United States Patent Application Publication US 2017/0114356 A1 - sequence listing, part 96

SEQ ID NO: 162172 - protein, 641 aa, Zea Mays
MEEKAMANGAATADVAAPDNKDNTKEEASESKEPAANQDADDQNKGLENGAEGQSGGDVNMADAEVTEEGDGDPGVAKQVDSEDIKTDADTKEDGNAKAEEVEDVKMTEADTGSTEVKDKEEKGDEVVDTTVDKQDESKEQEEGVSAEQDEKQGEEAEEKGKEMDADEKQEEEAEEKGSADEKDEDEGDQKMEENKEETPKNKKARSARDRSQGNDNKHDGSKSREAKSLLNTPSPYGTDRPQRERKIVERLVEVIEKEPNRNFVVEKGRGTPLKDIPSVAHRISRKKPSDLKFLHSILFGRKGKAVDFKGHILQFSGFVWHESDHRVKAKEKLDKCVKETLLDLCWTLGIPTPKANIRKEDIVSKLLDFIAEPHSAADSGLSDDQGSNSKKRKRGGESARKTPDSTPSRSRKKFINDSTSSKRQKKALEYDTDEDESMKSDSEENRDEDSDEAGDKQEGDYVSGKEKAGKFSEVKESSGKKKANTGSGHQSGPPKKIIRSPVKKVSSKIHEEKESPNNSAKVFSRKKKPTAEKEIKEKKSSGKKVTKGKGESVEAVLPSKDDLRKTITEILKKVDFNTATFSDILKKLDNHYKMDLAPKKEAIKVMIQDELTKLSEEDEGEGAGDTEKKQQQPQAKEIEA

SEQ ID NO: 162173 - protein, 246 aa, Zea Mays
MGAGTRPLASAIRRHQGVGSDVAPCACARTPSLIRLSLPQSRTAGRGSPGGCDVSGPISARHSRGAVATHIHHGEETSGVSGPLGEQTTLQRGARPPVPFSVVTVRPLPIHGVGAGSARRRRGRAAHAAAREQGAAPRHTPPLPRHRHRRAPGGPHRARRCRARREGAGGLPALQRRPGLRAHLRRHRRDGGLRHGGSHPALRRGLRTLHRRQRRLPRQTRHGEDAAHLPRLRWRRGLRQGTGGGD

SEQ ID NO: 162174 - protein, 310 aa, Zea Mays
MVMDQRARPSDRTKTPEEIAQEEKERLEKLEEERQKRMLGTADTSDEDDGNENDNHMKLGNSKPISGDDLGDSFSLDESTVKKKGWVDEIYEREGRKIGDDAAASDDGESDDENAGDDEADDEDSDSSDNDFGNMSARDWEQSDDDEVDVGDDEMEDFKEKGQEINDKVVNKDAHNLKGESNVKPQVKDGSIPFVIDAPNDLKDLSSLLDGRSEAEIIEIISRIRACNSIRLAAENRRKMQVFYGVLLQYFAVLATQSPVKFRIIDILVKPLIEMSGETPYFAAICARERLIHTRTRLCEDIKGRAAGQI

SEQ ID NO: 162175 - protein, 925 aa, Zea Mays
MAKTKPMAAAGEKKKSKGKKKGKNGPAKVAMKARGAAAEERNNPFEAIWSRRKFDVLGKKRKGEERRVSRSRSEAIRKRENTLLKEFVESAKSSVFHDRRIGERDDTLPEFDKAILRQQRERLAKLKRESKYNLSDDDEDEINIHNVLLSENDDFDEEVPLDDGSDEEGKMVLSKKRLSLQSDDHPSITDLPQETHGQKSKKEVMTEIISKSKFYKAQRAKEREEDEHLVDKLDSDFASLAQTRALLSLTESAKVKVNKTDSSTGLTGKEFSNKAKADTYEKLVKEMVMDQRARPSDRTKTPEEIAQEEKERLEKLEEERQKRMLGTADTSDEDDGNENDNHMKLGNSKPISGDDLGDSFSLDESTVKKKGWVDEIYEREGRKIGDDAAASDDGESDDENAGDDEADDEDSDSSDNDFGNMSARDWEQSDDDEVDVGDDEMEDFKEKGQEINDKVVNKDAHNLKGESNVKPQVKDGSIPFVIDAPNDLKDLSSLLDGRSEAEIIEIISRIRACNSIRLAAENRRKMQILWQVFYGVLLQYFAVLATQSPVKFRIIDILVKPLIEMSGETPYFAAICARERLIHTRTRLCEDIKVPGKSSWPNLKTLLLLRLWSLIFPCSDFRHVVTTPLLLLMCEYLMRCPIQSGRDVAVGSFLSSMVLVVTKESKKFCPEAIGFLQSLLVTSLKGKVETHLHNQINDQFMELKTLKLWLSIHDHVHEVNPVNILEIVGMDPDAPYFSSDNFKAGVLLSVAECLRGFVIIHEGLSSFPEIFLPISSLLQEILDRSELPGSLQDIFHEVIDLIKKRSDEHYASREPLRMRKKKPEPIKQLNPKFEENYIKGLDYDPDRERAQMKKLRKRVKSEMKGAKRELQKDNYFLSAVKEKERRKRDEERAEMYGKAMAFLQEQESAFKSGQLGKGKGRKRMR

SEQ ID NO: 162176 - protein, 709 aa, Zea Mays
MAKTKPMAAAGEKKKSKGKKKGKNGPAKVAMKARGAAAEERNNPFEAIWSRRKFDVLGKKRKGEERRVSRSRSEAIRKRENTLLKEFVESAKSSVFHDRRIGERDDTLPEFDKAILRQQRERLAKLKRESKYNLSDDDEDEINIHNVLLSENDDFDEEVPLDDGSDEEGKMVLSKKRLSLQSDDHPSITDLPQETHGQKSKKEVMTEIISKSKFYKAQRAKEREEDEHLVDKLDSDFASLAQTRALLSLTESAKVKVNKTDSSTGLTGKEFSNKAKADTYEKLVKEMVMDQRARPSDRTKTPEEIAQEEKERLEKLEEERQKRMLGTADTSDEDDGNENDNHMKLGNSKPISGDDLGDSFSLDESTVKKKGWVDEIYEREGRKIGDDAAASDDGESDDENAGDDEADDEDSDSSDNDFGNMSARDWEQSDDDEVDVGDDEMEDFKEKGQEINDKVVNKDAHNLKGESNVKPQVKDGSIPFVIDAPNDLKDLSSLLDGRSEAEIIEIISRIRACNSIRLAAENRRKMQVFYGVLLQYFAVLATQSPVKFRIIDILVKPLIEMSGETPYFAAICARERLIHTRTRLCEDIKVPGKSSWPNLKTLLLLRLWSLIFPCSDFRHVVTTPLLLLMCEYLMRCPIQSGRDVAVGSFLSSMVLVVTKESKKFCPEAIGFLQSLLVTSLKGKVETHLHNQGWCTFICGRMFKRFCYYT

SEQ ID NO: 162177 - protein, 596 aa, Zea Mays
MAKTKPMAAAGEKKKSKGKKKGKNGPAKVAMKARGAAAEERNNPFEAIWSRRKFDVLGKKRKGEERRVSRSRSEAIRKRENTLLKEFVESAKSSVFHDRRIGERDDTLPEFDKAILRQQRERLAKLKRESKYNLSDDDEDEINIHNVLLSENDDFDEEVPLDDGSDEEGKMVLSKKRLSLQSDDHPSITDLPQETHGQKSKKEVMTEIISKSKFYKAQRAKEREEDEHLVDKLDSDFASLAQTRALLSLTESAKVKVNKTDSSTGLTGKEFSNKAKADTYEKLVKEMVMDQRARPSDRTKTPEEIAQEEKERLEKLEEERQKRMLGTADTSDEDDGNENDNHMKLGNSKPISGDDLGDSFSLDESTVKKKGWVDEIYEREGRKIGDDAAASDDGESDDENAGDDEADDEDSDSSDNDFGNMSARDWEQSDDDEVDVGDDEMEDFKEKGQEINDKVVNKDAHNLKGESNVKPQVKDGSIPFVIDAPNDLKDLSSLLDGRSEAEIIEIISRIRACNSIRLAAENRRKMQVFYGVLLQYFAVLATQSPVKFRIIDILVKPLIEMSGETPYFAAICARERLIHTRTRLCEDIKGRAAGQI

SEQ ID NO: 162178 - protein, 919 aa, Zea Mays
MAKTKPMAAAGEKKKSKGKKKGKNGPAKVAMKARGAAAEERNNPFEAIWSRRKFDVLGKKRKGEERRVSRSRSEAIRKRENTLLKEFVESAKSSVFHDRRIGERDDTLPEFDKAILRQQRERLAKLKRESKYNLSDDDEDEINIHNVLLSENDDFDEEVPLDDGSDEEGKMVLSKKRLSLQSDDHPSITDLPQETHKSKKEVMTEIISKSKFYKAQRAKEREEDEHLVDKLDSDFASLAQTRALLSLTESAKVKVNKTDSSTGLTGKEFSNKAKADTYEKLVKEMVMDQRARPSDRTKTPEEIAQEEKERLEKLEEERQKRMLGTADTSDEDDGNENDNHMKLGNSKPISGDDLGDSFSLDESTVKKKGWVDEIYEREGRKIGDDAAASDDGESDDENAGDDEADDEDSDSSDNDFGNMSARDWEQSDDDEVDVGDDEMEDFKEKGQEINDKVVNKDAHNLKGESNVKPQVKDGSIPFVIDAPNDLKDLSSLLDGRSEAEIIEIISRIRACNSIRLAAENRRKMQVFYGVLLQYFAVLATQSPVKFRIIDILVKPLIEMSGETPYFAAICARERLIHTRTRLCEDIKVPGKSSWPNLKTLLLLRLWSLIFPCSDFRHVVTTPLLLLMCEYLMRCPIQSGRDVAVGSFLSSMVLVVTKESKKFCPEAIGFLQSLLVTSLKGKVETHLHNQINDQFMELKTLKLWLSIHDHVHEVNPVNILEIVGMDPDAPYFSSDNFKAGVLLSVAECLRGFVIIHEGLSSFPEIFLPISSLLQEILDRSELPGSLQDIFHEVIDLIKKRSDEHYASREPLRMRKKKPEPIKQLNPKFEENYIKGLDYDPDRERAQMKKLRKRVKSEMKGAKRELQKDNYFLSAVKEKERRKRDEERAEMYGKAMAFLQEQESAFKSGQLGKGKGRKRMR

SEQ ID NO: 162179 - protein, 152 aa, Zea Mays
MPDRLLYVRIPSLAKLGTPRIFRGLGLEYDMSGLTGNTMDSHRLITHAGHQGYDKQNALVEELFLNYHCQGKYIGDKQVLLDAARKVGIEGAEELLEDPTKGVHEVQEELKKYSSDISGVPHFVINNKYQLSGGQPPNEFMRAFEMAAKDGA

SEQ ID NO: 162180 - protein, 152 aa, Zea Mays
MASDTGKKLIQIDVSSDTVCPWCFVGKKNLEKAMEQSMGKFDFEVRWHPFFLNPDAPKEGVKKSDFFKMKFGPVQYEGAMSRMTEIFRGLGLEYDMSGLTGNTMDSHRLITHAGHQGYDKQNALVEELFLNYHCQGKYIGDKFCWMLQERWA

SEQ ID NO: 162181 - protein, 113 aa, Zea Mays
MQPGGGRWQMWRRRGRWLRAALGEGEREARGIENLTLCKPVVHGVKQIRTQASKTCFQIARVPAVPWKPTGLCVPKRGLRVVMEVTMKKPCLHNCEVRSGEETILTFSPKKIL

SEQ ID NO: 162182 - protein, 111 aa, Zea Mays
MRRGLGASELRMEKKISHQWRQVAKIPVAPPITAQQRGTAKPQGTRRGTEIWPEQITLWPIVMRIRGRNVIPEKAYSINSLSYSVRVTCCFPPQSAHGAALSSVPAPPQIK

SEQ ID NO: 162183 - protein, 176 aa, Zea Mays
MGPQKVETMRRPRPERGERRIDAAIDHLAQYGFAKPQIRKLYGRDGWVFLEEGSYSIVLKVLEEQAQQDQTQEAAAAEEALPQNGMEVSRVNGEAPNEPPSTLELQASPSSSPLLLVPPAKGPPCARTPCYGWISEESESESESEDGEMLSDVTGPVIFAKKDIPNPVGTLPSRRK

SEQ ID NO: 162184 - protein, 762 aa, Zea Mays
MKRKIKHLQETDGMTASLHETLGNANPHYTRMAREKIAAREAARKATDARKAAMVEASWCRILRAARIQNKNAEEVMEKAVLQATEAFEEARALGVMMYDRPDCPHKQYEVESSLHTGAQSTHKVIASFQTAFQVDMEVSAAVKKAFVQLANSPDSAKREEFKELLWKISQNPDLAEHEDKQQLVDCSNEDAIVLKLNKEHLSGSCVASDFNTTKVQESIDVVSIMLERLKALHEEELASLAVIVATSGLNAELQNERSKYHETGAVNNTSAGSLRSQARRYSTAASFIGVQGPKKEVTSELPSLDKFLVKHLSKLEREVQEAREASRKSTLVKSVTQGAHIQFTGSNAKTPESTSDLSSILVKHVSKLEKEILEAKKINQRIHQVEGNCEDVKSNVQSRNKELEFNKIQPEVESNCDSKGSCESKESCIDNNDIKDNDDCVQEDKENKNCYSHQLPPSGAKGKHGGKRLTRLEAARLEALKSFCTIDGNALDAGLDKIFVKPIHRLEKEKREAREGQINVQKHPQKLGQSATVTEGLDDILVKHVSRLEREKIDYQKRNELGVGERWSNVPHDQRSNGNNVKSSDSLDQVLVKRISRLEREKLEYEKRNALEGGSDVEPKREPHCNNAAASDSLDQNLIKHVSRLDKEKIEHEKNGGMIIVKKGQTQCTNGAEGGLADVFVKRPTKLEQAKLASAAEEKPASGFNPVEERRRARQKELLDAWGGMGLGNSMKPHVSRIERDKVAWRIAEDEQKQMAAAREA

SEQ ID NO: 162185 - protein, 301 aa, Zea Mays
MFGRAPKKSDNTKYYEILGVPKSASQDDLKKAYRKAAIKNHPDKGGDPEKFKELAQAYEVLSDPEKREIYDQYGEDALKEGMGGGGSHVDPFDIFSSFFGPSFGGGGGSSRGRRQRRGEDVVHPLKVSLEDLYNGTSKKLSLSRNVICSKCKGKGSKSGASMRCPGCQGSGMKVTIRQLGPSMIQQMQQPCNECKGTGESINEKDRCPGCKGEKVIQEKKVLEVHVEKGMQHNQKITFPGEADEAPDTVTGDIVFVLQQKDHSKFKRKGSFSSNQTLVKLLNLTNSRRLMMRGCQFTRGLS

SEQ ID NO: 162186 - protein, 328 aa, Zea Mays
MFGRAPKKSDNTKYYEILGVPKSASQDDLKKAYRKAAIKNHPDKGGDPEKFKELAQAYEVLSDPEKREIYDQYGEDALKEGMGGGGSHVDPFDIFSSFFGPSFGGGGGSSRGRRQRRGEDVVHPLKVSLEDLYNGTSKKLSLSRNVICSKCKGKGSKSGASMRCPGCQGSGMKVTIRQLGPSMIQQMQQPCNECKGTGESINEKDRCPGCKGEKVIQEKKVLEVHVEKGMQHNQKITFPGEADEAPDTVTGDIVFVLQQKDHSKFKRKGEDLFYEHTLSLTEALCGFQFVLTHLDNRQLLIKSDPGEVVKPEAFHEGEAVHPFHGGVP

SEQ ID NO: 162187 - protein, 418 aa, Zea Mays
MFGRAPKKSDNTKYYEILGVPKSASQDDLKKAYRKAAIKNHPDKGGDPEKFKELAQAYEVLSDPEKREIYDQYGEDALKEGMGGGGSHVDPFDIFSSFFGPSFGGGGSSRGRRQRRGEDVVHPLKVSLEDLYNGTSKKLSLSRNVICSKCKGKGSKSGASMRCPGCQGSGMKVTIRQLGPSMIQQMQQPCNECKGTGESINEKDRCPGCKGEKVIQEKKVLEVHVEKGMQHNQKITFPGEADEAPDTVTGDIVFVLQQKDHSKFKRKGEDLFYEHTLSLTEALCGFQFVLTHLDNRQLLIKSDPGEVVKPDQFKAINDEGMPIYQRPFMKGKLYIHFTVEFPDSLAPEQCKALETVLPPRPSSKLTDMEIDECEETTMHDVNNIEEEMRRKQAHAAQEAYEEDDEMPGGAQRVQCAQQ

SEQ ID NO: 162188 - protein, 302 aa, Zea Mays
MFGRAPKKSDNTKYYEILGVPKSASQDDLKKAYRKAAIKNHPDKGGDPEKFKELAQAYEVLSDPEKREIYDQYGEDALKEGMGGGGSHVDPFDIFSSFFGPSFGGGGGSSRGRRQRRGEDVVHPLKVSLEDLYNGTSKKLSLSRNVICSKCKGKGSKSGASMRCPGCQGSGMKVTIRQLGPSMIQQMQQPCNECKGTGESINEKDRCPGCKGEKVIQEKKVLEVHVEKGMQHNQKITFPGEADEAPDTVTGDIVFVLQQKDHSKFKRKGGSFSSNQTLVKLLNLTNSRRLMMRGCQFTRGLS

SEQ ID NO: 162189 - protein, 420 aa, Zea Mays
MFGRAPKKSDNTKYYEILGVPKSASQDDLKKAYRKAAIKNHPDKGGDPEKFKELAQAYEVLSDPEKREIYDQYGEDALKEGMGGGGSHVDPFDIFSSFFGPSFGGGGGSSRGRRQRRGEDVVHPLKVSLEDLYNGTSKKLSLSRNVICSKCKGKGSKSGASMRCPGCQGSGMKVTIRQLGPSMIQQMQQPCNECKGTGESINEKDRCPGCKGEKVIQEKKVLEVHVEKGMQHNQKITFPGEADEAPDTVTGDIVFVLQQKDHSKFKRKGEDLFYEHTLSLTEALCGFQFVLTHLDNRQLLIKSDPGEVVKPDQFKAINDEGMPIYQRPFMKGKLYIHFTVEFPDSLAPEQCKALETVLPPRPSSKLTDMEIDECEETTMHDVNNIEEEMRRKQAHAAQEAYEEDDEMPGGAQRVQCAQQL

SEQ ID NO: 162190 - protein, 190 aa, Zea Mays
MGTLVKEEFGRPNRENTMGMRHGSYDKLDDDGLAPPGTRVSGEDVIIGKTSPIPQDDAQGQASRYSKRDHSTSLRHSESGMVDQVLLTTNADGLRFVKVRMRSVRIPQIGDKFSSRHGQKGTVGMTYTQEDMPWTIEGITPDIIVNPHAIPSRMTIGQLIECIMGKVAAQMGKEGDATPFTDVTTQAHGG

SEQ ID NO: 162191 - protein, 66 aa, Zea Mays
MSTLKLVWFVISVLKNFDFTRIMDAAVVHYLLLRARGCSSRRRTSEPCNKGRLLMKAGMNWSQKDI

SEQ ID NO: 162192 - protein, 100 aa, Zea Mays
MHKQLQVNQQNRGYIQIWQQQCETVRAYLKKTVHPHHGLGYWVSLPKHGCYTNYVCVSPKSPFLILFYKSISGTNISLIRLHLDITDYLCSSMFTLTAVC

SEQ ID NO: 162193 - protein, 118 aa, Zea Mays
MASLLQVPRNQLHCHCDPLPPMALTFHRQNCSSSIPPMALTLNPHLLDPVLITILPLARRPTSPRALAVPREDTEVQCSAVLYSSAPRIFGTGQIGTNSTFIGSTKGRIYKIWIIFKN

SEQ ID NO: 162194 - protein, 125 aa, Zea Mays
MASLLQVPRNQLHCHCDPLPPMALTFHRQNCSSSIPPMALTLNPHLLDPVLITILPLARRPTSPRALAVPREDTEVQCSAVLYSSAPRIFGTGQIGTNSTFIGSTKVSSSTFHRCQLRGVLNGVS

SEQ ID NO: 162195 - protein, 219 aa, Zea Mays
MASLLQVPRNQLHCHCDPLPPMALTFHRQNCSSSIPPMALTLNPHLLDPVLITILPLARRPTSPRALAVPREDTEVQCSAVLYSSAPRIFGTGQIGTNSTFIGSTKEQGDGPIVLIPAPTRELAVQIQEESTKFGSYSRTRSTCVYGGAPKGPQIRGLRRGVEIVIATPGRLIDMLEAGHTNLRRVTYLVLDEADQMLDMGFEPQIQNSITSTFSFRNA

SEQ ID NO: 162196 - protein, 182 aa, Zea Mays
MAATDVAARGLEQGDGPIVLIPAPTRELAVQIQEESTKFGSYSRTRSTCVYGGAPKGPQIRGLRRGVEIVIATPGRLIDMLEAGHTNLRRVTYLVLDEADQMLDMGFEPQIQNSITMIMWWWCFNRESTSSRSHNNPRSFLALSIHLLLLALDATCTATDHSSRHKYQASLPIEYSPCINWL

SEQ ID NO: 162197 - protein, 216 aa, Zea Mays
MIADEIQTGIARTGKMLACDWENIRPDMVILGKALGAGVVPVSAVLADKDVMLCIRPGEHGSTFGGNPLASAVAVASLKVVRDEGLVERAAKLGQEFRDQLQKVQQKFPQILREVRGRGLLNAVDLNNDALSPASAYDICIKLKERGILAKPTHDTIIRLAPPLTISPEELAEASKALSDVLEHDLPQLQLQKQIKKPESEAEKPVCDRCGRDLYG

SEQ ID NO: 162198 - protein, 343 aa, Zea Mays
MFGYDMMLPMNTGAEGVETAIKLARKWGYEKKHIPKNEALLVSCCGCFHGRTLGVISMSCDNDATRGFGPLVPGHLKVDFGDIDGLKKIFEELGDRICGFLFEPIQVIPPDGYLKGARDLCSKHNVLMIADEIQTGIARTGKMLACDWENIRPDMVILGKALGAGVVPVSAVLADKDVMLCIRPGEHGSTFGGNPLASAVAVASLKVVRDEGLVERAAKLGQEFRDQLQKVQQKFPQILREVRGRGLLNAVDLNNDALSPASAYDICIKLKERGILAKPTHDTIIRLAPPLTISPEELAEASKALSDVLEHDLPQLQLQKQIKKPESEAEKPVCDRCGRDLYG

SEQ ID NO: 162199 - protein, 247 aa, Zea Mays
MATALARRGAAALARWRGMCSSSASAPRSAAALSSEELMRMEQDCSAHNYHPIPMVFSKGEGSHIVDPEGNKYIDFLSAYSAVNQGHCHPKVLRALIEQAERLTLSSRAFYNDKFPIFAEYLTSMFGYDMMLPMNTGAEGVETAIKLARKWGYEKKHIPKNEALLVSCCGCFHGRTLGVISMSCDNDATRGFGPLVPGHLKVDFGDIDGLKKIFEELGDRICGFLFEPIQGSNPTRWLFERCQRLVF

SEQ ID NO: 162200 - protein, 109 aa, Zea Mays
MLKMVLQSSCSSTEAIPARSLISPGTPARTGWLLASLKTTSSRYGRWLRTSTMTKMICQLAMSRQKLLEATQHKRNLNFYRLLGVPRSEPCSPENLHRVRVGCRLLPWS

SEQ ID NO: 162201 - protein, 705 aa, Zea Mays
MPKAVGGAADEEEFRAEVEERLINEEYKIWKKNTPFLYDLVITHALEWPSLTVQWLPDRTEPPGKDHSVQKMILGTHTSDNEPNYLMLAQVQLPLDDAEADARHYDDDHADIGGFGAASGKVQIVQQINHDGEVNRARYMPQNSFVIATKTVSAEVYVFDYSKHPSKPPLDGACNPDLRLKGHNSEGYGLSWSIFKEGHLLSGSDDAQICLWDIKANSRNKSLDALQIFKHHDGVVEDVAWHLRHEYLFGSVGDDYHLLIWDLRSPAPTKPVQSVVAHQGEETLHNEEEGASWNHRGKDTAAFGGGPVEADVGVTCSNWISCSATPHGLAATSAYRVVWLELMVARPTAPLVRRRVVVVVVRSSHMRASAGLSVAEGRNVLQPLVRGGKQPPRCSAALVQLRLSRNGAPPSSASLVDALGNRVLQSAGGRSLSSGAEQPPSPGCLSWGQGGWYTGPGMVAPSVVSHATGDEDGPEGATELVGIAAHEDVGVGAGDDDQAAGACVLLESAMLIALSLAKQIFEVCLVGNPRTHERQRRGRGTLVLRDVGVGVPVVEVNCLAFHPFNEWVVATGSTDKTVKLFDLRKIDTSLHTFDCHKEEVFQVGWSPKNETILASCCLGRRLMVWDLSRIGQEQTPEDAEDGPPELMFIHGGHTSKISDFSWNPCEDWVVASVAEDNILQIWQMAENIYHDEDDLPISDEPAKTS

SEQ ID NO: 162202 - protein, 342 aa, Zea Mays
MNDINNSFGKGSVTRLGSAGGAFVETFPSGCLTLDFALGGGLPKGRVVEVYGPESSGKTTLALHAIAEIQKLGGNAMLVDAEHAFDPAYSKALGVDIENLIVCQPDNGEMALEIADRMCRSGAIDLICIDSVSALTPRAEIEGEIGMQQMGLQARLMSQALRKMSGNASKAGCTLMFLNQIRYKIGVFYGNPEVTSGGIALKFFASVRLEIRLIGKIKSAKGDEDVGVKVRVRVQKSKVSRPYKQAEFEIIFGEGVSKLGCVLDCAELMDVVAKKGSWYSYKDIRLGQGREKALQYLRESPTTCDEIEKVVRAMIPEGSRHMSLLAFGQSSSTEDEQAYDEQ

SEQ ID NO: 162203 - protein, 261 aa, Zea Mays
MTRCLPWNFTLSFSDGTEQLLTASAPQNSAILVADRMCRSGAIDLICIDSVSALTPRAEIEGEIGMQQMGLQARLMSQALRKMSGNASKAGCTLMFLNQIRYKIGVFYGNPEVTSGGIALKFFASVRLEIRLIGKIKSAKGDEDVGVKVRVRVQKSKVSRPYKQAEFEIIFGEGVSKLGCVLDCAELMDVVAKKGSWYSYKDIRLGQGREKALQYLRESPTTCDEIEKVVRAMIPEGSRHMSLLAFGQSSSTEDEQAYDEQ

SEQ ID NO: 162204 - protein, 226 aa, Zea Mays
MLVDAEHAFDPAYSKALGVDIENLIVCQPDNGEMALEIADRMCRSGAIDLICIDSVSALTPRAEIEGEIGMQQMGLQARLMSQALRKMSGNASKAGCTLMFLNQIRYKIGVFYGNPEVTSGGIALKFFASAKGDEDVGVKVRVRVQKSKVSRPYKQAEFEIIFGEGVSKLGCVLDCAELMDVVAKKGSWYSYKDIRLGQGREKALQYLRESPTTCDEIEKACHGFF

SEQ ID NO: 162205 - protein, 543 aa, Zea Mays
MNQFVPDWSNMGDTSRPLGEEDDLIELLWCNGHVVMQSQSHRKVPPRPEKAAAVAAPPAPASVPQEDEGGLWFPFALADSLDKDIFSEFFCEAPTPAPAAADAAPAASGGGTGTEAGGKSCGGDVPVPAEDDRRGGGGACAVSAGDPCDLMPPPKSTPASCSRQQTTMSLANGGDNAGGDLPGLVRAGAEAGASSMLSAIGSSICGSNQVLVQRAACAPGRASASGSGTARGDGSGSAALPSAVGSANANAVGGGRGHEASSSGRSNYCCFGAATTTTTTTTTEPASTSNRSSKRKRLDTEDSESPSEDAESGSAAMLARKPPQKMTTARRSRAAEVHNLSERRRRDRINEKMRALQELIPHCNKTDKASMLDEAIEYLKSLQLQVQMMWMGSAGIAAPPAVMFPGVHQYLPRMGVGMGAAAAAALPSMPRLPFMAPQPVVPSAPVSVGPVPAYRGHMPAVGITEPYGHYIGVNHLQPAPPPPQVQHYAQGVSYYPPPLGATAKAVQQAAELHHVPGPGGSIMPAGAAPGVLLPESAQGRGPG

SEQ ID NO: 162206 - protein, 539 aa, Zea Mays
MNQFVPDWSNMGDTSRPLGEEDDLIELLWCNGHVVMQSQSHRKVPPRPEKAAAVAAPPAPASVPQEDEGGLWFPFALADSLDKDIFSEFFCEAPTPAPAAADAAPAASGGGTGTEAGGKSCGGDVPVPAEDDRRGGGGACAVSAGDPCDLMPPPKSTPASCSRQQTTMSLANGGDNAGGDLPGLVRAGAEAGASSMLSAIGSSICGSNQVLVQRAACAPGRASASGSGTARGDGSGSAALPSAVGSANANAVGGGRGHEASSSGRSNYCCFGAATTTTTTTTTEPASTSNRSSKRKRLDTEDSESPSEDAESGSAAMLARKPPQKMTTARRSRAAEVHNLSERRRRDRINEKMRALQELIPHCNKTDKASMLDEAIEYLKSLQLQVQMMWMGSAGIAAPPAVMFPGVHQYLPRMGVGMGAAAAAALPSMPRLPFMAPQPVVPSAPVSVGPVPAYRGHMPAVGITEPYGHYIGVNHLQPAPPPPQVQGVSYYPPPLGATAKAVQQAAELHHVPGPGGSIMPAGAAPGVLLPESAQGRGPG

SEQ ID NO: 162207 - protein, 734 aa, Zea Mays
MDASDSPPSGRPSSSAVALYGDSPIFDFVDSLSPIAPPKPLGSTQSVQLFKSSNLAPVSSIFTSPQVNPRKESKSTISCIELSGSAALAPETCTPFEDATNSPSKWLQSTLFGSETLGDANKQDIDGKPNHTADVEHVKPSSTCSDQNGFDQMDSSTSGRNVQENELAKQDSNDLAPCSLNHLITHCGTGNSVISISDLALEAQQQSWKVKGDSIISSTSLAVDQENLEDSRREDFVEQFGSYIQSAADGTHVYYADAAAGVTINHDQEMLPAIIRNQLDSNDYILDTSKVSIDGTALSQHQYGTHRCSLFNDKSGTSNKSMQNISDINPASICGNNYLNPVDPALCALPGIGLHLNTVALNLSDMPLTINHPLLSEQTSPATVIPGSETVLYGSEVFTHVDNYSSQKTMPNADKSGQQIHKKKRRKLQKDDGESCRHCNCRRSKCLKLYCPCFAAKVYCSSLCSCQGCSNNHAHEELVSCTRKRTESHNPLAFAPTVTHTYGTVLEFGDDSNKTPASARHKRGCNCRKSSCLKKYCECFQSGVGCCISCRCMSCKNSFGKREGVLLLTTEKLEKGGKAKGTHGEEDKLAFGKHHVVSQSGDIPAYENPLVTPLLETYRSPFLLPSTCSKLPPPTAGCSYGLHNPRPPMKSDVLFSPLEDVLHNPAEMVLGNGFSDTQEVGSSCTTSVKVVSPNKKRVASLQIGTALSPIGSSSRKLVLKSFPSLTGDADSEPH

SEQ ID NO: 162208 - protein, 473 aa, Zea Mays
MMGISSCIELSGSAALAPETCTPFEDATNSPSKWLQSTLFGSETLGDANKQDIDGKPNHTADVEHVKPSSTCSDQNGFDQMDSSTSGRNVQENELAKQDSNDLAPCSLNHLITHCGTGNSVISISDLALEAQQQSWKVKGDSIISSTSLAVDQENLEDSRREDFVEQFGSYIQSAADGTHVYYADAAAGVTINHDQEMLPAIIRNQLDSNDYILDTSKVSIDGTALSQHQYGTHRCSLFNDKSGTSNKSMQNISDINPASICGNNYLNPVDPALCALPGIGLHLNTVALNLSDMPLTINHPLLSEQTSPATVIPGSETVLYGSEVFTHVDNYSSQKTMPNADKSGQQIHKKKRRKLQKDDGESCRHCNCRRSKCLKLYCPCFAAKVYCSSLCSCQGCSNNHAHEELVSCTRKRTESHNPLAFAPTVTHTYGTVLEFGDDSNKTPASARHKRGCNCRKSSCLKKYCECFQVCCC

SEQ ID NO: 162209 - protein, 546 aa, Zea Mays
MDASDSPPSGRPSSSAVALYGDSPIFDFVDSLSPIAPPKPLGSTQSVQLFKSSNLAPVSSIFTSPQVNPRKESKSTISCIELSGSAALAPETCTPFEDATNSPSKWLQSTLFGSETLGDANKQDIDGKPNHTADVEHVKPSSTCSDQNGFDQMDSSTSGRNVQENELAKQDSNDLAPCSLNHLITHCGTGNSVISISDLALEAQQQSWKVKGDSIISSTSLAVDQENLEDSRREDFVEQFGSYIQSAADGTHVYYADAAAGVTINHDQEMLPAIIRNQLDSNDYILDTSKVSIDGTALSQHQYGTHRCSLFNDKSGTSNKSMQNISDINPASICGNNYLNPVDPALCALPGIGLHLNTVALNLSDMPLTINHPLLSEQTSPATVIPGSETVLYGSEVFTHVDNYSSQKTMPNADKSGQQIHKKKRRKLQKDDGESCRHCNCRRSKCLKLYCPCFAAKVYCSSLCSCQGCSNNHAHEELVSCTRKRTESHNPLAFAPTVTHTYGTVLEFGDDSNKTPASARHKRGCNCRKSSCLKKYCECFQGTDVM

SEQ ID NO: 162210 - protein, 108 aa, Zea Mays
MTNWTRQQATGNRIIDMITGPYKLIKRCEVTAILILLILLPILLPLVHDSQGGAIGFVHNYLTVASSTAPVKPSVDKTVYWRYILASPKGVPFLNLLRHDLIRHNLWH

SEQ ID NO: 162211 - protein, 99 aa, Zea Mays
MTNWTRQQATGNRIIDMITGPYKLIKRCEVTAILILYGLPSQGGAIGFVHNYLTVASSTAPVKPSVDKTVYWRYILASPKGVPFLNLLRHDLIRHNLWH

SEQ ID NO: 162212 - protein, 327 aa, Zea Mays
MAADAVNRMTGEDLSRFVSEKSSLSALKIGGCSNLDILNLCSSSLSILWLSDLCSLSKSVMNCPNMSELSLCFTEHSSDCTNLITLMDGLGRTCPNLEKMHISSKQLSNEAVCALENANLRGLFMLSLILGSKITDAAVASIVRSCASLELLDLSGSSISDNGVGMICKAYPRTLSRLLLALCPNVTTRGIQLATAQLPCLQLMDCGMSLCANVKNEKEGPYFGEINGGIRIIRKLSILKRQPIHQKLIIKHGNLKKLSLWGCSALDALYLNCPELNDLNLNSCTNLHPERLLLQCPNLKNVYASGCQDMLIGAIRNQLNHLFHASG

SEQ ID NO: 162213 - protein, 518 aa, Zea Mays
MASLPKPPPPPRPKTRGNYNCGRCGQPKKGHVCVGPGPGPGGAASPSSSSGAGGEHGLRRALSFDEAGTPSSPEKKPKVEDVDEAELDEEATVDVGARAVSREVMAEVLHRLGPRGVMAAAGVSRGWRDCAGRVWRAAEELRLRVLASSGAGLLAALLPRCPALSRLHLRMESDVDGTTLACIAFSCPSLRTLEITMAADAVNRMTGEDLSRFVSEKSSLSALKIGGCSNLDILNLCSSSLSILWLSDLCSLSKSVMNCPNMSELSLCFTEHSSDCTNLITLMDGLGRTCPNLEKMHISSKQLSNEAVCALENANLRGLFMLSLILGSKITDAAVASIVRSCASLELLDLSGSSISDNGVGMICKAYPRTLSRLLLALCPNVTTRGIQLATAQLPCLQLMDCGMSLCANVKNEKEGPYFGEINGGIRIIRKLSILKRQPIHQKLIIKHGNLKKLSLWGCSALDALYLNCPELNDLNLNSCTNLHPERLLLQCPNLKNVYASGCQDMLIGAIRNQPGSE

SEQ ID NO: 162214 - protein, 555 aa, Zea Mays
MASLPKPPPPPRPKTRGNYNCGRCGQPKKGHVCVGPGPGPGGAASPSSSSGAGGEHGLRRALSFDEAGTPSSPEKKPKVEDVDEAELDEEATVDVGARAVSREVMAEVLHRLGPRGVMAAAGVSRGWRDCAGRVWRAAEELRLRVLASSGAGLLAALLPRCPALSRLHLRMESDVDGTTLACIAFSCPSLRTLEITMAADAVNRMTGEDLSRFVSEKSSLSALKIGGCSNLDILNLCSSSLSILWLSDLCSLSKSVMNCPNMSELSLCFTEHSSDCTNLITLMDGLGRTCPNLEKMHISSKQLSNEAVCALENANLRGLFMLSLILGSKITDAAVASIVRSCASLELLDLSGSSISDNGVGMICKAYPRTLSRLLLALCPNVTTRGIQLATAQLPCLQLMDCGMSLCANVKNEKEGPYFGEINGGIRIIRKLSILKRQPIHQKLIIKHGNLKKLSLWGCSALDALYLNCPELNDLNLNSCTNLHPVPKFKECLCIRMPRYVDWSNQKSVEPSLPCKRLADGSKRVQLPQFLKQQPSKDNKLIELSQTQCTVHLGS

SEQ ID NO: 162215 - protein, 279 aa, Zea Mays
MASLPKPPPPPRPKTRGNYNCGRCGQPKKGHVCVGPGPGPGGAASPSSSSGAGGEHGLRRALSFDEAGTPSSPEKKPKVEDVDEAELDEEATVDVGARAVSREVMAEVLHRLGPRGVMAAAGVSRGWRDCAGRVWRAAEELRLRVLASSGAGLLAALLPRCPALSRLHLRMESDVDGTTLACIAFSCPSLRTLEITMAADAVNRMTGEDLSRFVSEKSSLSALKIGGCSNLDILNLCSSSLSILWLSDLCSLSKSVVHVLTWKKCTYHQNNYLMKLYVL

SEQ ID NO: 162216 - protein, 54 aa, Zea Mays
MEWIQLCSNKRRWQPLARRWSLYQKSKKYKGSSDENCVCILSCHVCWYMMAWSS

SEQ ID NO: 162217 - protein, 279 aa, Zea Mays
MWHSFFSMHRIASRSGLLGRRCYSYAMKGGTSIAGVGDIIAVASGKGGVGKSTTAVNIAVALAKEFKLQVGLLDADIYGPSIPTMMNLHAKPEVNEDMKMIPVENHGVRCMSIGFLVDNDAPIVWRGPMVMSALEKMTRGVAWGDLDILVVDMPPGTGDAQLSMSQRLRLSGALIVSTPQDIALIDARRGANMFRKVQVPILGLVENMSCFKCPKCGEKSYIFGEGGAQRTAEEMDMKLLGDRLFFFNRYLLKSASEQVQMKAALSLYHHPTLHQHKRT

SEQ ID NO: 162218 - protein, 145 aa, Zea Mays
MMHQLFGEVMSALEKMTRGVAWGDLDILVVDMPPGTGDAQLSMSQRLRLSGALIVSTPQDIALIDARRGANMFRKVQVPILGLVENMSCFKCPKCGEKSYIFGEGGAQRTAEEMDMKLLGDVSESCDCNWHQFLSYDEYARMFYI

SEQ ID NO: 162219 - protein, 131 aa, Zea Mays
MWHSFFSMHRIASRSGLLGRRCYSYAMKGGTSIAGVGDIIAVASGKGGVGKSTTAVNIAVALAKEFKLQVGLLDADIYGPSIPTMMNLHAKPEVNEDMKMIPVENHGVRCMSIGFLVDNDAPIVWRGNECS

SEQ ID NO: 162220 - protein, 223 aa, Zea Mays
MLQCLDGVKQLLAVLLKCCHIDLKQPNGLDDPEVLARETVVSEVEALYELFKKISSAVIDDGLINKEEFQLALFKTNKKESLFADRVFDLFDTKHNGILGFEEFARALSVFHPNAPLDEKIEFSFQLYDLKQQGFIERQEVKQMVVATLAESGMNLLDEVIESIIDKTFEEADTKHDGKIDKEEWRNLVVRHPSLLKNMTLQYLKDITTTFPSFVFHSQVDDT

SEQ ID NO: 162221 - protein, 168 aa, Zea Mays
MIRRCSLGRPFSVSEVEALYELFKKISSAVIDDGLINKEEFQLALFKTNKKESLFADRVFDLFDTKHNGILGFEEFARALSVFHPNAPLDEKIEFSFQLYDLKQQGFIERQETFEEADTKHDGKIDKEEWRNLVVRHPSLLKNMTLQYLKDITTTFPSFVFHSQVDDT

SEQ ID NO: 162222 - protein, 270 aa, Zea Mays
MGNCSSSSGFFSLPKRGSKLLKLNNGMVSVDDEGGTHEGIKTIPVQRACEFTTNSVLCVCIVTWNMNSKMSAEDVAKLVSSDRKFDLLVVGLQEAPKPDVSRVLQEALAGTHVLLGQKSMQSLRMLLFGSRSSEKYIREMKVDKHAVGGCGGIIGRKKGAVAMYINFSGIRMVFVSCHLAAHEHKVEKRNAEFQHISQSLFARYGAPTPYAQSADITVWLGDLNYRLQGISSTPARKMIEENRQSRQRPAAARGREGPGVQRLLRGDAVV

SEQ ID NO: 162223 - protein, 510 aa, Zea Mays
MNIVCEVCGDIGYRQLLLCCGDCKRYAVHQYCLDKVVFDATLLEWFCYECLQRRGEVTCVASLEQVSSESPLSHAHFGPLVHQRTTKRVESVTGPYSPSDDCEELFSYPGIESIPSVQEISVDPIKTSSISEHDTIEAAASSERFTECQKASSCREGITVKMAMAPSSYENSGEDIFSENVFLEYVLAYKCYLSKAQKKRVMELIQEIQPEFTVFISIMRRGNVRPPGPFLGINKEYANAHFPDKSTNVTLEMPDKSKKWHPKFYRRDVSRTCMLTGQWLDFVCDNHVQEGDICLLLPTKDEIRCTFMVYVLHETTHSSRGEAGFQMGGPCPGASGVASEIHVEEEPTTGEHVSSESDMREIPHESLSRGDSDDQFEPPYFVPCKSPLSESQKRMVEERVRAIRSEIPICVAVMKNNNVGVAQRWMLELGSRYGSVYLPTKGQTILLQCGGTTWKAKLMFHNGRRWFLNGGWPNFARGNGLRVGDICLFELKKKDSKLTMAVHIIRREKF

SEQ ID NO: 162224 - protein, 252 aa, Zea Mays
MPDKSKKWHPKFYRRDVSRTCMLTGQWLDFVCDNHVQEGDICLLLPTKDEIRCTFMVYVLHETTHSSRGEAGFQMGGPCPGASGVASEIHVEEEPTTESDMREIPHESLSRGDSDDQFEPPYFVPCKSPLSESQKRMVEERVRAIRSEIPICVAVMKNNNVGVAQRWMLELGSRYGSVYLPTKGQTILLQCGGTTWKAKLMFHNGRRWFLNGGWPNFARGNGLRVGDICLFELKKKDSKLTMAVHIIRREKF

SEQ ID NO: 162225 - protein, 349 aa, Zea Mays
MAMAPSSYENSGEDIFSENVFLEYVLAYKCYLSKAQKKRVMELIQEIQPEFTVFISIMRRGNVRPPGPFLGINKEYANAHFPDKSTNVTLEMPDKSKKWHPKFYRRDVSRTCMLTGQWLDFVCDNHVQEGDICLLLPTKDEIRCTFMVYVLHETTHSSRGEAGFQMGGPCPGASGVASEIHVEEEPTTGEHVSSESDMREIPHESLSRGDSDDQFEPPYFVPCKSPLSESQKRMVEERVRAIRSEIPICVAVMKNNNVGVAQRWMLELGSRYGSVYLPTKGQTILLQCGGTTWKAKLMFHNGRRWFLNGGWPNFARGNGLRVGDICLFELKKKDSKLTMAVHIIRREKF

SEQ ID NO: 162226 - protein, 241 aa, Zea Mays
MNTVCEVCGDIGYRQLLLCCRDCKRCAVHQYCLDKVVYEASLIKWFCYECLQRRGEVTRISSLEKLSSERPLSQVHSRSPVQQLITKSVESVRDAGPYSPNGGCEESFSCPGIKNTPSVRERSVDPINISSDSHDTIEASESSERFMECQKASLCRRRKTVKMAMVSSSSEESGEDTISENVSLGYVLACRSSLSKAQKKRVTKLIQEIQPEFTVFISIMRMSNVKLPGNYQGICNCTFPR

SEQ ID NO: 162227 - protein, 740 aa, Zea Mays
MNTVCEVCGDIGYRQLLLCCRDCKRCAVHQYCLDKVVYEASLIKWFCYECLQRRGEVTRISSLEKLSSERPLSQVHSRSPVQQLITKSVESVRDAGPWRDRKNESIATKYPSLNRTYPSIKKHTKKKPIVKPMGNCTNRKVRMAKVTTHTSAEASRSCETIGTESSKSNHGKNQQVDHANPVALNTEQSFPLIVNSLGTLGDNHQYHLLETTEGLACKFKKVPQSLAAPLKRLEKRDNVVLGSNNLGSSCFTADLGSSVLGKSGDKSNRMKDIGANLSSKHNDHGNQANQHTLVGSKNMEGKSVKAKHTVVDAHKNTSWTVDSLINVKDKSEVYGDSNRDILNDVTVQLDHRASNELLPRSTATNIPQLATLENDVVDTVMPYSPNGGCEESFSCPGIKNTPSVRERSVDPINISSDSHDTIEASESSERFMECQKASLCRRRKTVKMAMVSSSSEESGEDTISENVSLGYVLACRSSLSKAQKKRVTKLIQEIQPEFTVFISIMRMSNVKLPGPLLEGDICLFLPTKDEIRHTFMVYILHETTHSRCGAGFQRVGPCLGGASSAKMASEVHIEDEPTAGEHVSSDSDMPENSHEPLESGDSDDPFEPPYFVPCRSPLSKSQKRMVEQRVRAIRSEVPICVAVMKNNNVGIAQRWMLELCSRYASVYLPTKGQNILLQCKGKTWEAKMMFHNGRRWFLNGGWPDFARGNGLRVGDMCLFELKKKKSTLTMAVHIIRKEQF

SEQ ID NO: 162228 - protein, 71 aa, Zea Mays
MSRRQPVPAAAAKLEEGEHELSIVDALLEVLSGRCELRRTSFGSRRLYRRFSFTSMGAPPQGRRCEYGGIS

SEQ ID NO: 162229 - protein, 1040 aa, Zea Mays
MHNGVDARPGPLLHLPGASPAPCSGRRVPWPRSGLGAALRQPNSPHGRLRFGPLPAGELCKRTHREKLRVAVLVSKSTLQSDHGASLQSERVVPQGVKAAAGFQISADDLASLVENRDTGKLTLLGQLDGIADKLATSLADGITTDELSLNQRQGMYGVNKFTESEARSLWEFVWEALQDTTLVILIACALVSFVVGIATEGWPSGAHDGIGIFTSILLVVSVTATSNYQQSLQFRDLDREKRKISVQVTRDGFRQRILIDDLLPGDVVHLGVGDQVPADGLFVSGYSVLVNESSLTGESEPVVISEDNPFLLSGTKVLDGSCIMLVTAVGMRTQWGKLMAAITESGDDETPLQGKLNGVANTIGNIGLFFALLTFVILSQGLVGQKYSDGLLLSWTGEDVLEILEHFAIAVTIVVVAVPEGLPLAVTLSLAFAMKKMMSEKALVRQLSACETMGSATVICSDKTGTLTTNRMSVTKACICGNTMEVNNSSVLSSFSSKVPEFALQILMESIFNNTAGEVVINQDGKCQILGTPTEAALLDFALTIGGDFKEKRQETKIVKVEPFNSTKKRMGIILELPGGGYRAHCKGASEVVLAACDNFIDARGTIVALDKTATKKLSDVIETFSKEALRTLCLAYREMDDSFSVDEQIPLQGYTCIGIVGIKDPVRPGVRQSVATCRSAGIAVRMVTGDNINTAKAIARECGILTEDGIAIEGAEFREKNPEELLELIPKMQFTCVLKVLARSSPLDKHALVKYLRTTFNEVVAVTGDGTNDAPALREADIGLAMGIAGTEVAKESADVVILDDNFSTIVTVAKWGRSVYVNIQKFVQFQLTVNVVALLVNFSSACFTGDAPLTAVQLLWVNMIMDTLGALALATEPPDDNLMKKSPVGRTGRFITNVMWRNIVGQSIFQFVVIWYLQTQGEYLFGLESSEANTVLNTIIFNTFVFCQVFNEISSRDMEEINVLKGLPQNSIFMSILGGTIIFQFILVQFLGDFANTTPLTHLQWLVSILFGLLGMPIAAAIKLIPVEPREDDGRIP

SEQ ID NO: 162230 - protein, 807 aa, Zea Mays
MHNGVDARPGPLLHLPGASPAPCSGRRVPWPRSGLGAALRQPNSPHGRLRFGPLPAGELCKRTHREKLRVAVLVSKSTLQSDHGASLQSERVVPQGVKAAAGFQISADDLASLVENRDTGKLTLLGQLDGIADKLATSLADGITTDELSLNQRQGMYGVNKFTESEARSLWEFVWEALQDTTLVILIACALVSFVVGIATEGWPSGAHDGIGIFTSILLVVSVTATSNYQQSLQFRDLDREKRKISVQVTRDGFRQRILIDDLLPGDVVHLGVGDQVPADGLFVSGYSVLVNESSLTGESEPVVISEDNPFLLSGTKVLDGSCIMLVTAVGMRTQWGKLMAAITESGDDETPLQGKLNGVANTIGNIGLFFALLTFVILSQGLVGQKYSDGLLLSWTGEDVLEILEHFAIAVTIVVVAVPEGLPLAVTLSLAFAMKKMMSEKALVRQLSACETMGSATVICSDKTGTLTTNRMSVTKACICGNTMEVNNSSVLSSFSSKVPEFALQILMESIFNNTAGEVVINQDGKCQILGTPTEAALLDFALTIGGDFKEKRQETKIVKVEPFNSTKKRMGIILELPGGGYRAHCKGASEVVLAACDNFIDARGTIVALDKTATKKLSDVIETFSKEALRTLCLAYREMDDSFSVDEQIPLQGYTCIGIVGIKDPVRPGVRQSVATCRSAGIAVRMVTGDNINTAKAIARECGILTEDGIAIEGAEFREKNPEELLELIPKMQVLARSSPLDKHALVKYLRTTFNEVVAVTGDGTNDAPALREADIGLAMGIAGTELRNGDALFMSTSKSLCSSS

SEQ ID NO: 162231 - protein, 222 aa, Zea Mays
MSSSNSPCAACKLLRRKCTQGCVFAPYFPPDNPGKFASVHRVFGASNVSKLLNDLDQLQREDAVNSLAYEADARIRDPVYGCVAYISVLQMKIKRVRDEIANARKELAAYIGTAAFAPYVATPQYHHHQYAAGRGIRARRAQRRPHGRRCAARRAAVRGRLPLPAAAAPFAGADRRGAHVPDGAVPAVVVLGPVSPRGVAAAQYGWQRRGQRWRWCRAAGLI

SEQ ID NO: 162232 - protein, 227 aa, Zea Mays
MLHIRPDRYVALFGEFSYNPTKWRPSIPFEEQLKALQELVDEGKVRYIGVSNETSYGVMEFVHAAKAQGLPKIVSIQNSYSLLVRCRFEVDLVEVCHPNNCNVGLLAYSPLAGGVLTGKYLDANADISKSRLNLFPGYMARYNDSLAKEATLEYVKLAKKHGLTPVQLALGFVRDRPFTASSIIGATTMEQVKENIDAFTSTPRPLPQEVLDGIEDLFKRYKDPAIL

SEQ ID NO: 162233 - protein, 376 aa, Zea Mays
MQQMAMPSFAVTSPPSHGTTLWAPHARRPQRLHKRHVRSQVRAVAQAQLQYQKLGDSDLLISEVTLGTMTFGEQNTEKEAHDIIAYSFDQGVNILDTAEIIILATKVAGYSERSTFLRDNAKVVRVDAANIKESIEKSLKRLSTDYIDLLQIHWPDRYVALFGEFSYNPTKWRPSIPFEEQLKALQELVDEGKVRYIGVSNETSYGVMEFVHAAKAQGLPKIVSIQNSYSLLVRCRFEVDLVEVCHPNNCNVGLLAYSPLAGGVLTGKYLDANADISKSRLNLFPGYMARYNDSLAKEATLEYVKLAKKHGLTPVQLALGFVRDRPFTASSIIGATTMEQVKENIDAFTSTPRPLPQEVLDGIEDLFKRYKDPAIL

SEQ ID NO: 162234 - protein, 401 aa, Zea Mays
MQQMAMPSFAVTSPPSHGTTLWAPHARRPQRLHKRHVRSQVRAVAQAQLQYQKLGDSDLLISEVTLGTMTFGEQNTEKEAHDIIAYSFDQGVNILDTAEIYPVPMNKETQGRTDLYIGRWMQSKPRDKIILATKVAGYSERSTFLRDNAKVVRVDAANIKESIEKSLKRLSTDYIDLLQIHWYVALFGEFSYNPTKWRPSIPFEEQLKALQELVDEGKVRYIGVSNETSYGVMEFVHAAKAQGLPKIVSIQNSYSLLVRCRFEVDLVEVCHPNNCNVGLLAYSPLAGGVLTGKYLDANADISKSRLNLFPGYMARYNDSLAKEATLEYVKLAKKHGLTPVQLALGFVRDRPFTASSIIGATTMEQVKENIDAFTSTPRPLPQEVLDGIEDLFKRYKDPAIL

SEQ ID NO: 162235 - protein, 51 aa, Zea Mays
MEESLVAGKTFNQEQEEVTSSKPIVVILIDELEHLSTRSHQLSRRSSLLIA

SEQ ID NO: 162236 - protein, 58 aa, Zea Mays
MYLHFLQQEYTCMSLAITDQSNICKEETLLLKFIVYQLVPLKQKCISKLDDCKLLSNQ

SEQ ID NO: 162237 - protein, 70 aa, Zea Mays
MARKQVEPICCQKEIHDDRPRKVPCPCNTVSPCKKGGMQRCYTNRTLFSRPNPYLNCTCNTVSPPAVKAR

SEQ ID NO: 162238 - protein, 313 aa, Zea Mays
MPTAYSLRAPPSASQQRLRLPLPPPPPPLPFCPGGGAARRRRGVGVASASASPFDELHARGRPVHGPSKKSMLWNLIQDIEPLDLSVIQKDVAPETVDAMKRTISGMLGLLPSDQFRVIVEALWNPFFKLLVSSIMTGYTLRNAEYRLSFERNLELPEEGVECLKSDVTEDNHHNINLGRPVTIFRLSEEDMPQDPGKTDEASSYENMGEELGDLTPQAEEYIIQMQSHLNAMKKELHDLRRKNSALQMQQFVGEEKNDLLDYLRSLTPEKVAELSESTSPGVQETIHSVVHGLLATLSPKNLWRMLPSHFSP

SEQ ID NO: 162239 - protein, 191 aa, Zea Mays
MSMSKTGQAAEKDEQQQSRGIALMQGICAVVYRKADNTPCPIKQGLYLGSVGAAFNKDALKSLNITHILIVAKSLDPVFPAEFNYKKIEDEAISSGGNVLVHCFAGRSRSLTSLRLGGHNPNRRGRPTATSYVAVVRQVGDSRSLTRSFRNPCKWSRNGECNLCSTDNYTSVIIGAEGLICSEGVCVVRAS

SEQ ID NO: 162240 - protein, 101 aa, Zea Mays
MSMSKTGQAAEKDEQQQSRGIALMQGICAVVYRKADNTPCPIKQGLYLGSVGAAFNKDALKSLNITHILIVAKSLDPVFPAEFNYKKIEVEQEWRMQPVQH

SEQ ID NO: 162241 - protein, 113 aa, Zea Mays
MSMSKTGQAAEKDEQQQSRGIALMQGICAVVYRKADNTPCPIKQGLYLGSVGAAFNKDALKSLNITHILIVAKSLDPVFPAEFNYKKIEDEAISSGGNVLVHCFAGRSRSMAN

SEQ ID NO: 162242 - protein, 133 aa, Zea Mays
MSMSKTGQAAEKDEQQQSRGIALMQGICAVVYRKADNTPCPIKQGLYLGSVGAAFNKDALKSLNITHILIVAKSLDPVFPAEFNYKKIEVLDIPDTDLLKHSDECFGFIDEAISSGGNVLVHCFAGRSRSMAN

SEQ ID NO: 162243 - protein, 397 aa, Zea Mays
MYRMMWDYFFPEEDDSQRRQEVWRVSTSTGPRRTRRLSSGVDAVTSSSYSVRDHELPGKSSTTVSTSTNVSSWQGILSDNSQVSKFQSIKANMVCGSHQELHRSSSFERNWEESAAESVASNDVVSLLNSSIVSSKVDASNSVLENPVVGSEMWRSKTKDSKPAKSGRLSHEEKKLGKSNDEKKTKPRKSMEFHNIKIGKVELLVTYEGSRLAINDLRLLMDTFHKAEFTGTWRRLFSRVKKGKKFSNHRETLEGSIPENDLNLSDSDVGQPGRHDQLTASWLKRPGDGAGDGFVTSIRGLFNTQRRKAKAFVIRTMRGEGHNDEYQDEWSESDGEYPFARQLTITKAKKLIRRKFRPRVQKNPGLSMQDSLPSSPRETTPYQSDSSRSSYEDFHEQ

SEQ ID NO: 162244 - protein, 411 aa, Zea Mays
MYRMMWDYFFPEEDDSQRRQEVWRVSTSTGPRRTRRLSSGVDAVTSSSYSVRDHELPGKSSTTVSTSTNVSSWQGILSDNSQVSKFQSIKANMVCGSHQELHRSSSFERNWEESAAESVASNDVVSLLNSSIVSSKVDASNSVLENPVVGSEMWRSKTKDSKPAKSGRLSHEEKKLGKSNDEKKTKPRKSMEFHNIKIGKVELLVTYEGSRLAINDLRLLMDTFHKAEFTGTWRRLFSRVKKHIIWGVLKSVTGMQGKKFSNHRETLEGSIPENDLNLSDSDVGQPGRHDQLTASWLKRPGDGAGDGFVTSIRGLFNTQRRKAKAFVIRTMRGEGHNDEYQDEWSESDGEYPFARQLTITKAKKLIRRKFRPRVQKNPGLSMQDSLPSSPRETTPYQSDSSRSSYEDFHEQ

SEQ ID NO: 162245 - protein, 1456 aa, Zea Mays
MLSRLMPWMRLHSLRTKGMKLSKRNSNQEISQKKEMKPILWTCTVAAPEMTVLLYSLNGLVLYHACSQSSHLFANNIASKGIQIHTELGELLVHMEEEYRELLKENIFGVDTYSGSLMHIARMSLDWGYRESDVQDMVETSRNALVFSIDISDMEVKFGFKHLESIVLNLMSFRTLFKSLQLSGGSAKEKNLERKGEKKMKGVKKLKLSLQKFSITYCGDANIISMPIADPKRVNYGSQGGQVIVSVSADGTPRRASITSVLPDCHLRFSASLVISHLSMCIDKERKTTEAELERVKAIYEELPEDRSGVRVTLLDMQNAKIVRRSSGHAEVAVCSLFSATDIYLRWEPDAHLALYETFIRFKHFLHHNVSQNSEKMINTEVASTKSNEHGNITAGFINSQKSNRKGSIFAIDVDMLRVSAELADGVEANMHVQSIFTENAKIGVLSEGLSLTFNGARVLKSTRIQISCIPFSTGSLLDAKIEPSSKRDWVVQGLDVHICMPYRLPLRAIEDAVEDMFRALKLVSSAKRSIICPDEKEKSRKVNSGGSKFGSVKFVLRKLTADIEEEPIQGWLDEHYHLMRNKICELGVRLNYLEEAISGSVDPSNHSSERKVLYNGVEVDIHDTTALQKLQEEIHKQAFRSYYVSCQNMVLAEGSGACSEGFQAGFRQSSRRASLLSLSASDLDVTLTRIDGGELRDYTSPLFSSLSGKCQGRIVLAQQATCFQPQIHQELYIGRWQKVTMLRSASGTTPAMKMYSNLPIYFQKGEISFGVGYEPSFADISYAFQVALRKVNLSTRASCSGLAVQLPKKERSLPWWDDMRYYLHGKIILYFNETKWKFLATTNPYEHVDKLQIVSEYMEIQQTDGRVDVSAKEFKIYISSVESITKNRRIKVPSRVPRPFIYAPLFSLNVVIDWQCESRNPLNHYLHALPVEGEPRKKVYDPFRSTYLSLRWNFSLRPLQSQYGNGPPPPFYGNNSMLRGIMSGSPCKMTDDDFPTMNLGAHDLAWVFKWWSLNYSPPHKLRSFSRWRRFGIPRATRSGNLSLDKVLVEFFFRVDATPCCIRHAPLSEDDDPAFGLTFKMSNLKYELCYSRGKQQYTFDCKRESLDLVYRGLDLHRPEVYLMRDNNLSSVENVSKVRTMVQQSHGKFVHDRCNMGNFQEKHEDGFLLSSDYITIRRQTRKADPERLMGWQDTGRSHEITYVRSEFEDDSESDHTLSEPSDDDDDFNVVLADNCQRVFVYGLRILWTIENRDAVWSWVGGISKAFEPPKPSPSRQYAQRKMIEERNAEGSKVPQDSSSSIHVGSPSVQHLDASGSSSSLHSKANRSSDVAVNHDIFDDSDKGGTAQYMVNVITPQFNLHSEEANGRFLLAAASGRVLARSFHSVVHLGKEILEQALGTSSAQILELQPEMTWNKSELSVMLKDVQAHVAPTDVDPGAGLQWLPKVLGSSEKLKRTG

SEQ ID NO: 162246 - protein, 1536 aa, Zea Mays
MLSRLMPWMRLHSLRTKGMKLSKRNSNQEISQKKEMKPILWTCTVAAPEMTVLLYSLNGLVLYHACSQSSHLFANNIASKGIQIHTELGELLVHMEEEYRELLKENIFGVDTYSGSLMHIARMSLDWGYRESDVQDMVETSRNALVFSIDISDMEVKFGFKHLESIVLNLMSFRTLFKSLQLSGGSAKEKNLERKGEKKMKGVKKLKLSLQKFSITYCGDANIISMPIADPKRVNYGSQGGQVIVSVSADGTPRRASITSVLPDCHLRFSASLVISHLSMCIDKERKTTEAELERVKAIYEELPEDRSGVRVTLLDMQNAKIVRRSSGHAEVAVCSLFSATDIYLRWEPDAHLALYETFIRFKHFLHHNVSQNSEKMINTEVASTKSNEHGNITAGFINSQKSNRKGSIFAIDVDMLRVSAELADGVEANMHVQSIFTENAKIGVLSEGLSLTFNGARVLKSTRIQISCIPFSTGSLLDAKIEPSSKRDWVVQGLDVHICMPYRLPLRAIEDAVEDMFRALKLVSSAKRSIICPDEKEKSRKVNSGGSKFGSVKFVLRKLTADIEEEPIQGWLDEHYHLMRNKICELGVRLNYLEEAISGSVDPSNHSSERKVLYNGVEVDIHDTTALQKLQEEIHKQAFRSYYVSCQNMVLAEGSGACSEGFQAGFRQSSRRASLLSLSASDLDVTLTRIDGGELRDYTSPLFSSLSGKCQGRIVLAQQATCFQPQIHQELYIGRWQKVTMLRSASGTTPAMKMYSNLPIYFQKGEISFGVGYEPSFADISYAFQVALRKVNLSTRASCSGLAVQLPKKERSLPWWDDMRYYLHGKIILYFNETKWKFLATTNPYEHVDKLQIVSEYMEIQQTDGRVDVSAKEFKIYISSVESITKNRRIKVPSRVPRPFIYAPLFSLNVVIDWQCESRNPLNHYLHALPVEGEPRKKVYDPFRSTYLSLRWNFSLRPLQSQYGNGPPPPFYGNNSMLRGIMSGSPCKMTDDDFPTMNLGAHDLAWVFKWWSLNYSPPHKLRSFSRWRRFGIPRATRSGNLSLDKVLVEFFFRVDATPCCIRHAPLSEDDDPAFGLTFKMSNLKYELCYSRGKQQYTFDCKRESLDLVYRGLDLHRPEVYLMRDNNLSSVENVSKVRTMVQQSHGKFVHDRCNMGNFQEKHEDGFLLSSDYITIRRQTRKADPERLMGWQDTGRSHEITYVRSEFEDDSESDHTLSEPSDDDDDFNVVLADNCQRVFVYGLRILWTIENRDAVWSWVGGISKAFEPPKPSPSRQYAQRKMIEERNAEGSKVPQDSSSSIHVGSPSVQHLDASGSSSSLHSKANRSSDVAVNHDIFDDSDKGGTAQYMVNVITPQFNLHSEEANGRFLLAAASGRVLARSFHSVVHLGKEILEQALGTSSAQILELQPEMTWNKSELSVMLKDVQAHVAPTDVDPGAGLQWLPKVLGSSEKLKRTGALLERVFMPCQMYFRYTRHKGGTADLRVKPLKELRFNSPDITATMTSRQFQVMFDVLRNLLFARLPKSRISDELEMFGSK

SEQ ID NO: 162247 - protein, 2368 aa, Zea Mays
MFHKKRTIPEYNTVSLNTGDSITDTSALKQTSKSKSILPLLKKHMLTFPDKVSFSVPKLDVKFRHLHEGLSVDNNITGIQFTCAKSLPQDDFEEATPHFDVQIDLSEIHLIREGSSSLLEVLKVFTIASLDVPVDPFLPIRAEIDAKLGGTQCNIMLSRLMPWMRLHSLRTKGMKLSKRNSNQEISQKKEMKPILWTCTVAAPEMTVLLYSLNGLVLYHACSQSSHLFANNIASKGIQIHTELGELLVHMEEEYRELLKENIFGVDTYSGSLMHIARMSLDWGYRESDVQDMVETSRNALVFSIDISDMEVKFGFKHLESIVLNLMSFRTLFKSLQLSGGSAKEKNLERKGEKKMKGVKKLKLSLQKFSITYCGDANIISMPIADPKRVNYGSQGGQVIVSVSADGTPRRASITSVLPDCHLRFSASLVISHLSMCIDKERKTTEAELERVKAIYEELPEDRSGVRVTLLDMQNAKIVRRSSGHAEVAVCSLFSATDIYLRWEPDAHLALYETFIRFKHFLHHNVSQNSEKMINTEVASTKSNEHGNITAGFINSQKSNRKGSIFAIDVDMLRVSAELADGVEANMHVQSIFTENAKIGVLSEGLSLTFNGARVLKSTRIQISCIPFSTGSLLDAKIEPSSKRDWVVQGLDVHICMPYRLPLRAIEDAVEDMFRALKLVSSAKRSIICPDEKEKSRKVNSGGSKFGSVKFVLRKLTADIEEEPIQGWLDEHYHLMRNKICELGVRLNYLEEAISGSVDPSNHSSERKVLYNGVEVDIHDTTALQKLQEEIHKQAFRSYYVSCQNMVLAEGSGACSEGFQAGFRQSSRRASLLSLSASDLDVTLTRIDGGEIEMVEFIKGLDPVCQEQNIPFSRLYGSDVSVVAGSLVVQLRDYTSPLFSSLSGKCQGRIVLAQQATCFQPQIHQELYIGRWQKVTMLRSASGTTPAMKMYSNLPIYFQKGEISFGVGYEPSFADISYAFQVALRKVNLSTRASCSGLAVQLPKKERSLPWWDDMRYYLHGKIILYFNETKWKFLATTNPYEHVDKLQIVSEYMEIQQTDGRVDVSAKEFKIYISSVESITKNRRIKVPSRVPRPFIYAPLFSLNVVIDWQCESRNPLNHYLHALPVEGEPRKKVYDPFRSTYLSLRWNFSLRPLQSQYGNGPPPPFYGNNSMLRGIMSGSPCKMTDDDFPTMNLGAHDLAWVFKWWSLNYSPPHKLRSFSRWRRFGIPRATRSGNLSLDKVLVEFFFRVDATPCCIRHAPLSEDDDPAFGLTFKMSNLKYELCYSRGKQQYTFDCKRESLDLVYRGLDLHRPEVYLMRDNNLSSVENVSKVRTMVQQSHGKFVHDRCNMGNFQEKHEDGFLLSSDYITIRRQTRKADPERLMGWQDTGRSHEITYVRSEFEDDSESDHTLSEPSDDDDDFNVVLADNCQRVFVYGLRILWTIENRDAVWSWVGGISKAFEPPKPSPSRQYAQRKMIEERNAEGSKVPQDSSSSIHVGSPSVQHLDASGSSSSLHSKANRSSDVAVNHDIFDDSDKGGTAQYMVNVITPQFNLHSEEANGRFLLAAASGRVLARSFHSVVHLGKEILEQALGTSSAQILELQPEMTWNKSELSVMLKDVQAHVAPTDVDPGAGLQWLPKVLGSSEKLKRTGALLERVFMPCQMYFRYTRHKGGTADLRVKPLKELRFNSPDITATMTSRQFQVMFDVLRNLLFARLPKPRKNSLQYPSDDEDIEEEADEVVPDGVEEVELAKITLEQREREIKLLLDDIRSLTGNGDNGTDHCHSAEKGDCLWMINSGKASLVEGLKRDFANLQKSRIFASSALRKALSNASQSHLEKEKNKTTSCAMRISMKISKVVWSMLADGNTFAEAEINDMVYDFDRDYKDIGIALFTTKYFVVRNCMVNAKCDTLLSAWNTPPGKINMLRVDAKQGAPKDGSSPLELFQVEIYPLRIYLSEAMYRMMWDYFFPEEDDSQRRQEVWRVSTSTGPRRTRRLSSGVDAVTSSSYSVRDHELPGKSSTTVSTSTNVSSWQGILSDNSQVSKFQSIKANMVCGSHQELHRSSSFERNWEESAAESVASNDVVSLLNSSIVSSKVDASNSVLENPVVGSEMWRSKTKDSKPAKSGRLSHEEKKLGKSNDEKKTKPRKSMEFHNIKIGKVELLVTYEGSRLAINDLRLLMDTFHKAEFTGTWRRLFSRVKKHIIWGVLKSVTGMQGKKFSNHRETLEGSIPENDLNLSDSDVGQPGRHDQLTASWLKRPGDGAGDGFVTSIRGLFNTQRRKAKAFVIRTMRGEGHNDEYQDEWSESDGEYPFARQLTITKAKKLIRRKFRPRVQKNPGLSMQDSLPSSPRETTPYQSDSSRSSYEDFHEQ

SEQ ID NO: 162248 - protein, 2265 aa, Zea Mays
MASSPVKFFSVFLAVSVVGWIVFTFASRLLAWFLSRVFSASVGFRVAGFNCLRDVTIKFCKGSVESVSIGEIKLSFRKSLVKLSFGVISKDPKLQLLINDLEIVTRSSSENKKIRKSAKPRSTGKGKWLVTSSMARLLSVSVTDLIIKVPKGALDIKELTVDTFKIAGPNHTLGVKLHLLPLNILLGDLGLTTDPMGSCSLFDAFQSDQASVSNSEKSLAPFVCEDLLVTCNLGHEKEKGIKIINLELKCGYAIANIDERMFHKKRTIPEYNTVSLNTGDSITDTSALKQTSKSKSILPLLKKHMLTFPDKVSFSVPKLDVKFRHLHEGLSVDNNITGIQFTCAKSLPQDDFEEATPHFDVQIDLSEIHLIREGSSSLLEVLKVFTIASLDVPVDPFLPIRAEIDAKLGGTQCNIMLSRLMPWMRLHSLRTKGMKLSKRNSNQEISQKKEMKPILWTCTVAAPEMTVLLYSLNGLVLYHACSQSSHLFANNIASKGIQIHTELGELLVHMEEEYRELLKENIFGVDTYSGSLMHIARMSLDWGYRESDVQDMVETSRNALVFSIDISDMEVKFGFKHLESIVLNLMSFRTLFKSLQLSGGSAKEKNLERKGEKKMKGVKKLKLSLQKFSITYCGDANIISMPIADPKRVNYGSQGGQVIVSVSADGTPRRASITSVLPDCHLRFSASLVISHLSMCIDKERKTTEAELERVKAIYEELPEDRSGVRVTLLDMQNAKIVRRSSGHAEVAVCSLFSATDIYLRWEPDAHLALYETFIRFKHFLHHNVSQNSEKMINTEVASTKSNEHGNITAGFINSQKSNRKGSIFAIDVDMLRVSAELADGVEANMHVQSIFTENAKIGVLSEGLSLTFNGARVLKSTRIQISCIPFSTGSLLDAKIEPSSKRDWVVQGLDVHICMPYRLPLRAIEDAVEDMFRALKLVSSAKRSIICPDEKEKSRKVNSGGSKFGSVKFVLRKLTADIEEEPIQGWLDEHYHLMRNKICELGVRLNYLEEAISGSVDPSNHSSERKVLYNGVEVDIHDTTALQKLQEEIHKQAFRSYYVSCQNMVLAEGSGACSEGFQAGFRQSSRRASLLSLSASDLDVTLTRIDGGELRDYTSPLFSSLSGKCQGRIVLAQQATCFQPQIHQELYIGRWQKVTMLRSASGTTPAMKMYSNLPIYFQKGEISFGVGYEPSFADISYAFQVALRKVNLSTRASCSGLAVQLPKKERSLPWWDDMRYYLHGKIILYFNETKWKFLATTNPYEHVDKLQIVSEYMEIQQTDGRVDVSAKEFKIYISSVESITKNRRIKVPSRVPRPFIYAPLFSLNVVIDWQCESRNPLNHYLHALPVEGEPRKKVYDPFRSTYLSLRWNFSLRPLQSQYGNGPPPPFYGNNSMLRGIMSGSPCKMTDDDFPTMNLGAHDLAWVFKWWSLNYSPPHKLRSFSRWRRFGIPRATRSGNLSLDKVLVEFFFRVDATPCCIRHAPLSEDDDPAFGLTFKMSNLKYELCYSRGKQQYTFDCKRESLDLVYRGLDLHRPEVYLMRDNNLSSVENVSKVRTMVQQSHGKFVHDRCNMGNFQEKHEDGFLLSSDYITIRRQTRKADPERLMGWQDTGRSHEITYVRSEFEDDSESDHTLSEPSDDDDDFNVVLADNCQRVFVYGLRILWTIENRDAVWSWVGGISKAFEPPKPSPSRQYAQRKMIEERNAEGSKVPQDSSSSIHVGSPSVQHLDASGSSSSLHSKANRSSDVAVNHDIFDDSDKGGTAQYMVNVITPQFNLHSEEANGRFLLAAASGRVLARSFHSVVHLGKEILEQALGTSSAQILELQPEMTWNKSELSVMLKDVQAHVAPTDVDPGAGLQWLPKVLGSSEKLKRTGALLERVFMPCQMYFRYTRHKGGTADLRVKPLKELRFNSPDITATMTSRQFQVMFDVLRNLLFARLPKPRKNSLQYPSDDEDIEEEADEVVPDGVEEVELAKITLEQREREIKLLLDDIRSLTGNGDNGTDHCHSAEKGDCLWMINSGKASLVEGLKRDFANLQKSRIFASSALRKALSNASQSHLEKEKNKTTSCAMRISMKISKVVWSMLADGNTFAEAEINDMVYDFDRDYKDIGIALFTTKYFVVRNCMVNAKCDTLLSAWNTPPGKINMLRVDAKQGAPKDGSSPLELFQVEIYPLRIYLSEAMYRMMWDYFFPEEDDSQRRQFGEFQHQPGLEEQEGSLLVSMLLLLAAILSEIMNFLGNQVQLYLHQQMFQVGKVYSAITHRCQSFRV

SEQ ID NO: 162249 - protein, 2304 aa, Zea Mays
MASSPVKFFSVFLAVSVVGWIVFTFASRLLAWFLSRVFSASVGFRVAGFNCLRDVTIKFCKGSVESVSIGEIKLSFRKSLVKLSFGVISKDPKLQLLINDLEIVTRSSSENKKIRKSAKPRSTGKGKWLVTSSMARLLSVSVTDLIIKVPKGALDIKELTVDTFKIAGPNHTLGVKLHLLPLNILLGDLGLTTDPMGSCSLFDAFQSDQASVSNSEKSLAPFVCEDLLVTCNLGHEKEKGIKIINLELKCGYAIANIDERMFHKKRTIPEYNTVSLNTGDSITDTSALKQTSKSKSILPLLKKHMLTFPDKVSFSVPKLDVKFRHLHEGLSVDNNITGIQFTCAKSLPQDDFEEATPHFDVQIDLSEIHLIREGSSSLLEVLKVFTIASLDVPVDPFLPIRAEIDAKLGGTQCNIMLSRLMPWMRLHSLRTKGMKLSKRNSNQEISQKKEMKPILWTCTVAAPEMTVLLYSLNGLVLYHACSQSSHLFANNIASKGIQIHTELGELLVHMEEEYRELLKENIFGVDTYSGSLMHIARMSLDWGYRESDVQDMVETSRNALVFSIDISDMEVKFGFKHLESIVLNLMSFRTLFKSLQLSGGSAKEKNLERKGEKKMKGVKKLKLSLQKFSITYCGDANIISMPIADPKRVNYGSQGGQVIVSVSADGTPRRASITSVLPDCHLRFSASLVISHLSMCIDKERKTTEAELERVKAIYEELPEDRSGVRVTLLDMQNAKIVRRSSGHAEVAVCSLFSATDIYLRWEPDAHLALYETFIRFKHFLHHNVSQNSEKMINTEVASTKSNEHGNITAGFINSQKSNRKGSIFAIDVDMLRVSAELADGVEANMHVQSIFTENAKIGVLSEGLSLTFNGARVLKSTRIQISCIPFSTGSLLDAKIEPSSKRDWVVQGLDVHICMPYRLPLRAIEDAVEDMFRALKLVSSAKRSIICPDEKEKSRKVNSGGSKFGSVKFVLRKLTADIEEEPIQGWLDEHYHLMRNKICELGVRLNYLEEAISGSVDPSNHSSERKVLYNGVEVDIHDTTALQKLQEEIHKQAFRSYYVSCQNMVLAEGSGACSEGFQAGFRQSSRRASLLSLSASDLDVTLTRIDGGEIEMVEFIKGLDPVCQEQNIPFSRLYGSDVSVVAGSLVVQLRDYTSPLFSSLSGKCQGRIVLAQQATCFQPQIHQELYIGRWQKVTMLRSASGTTPAMKMYSNLPIYFQKGEISFGVGYEPSFADISYAFQVALRKVNLSTRASCSGLAVQLPKKERSLPWWDDMRYYLHGKIILYFNETKWKFLATTNPYEHVDKLQIVSEYMEIQQTDGRVDVSAKEFKIYISSVESITKNRRIKVPSRVPRPFIYAPLFSLNVVIDWQCESRNPLNHYLHALPVEGEPRKKVYDPFRSTYLSLRWNFSLRPLQSQYGNGPPPPFYGNNSMLRGIMSGSPCKMTDDDFPTMNLGAHDLAWVFKWWSLNYSPPHKLRSFSRWRRFGIPRATRSGNLSLDKVLVEFFFRVDATPCCIRHAPLSEDDDPAFGLTFKMSNLKYELCYSRGKQQYTFDCKRESLDLVYRGLDLHRPEVYLMRDNNLSSVENVSKVRTMVQQSHGKFVHDRCNMGNFQEKHEDGFLLSSDYITIRRQTRKADPERLMGWQDTGRSHEITYVRSEFEDDSESDHTLSEPSDDDDDFNVVLADNCQRVFVYGLRILWTIENRDAVWSWVGGISKAFEPPKPSPSRQYAQRKMIEERNAEGSKVPQDSSSSIHVGSPSVQHLDASGSSSSLHSKANRSSDVAVNHDIFDDSDKGGTAQYMVNVITPQFNLHSEEANGRFLLAAASGRVLARSFHSVVHLGKEILEQALGTSSAQILELQPEMTWNKSELSVMLKDVQAHVAPTDVDPGAGLQWLPKVLGSSEKLKRTGALLERVFMPCQMYFRYTRHKGGTADLRVKPLKELRFNSPDITATMTSRQFQVMFDVLRNLLFARLPKPRKNSLQYPSDDEDIEEEADEVVPDGVEEVELAKITLEQREREIKLLLDDIRSLTGNGDNGTDHCHSAEKGDCLWMINSGKASLVEGLKRDFANLQKSRIFASSALRKALSNASQSHLEKEKNKTTSCAMRISMKISKVVWSMLADGNTFAEAEINDMVYDFDRDYKDIGIALFTTKYFVVRNCMVNAKCDTLLSAWNTPPGKINMLRVDAKQGAPKDGSSPLELFQVEIYPLRIYLSEAMYRMMWDYFFPEEDDSQRRQFGEFQHQPGLEEQEGSLLVSMLLLLAAILSEIMNFLGNQVQLYLHQQMFQVGKVYSAITHRCQSFRV

SEQ ID NO: 162250 - protein, 1856 aa, Zea Mays
MASSPVKFFSVFLAVSVVGWIVFTFASRLLAWFLSRVFSASVGFRVAGFNCLRDVTIKFCKGSVESVSIGEIKLSFRKSLVKLSFGVISKDPKLQLLINDLEIVTRSSSENKKIRKSAKPRSTGKGKWLVTSSMARLLSVSVTDLIIKVPKGALDIKELTVDTFKIAGPNHTLGVKLHLLPLNILLGDLGLTTDPMGSCSLFDAFQSDQASVSNSEKSLAPFVCEDLLVTCNLGHEKEKGIKIINLELKCGYAIANIDERMFHKKRTIPEYNTVSLNTGDSITDTSALKQTSKSKSILPLLKKHMLTFPDKVSFSVPKLDVKFRHLHEGLSVDNNITGIQFTCAKSLPQDDFEEATPHFDVQIDLSEIHLIREGSSSLLEVLKVFTIASLDVPVDPFLPIRAEIDAKLGGTQCNIMLSRLMPWMRLHSLRTKGMKLSKRNSNQEISQKKEMKPILWTCTVAAPEMTVLLYSLNGLVLYHACSQSSHLFANNIASKGIQIHTELGELLVHMEEEYRELLKENIFGVDTYSGSLMHIARMSLDWGYRESDVQDMVETSRNALVFSIDISDMEVKFGFKHLESIVLNLMSFRTLFKSLQLSGGSAKEKNLERKGEKKMKGVKKLKLSLQKFSITYCGDANIISMPIADPKRVNYGSQGGQVIVSVSADGTPRRASITSVLPDCHLRFSASLVISHLSMCIDKERKTTEAELERVKAIYEELPEDRSGVRVTLLDMQNAKIVRRSSGHAEVAVCSLFSATDIYLRWEPDAHLALYETFIRFKHFLHHNVSQNSEKMINTEVASTKSNEHGNITAGFINSQKSNRKGSIFAIDVDMLRVSAELADGVEANMHVQSIFTENAKIGVLSEGLSLTFNGARVLKSTRIQISCIPFSTGSLLDAKIEPSSKRDWVVQGLDVHICMPYRLPLRAIEDAVEDMFRALKLVSSAKRSIICPDEKEKSRKVNSGGSKFGSVKFVLRKLTADIEEEPIQGWLDEHYHLMRNKICELGVRLNYLEEAISGSVDPSNHSSERKVLYNGVEVDIHDTTALQKLQEEIHKQAFRSYYVSCQNMVLAEGSGACSEGFQAGFRQSSRRASLLSLSASDLDVTLTRIDGGEIEMVEFIKGLDPVCQEQNIPFSRLYGSDVSVVAGSLVVQLRDYTSPLFSSLSGKCQGRIVLAQQATCFQPQIHQELYIGRWQKVTMLRSASGTTPAMKMYSNLPIYFQKGEISFGVGYEPSFADISYAFQVALRKVNLSTRASCSGLAVQLPKKERSLPWWDDMRYYLHGKIILYFNETKWKFLATTNPYEHVDKLQIVSEYMEIQQTDGRVDVSAKEFKIYISSVESITKNRRIKVPSRVPRPFIYAPLFSLNVVIDWQCESRNPLNHYLHALPVEGEPRKKVYDPFRSTYLSLRWNFSLRPLQSQYGNGPPPPFYGNNSMLRGIMSGSPCKMTDDDFPTMNLGAHDLAWVFKWWSLNYSPPHKLRSFSRWRRFGIPRATRSGNLSLDKVLVEFFFRVDATPCCIRHAPLSEDDDPAFGLTFKMSNLKYELCYSRGKQQYTFDCKRESLDLVYRGLDLHRPEVYLMRDNNLSSVENVSKVRTMVQQSHGKFVHDRCNMGNFQEKHEDGFLLSSDYITIRRQTRKADPERLMGWQDTGRSHEITYVRSEFEDDSESDHTLSEPSDDDDDFNVVLADNCQRVFVYGLRILWTIENRDAVWSWVGGISKAFEPPKPSPSRQYAQRKMIEERNAEGSKVPQDSSSSIHVGSPSVQHLDASGSSSSLHSKANRSSDVAVNHDIFDDSDKGGTAQYMVNVITPQFNLHSEEANVSTCCSQWSCTGSFISFSCSSWERNTRTSTWNKQCTDS

SEQ ID NO: 162251 - protein, 2163 aa, Zea Mays
MASSPVKFFSVFLAVSVVGWIVFTFASRLLAWFLSRVFSASVGFRVAGFNCLRDVTIKFCKGSVESVSIGEIKLSFRKSLVKLSFGVISKDPKLQLLINDLEIVTRSSSENKKIRKSAKPRSTGKGKWLVTSSMARLLSVSVTDLIIKVPKGALDIKELTVDTFKIAGPNHTLGVKLHLLPLNILLGDLGLTTDPMGSCSLFDAFQSDQASVSNSEKSLAPFVCEDLLVTCNLGHEKEKGIKIINLELKCGYAIANIDERMFHKKRTIPEYNTVSLNTGDSITDTSALKQTSKSKSILPLLKKHMLTFPDKVSFSVPKLDVKFRHLHEGLSVDNNITGIQFTCAKSLPQDDFEEATPHFDVQIDLSEIHLIREGSSSLLEVLKVFTIASLDVPVDPFLPIRAEIDAKLGGTQCNIMLSRLMPWMRLHSLRTKGMKLSKRNSNQEISQKKEMKPILWTCTVAAPEMTVLLYSLNGLVLYHACSQSSHLFANNIASKGIQIHTELGELLVHMEEEYRELLKENIFGVDTYSGSLMHIARMSLDWGYRESDVQDMVETSRNALVFSIDISDMEVKFGFKHLESIVLNLMSFRTLFKSLQLSGGSAKEKNLERKGEKKMKGVKKLKLSLQKFSITYCGDANIISMPIADPKRVNYGSQGGQVIVSVSADGTPRRASITSVLPDCHLRFSASLVISHLSMCIDKERKTTEAELERVKAIYEELPEDRSGVRVTLLDMQNAKIVRRSSGHAEVAVCSLFSATDIYLRWEPDAHLALYETFIRFKHFLHHNVSQNSEKMINTEVASTKSNEHGNITAGFINSQKSNRKGSIFAIDVDMLRVSAELADGVEANMHVQSIFTENAKIGVLSEGLSLTFNGARVLKSTRIQISCIPFSTGSLLDAKIEPSSKRDWVVQGLDVHICMPYRLPLRAIEDAVEDMFRALKLVSSAKRSIICPDEKEKSRKVNSGGSKFGSVKFVLRKLTADIEEEPIQGWLDEHYHLMRNKICELGVRLNYLEEAISGSVDPSNHSSERKVLYNGVEVDIHDTTALQKLQEEIHKQAFRSYYVSCQNMVLAEGSGACSEGFQAGFRQSSRRASLLSLSASDLDVTLTRIDGGEIEMVEFIKGLDPVCQEQNIPFSRLYGSDVSVVAGSLVVQLRDYTSPLFSSLSGKCQGRIVLAQQATCFQPQIHQELYIGRWQKVTMLRSASGTTPAMKMYSNLPIYFQKGEISFGVGYEPSFADISYAFQVALRKVNLSTRASCSGLAVQLPKKERSLPWWDDMRYYLHGKIILYFNETKWKFLATTNPYEHVDKLQIVSEYMEIQQTDGRVDVSAKEFKIYISSVESITKNRRIKVPSRVPRPFIYAPLFSLNVVIDWQCESRNPLNHYLHALPVEGEPRKKVYDPFRSTYLSLRWNFSLRPLQSQYGNGPPPPFYGNNSMLRGIMSGSPCKMTDDDFPTMNLGAHDLAWVFKWWSLNYSPPHKLRSFSRWRRFGIPRATRSGNLSLDKVLVEFFFRVDATPCCIRHAPLSEDDDPAFGLTFKMSNLKYELCYSRGKQQYTFDCKRESLDLVYRGLDLHRPEVYLMRDNNLSSVENVSKVRTMVQQSHGKFVHDRCNMGNFQEKHEDGFLLSSDYITIRRQTRKADPERLMGWQDTGRSHEITYVRSEFEDDSESDHTLSEPSDDDDDFNVVLADNCQRVFVYGLRILWTIENRDAVWSWVGGISKAFEPPKPSPSRQYAQRKMIEERNAEGSKVPQDSSSSIHVGSPSVQHLDASGSSSSLHSKANRSSDVAVNHDIFDDSDKGGTAQYMVNVITPQFNLHSEEANGRFLLAAASGRVLARSFHSVVHLGKEILEQALGTSSAQILELQPEMTWNKSELSVMLKDVQAHVAPTDVDPGAGLQWLPKVLGSSEKLKRTGALLERVFMPCQMYFRYTRHKGGTADLRVKPLKELRFNSPDITATMTSRQFQVMFDVLRNLLFARLPKPRKNSLQYPSDDEDIEEEADEVVPDGVEEVELAKITLEQREREIKLLLDDIRSLTGNGDNGTDHCHSAEKGDCLWMINSGKASLVEGLKRDFANLQKSRIFASSALRKALSNASQSHLEKEKNKTTSCAMRISMKISKVVWSMLADGNTFAEAEINDMVCAQPCPFTSVAVCSFNRVGESERRQGG

SEQ ID NO: 162252 - protein, 1871 aa, Zea Mays
MASSPVKFFSVFLAVSVVGWIVFTFASRLLAWFLSRVFSASVGFRVAGFNCLRDVTIKFCKGSVESVSIGEIKLSFRKSLVKLSFGVISKDPKLQLLINDLEIVTRSSSENKKIRKSAKPRSTGKGKWLVTSSMARLLSVSVTDLIIKVPKGALDIKELTVDTFKIAGPNHTLGVKLHLLPLNILLGDLGLTTDPMGSCSLFDAFQSDQASVSNSEKSLAPFVCEDLLVTCNLGHEKEKGIKIINLELKCGYAIANIDERMFHKKRTIPEYNTVSLNTGDSITDTSALKQTSKSKSILPLLKKHMLTFPDKVSFSVPKLDVKFRHLHEGLSVDNNITGIQFTCAKSLPQDDFEEATPHFDVQIDLSEIHLIREGSSSLLEVLKVFTIASLDVPVDPFLPIRAEIDAKLGGTQCNIMLSRLMPWMRLHSLRTKGMKLSKRNSNQEISQKKEMKPILWTCTVAAPEMTVLLYSLNGLVLYHACSQSSHLFANNIASKGIQIHTELGELLVHMEEEYRELLKENIFGVDTYSGSLMHIARMSLDWGYRESDVQDMVETSRNALVFSIDISDMEVKFGFKHLESIVLNLMSFRTLFKSLQLSGGSAKEKNLERKGEKKMKGVKKLKLSLQKFSITYCGDANIISMPIADPKRVNYGSQGGQVIVSVSADGTPRRASITSVLPDCHLRFSASLVISHLSMCIDKERKTTEAELERVKAIYEELPEDRSGVRVTLLDMQNAKIVRRSSGHAEVAVCSLFSATDIYLRWEPDAHLALYETFIRFKHFLHHNVSQNSEKMINTEVASTKSNEHGNITAGFINSQKSNRKGSIFAIDVDMLRVSAELADGVEANMHVQSIFTENAKIGVLSEGLSLTFNGARVLKSTRIQISCIPFSTGSLLDAKIEPSSKRDWVVQGLDVHICMPYRLPLRAIEDAVEDMFRALKLVSSAKRSIICPDEKEKSRKVNSGGSKFGSVKFVLRKLTADIEEEPIQGWLDEHYHLMRNKICELGVRLNYLEEAISGSVDPSNHSSERKVLYNGVEVDIHDTTALQKLQEEIHKQAFRSYYVSCQNMVLAEGSGACSEGFQAGFRQSSRRASLLSLSASDLDVTLTRIDGGELRDYTSPLFSSLSGKCQGRIVLAQQATCFQPQIHQELYIGRWQKVTMLRSASGTTPAMKMYSNLPIYFQKGEISFGVGYEPSFADISYAFQVALRKVNLSTRASCSGLAVQLPKKERSLPWWDDMRYYLHGKIILYFNETKWKFLATTNPYEHVDKLQIVSEYMEIQQTDGRVDVSAKEFKIYISSVESITKNRRIKVPSRVPRPFIYAPLFSLNVVIDWQCESRNPLNHYLHALPVEGEPRKKVYDPFRSTYLSLRWNFSLRPLQSQYGNGPPPPFYGNNSMLRGIMSGSPCKMTDDDFPTMNLGAHDLAWVFKWWSLNYSPPHKLRSFSRWRRFGIPRATRSGNLSLDKVLVEFFFRVDATPCCIRHAPLSEDDDPAFGLTFKMSNLKYELCYSRGKQQYTFDCKRESLDLVYRGLDLHRPEVYLMRDNNLSSVENVSKVRTMVQQSHGKFVHDRCNMGNFQEKHEDGFLLSSDYITIRRQTRKADPERLMGWQDTGRSHEITYVRSEFEDDSESDHTLSEPSDDDDDFNVVLADNCQRVFVYGLRILWTIENRDAVWSWVGGISKAFEPPKPSPSRQYAQRKMIEERNAEGSKVPQDSSSSIHVGSPSVQHLDASGSSSSLHSKANRSSDVAVNHDIFDDSDKGGTAQYMVNVITPQFNLHSEEANGRFLLAAASGRVLARSFHSVVHLGKEILEQALGTSSAQILELQPEMTWNKSELSVMLKDVQAHVAPTDVDPGAGLQWLPKVLGSSEKLKRTG

SEQ ID NO: 162253 - protein, 2160 aa, Zea Mays
MLSRLMPWMRLHSLRTKGMKLSKRNSNQEISQKKEMKPILWTCTVAAPEMTVLLYSLNGLVLYHACSQSSHLFANNIASKGIQIHTELGELLVHMEEEYRELLKENIFGVDTYSGSLMHIARMSLDWGYRESDVQDMVETSRNALVFSIDISDMEVKFGFKHLESIVLNLMSFRTLFKSLQLSGGSAKEKNLERKGEKKMKGVKKLKLSLQKFSITYCGDANIISMPIADPKRVNYGSQGGQVIVSVSADGTPRRASITSVLPDCHLRFSASLVISHLSMCIDKERKTTEAELERVKAIYEELPEDRSGVRVTLLDMQNAKIVRRSSGHAEVAVCSLFSATDIYLRWEPDAHLALYETFIRFKHFLHHNVSQNSEKMINTEVASTKSNEHGNITAGFINSQKSNRKGSIFAIDVDMLRVSAELADGVEANMHVQSIFTENAKIGVLSEGLSLTFNGARVLKSTRIQISCIPFSTGSLLDAKIEPSSKRDWVVQGLDVHICMPYRLPLRAIEDAVEDMFRALKLVSSAKRSIICPDEKEKSRKVNSGGSKFGSVKFVLRKLTADIEEEPIQGWLDEHYHLMRNKICELGVRLNYLEEAISGSVDPSNHSSERKVLYNGVEVDIHDTTALQKLQEEIHKQAFRSYYVSCQNMVLAEGSGACSEGFQAGFRQSSRRASLLSLSASDLDVTLTRIDGGELRDYTSPLFSSLSGKCQGRIVLAQQATCFQPQIHQELYIGRWQKVTMLRSASGTTPAMKMYSNLPIYFQKGEISFGVGYEPSFADISYAFQVALRKVNLSTRASCSGLAVQLPKKERSLPWWDDMRYYLHGKIILYFNETKWKFLATTNPYEHVDKLQIVSEYMEIQQTDGRVDVSAKEFKIYISSVESITKNRRIKVPSRVPRPFIYAPLFSLNVVIDWQCESRNPLNHYLHALPVEGEPRKKVYDPFRSTYLSLRWNFSLRPLQSQYGNGPPPPFYGNNSMLRGIMSGSPCKMTDDDFPTMNLGAHDLAWVFKWWSLNYSPPHKLRSFSRWRRFGIPRATRSGNLSLDKVLVEFFFRVDATPCCIRHAPLSEDDDPAFGLTFKMSNLKYELCYSRGKQQYTFDCKRESLDLVYRGLDLHRPEVYLMRDNNLSSVENVSKVRTMVQQSHGKFVHDRCNMGNFQEKHEDGFLLSSDYITIRRQTRKADPERLMGWQDTGRSHEITYVRSEFEDDSESDHTLSEPSDDDDDFNVVLADNCQRVFVYGLRILWTIENRDAVWSWVGGISKAFEPPKPSPSRQYAQRKMIEERNAEGSKVPQDSSSSIHVGSPSVQHLDASGSSSSLHSKANRSSDVAVNHDIFDDSDKGGTAQYMVNVITPQFNLHSEEANGRFLLAAASGRVLARSFHSVVHLGKEILEQALGTSSAQILELQPEMTWNKSELSVMLKDVQAHVAPTDVDPGAGLQWLPKVLGSSEKLKRTGALLERVFMPCQMYFRYTRHKGGTADLRVKPLKELRFNSPDITATMTSRQFQVMFDVLRNLLFARLPKPRKNSLQYPSDDEDIEEEADEVVPDGVEEVELAKITLEQREREIKLLLDDIRSLTGNGDNGTDHCHSAEKGDCLWMINSGKASLVEGLKRDFANLQKSRIFASSALRKALSNASQSHLEKEKNKTTSCAMRISMKISKVVWSMLADGNTFAEAEINDMVYDFDRDYKDIGIALFTTKYFVVRNCMVNAKCDTLLSAWNTPPGKINMLRVDAKQGAPKDGSSPLELFQVEIYPLRIYLSEAMYRMMWDYFFPEEDDSQRRQEVWRVSTSTGPRRTRRLSSGVDAVTSSSYSVRDHELPGKSSTTVSTSTNVSSWQGILSDNSQVSKFQSIKANMVCGSHQELHRSSSFERNWEESAAESVASNDVVSLLNSSIVSSKVDASNSVLENPVVGSEMWRSKTKDSKPAKSGRLSHEEKKLGKSNDEKKTKPRKSMEFHNIKIGKVELLVTYEGSRLAINDLRLLMDTFHKAEFTGTWRRLFSRVKKGKKFSNHRETLEGSIPENDLNLSDSDVGQPGRHDQLTASWLKRPGDGAGDGFVTSIRGLFNTQRRKAKAFVIRTMRGEGHNDEYQDEWSESDGEYPFARQLTITKAKKLIRRKFRPRVQKNPGLSMQDSLPSSPRETTPYQSDSSRSSYEDFHEQ

SEQ ID NO: 162254 - protein, 2174 aa, Zea Mays
MLSRLMPWMRLHSLRTKGMKLSKRNSNQEISQKKEMKPILWTCTVAAPEMTVLLYSLNGLVLYHACSQSSHLFANNIASKGIQIHTELGELLVHMEEEYRELLKENIFGVDTYSGSLMHIARMSLDWGYRESDVQDMVETSRNALVFSIDISDMEVKFGFKHLESIVLNLMSFRTLFKSLQLSGGSAKEKNLERKGEKKMKGVKKLKLSLQKFSITYCGDANIISMPIADPKRVNYGSQGGQVIVSVSADGTPRRASITSVLPDCHLRFSASLVISHLSMCIDKERKTTEAELERVKAIYEELPEDRSGVRVTLLDMQNAKIVRRSSGHAEVAVCSLFSATDIYLRWEPDAHLALYETFIRFKHFLHHNVSQNSEKMINTEVASTKSNEHGNITAGFINSQKSNRKGSIFAIDVDMLRVSAELADGVEANMHVQSIFTENAKIGVLSEGLSLTFNGARVLKSTRIQISCIPFSTGSLLDAKIEPSSKRDWVVQGLDVHICMPYRLPLRAIEDAVEDMFRALKLVSSAKRSIICPDEKEKSRKVNSGGSKFGSVKFVLRKLTADIEEEPIQGWLDEHYHLMRNKICELGVRLNYLEEAISGSVDPSNHSSERKVLYNGVEVDIHDTTALQKLQEEIHKQAFRSYYVSCQNMVLAEGSGACSEGFQAGFRQSSRRASLLSLSASDLDVTLTRIDGGELRDYTSPLFSSLSGKCQGRIVLAQQATCFQPQIHQELYIGRWQKVTMLRSASGTTPAMKMYSNLPIYFQKGEISFGVGYEPSFADISYAFQVALRKVNLSTRASCSGLAVQLPKKERSLPWWDDMRYYLHGKIILYFNETKWKFLATTNPYEHVDKLQIVSEYMEIQQTDGRVDVSAKEFKIYISSVESITKNRRIKVPSRVPRPFIYAPLFSLNVVIDWQCESRNPLNHYLHALPVEGEPRKKVYDPFRSTYLSLRWNFSLRPLQSQYGNGPPPPFYGNNSMLRGIMSGSPCKMTDDDFPTMNLGAHDLAWVFKWWSLNYSPPHKLRSFSRWRRFGIPRATRSGNLSLDKVLVEFFFRVDATPCCIRHAPLSEDDDPAFGLTFKMSNLKYELCYSRGKQQYTFDCKRESLDLVYRGLDLHRPEVYLMRDNNLSSVENVSKVRTMVQQSHGKFVHDRCNMGNFQEKHEDGFLLSSDYITIRRQTRKADPERLMGWQDTGRSHEITYVRSEFEDDSESDHTLSEPSDDDDDFNVVLADNCQRVFVYGLRILWTIENRDAVWSWVGGISKAFEPPKPSPSRQYAQRKMIEERNAEGSKVPQDSSSSIHVGSPSVQHLDASGSSSSLHSKANRSSDVAVNHDIFDDSDKGGTAQYMVNVITPQFNLHSEEANGRFLLAAASGRVLARSFHSVVHLGKEILEQALGTSSAQILELQPEMTWNKSELSVMLKDVQAHVAPTDVDPGAGLQWLPKVLGSSEKLKRTGALLERVFMPCQMYFRYTRHKGGTADLRVKPLKELRFNSPDITATMTSRQFQVMFDVLRNLLFARLPKPRKNSLQYPSDDEDIEEEADEVVPDGVEEVELAKITLEQREREIKLLLDDIRSLTGNGDNGTDHCHSAEKGDCLWMINSGKASLVEGLKRDFANLQKSRIFASSALRKALSNASQSHLEKEKNKTTSCAMRISMKISKVVWSMLADGNTFAEAEINDMVYDFDRDYKDIGIALFTTKYFVVRNCMVNAKCDTLLSAWNTPPGKINMLRVDAKQGAPKDGSSPLELFQVEIYPLRIYLSEAMYRMMWDYFFPEEDDSQRRQEVWRVSTSTGPRRTRRLSSGVDAVTSSSYSVRDHELPGKSSTTVSTSTNVSSWQGILSDNSQVSKFQSIKANMVCGSHQELHRSSSFERNWEESAAESVASNDVVSLLNSSIVSSKVDASNSVLENPVVGSEMWRSKTKDSKPAKSGRLSHEEKKLGKSNDEKKTKPRKSMEFHNIKIGKVELLVTYEGSRLAINDLRLLMDTFHKAEFTGTWRRLFSRVKKHIIWGVLKSVTGMQGKKFSNHRETLEGSIPENDLNLSDSDVGQPGRHDQLTASWLKRPGDGAGDGFVTSIRGLFNTQRRKAKAFVIRTMRGEGHNDEYQDEWSESDGEYPFARQLTITKAKKLIRRKFRPRVQKNPGLSMQDSLPSSPRETTPYQSDSSRSSYEDFHEQ

SEQ ID NO: 162255 - protein, 1910 aa, Zea Mays
MASSPVKFFSVFLAVSVVGWIVFTFASRLLAWFLSRVFSASVGFRVAGFNCLRDVTIKFCKGSVESVSIGEIKLSFRKSLVKLSFGVISKDPKLQLLINDLEIVTRSSSENKKIRKSAKPRSTGKGKWLVTSSMARLLSVSVTDLIIKVPKGALDIKELTVDTFKIAGPNHTLGVKLHLLPLNILLGDLGLTTDPMGSCSLFDAFQSDQASVSNSEKSLAPFVCEDLLVTCNLGHEKEKGIKIINLELKCGYAIANIDERMFHKKRTIPEYNTVSLNTGDSITDTSALKQTSKSKSILPLLKKHMLTFPDKVSFSVPKLDVKFRHLHEGLSVDNNITGIQFTCAKSLPQDDFEEATPHFDVQIDLSEIHLIREGSSSLLEVLKVFTIASLDVPVDPFLPIRAEIDAKLGGTQCNIMLSRLMPWMRLHSLRTKGMKLSKRNSNQEISQKKEMKPILWTCTVAAPEMTVLLYSLNGLVLYHACSQSSHLFANNIASKGIQIHTELGELLVHMEEEYRELLKENIFGVDTYSGSLMHIARMSLDWGYRESDVQDMVETSRNALVFSIDISDMEVKFGFKHLESIVLNLMSFRTLFKSLQLSGGSAKEKNLERKGEKKMKGVKKLKLSLQKFSITYCGDANIISMPIADPKRVNYGSQGGQVIVSVSADGTPRRASITSVLPDCHLRFSASLVISHLSMCIDKERKTTEAELERVKAIYEELPEDRSGVRVTLLDMQNAKIVRRSSGHAEVAVCSLFSATDIYLRWEPDAHLALYETFIRFKHFLHHNVSQNSEKMINTEVASTKSNEHGNITAGFINSQKSNRKGSIFAIDVDMLRVSAELADGVEANMHVQSIFTENAKIGVLSEGLSLTFNGARVLKSTRIQISCIPFSTGSLLDAKIEPSSKRDWVVQGLDVHICMPYRLPLRAIEDAVEDMFRALKLVSSAKRSIICPDEKEKSRKVNSGGSKFGSVKFVLRKLTADIEEEPIQGWLDEHYHLMRNKICELGVRLNYLEEAISGSVDPSNHSSERKVLYNGVEVDIHDTTALQKLQEEIHKQAFRSYYVSCQNMVLAEGSGACSEGFQAGFRQSSRRASLLSLSASDLDVTLTRIDGGEIEMVEFIKGLDPVCQEQNIPFSRLYGSDVSVVAGSLVVQLRDYTSPLFSSLSGKCQGRIVLAQQATCFQPQIHQELYIGRWQKVTMLRSASGTTPAMKMYSNLPIYFQKGEISFGVGYEPSFADISYAFQVALRKVNLSTRASCSGLAVQLPKKERSLPWWDDMRYYLHGKIILYFNETKWKFLATTNPYEHVDKLQIVSEYMEIQQTDGRVDVSAKEFKIYISSVESITKNRRIKVPSRVPRPFIYAPLFSLNVVIDWQCESRNPLNHYLHALPVEGEPRKKVYDPFRSTYLSLRWNFSLRPLQSQYGNGPPPPFYGNNSMLRGIMSGSPCKMTDDDFPTMNLGAHDLAWVFKWWSLNYSPPHKLRSFSRWRRFGIPRATRSGNLSLDKVLVEFFFRVDATPCCIRHAPLSEDDDPAFGLTFKMSNLKYELCYSRGKQQYTFDCKRESLDLVYRGLDLHRPEVYLMRDNNLSSVENVSKVRTMVQQSHGKFVHDRCNMGNFQEKHEDGFLLSSDYITIRRQTRKADPERLMGWQDTGRSHEITYVRSEFEDDSESDHTLSEPSDDDDDFNVVLADNCQRVFVYGLRILWTIENRDAVWSWVGGISKAFEPPKPSPSRQYAQRKMIEERNAEGSKVPQDSSSSIHVGSPSVQHLDASGSSSSLHSKANRSSDVAVNHDIFDDSDKGGTAQYMVNVITPQFNLHSEEANGRFLLAAASGRVLARSFHSVVHLGKEILEQALGTSSAQILELQPEMTWNKSELSVMLKDVQAHVAPTDVDPGAGLQWLPKVLGSSEKLKRTG

SEQ ID NO: 162256 - protein, 2232 aa, Zea Mays
MSLLTAEIDAKLGGTQCNIMLSRLMPWMRLHSLRTKGMKLSKRNSNQEISQKKEMKPILWTCTVAAPEMTVLLYSLNGLVLYHACSQSSHLFANNIASKGIQIHTELGELLVHMEEEYRELLKENIFGVDTYSGSLMHIARMSLDWGYRESDVQDMVETSRNALVFSIDISDMEVKFGFKHLESIVLNLMSFRTLFKSLQLSGGSAKEKNLERKGEKKMKGVKKLKLSLQKFSITYCGDANIISMPIADPKRVNYGSQGGQVIVSVSADGTPRRASITSVLPDCHLRFSASLVISHLSMCIDKERKTTEAELERVKAIYEELPEDRSGVRVTLLDMQNAKIVRRSSGHAEVAVCSLFSATDIYLRWEPDAHLALYETFIRFKHFLHHNVSQNSEKMINTEVASTKSNEHGNITAGFINSQKSNRKGSIFAIDVDMLRVSAELADGVEANMHVQSIFTENAKIGVLSEGLSLTFNGARVLKSTRIQISCIPFSTGSLLDAKIEPSSKRDWVVQGLDVHICMPYRLPLRAIEDAVEDMFRALKLVSSAKRSIICPDEKEKSRKVNSGGSKFGSVKFVLRKLTADIEEEPIQGWLDEHYHLMRNKICELGVRLNYLEEAISGSVDPSNHSSERKVLYNGVEVDIHDTTALQKLQEEIHKQAFRSYYVSCQNMVLAEGSGACSEGFQAGFRQSSRRASLLSLSASDLDVTLTRIDGGEIEMVEFIKGLDPVCQEQNIPFSRLYGSDVSVVAGSLVVQLRDYTSPLFSSLSGKCQGRIVLAQQATCFQPQIHQELYIGRWQKVTMLRSASGTTPAMKMYSNLPIYFQKGEISFGVGYEPSFADISYAFQVALRKVNLSTRASCSGLAVQLPKKERSLPWWDDMRYYLHGKIILYFNETKWKFLATTNPYEHVDKLQIVSEYMEIQQTDGRVDVSAKEFKIYISSVESITKNRRIKVPSRVPRPFIYAPLFSLNVVIDWQCESRNPLNHYLHALPVEGEPRKKVYDPFRSTYLSLRWNFSLRPLQSQYGNGPPPPFYGNNSMLRGIMSGSPCKMTDDDFPTMNLGAHDLAWVFKWWSLNYSPPHKLRSFSRWRRFGIPRATRSGNLSLDKVLVEFFFRVDATPCCIRHAPLSEDDDPAFGLTFKMSNLKYELCYSRGKQQYTFDCKRESLDLVYRGLDLHRPEVYLMRDNNLSSVENVSKVRTMVQQSHGKFVHDRCNMGNFQEKHEDGFLLSSDYITIRRQTRKADPERLMGWQDTGRSHEITYVRSEFEDDSESDHTLSEPSDDDDDFNVVLADNCQRVFVYGLRILWTIENRDAVWSWVGGISKAFEPPKPSPSRQYAQRKMIEERNAEGSKVPQDSSSSIHVGSPSVQHLDASGSSSSLHSKANRSSDVAVNHDIFDDSDKGGTAQYMVNVITPQFNLHSEEANGRFLLAAASGRVLARSFHSVVHLGKEILEQALGTSSAQILELQPEMTWNKSELSVMLKDVQAHVAPTDVDPGAGLQWLPKVLGSSEKLKRTGALLERVFMPCQMYFRYTRHKGGTADLRVKPLKELRFNSPDITATMTSRQFQVMFDVLRNLLFARLPKPRKNSLQYPSDDEDIEEEADEVVPDGVEEVELAKITLEQREREIKLLLDDIRSLTGNGDNGTDHCHSAEKGDCLWMINSGKASLVEGLKRDFANLQKSRIFASSALRKALSNASQSHLEKEKNKTTSCAMRISMKISKVVWSMLADGNTFAEAEINDMVYDFDRDYKDIGIALFTTKYFVVRNCMVNAKCDTLLSAWNTPPGKINMLRVDAKQGAPKDGSSPLELFQVEIYPLRIYLSEAMYRMMWDYFFPEEDDSQRRQEVWRVSTSTGPRRTRRLSSGVDAVTSSSYSVRDHELPGKSSTTVSTSTNVSSWQGILSDNSQVSKFQSIKANMVCGSHQELHRSSSFERNWEESAAESVASNDVVSLLNSSIVSSKVDASNSVLENPVVGSEMWRSKTKDSKPAKSGRLSHEEKKLGKSNDEKKTKPRKSMEFHNIKIGKVELLVTYEGSRLAINDLRLLMDTFHKAEFTGTWRRLFSRVKKHIIWGVLKSVTGMQGKKFSNHRETLEGSIPENDLNLSDSDVGQPGRHDQLTASWLKRPGDGAGDGFVTSIRGLFNTQRRKAKAFVIRTMRGEGHNDEYQDEWSESDGEYPFARQLTITKAKKLIRRKFRPRVQKNPGLSMQDSLPSSPRETTPYQSDSSRSSYEDFHEQ

SEQ ID NO: 162257 - protein, 1530 aa, Zea Mays
MASSPVKFFSVFLAVSVVGWIVFTFASRLLAWFLSRVFSASVGFRVAGFNCLRDVTIKFCKGSVESVSIGEIKLSFRKSLVKLSFGVISKDPKLQLLINDLEIVTRSSSENKKIRKSAKPRSTGKGKWLVTSSMARLLSVSVTDLIIKVPKGALDIKELTVDTFKIAGPNHTLGVKLHLLPLNILLGDLGLTTDPMGSCSLFDAFQSDQASVSNSEKSLAPFVCEDLLVTCNLGHEKEKGIKIINLELKCGYAIANIDERMFHKKRTIPEYNTVSLNTGDSITDTSALKQTSKSKSILPLLKKHMLTFPDKVSFSVPKLDVKFRHLHEGLSVDNNITGIQFTCAKSLPQDDFEEATPHFDVQIDLSEIHLIREGSSSLLEVLKVFTIASLDVPVDPFLPIRAEIDAKLGGTQCNIMLSRLMPWMRLHSLRTKGMKLSKRNSNQEISQKKEMKPILWTCTVAAPEMTVLLYSLNGLVLYHACSQSSHLFANNIASKGIQIHTELGELLVHMEEEYRELLKENIFGVDTYSGSLMHIARMSLDWGYRESDVQDMVETSRNALVFSIDISDMEVKFGFKHLESIVLNLMSFRTLFKSLQLSGGSAKEKNLERKGEKKMKGVKKLKLSLQKFSITYCGDANIISMPIADPKRVNYGSQGGQVIVSVSADGTPRRASITSVLPDCHLRFSASLVISHLSMCIDKERKTTEAELERVKAIYEELPEDRSGVRVTLLDMQNAKIVRRSSGHAEVAVCSLFSATDIYLRWEPDAHLALYETFIRFKHFLHHNVSQNSEKMINTEVASTKSNEHGNITAGFINSQKSNRKGSIFAIDVDMLRVSAELADGVEANMHVQSIFTENAKIGVLSEGLSLTFNGARVLKSTRIQISCIPFSTGSLLDAKIEPSSKRDWVVQGLDVHICMPYRLPLRAIEDAVEDMFRALKLVSSAKRSIICPDEKEKSRKVNSGGSKFGSVKFVLRKLTADIEEEPIQGWLDEHYHLMRNKICELGVRLNYLEEAISGSVDPSNHSSERKVLYNGVEVDIHDTTALQKLQEEIHKQAFRSYYVSCQNMVLAEGSGACSEGFQAGFRQSSRRASLLSLSASDLDVTLTRIDGGELRDYTSPLFSSLSGKCQGRIVLAQQATCFQPQIHQELYIGRWQKVTMLRSASGTTPAMKMYSNLPIYFQKGEISFGVGYEPSFADISYAFQVALRKVNLSTRASCSGLAVQLPKKERSLPWWDDMRYYLHGKIILYFNETKWKFLATTNPYEHVDKLQIVSEYMEIQQTDGRVDVSAKEFKIYISSVESITKNRRIKVPSRVPRPFIYAPLFSLNVVIDWQCESRNPLNHYLHALPVEGEPRKKVYDPFRSTYLSLRWNFSLRPLQSQYGNGPPPPFYGNNSMLRGIMSGSPCKMTDDDFPTMNLGAHDLAWVFKWWSLNYSPPHKLRSFSRWRRFGIPRATRSGNLSLDKVLVEFFFRVDATPCCIRHAPLSEDDDPAFGLTFKMSNLKYELCYSRDATWVISKKSMRMASSCLQIISR

SEQ ID NO: 162258 - protein, 124 aa, Zea Mays
MPVAPPPTSRCRGSISPARSTCPPMGPPLAGLYLSYNTLWRHPVGAGCGSRRWRQDRAQAGLHHRRPATTPDAQPHSYHPRHLCLHHPRQILHAHWSHPHPPVPRRIQHRHRPRHARNNLANLS

SEQ ID NO: 162259 - protein, 142 aa, Zea Mays
MPVAPPPTSRCRGSISPARSTCPPMGPPLAGLYLSYNTLWRHPVGAGCGSRRWRQDRAQAGLHHRRPATTPDAQPHSYHPRHLCLHHPRQILHAHWSHPHPPVPRRIQHRHRPRHARNNLDTLTVCWCVWRKSLTEAEERNQ

SEQ ID NO: 162260 - protein, 559 aa, Zea Mays
MLNSRCGTGLSTMPGMSGTARCRSSPGWISSGTSTSTWRSCLVQLPMRARCSSAGCLGDPTQPAGILTSSLSCEFEERCREVERARAIYKYALDRVPKGRAEELYRKFLAFEKQFGDREGIEDAIVGKRRFQYEDEVRKNPLNYDSWFDYIRLEESVGNKDRIREVYERAIANVPPAEEKRYWQRYIYLWINYALYEELDAQDRERTREVYKECLRLIPHKKFTFAKMWLMAAQFEIRQRNLKAARQILGNAIGMAPKGKIFKKYIEIELYLGNFDRCRTLYEKYIEWSPANCYAWRKYAELEKNLSETDRARSIYELAIAQPALDTPEVLWKPKFNSSLGIGSILIEHESIESDNVLFRHEKLSLLLWAADDCEGLRVTAREYLQFEIDENEFERTRQLYERLLDRTKHLKVWISYAEFEASAGLGGEDGEDKEKKNEVSYQEQQMERVQKCRAVFERAFDYFRTSAPELKEERAMLLEEWLNKEVNFGDLGDVSLVQKKAPRKVKRKRPIPTEDGSTIAYEEYIDYIFPDEVALAPNLKILEAAYKWKKQKTGDGDE

SEQ ID NO: 162261 - protein, 53 aa, Zea Mays
MLYFLWTWKACLCIKVKYLESAANWKASKTLFSSQHPRQCSFHFNPTITPFLS

SEQ ID NO: 162262 - protein, 177 aa, Zea Mays
MLSREKANKPTDDESLLLSSTKNSQPTLSLLTQLKQQNKPDKLGPTPENEPNSDTMLKAWGGSHHKSISSTQRHDAESLQSVLQNFSLAQNDRLESEKNRYSDSVLVSSAFYSADGPQTTCLTPNMTQVQQDCISSSWEMPQGGPLGEILTNSKISEDLSKCGSRSYGWLLNLDHAP

SEQ ID NO: 162263 - protein, 367 aa, Zea Mays
MSAEFCAAAAGAVAMELGVGDVMGLQQGIAAATGPSSGDSDLGLLKRAGLAQAATSYPSPFLDQQKMLRFSKAAAAHTSPSVSWRPLYQGYANADSDPEPGRCRRTDGKKWRCSKEAMPDHKYCERHINRNRHRSRKPVENQPRKATKEVTTAAAGSLPCAGPQGSLKKAKVNDSKPGTGSYWTDSLNRTMLSREKANKPTDDESLLLSSTKNSQPTLSLLTQLKQQNKPDKLGPTPENEPNSDTMLKAWGGSHHKSISSTQRHDAESLQSVLQNFSLAQNDRLESEKNRYSDSVLVSSAFYSADGPQTTCLTPNMTQVQQDCISSSWEMPQGGPLGEILTNSKISEDLSKCGSRSYGWLLNLDHAP

SEQ ID NO: 162264 - protein, 172 aa, Zea Mays
MACVTLVKNLLSVSADDEVPIKSVTIRKIPRVLEEMPLYDILNEFQKGHSHMAVVIRKNNPSYQPAEQAANDGGTFEVSIAIDDKNNEKVVKNLPPPLQRWKSYPNTQNTSNRGNRPKKWSKDQADVLQVHKEPLPTLSEDEEAVGIITMEDVIEELLQEEIYDETDVHEEQ

SEQ ID NO: 162265 - protein, 213 aa, Zea Mays
MTPLCQTFAIDINAKLDRNLMQEVLEKGHSRVPVYYEKKTNIIGLILVKNLLSVSADDEVPIKSVTIRKIPRVLEEMPLYDILNEFQKGHSHMAVVIRKNNPSYQPAEQAANDGGTFEVSIAIDDKNNEKVVKNLPPPLQRWKSYPNTQNTSNRGNRPKKWSKDQADVLQVHKEPLPTLSEDEEAVGIITMEDVIEELLQEEIYDETDVHEEQ

SEQ ID NO: 162266 - protein, 73 aa, Zea Mays
MKELTLSRNEPSVLKKKSTTQTNQGRSILCRYLCQFSLDPSVFNYMSVKYCLLVKTEHLQAKINTKNIWPRVV

SEQ ID NO: 162267 - protein, 105 aa, Zea Mays
MAGIFGAIHSPAAACLFSPRRPPSLRPLSPLPSIFSLISRRLHPTSLSTLVMAASNGAAAVDETVAATDSVQEPPQKISKISPLLKVEDLDATVRGDGGFGSTGV

SEQ ID NO: 162268 - protein, 125 aa, Zea Mays
MGAAARKPAAALLPIWLCLVCVSSTAAPAQPKAGGWCVARDGASDAELQADLDYACSQVGVDCGAIQPGGACFEPNTVHAHAAYAMNQLYQAAGRQPWNCDFRASATLTSENPSYGACVYTGGGQ

SEQ ID NO: 162269 - protein, 470 aa, Zea Mays
MPEVSELHPVPDAHVPVLGFKINGVSIDLLYANLAHAVIPEDLDLSQDSILHNVDEQTVRSLNGCRVTDQILRLVPNILSFRTTLRFIRCWGKRRGVYSNVMGFLGGINWAILVGRICQLYPNASPSMLISRFFRVYSKWKWPNPVMLCHIEEGYLGLPVWDPRRNYRDRGHQMPIITPAYPCMNSSYNVSVSTRYVMVQEFTQAFEICQAIDEGKADWDALFEPYPFFESYKNYLEVNITARNEDDLRNWKGWVESRLRTLVLKIERYSHEMILAHPYPKDFSDKSRPLHIFYFMGLWRKQTTQAQETEQFDIRGIVNEFKNTICAYQHRKEGMDIEVSHVKRKEIPLFVFPGGVRPSRTSRTTHKNSRAIPTRDVSADDQVGNLLGVASCSDAQHVPCKGSYMKQPEPDFAGGFQLPGSISLLPPSLPNKVVLNGSANFHAESIESEHPEHYQEIQKGNVQAVLQTTC

SEQ ID NO: 162270 - protein, 595 aa, Zea Mays
MSKVKNNNGYHGVTEPISLSGPTEKDLMQTAEVEKYLSDAGLYERQDEAILREEVLGKLDQTVKAWIKKATRISGYGEQFVHEANAKIFTFGSYRLGVHGPGADIDTLCVGPRHATRNEYFFRWLHDILAEMPEVSELHPVPDAHVPVLGFKINGVSIDLLYANLAHAVIPEDSILHNVDEQTVRSLNGCRVTDQILRLVPNILSFRTTLRFIRCWGKRRGVYSNVMGFLGGINWAILVGRICQLYPNASPSMLISRFFRVYSKWKWPNPVMLCHIEEGYLGLPVWDPRRNYRDRGHQMPIITPAYPCMNSSYNVSVSTRYVMVQEFTQAFEICQAIDEGKADWDALFEPYPFFESYKNYLEVNITARNEDDLRNWKGWVESRLRTLVLKIERYSHEMILAHPYPKDFSDKSRPLHIFYFMGLWRKQTTQAQETEQFDIRGIVNEFKNTICAYQHRKEGMDIEVSHVKRKEIPLFVFPGGVRPSRTSRTTHKNSRAIPTRDVSADDQVGNLLGVASCSDAQHVPCKGSYMKQPEPDFAGGFQLPGSISLLPPSLPNKVVLNGSANFHAESIESEHPEHYQEIQKGNVQAVLQTTC

SEQ ID NO: 162271 - protein, 342 aa, Zea Mays
MILAHPYPKDFSDKSRPLHIFYFMGLWRKQTTQAQETEQFDIRGIVNEFKNTICAYQHRKEGMDIEVSHVKRKEIPLFVFPGGVRPSRTSRTTHKNSRAIPTRDVSADDQVGNLLGVASCSDAQHVPCKGSYMKQPEPDFAGGFQLPGSISLLPPSLPNKVVLNGSANFHAESIESEHPEHYQESKFVAVQNTVCLVVKQPNSLLPNSNNNSQLYGSDSSLNSSKRECAGSAANNLLKLSPAIPATPDELDELISYQTNQKDVNAENNLEIGSENNLEQICSLRPQESNNNLKRKANQELEPLELAVPSTGAAPQSTGTAPRKPLRLRLTTLGKPKPAEGTS

SEQ ID NO: 162272 - protein, 361 aa, Zea Mays
MSKVKNNNGYHGVTEPISLSGPTEKDLMQTAEVEKYLSDAGLYERQDEAILREEVLGKLDQTVKAWIKKATRISGYGEQFVHEANAKIFTFGSYRLGVHGPGADIDTLCVGPRHATRNEYFFRWLHDILAEMPEVSELHPVPDAHVPVLGFKINGVSIDLLYANLAHAVIPEDLDLSQDSILHNVDEQTVRSLNGCRVTDQILRLVPNILSFRTTLRFIRCWGKRRGVYSNVMGFLGGINWAILVGRICQLYPNASPSMLISRFFRVYSKWKWPNPVMLCHIEEGYLGLPVWDPRRNYRDRGHQMPIITPAYPCMNSSYNVSVSTRYVMVQEFTQAFEICQVPHILSDLFYFNPQITNRKK

SEQ ID NO: 162273 - protein, 342 aa, Zea Mays
MMDPHSLVDRRFSVCDRISFGSRPSDVDTSMRCGGSSDDENIDEESPSGIFFPPMPCAYGAPLCTGSRYCLVASKQMVGIFLMVWVRSDIREHVKNLKVSCVGRGLMGYLGNKGSISISMSLHQTSFCFVCTHLTSGQKDGDQLRRNADVVEILRKTRFPHVHGAGDRKSPETILDHDRIIWLGDLNYRIALSYRSVKALVEMHSWKQLLEKDQLRIEQRFGRVFAGWKEGRIYFPPTYKYSYNSDRYAGDDMHPNEKRRTPAWCDRILWYGRGLSQLCYVRGESRFSDHRPVYSIFTAEVEIPSQSAAHFGGITRSASLLGLDELPPYQTYPRSYMDINFY

SEQ ID NO: 162274 - protein, 202 aa, Zea Mays
MSPHALAQKKRNKKRGRQPYPQPRTAPQSLAHHGRCLSFASPPRDPDPDSLHSPRRPPPQRPAVALAIGGTHRRRAAAAGVQGDDRARRRVAGGGGGGGRDDPVPRAGRGPGRAARLQARRVHDVPGAAGLRDGGPERRHAQRRRRRAGVRAALRRVPALRLHHPRHPRGRAAQGPARHRRRLTDAPPMTSGPASRHQPPAV

SEQ ID NO: 162275 - protein, 210 aa, Zea Mays
MAEPGLEDSQPVDLSKHPSGIVPTLQNIVSTVNLDCKLDLKAIALQARNAEYNPKRFAAVIMRIREPKTTALIFASGKMVCTGAKSEQQSKLAARKYARIIQKLGFPAKFKDFKIQNIVGSCDVKFPIRLEGLAYSHGAFSSYEPELFPGLIYRMKQPKIVLLIFVSGKIVLTGAKVREETYTAFENIYPVLAEFRKVQQCVNLSANKSR

SEQ ID NO: 162276 - protein, 139 aa, Zea Mays
MRIREPKTTALIFASGKMVCTGAKSEQQSKLAARKYARIIQKLGFPAKFKDFKIQNIVGSCDVKFPIRLEGLAYSHGAFSSYEPELFPGLIYRMKQPKIVLLIFVSGKIVLTGAKVREETYTAFENIYPVLAEFRKVQQ

SEQ ID NO: 162277 - protein, 277 aa, Zea Mays
MAEPGLEDSQPVDLSKHPSGIVPTLHGIFLKYADNSVPSNWVDEVIPCGTRRRAIFVSPGASAVGQRALPWGSSVLKAIRGDEMDIDYTTYWDSSDNKRIGVRNIVSTVNLDCKLDLKAIALQARNAEYNPKRFAAVIMRIREPKTTALIFASGKMVCTGAKSEQQSKLAARKYARIIQKLGFPAKFKDFKIQNIVGSCDVKFPIRLEGLAYSHGAFSSYEPELFPGLIYRMKQPKIVLLIFVSGKIVLTGAKVREETYTAFENIYPVLAEFRKVQQ

SEQ ID NO: 162278 - protein, 189 aa, Zea Mays
MEAAPSLRTFSPSSFFSAGPRHCLLLAGPASRRARALPAPPLPRAVASTRAPLVVSSPPPPAASGTTAPAHAKVDRSGRFCSPRAARELALMISYAACLEGTDVVRLFDRRISARREPGFVFDKACLLSYNHMSFGGGPLEVGTEEEAEKLTSQNEKDSANEADVLSAPPKLVYNNFVLRYTFLLAPFH

SEQ ID NO: 162279 - protein, 780 aa, Zea Mays
MDMERGAGSEQGSPDSEMGEGDNDSVGYGAEMEVDAGSGSAPASSASASASVSASAYAARAGAFDGVDPFEGMEFDDEEDAWTFYNVYAHRVGFSTRISVMHRSRRDGSVMSRQFVCAKEGFRTYRGKNEVSRADAADAGDDDSGRGRRTRAVTRVGCKAMIRVKKQDNGRWSVTKLETAHNHPLVPTNQAHCLRPHKPLSECGKHRPFGGHRNGGSLLAIEPPPPPLTPPVPHTSVAQVVPQYFSDGIGNATRVILDYVKRMQAEDPAFFYAMQFVEGRPVGNVFWADARARTTYKDFGDAVVLDDYCKRSKHELPLVAFTGVNHHCQPILFGCAIMAHNNEVSFVWLFETFLLAMSGCHPTSLIMEHDNVLKPAALKVFPLTRLQFCKWHIMNEAHDKLSYLLDAFPSFHDDFINCINMSETINEFEENWKALISKASSQKSEWLDLVYNCRHHWVPVYLRDTFFGDVSLKLQCSSRSSLFEGYISAKTDSQSFIQQYEKALDCCYEKEVKEEFETKYSLPDIKTSSPIEKQGAELYTRSMFLKFQQELICATAYTAEMVKEEGNASIYTVAISEGSEKSVTVQFCSSGSSATCSCRMFEYFGIVCRHILTVFGVRGVSALPSHYFVKRWTKNALDRSLGKNVDEVSREELKEEPRSSAEDGEQSLTWRYNSLCHEALRYAEEGASSLEVYIVAMQALQEAANRVNMAKRGIGQVAPLAVMPIAAQPPESFARNQEITSNKQKKRKKNSSSSRENATSNQLINFNWKSARWSNKIHRG

SEQ ID NO: 162280 - protein, 681 aa, Zea Mays
MDMERGAGSEQGSPDSEMGEGDNDSVGYGAEMEVDAGSGSAPASSASASASVSASAYAARAGAFDGVDPFEGMEFDDEEDAWTFYNVYAHRVGFSTRISVMHRSRRDGSVMSRQFVCAKEGFRTYRGKNEVSRADAADAGDDDSGRGRRTRAVTRVGCKAMIRVKKQDNGRWSVTKLETAHNHPLVPTNQAHCLRPHKPLSECGKHRPFGGHRNGGSLLAIEPPPPPLTPPVPHTSVAQVVPQYFSDGIGNATRVILDYVKRMQAEDPAFFYAMQFVEGRPVGNVFWADARARTTYKDFGDAVVLDDYCKRSKHELPLVAFTGVNHHCQPILFGCAIMAHNNEVSFVWLFETFLLAMSGCHPTSLIMEHDNVLKPAALKVFPLTRLQFCKWHIMNEAHDKLSYLLDAFPSFHDDFINCINMSETINEFEENWKALISKASSQKSEWLDLVYNCRHHWVPVYLRDTFFGDVSLKLQCSSRSSLFEGYISAKTDSQSFIQQYEKALDCCYEKEVKEEFETKYSLPDIKTSSPIEKQGAELYTRSMFLKFQQELICATAYTAEMVKEEGNASIYTVAISEGSEKSVTVQFCSSGSSATCSCRMFEYFGIVCRHILTVFGVRGVSALPSHYFVKRWTKNALDRSLGKNVDEVSREELKEEPRSSAEDGEQSLTWRYNSLCHEALR

SEQ ID NO: 162281 - protein, 736 aa, Zea Mays
MDMERGAGSEQGSPDSEMGEGDNDSVGYGAEMEVDAGSGSAPASSASASASVSASAYAARAGAFDGVDPFEGMEFDDEEDAWTFYNVYAHRVGFSTRISVMHRSRRDGSVMSRQFVCAKEGFRTYRGKNEVSRADAADAGDDDSGRGRRTRAVTRVGCKAMIRVKKQDNGRWSVTKLETAHNHPLVPTNQAHCLRPHKPLSECGKHRPFGGHRNGGSLLAIEPPPPPLTPPVPHTSVAQVVPQYFSDGIGNATRVILDYVKRMQAEDPAFFYAMQFVEGRPVGNVFWADARARTTYKDFGDAVVLDDYCKRSKHELPLVAFTGVNHHCQPILFGCAIMAHNNEFCKWHIMNEAHDKLSYLLDAFPSFHDDFINCINMSETINEFEENWKALISKASSQKSEWLDLVYNCRHHWVPVYLRDTFFGDVSLKLQCSSRSSLFEGYISAKTDSQSFIQQYEKALDCCYEKEVKEEFETKYSLPDIKTSSPIEKQGAELYTRSMFLKFQQELICATAYTAEMVKEEGNASIYTVAISEGSEKSVTVQFCSSGSSATCSCRMFEYFGIVCRHILTVFGVRGVSALPSHYFVKRWTKNALDRSLGKNVDEVSREELKEEPRSSAEDGEQSLTWRYNSLCHEALRYAEEGASSLEVYIVAMQALQEAANRVNMAKRGIGQVAPLAVMPIAAQPPESFARNQEITSNKQKKRKKNSSSSRENATSNQLINFNWKSARWSNKIHRG

SEQ ID NO: 162282 - protein, 778 aa, Zea Mays
MDMERGAGSEQGSPDSEMGEGDNDSVGYGAEMEVDAGSGSAPASSASASASVSASAYAARAGAFDGVDPFEGMEFDDEEDAWTFYNVYAHRVGFSTRISVMHRSRRDGSVMSRQFVCAKEGFRTYRGKNEVSRADAADAGDDDSGRGRRTRAVTRVGCKAMIRVKKQDNGRWSVTKLETAHNHPLVPTNQAHCLRPHKPLSECGKHRPFGGHRNGGSLLAIEPPPPPLTPPVPHTSVAQVVPQYFSDGIGNATRVILDYVKRMQAEDPAFFYAMQFVEGRPVGNVFWADARARTTYKDFGDAVVLDDYCKRSKHELPLVAFTGVNHHCQPILFGCAIMAHNNEVSFVWLFETFLLAMSGCHPTSLIMEHDNVLKPAALKVFPLTRLQFCKWHIMNEAHDKLSYLLDAFPSFHDDFINCINMSETINEFEENWKALISKASSQKSEWLDLVYNCRHHWVPVYLRDTFFGDVSLKLQCSSRSSLFEGYISAKTDSQSFIQQYEKALDCCYEKEVKEEFETKYSLPDIKTSSPIEKQGAELYTRSMFLKFQQELICATAYTAEMVKEEGNASIYTVAISEGSEKSVTVQFCSSGSSATCSCRMFEYFGIVCRHILTVFGVRGVSALPSHYFVKRWTKNALDRSLGKNVDEVSREELKEEPRSSAEDGEQSLTWRYNSLCHEALRYAEEGASSLEVYIVAMQALQEAANRVNMAKRGIGQVAPLAVMPIAAQPPESFARNQEITSNKQKKRKKNSSSSRENATSNQLIVMNYPKLMVTGDAV

SEQ ID NO: 162283 - protein, 131 aa, Zea Mays
MSSSGPLLATGTHHTGRQPEVLWAQRSEKIFLTISLPDAKDVVLKTDPKGLFTFSAVVHGEPFSFTLELFDSILSEGSKTKTKMGLRNIICSIQKEKKGWWKRLLKSEEKHPYIKVDWNKWCDEDEESGMC

SEQ ID NO: 162284 - protein, 63 aa, Zea Mays
MDCWDSDSSTVSQGESWSNVDTNQSYLLALNKVLELMFIFLSNVDWVLLHEQKKTLKVVLVYK

SEQ ID NO: 162285 - protein, 99 aa, Zea Mays
MPANTDCSEDLFQSHEAEMLENAEFWSKSNYSPVEHLECHMEVNMELNEGEQMIDHTEASRYELFSNDLQSKSRTSNLDNEHFPRDASNHANVEATGPP

SEQ ID NO: 162286 - protein, 163 aa, Zea Mays
MAEEPVVGYDGFEAAGDAGAGGAEDNLSMSLGDFMAFLETEPTSPEEGWKEEQQMQPAVNQGCLEMPANTDCSEDLFQSHEEMLENAEFWSKSNYSPVEHLECHMEVNMELNEGEQMIDHTEASRYELFSNDLQSKSRTSNLDNEHFPRDASNHANVEATGPP

SEQ ID NO: 162287 - protein, 164 aa, Zea Mays
MAEEPVVGYDGFEAAGDAGAGGAEDNLSMSLGDFMAFLETEPTSPEEGWKEEQQMQPAVNQGCLEMPANTDCSEDLFQSHEAEMLENAEFWSKSNYSPVEHLECHMEVNMELNEGEQMIDHTEASRYELFSNDLQSKSRTSNLDNEHFPRDASNHANVEATGPP

SEQ ID NO: 162288 - protein, 480 aa, Zea Mays
MDDDHDHDASSPAAGERCPCCSSPSSSPAVPWRRSVKRKLGAEKGEEGGEAGPTARVEAEDECAALREAVAAAQSTASALRAEVEEERLAAASAASEAMAMMLRLQRDKAEVQMELRQFRRFADEKMALDAADIDQLRALLAQRARRLVRLRARLREYRRQFLHLGIPLPEGEDLLFAQTAAEEEEDLLLLEGEDGYADGDGDGDGGYYPQLRCNDGEYYYEDEEEEDAVALDLERRICRLEHDQETPLLEPPLQEDEEEGTHLYTEEALPDLSGHEQGGLYADDMLSVDGVEELSDLHNDDEELPESPTAGRGDRVEASEADGVDSGSDRVYTIDKVHQGESAPIARVMDKYQGEAVEPDIKKLYMRLEALEADRESMRQALVAMRTEKAQLVLLCEIAQHLAKDGVPAGVGPGVHRSPRKRAVGIVERRFTEDKRVALLKTYSVVALFKWVLTLFGKKKKLSQSRWSQYRYVVFMLTH

SEQ ID NO: 162289 - protein, 492 aa, Zea Mays
MDDDHDHDASSPAAGERCPCCSSPSSSPAVPWRRSVKRKLGAEKGEEGGEAGPTARVEAEDECAALREAVAAAQSTASALRAEVEEERLAAASAASEAMAMMLRLQRDKAEVQMELRQFRRFADEKMALDAADIDQLRALLAQRARRLVRLRARLREYRRQFLHLGIPLPEGEDLLFAQTAAEEEEDLLLLEGEDGYADGDGDGDGGYYPQLRCNDGEYYYEDEEEEDAVALDLERRICRLEHDQETPLLEPPLQEDEEEGTHLYTEEALPDLSGHEQGGLYADDMLSVDGVEELSDLHNDDEELPESPTAGRGDRVEASEADGVDSGSDRVYTIDKVHQGESAPIARVMDKYQGEAVEPDIKKLYMRLEALEADRESMRQALVAMRTEKAQLVLLCEIAQHLAKDGVPAGVGPGVHRSPRKRAVGIVERRFTEDKRVALLKTYSVVALFKWVLTLFGKKKKLSQSILLAYQVIMLVCSYSWISAHGSRKPS

SEQ ID NO: 162290 - protein, 435 aa, Zea Mays
MASVPLSSPSQAGLLGPPFPLLPPPFGACLRYRLPRLPTGLSSSVRKGGLLPLPLLVPPRAAGGKDGRAVTKEELEEEEEEFEVTKEGEEVNQETGGGSGATKEAAARGSGRFAADYVSLGVREPVYEVIEVRSNGRMSTKKISRRQLLKSSGLRLRDTRSVDPSLWLMNSMPSLLVREQAILLNLGSLRAIAMYARVLIFNYNSPGGKAFLGLLLSRLNPRNINGGPAMPFQLEVVEAALLSRIQRLEQRLMKIEPHVATLLEVLPNRLTADVLEQLRLSKQALVELGSRAGDLKQMLIDLLDDPHEIRRICIMGRNCTLDRLSDIVECTVPLEKQIAEEEEEEIEMLLENYLQRCESCHGQAERLLNSAREMEDSISVNLSSRRLEVSRVELLLQVGTFCVAIGALIAGIFGMNLKSYLETNAVHFTQTPMKP

SEQ ID NO: 162291 - protein, 264 aa, Zea Mays
MASVPLSSPSQAGLLGPPFPLLPPPFGACLRYRLPRLPTGLSSSVRKGGLLPLPLLVPPRAAGGKDGRAVTKEELEEEEEEFEVTKEGEEVNQETGGGSGATKEAAARGSGRFAADYVSLGVREPVYEVIEVRSNGRMSTKKISRRQLLKSSGLRLRDTRSVDPSLWLMNSMPSLLVREQAILLNLGSLRAIAMYARVLIFNYNSPGGKAFLGLLLSRLNPRNINGGPAMPFQLEVVEAALLSRIQRLEQRLMKIEPHLLTLLL

SEQ ID NO: 162292 - protein, 294 aa, Zea Mays
MASVPLSSPSQAGLLGPPFPLLPPPFGACLRYRLPRLPTGLSSSVRKGGLLPLPLLVPPRAAGGKDGRAVTKEELEEEEEEFEVTKEGEEVNQETGGGSGATKEAAARGSGRFAADYVSLGVREPVYEVIEVRSNGRMSTKKISRRQLLKSSGLRLRDTRSVDPSLWLMNSMPSLLVREQAILLNLGSLRAIAMYARVLIFNYNSPGGKAFLGLLLSRLNPRNINGGPAMPFQLEVVEAALLSRIQRLEQRLMKIEPHCTQWNPNSNVSGYFHLFQIHQPVQIRAANSRSIPFL

SEQ ID NO: 162293 - protein, 151 aa, Zea Mays
MGTECMHACNMCLSSPHPHADRVSFITAPWITNHSGKMDLAKVSRVDSVVRHPIISDHPTASATIGSLRATTPSLINGLGSWHAGRRAHRTCARVRWVVCIHGRMDTMQYSTSTWPPWTRYRRYAPAPSPLVTRQQGLCGCGLCPWLQANM

SEQ ID NO: 162294 - protein, 129 aa, Zea Mays
MQAQEELRSIRAKIAVLEGKMALEIIERNKIIEDKQRRLDKVEKALSELRTVCIMWANPASDVLVVGSFDGWTSQRKLERSENGMFSLNLRLYPGRYEIKFIVDGVWKNDPLRPTVHNNGHENNLLLVT

SEQ ID NO: 162295 - protein, 537 aa, Zea Mays
MPPLVPSLLLPIPALILPAPPRLSRHRCFLPAVSSSSSSSSSPHSREPYRRRRRDTPSQTPTPAPRPSSQPQPPPRRANAATPGARSQEELEAAIYDFMCRSAKPGAFPTREELVAAGRSDLAAAVASSGGWLSLGWSSTAAEGPATTAAPCSSGGGHPDYPPETGVYYRGDLAPVSVEDSEWEDDEEDASPSGRESGTEEASEVRLNAGIEGMLTRLQKDRERARPPPRTSTHDTQGQSDDDAGNSGAPSHTAAGGRHIPRAPENGSVHGSHSQNGTIEGNSTFQGSNDDAWQTWTLGKGDLSHFEAAEVLPIERRKVSRHDDIASVQNDIHRSSNGVAVSDFSSDGVGTGRDEIHSRLQILELDLSAALKTLRSRFDKVLSDLSNSNGATVLDDISDDWEFEETKVMQAQEELRSIRAKIAVLEGKMALEIIERNKIIEDKQRRLDKVEKALSELRTVCIMWANPASDVLVVGSFDGWTSQRKLERSENGMFSLNLRLYPGRYEIKFIVDGVWKNDPLRPTVHNNGHENNLLLVT

SEQ ID NO: 162296 - protein, 530 aa, Zea Mays
MPPLVPSLLLPIPALILPAPPRLSRHRCFLPAVSSSSSSSSSPHSREPYRRRRRDTPSQTPTPAPRPSSQPQPPPRRANAATPGARSQEELEAAIYDFMCRSAKPGAFPTREELVAAGRSDLAAAVASSGGWLSLGWSSTAAEGPATTAAPCSSGGGHPDYPPETGVYYRGDLAPVSVEDSEWEDDEEDASPSGRESGTEEASEVRLNAGIEGMLTRLQKDRERARPPPRTSTHDTQGQSDDDAGNSGAPSHTAAGGRHIPRAPENGSVHGSHSQNGTIEGNSTFQGSNDDAWQTWTLGKGDLSHFEAAEVLPIERRKVSRHDDIASVQNDIHRSSNGVAVSDFSSDGVGTGRDEIHSRLQILELDLSAALKTLRSRFDKVLSDLSNSNGATVLDDISDDWEFEETKVMQAQEELRSIRAKIAVLEGKMALEIIERNKIIEDKQRRLDKVEKALSELRTVCIMWANPASDVLVVGSFDGWTSQRKLERSENGMFSLNLRLYPGRYENAARNRRGGFVCGGKSISSSQGTA

SEQ ID NO: 162297 - protein, 510 aa, Zea Mays
MPPLVPSLLLPIPALILPAPPRLSRHRCFLPAVSSSSSSSSSPHSREPYRRRRRDTPSQTPTPAPRPSSQPQPPPRRANAATPGARSQEELEAAIYDFMCRSAKPGAFPTREELVAAGRSDLAAAVASSGGWLSLGWSSTAAEGPATTAAPCSSGGGHPDYPPETGVYYRGDLAPVSVEDSECEVRLNAGIEGMLTRLQKDRERARPPPRTSTHDTQGQSDDDAGNSGAPSHTAAGGRHIPRAPENGSVHGSHSQNGTIEGNSTFQGSNDDAWQTWTLGKGDLSHFEAAEVLPIERRKVSRHDDIASVQNDIHRSSNGVAVSDFSSDGVGTGRDEIHSRLQILELDLSAALKTLRSRFDKVLSDLSNSNGATVLDDISDDWEFEETKVMQAQEELRSIRAKIAVLEGKMALEIIERNKIIEDKQRRLDKVEKALSELRTVCIMWANPASDVLVVGSFDGWTSQRKLERSENGMFSLNLRLYPGRYENAARNRRGGFVCGGKSISSSQGTA

SEQ ID NO: 162298 - protein, 530 aa, Zea Mays
MPPLVPSLLLPIPALILPAPPRLSRHRCFLPAVSSSSSSSSSPHSREPYRRRRRDTPSQTPTPAPRPSSQPQPPPRRANAATPGARSQEELEAAIYDFMCRSAKPGAFPTREELVAAGRSDLAAAVASSGGWLSLGWSSTAAEGPATTAAPCSSGGGHPDYPPETGVYYRGDLAPVSVEDSEWEDDEEDASPSGRESGTEEASEVRLNAGIEGMLTRLQKDRERARPPPRTSTHDTQGQSDDDAGNSGAPSHTAAGGRHIPRAPENGSVHGSHSQNGTIEGNSTFQGSNDDAWQTWTLGKGDLSHFEAAEVLPIERRKVSRHDDIASVQNDIHRSSNGVAVSDFSSDGVGTGRDEIHSRLQILELDLSAALKTLRSRFDKVLSDLSNSNGATVLDDISDDWEFEETKVMQAQEELRSIRAKIAVLEGKMALEIIERNKIIEDKQRRLDKVEKALSELRTVCIMWANPASDVLVVGSFDGWTSQRKLERSENGMFSLNLRLYPGRYENAARNRRGGFVCGGKSISSSQAGR

SEQ ID NO: 162299 - protein, 474 aa, Zea Mays
MPPLVPSLLLPIPALILPAPPRLSRHRCFLPAVSSSSSSSSSPHSREPYRRRRRDTPSQTPTPAPRPSSQPQPPPRRANAATPGARSQEELEAAIYDFMCRSAKPGAFPTREELVAAGRSDLAAAVASSGGWLSLGWSSTAAEGPATTAAPCSSGGGHPDYPPETGVYYRGDLAPVSVEDSECEVRLNAGIEGMLTRLQKDRERARPPPRTSTHDTQGQSDDDAGNSGAPSHTAAGGRHIPRAPENGSVHGSHSQNGTIEGNSTFQGSNDDAWQTWTLGKGDLSHFEAAEVLPIERRKVSRHDDIASVQNDIHRSSNGVAVSDFSSDGVGTGRDEIHSRLQILELDLSAALKTLRSRFDKVLSDLSNSNGATVLDDISDDWEFEETKVMQAQEELRSIRAKIAVLEGKMALEIIERNKIIEDKQRRLDKVEKALSELRTVCIMWANPASDVLVVGSFDGWTSQQQIQSRWLQRK

SEQ ID NO: 162300 - protein, 494 aa, Zea Mays
MPPLVPSLLLPIPALILPAPPRLSRHRCFLPAVSSSSSSSSSPHSREPYRRRRRDTPSQTPTPAPRPSSQPQPPPRRANAATPGARSQEELEAAIYDFMCRSAKPGAFPTREELVAAGRSDLAAAVASSGGWLSLGWSSTAAEGPATTAAPCSSGGGHPDYPPETGVYYRGDLAPVSVEDSEWEDDEEDASPSGRESGTEEASEVRLNAGIEGMLTRLQKDRERARPPPRTSTHDTQGQSDDDAGNSGAPSHTAAGGRHIPRAPENGSVHGSHSQNGTIEGNSTFQGSNDDAWQTWTLGKGDLSHFEAAEVLPIERRKVSRHDDIASVQNDIHRSSNGVAVSDFSSDGVGTGRDEIHSRLQILELDLSAALKTLRSRFDKVLSDLSNSNGATVLDDISDDWEFEETKVMQAQEELRSIRAKIAVLEGKMALEIIERNKIIEDKQRRLDKVEKALSELRTVCIMWANPASDVLVVGSFDGWTSQQQIQSRWLQRK

SEQ ID NO: 162301 - protein, 471 aa, Zea Mays
MPPLVPSLLLPIPALILPAPPRLSRHRCFLPAVSSSSSSSSSPHSREPYRRRRRDTPSQTPTPAPRPSSQPQPPPRRANAATPGARSQEELEAAIYDFMCRSAKPGAFPTREELVAAGRSDLAAAVASSGGWLSLGWSSTAAEGPATTAAPCSSGGGHPDYPPETGVYYRGDLAPVSVEDSECEVRLNAGIEGMLTRLQKDRERARPPPRTSTHDTQGQSDDDAGNSGAPSHTAAGGRHIPRAPENGSVHGSHSQNGTIEGNSTFQGSNDDAWQTWTLGKGDLSHFEAAEVLPIERRKVSRHDDIASVQNDIHRSSNGVAVSDFSSDGVGTGRDEIHSRLQILELDLSAALKTLRSRFDKVLSDLSNSNGATVLDDISDDWEFEETKVMQAQEELRSIRAKIAVLEGKMALEIIERNKIIEDKQRRLDKVEKALSELRTVCIMWANPASDVLVVGSFDGWTSQKHCRHKDE

SEQ ID NO: 162302 - protein, 75 aa, Zea Mays
MKLIAKKKHEMCFVTYATTSAATPQNVFLKLNRTSRREKKRQIPYLIWPGKFFLELFVSFLNHGVDGDWRGLGGF

SEQ ID NO: 162303 - protein, 608 aa, Zea Mays
MSIVGDIQSLLLTIMCAAVKIILSRKLSCSGTSYQVDHLECSCLIDAAIAFCKLQHLDPTISIKTQVDLIVAVHDLLAEYGLCCAGRDGEGEEGMFLKFAIKHLMALDVKLKSQLNSNGMEEDAVPKDVRAEDSVADEPSVSDNKQNSDDEEESELDEIQSCLDSALDQAFFCLYGLKINPDSCSEDDLAVHKNTSRGDYQTKEQCADVFQYVLPYAKALSKTGLVKLRRVLRAIRKHFPQPPYDLFVNNPIDNFLDGPDSCEKILSEICESNESREAILNVLFPGERGYEAFKKLSTASSEPYSDVYENLYYFIAQAEDISATDKHTGFVLKKEGEEFVEQSANIFKYDLLYNPLRFESWQKLSNLYDEEVDLLLNDGSKHISILDWRTNTDLIRRVEMGRRHSRRCLLMSSLLAKTAPEQSEAHELLALVYYDSLQNVVPFYDQRATLPVKDSSWETFCKNSMKHFEKAFEIKEQWLHAFYLGKLCEKLGHSFSKALSYYNKAMMLNPTAVDPVYRIHASRLKLLYTQGKQNLEAIQVVADYTYNQSTKENVLSMLGSMTKGNSSISTRRDTSLRKDIIEEVKQGTWNGLRKSSRSVSNLLGLPLQ

SEQ ID NO: 162304 - protein, 1791 aa, Zea Mays
MGLLSVSRWAFEQGLVCSPNNWNCMEKLLEVLISIRDEVACLSVANLILNSWPSHHRALHVKKTIECAEPVPFAPRGIDILEPKHAKLIFSNKRKSVDDEICQEIGTKKSKHSATLQLNEAKWLALLDGILSLISANTEKAGEYNCSNTVDRCSISEGSAKGLAYNIIDVVISTDTLKSVETAGGNGNDSHHGEILPYDCKATVKEKDGNSDREHPHERRSTRLERLRSRKSGKDENGSDGKDISHAMTQFLESFILKGPSPVEKAYCSGNADASNPDTHNYTSNEEANDLKQFLCKISKNFGPHHIGYMLLEEMAHLKVPFQDYFVKLIELDKLTRGWAEDRSASCNLFLAELYYDRALCSGSPPTSSELSDSSYHLCKIIESVALELPFNISVREIHSTNLDTESSRTGESSSELIERSHENGHINMLNDQKSKHDSSSNMNCAFWIRFFWLSGCLSLSSDCKEKAYKEFNIALSILKNSNKTKSYGEVILLPHTKLVKSLTTDRILREINLIRLESLLWNNDENINKITHTEFMQLLPPLLLSTKDAYVGNAYGPQRESENVISLELSALDVLISACEKAKPMNIQVYLDSHRRKIQVLTVAAGMVGSVTPLKAKGSSNVEFVEAMNRNRLENVVEAVKDVSRNASKAKDIIDQCDNSDGQDGWSPLMSIVGDIQSLLLTIMCAAVKIILSRKLSCSGTSYQVDHLECSCLIDAAIAFCKLQHLDPTISIKTQVDLIVAVHDLLAEYGLCCAGRDGEGEEGMFLKFAIKHLMALDVKLKSQLNSNGMEEDAVPKDVRAEDSVADEPSVSDNKQNSDDEEESELDEIQSCLDSALDQAFFCLYGLKINPDSCSEDDLAVHKNTSRGDYQTKEQCADVFQYVLPYAKALSKTGLVKLRRVLRAIRKHFPQPPYDLFVNNPIDNFLDGPDSCEKILSEICESNESREAILNVLFPGERGYEAFKKLSTASSEPYSDVYENLYYFIAQAEDISATDKHTGFVLKKEGEEFVEQSANIFKYDLLYNPLRFESWQKLSNLYDEEVDLLLNDGSKHISILDWRTNTDLIRRVEMGRRHSRRCLLMSSLLAKTAPEQSEAHELLALVYYDSLQNVVPFYDQRATLPVKDSSWETFCKNSMKHFEKAFEIKEQWLHAFYLGKLCEKLGHSFSKALSYYNKAMMLNPTAVDPVYRIHASRLKLLYTQGKQNLEAIQVVADYTYNQSTKENVLSMLGSMTKVLQSSSDKTSLDTKEENKFFESDILDKVWHILYDDCLYALGTCVEGELKHFHKARYKLAQGYYRRGEAGDLERAKEELSFCFKSSRSSFTVNMWEIDGTVRKGRRKNPNVGGSRKNLEVSLSESSRKFITCIRKYMILYLNLLEKNTDLWTLEKAYTYLRTDKRFALCLGDIVPVGLGKYILVLTAAIHNPEIRRASGDASVEQLLEKMFTVFMDHANMWADISNIPEVNSPELSESNLYSYIHQYIHLLESDVRLDVLEGLNEKIRKRFKTPKLSNSNFAKICKHASLAWCRCILIKLASITPLPESADATNQPAPLSNGLLLYVDLQPDELLISSPDGPAQFKGLDMNWFETLNRIKNIPVKQTSEDNLETAVTLMKSTYNFYRESPCGTFPSGINLYTVTPSQAPIEGLPPTAAVVETLDLSIPRKLLLWVYTLVHGRYSNISSVVKYCDEMKLRSKRGTPAASASSQVVQPVSHSTVSSQVVSKEKSSQVEPAEAAQNPSDLAATCVPAYQEVGGASASQSAIEAQKATAAASQLTRSGSSRAMENAQDGGERK

SEQ ID NO: 162305 - protein, 1852 aa, Zea Mays
MFSDQHLLQLRFLTLKNLASVFLQQGFEFYDNALHCYLQAVELDSNDSVVWNHLGTLSCSMGLLSVSRWAFEQGLVCSPNNWNCMEKLLEVLISIRDEVACLSVANLILNSWPSHHRALHVKKTIECAEPVPFAPRGIDILEPKHAKLIFSNKRKSVDDEICQEIGTKKSKHSATLQLNEAKWLALLDGILSLISANTEKAGEYNCSNTVDRCSISEGSAKGLAYNIIDVVISTDTLKSVETAGGNGNDSHHGEILPYDCKATVKEKDGNSDREHPHERRSTRLERLRSRKSGKDENGSDGKDISHAMTQFLESFILKGPSPVEKAYCSGNADASNPDTHNYTSNEEANDLKQFLCKISKNFGPHHIGYMLLEEMAHLKVPFQDYFVKLIELDKLTRGWAEDRSASCNLFLAELYYDRALCSGSPPTSSELSDSSYHLCKIIESVALELPFNISVREIHSTNLDTESSRTGESSSELIERSHENGHINMLNDQKSKHDSSSNMNCAFWIRFFWLSGCLSLSSDCKEKAYKEFNIALSILKNSNKTKSYGEVILLPHTKLVKSLTTDRILREINLIRLESLLWNNDENINKITHTEFMQLLPPLLLSTKDAYVGNAYGPQRESENVISLELSALDVLISACEKAKPMNIQVYLDSHRRKIQVLTVAAGMVGSVTPLKAKGSSNVEFVEAMNRNRLENVVEAVKDVSRNASKAKDIIDQCDNSDGQDGWSPLMSIVGDIQSLLLTIMCAAVKIILSRKLSCSGTSYQVDHLECSCLIDAAIAFCKLQHLDPTISIKTQVDLIVAVHDLLAEYGLCCAGRDGEGEEGMFLKFAIKHLMALDVKLKSQLNSNGMEEDAVPKDVRAEDSVADEPSVSDNKQNSDDEEESELDEIQSCLDSALDQAFFCLYGLKINPDSCSEDDLAVHKNTSRGDYQTKEQCADVFQYVLPYAKALSKTGLVKLRRVLRAIRKHFPQPPYDLFVNNPIDNFLDGPDSCEKILSEICESNESREAILNVLFPGERGYEAFKKLSTASSEPYSDVYENLYYFIAQAEDISATDKHTGFVLKKEGEEFVEQSANIFKYDLLYNPLRFESWQKLSNLYDEVEVDLLLNDGSKHISILDWRTNTDLIRRVEMGRRHSRRCLLMSSLLAKTAPEQSEAHELLALVYYDSLQNVVPFYDQRATLPVKDSSWETFCKNSMKHFEKAFEIKEQWLHAFYLGKLCEKLGHSFSKALSYYNKAMMLNPTAVDPVYRIHASRLKLLYTQGKQNLEAIQVVADYTYNQSTKENVLSMLGSMTKVLQSSSDKTSLDTKEENKFFESDILDKVWHILYDDCLYALGTCVEGELKHFHKARYKLAQGYYRRGEAGDLERAKEELSFCFKSSRSSFTVNMWEIDGTVRKGRRKNPNVGGSRKNLEVSLSESSRKFITCIRKYMILYLNLLEKNTDLWTLEKAYTYLRTDKRFALCLGDIVPVGLGKYILVLTAAIHNPEIRRASGDASVEQLLEKMFTVFMDHANMWADISNIPEVNSPELSESNLYSYIHQYIHLLESDVRLDVLEGLNEKIRKRFKTPKLSNSNFAKICKHASLAWCRCILIKLASITPLPESADATNQPAPLSNGLLLYVDLQPDELLISSPDGPAQFKGLDMNWFETLNRIKNIPVKQTSEDNLETAVTLMKSTYNFYRESPCGTFPSGINLYTVTPSQAPIEGLPPTAAVVETLDLSIPRKLLLWVYTLVHGRYSNISSVVKYCDEMKLRSKRGTPAASASSQVVQPVSHSTVSSQVVSKEKSSQVEPAEAAQNPSDLAATCVPAYQEVGGASASQSAIEAQKATAAASQLTRSGSSRAMENAQDGGERK

SEQ ID NO: 162306 - protein, 1404 aa, Zea Mays
MGLLSVSRWAFEQGLVCSPNNWNCMEKLLEVLISIRDEVACLSVANLILNSWPSHHRALHVKKTIECAEPVPFAPRGIDILEPKHAKLIFSNKRKSVDDEICQEIGTKKSKHSATLQLNEAKWLALLDGILSLISANTEKAGEYNCSNTVDRCSISEGSAKGLAYNIIDVVISTDTLKSVETAGGNGNDSHHGEILPYDCKATVKEKDGNSDREHPHERRSTRLERLRSRKSGKDENGSDGKDISHAMTQFLESFILKGPSPVEKAYCSGNADASNPDTHNYTSNEEANDLKQFLCKISKNFGPHHIGYMLLEEMAHLKVPFQDYFVKLIELDKLTRGWAEDRSASCNLFLAELYYDRALCSGSPPTSSELSDSSYHLCKIIESVALELPFNISVREIHSTNLDTESSRTGESSSELIERSHENGHINMLNDQKSKHDSSSNMNCAFWIRFFWLSGCLSLSSDCKEKAYKEFNIALSILKNSNKTKSYGEVILLPHTKLVKSLTTDRILREINLIRLESLLWNNDENINKITHTEFMQLLPPLLLSTKDAYVGNAYGPQRESENVISLELSALDVLISACEKAKPMNIQVYLDSHRRKIQVLTVAAGMVGSVTPLKAKGSSNVEFVEAMNRNRLENVVEAVKDVSRNASKAKDIIDQCDNSDGQDGWSPLMSIVGDIQSLLLTIMCAAVKIILSRKLSCSGTSYQVDHLECSCLIDAAIAFCKLQHLDPTISIKTQVDLIVAVHDLLAEYGLCCAGRDGEGEEGMFLKFAIKHLMALDVKLKSQLNSNGMEEDAVPKDVRAEDSVADEPSVSDNKQNSDDEEESELDEIQSCLDSALDQAFFCLYGLKINPDSCSEDDLAVHKNTSRGDYQTKEQCADVFQYVLPYAKALSKTGLVKLRRVLRAIRKHFPQPPYDLFVNNPIDNFLDGPDSCEKILSEICESNESREAILNVLFPGERGYEAFKKLSTASSEPYSDVYENLYYFIAQAEDISATDKHTGFVLKKEGEEFVEQSANIFKYDLLYNPLRFESWQKLSNLYDEVEVDLLLNDGSKHISILDWRTNTDLIRRVEMGRRHSRRCLLMSSLLAKTAPEQSEAHELLALVYYDSLQNVVPFYDQRATLPVKDSSWETFCKNSMKHFEKAFEIKEQWLHAFYLGKLFDPVYRIHASRLKLLYTQGKQNLEAIQVVADYTYNQSTKENVLSMLGSMTKVLQSSSDKTSLDTKEENKFFESDILDKVWHILYDDCLYALGTCVEGELKHFHKARYKLAQGYYRRGEAGDLERAKEELSFCFKSSRSSFTVNMWEIDGTVRKGRRKNPNVGGSRKNLEVSLSESSRKFITCIRKYMILYLNLLEKNTDLWTLEKAYTYLRTDKRVPPNYTNYARLYFFCTLKNSFSFLFCSLHCV

SEQ ID NO: 162307 - protein, 1767 aa, Zea Mays
MGLLSVSRWAFEQGLVCSPNNWNCMEKLLEVLISIRDEVACLSVANLILNSWPSHHRALHVKKTIECAEPVPFAPRGIDILEPKHAKLIFSNKRKSVDDEICQEIGTKKSKHSATLQLNEAKWLALLDGILSLISANTEKAGEYNCSNTVDRCSISEGSAKGLAYNIIDVVISTDTLKSVETAGGNGNDSHHGEILPYDCKATVKEKDGNSDREHPHERRSTRLERLRSRKSGKDENGSDGKDISHAMTQFLESFILKGPSPVEKAYCSGNADASNPDTHNYTSNEEANDLKQFLCKISKNFGPHHIGYMLLEEMAHLKVPFQDYFVKLIELDKLTRGWAEDRSASCNLFLAELYYDRALCSGSPPTSSELSDSSYHLCKIIESVALELPFNISVREIHSTNLDTESSRTGESSSELIERSHENGHINMLNDQKSKHDSSSNMNCAFWIRFFWLSGCLSLSSDCKEKAYKEFNIALSILKNSNKTKSYGEVILLPHTKLVKSLTTDRILREINLIRLESLLWNNDENINKITHTEFMQLLPPLLLSTKDAYVGNAYGPQRESENVISLELSALDVLISACEKAKPMNIQVYLDSHRRKIQVLTVAAGMVGSVTPLKAKGSSNVEFVEAMNRNRLENVVEAVKDVSRNASKAKDIIDQCDNSDGQDGWSPLMSIVGDIQSLLLTIMCAAVKIILSRKLSCSGTSYQVDHLECSCLIDAAIAFCKLQHLDPTISIKTQVDLIVAVHDLLAEYGLCCAGRDGEGEEGMFLKFAIKHLMALDVKLKSQLNSNGMEEDAVPKDVRAEDSVADEPSVSDNKQNSDDEEESELDEIQSCLDSALDQAFFCLYGLKINPDSCSEDDLAVHKNTSRGDYQTKEQCADVFQYVLPYAKALSKTGLVKLRRVLRAIRKHFPQPPYDLFVNNPIDNFLDGPDSCEKILSEICESNESREAILNVLFPGERGYEAFKKLSTASSEPYSDVYENLYYFIAQAEDISATDKHTGFVLKKEGEEFVEQSANIFKYDLLYNPLRFESWQKLSNLYDEVEVDLLLNDGSKHISILDWRTNTDLIRRVEMGRRHSRRCLLMSSLLAKTAPEQSEAHELLALVYYDSLQNVVPFYDQRATLPVKDSSWETFCKNSMKHFEKAFEIKEQWLHAFYLGKLFDPVYRIHASRLKLLYTQGKQNLEAIQVVADYTYNQSTKENVLSMLGSMTKVLQSSSDKTSLDTKEENKFFESDILDKVWHILYDDCLYALGTCVEGELKHFHKARYKLAQGYYRRGEAGDLERAKEELSFCFKSSRSSFTVNMWEIDGTVRKGRRKNPNVGGSRKNLEVSLSESSRKFITCIRKYMILYLNLLEKNTDLWTLEKAYTYLRTDKRFALCLGDIVPVGLGKYILVLTAAIHNPEIRRASGDASVEQLLEKMFTVFMDHANMWADISNIPEVNSPELSESNLYSYIHQYIHLLESDVRLDVLEGLNEKIRKRFKTPKLSNSNFAKICKHASLAWCRCILIKLASITPLPESADATNQPAPLSNGLLLYVDLQPDELLISSPDGPAQFKGLDMNWFETLNRIKNIPVKQTSEDNLETAVTLMKSTYNFYRESPCGTFPSGINLYTVTPSQAPIEGLPPTAAVVETLDLSIPRKLLLWVYTLVHGRYSNISSVVKYCDEMKLRSKRGTPAASASSQVVQPVSHSTVSSQVVSKEKSSQVEPAEAAQNPSDLAATCVPAYQEVGGASASQSAIEAQKATAAASQLTRSGSSRAMENAQDGGERK

SEQ ID NO: 162308 - protein, 1717 aa, Zea Mays
MGLLSVSRWAFEQGLVCSPNNWNCMEKLLEVLISIRDEVACLSVANLILNSWPSHHRALHVKKTIECAEPVPFAPRGIDILEPKHAKLIFSNKRKSVDDEICQEIGTKKSKHSATLQLNEAKWLALLDGILSLISANTEKAGEYNCSNTVDRCSISEGSAKGLAYNIIDVVISTDTLKSVETAGGNGNDSHHGEILPYDCKATVKEKDGNSDREHPHERRSTRLERLRSRKSGKDENGSDGKDISHAMTQFLESFILKGPSPVEKAYCSGNADASNPDTHNYTSNEEANDLKQFLCKISKNFGPHHIGYMLLEEMAHLKVPFQDYFVKLIELDKLTRGWAEDRSASCNLFLAELYYDRALCSGSPPTSSELSDSSYHLCKIIESVALELPFNISVREIHSTNLDTESSRTGESSSELIERSHENGHINMLNDQKSKHDSSSNMNCAFWIRFFWLSGCLSLSSDCKEKAYKEFNIALSILKNSNKTKSYGEVILLPHTKLVKSLTTDRILREINLIRLESLLWNNDENINKITHTEFMQLLPPLLLSTKDAYVGNAYGPQRESENVISLELSALDVLISACEKAKPMNIQVYLDSHRRKIQVLTVAAGMVGSVTPLKAKGSSNVEFVEAMNRNRLENVVEAVKDVSRNASKAKDIIDQCDNSVDLIVAVHDLLAEYGLCCAGRDGEGEEGMFLKFAIKHLMALDVKLKSQLNSNGMEEDAVPKDVRAEDSVADEPSVSDNKQNSDDEEESELDEIQSCLDSALDQAFFCLYGLKINPDSCSEDDLAVHKNTSRGDYQTKEQCADVFQYVLPYAKALSKTGLVKLRRVLRAIRKHFPQPPYDLFVNNPIDNFLDGPDSCEKILSEICESNESREAILNVLFPGERGYEAFKKLSTASSEPYSDVYENLYYFIAQAEDISATDKHTGFVLKKEGEEFVEQSANIFKYDLLYNPLRFESWQKLSNLYDEVEVDLLLNDGSKHISILDWRTNTDLIRRVEMGRRHSRRCLLMSSLLAKTAPEQSEAHELLALVYYDSLQNVVPFYDQRATLPVKDSSWETFCKNSMKHFEKAFEIKEQWLHAFYLGKLCEKLGHSFSKALSYYNKAMMLNPTAVDPVYRIHASRLKLLYTQGKQNLEAIQVVADYTYNQSTKENVLSMLGSMTKVLQSSSDKTSLDTKEENKFFESDILDKVWHILYDDCLYALGTCVEGELKHFHKARYKLAQGYYRRGEAGDLERAKEELSFCFKSSRSSFTVNMWEIDGTVRKGRRKNPNVGGSRKNLEVSLSESSRKFITCIRKYMILYLNLLEKNTDLWTLEKAYTYLRTDKRFALCLGDIVPVGLGKYILVLTAAIHNPEIRRASGDASVEQLLEKMFTVFMDHANMWADISNIPEVNSPELSESNLYSYIHQYIHLLESDVRLDVLEGLNEKIRKRFKTPKLSNSNFAKICKHASLAWCRCILIKLASITPLPESADATNQPAPLSNGLLLYVDLQPDELLISSPDGPAQFKGLDMNWFETLNRIKNIPVKQTSEDNLETAVTLMKSTYNFYRESPCGTFPSGINLYTVTPSQAPIEGLPPTAAVVETLDLSIPRKLLLWVYTLVHGRYSNISSVVKYCDEMKLRSKRGTPAASASSQVVQPVSHSTVSSQVVSKEKSSQVEPAEAAQNPSDLAATCVPAYQEVGGASASQSAIEAQKATAAASQLTRSGSSRAMENAQDGGERK

SEQ ID NO: 162309 - protein, 1846 aa, Zea Mays
MQPKQLYGNCMEKLLEVLISIRDEVACLSVANLILNSWPSHHRALHVKKTIECAEPVPFAPRGIDILEPKHAKLIFSNKRKSVDDEICQEIGTKKSKHSATLQLNEAKWLALLDGILSLISANTEKAGEYNCSNTVDRCSISEGSAKGLAYNIIDVVISTDTLKSVETAGGNGNDSHHGEILPYDCKATVKEKDGNSDREHPHERRSTRLERLRSRKSGKDENGSDGKDISHAMTQFLESFILKGPSPVEKAYCSGNADASNPDTHNYTSNEEANDLKQFLCKISKNFGPHHIGYMLLEEMAHLKVPFQDYFVKLIELDKLTRGWAEDRSASCNLFLAELYYDRALCSGSPPTSSELSDSSYHLCKIIESVALELPFNISVREIHSTNLDTESSRTGESSSELIERSHENGHINMLNDQKSKHDSSSNMNCAFWIRFFWLSGCLSLSSDCKEKAYKEFNIALSILKNSNKTKSYGEVILLPHTKLVKSLTTDRILREINLIRLESLLWNNDENINKITHTEFMQLLPPLLLSTKDAYVGNAYGPQRESENVISLELSALDVLISACEKAKPMNIQVYLDSHRRKIQVLTVAAGMVGSVTPLKAKGSSNVEFVEAMNRNRLENVVEAVKDVSRNASKAKDIIDQCDNSVPSITIVLIHKYISQGYQVDKSSRVDKASIKRRLSVALALRRAHRARRLARLPPWRKASAAAQCVRCGDGQDGWSPLMSIVGDIQSLLLTIMCAAVKIILSRKLSCSGTSYQVDHLECSCLIDAAIAFCKLQHLDPTISIKTQVDLIVAVHDLLAEYGLCCAGRDGEGEEGMFLKFAIKHLMALDVKLKSQLNSNGMEEDAVPKDVRAEDSVADEPSVSDNKQNSDDEEESELDEIQSCLDSALDQAFFCLYGLKINPDSCSEDDLAVHKNTSRGDYQTKEQCADVFQYVLPYAKALSKTGLVKLRRVLRAIRKHFPQPPYDLFVNNPIDNFLDGPDSCEKILSEICESNESREAILNVLFPGERGYEAFKKLSTASSEPYSDVYENLYYFIAQAEDISATDKHTGFVLKKEGEEFVEQSANIFKYDLLYNPLRFESWQKLSNLYDEVEVDLLLNDGSKHISILDWRTNTDLIRRVEMGRRHSRRCLLMSSLLAKTAPEQSEAHELLALVYYDSLQNVVPFYDQRATLPVKDSSWETFCKNSMKHFEKAFEIKEQWLHAFYLGKLCEKLGHSFSKALSYYNKAMMLNPTAVDPVYRIHASRLKLLYTQGKQNLEAIQVVADYTYNQSTKENVLSMLGSMTKVLQSSSDKTSLDTKEENKFFESDILDKVWHILYDDCLYALGTCVEGELKHFHKARYKLAQGYYRRGEAGDLERAKEELSFCFKSSRSSFTVNMWEIDGTVRKGRRKNPNVGGSRKNLEVSLSESSRKFITCIRKYMILYLNLLEKNTDLWTLEKAYTYLRTDKRFALCLGDIVPVGLGKYILVLTAAIHNPEIRRASGDASVEQLLEKMFTVFMDHANMWADISNIPEVNSPELSESNLYSYIHQYIHLLESDVRLDVLEGLNEKIRKRFKTPKLSNSNFAKICKHASLAWCRCILIKLASITPLPESADATNQPAPLSNGLLLYVDLQPDELLISSPDGPAQFKGLDMNWFETLNRIKNIPVKQTSEDNLETAVTLMKSTYNFYRESPCGTFPSGINLYTVTPSQAPIEGLPPTAAVVETLDLSIPRKLLLWVYTLVHGRYSNISSVVKYCDEMKLRSKRGTPAASASSQVVQPVSHSTVSSQVVSKEKSSQVEPAEAAQNPSDLAATCVPAYQEVGGASASQSAIEAQKATAAASQLTRSGSSRAMENAQDGGERK

SEQ ID NO: 162310 - protein, 1121 aa, Zea Mays
MSIVGDIQSLLLTIMCAAVKIILSRKLSCSGTSYQVDHLECSCLIDAAIAFCKLQHLDPTISIKTQVDLIVAVHDLLAEYGLCCAGRDGEGEEGMFLKFAIKHLMALDVKLKSQLNSNGMEEDAVPKDVRAEDSVADEPSVSDNKQNSDDEEESELDEIQSCLDSALDQAFFCLYGLKINPDSCSEDDLAVHKNTSRGDYQTKEQCADVFQYVLPYAKALSKTGLVKLRRVLRAIRKHFPQPPYDLFVNNPIDNFLDGPDSCEKILSEICESNESREAILNVLFPGERGYEAFKKLSTASSEPYSDVYENLYYFIAQAEDISATDKHTGFVLKKEGEEFVEQSANIFKYDLLYNPLRFESWQKLSNLYDEEVDLLLNDGSKHISILDWRTNTDLIRRVEMGRRHSRRCLLMSSLLAKTAPEQSEAHELLALVYYDSLQNVVPFYDQRATLPVKDSSWETFCKNSMKHFEKAFEIKEQWLHAFYLGKLCEKLGHSFSKALSYYNKAMMLNPTAVDPVYRIHASRLKLLYTQGKQNLEAIQVVADYTYNQSTKENVLSMLGSMTKVLQSSSDKTSLDTKEENKFFESDILDKVWHILYDDCLYALGTCVEGELKHFHKARYKLAQGYYRRGEAGDLERAKEELSFCFKSSRSSFTVNMWEIDGTVRKGRRKNPNVGGSRKNLEVSLSESSRKFITCIRKYMILYLNLLEKNTDLWTLEKAYTYLRTDKRFALCLGDIVPVGLGKYILVLTAAIHNPEIRRASGDASVEQLLEKMFTVFMDHANMWADISNIPEVNSPELSESNLYSYIHQYIHLLESDVRLDVLEGLNEKIRKRFKTPKLSNSNFAKICKHASLAWCRCILIKLASITPLPESADATNQPAPLSNGLLLYVDLQPDELLISSPDGPAQFKGLDMNWFETLNRIKNIPVKQTSEDNLETAVTLMKSTYNFYRESPCGTFPSGINLYTVTPSQAPIEGLPPTAAVVETLDLSIPRKLLLWVYTLVHGRYSNISSVVKYCDEMKLRSKRGTPAASASSQVVQPVSHSTVSSQVVSKEKSSQVEPAEAAQNPSDLAATCVPAYQEVGGASASQSAIEAQKATAAASQLTRSGSSRAMENAQDGGERK

SEQ ID NO: 162311 - protein, 1845 aa, Zea Mays
MQPKQLYGNCMEKLLEVLISIRDEVACLSVANLILNSWPSHHRALHVKKTIECAEPVPFAPRGIDILEPKHAKLIFSNKRKSVDDEICQEIGTKKSKHSATLQLNEAKWLALLDGILSLISANTEKAGEYNCSNTVDRCSISEGSAKGLAYNIIDVVISTDTLKSVETAGGNGNDSHHGEILPYDCKATVKEKDGNSDREHPHERRSTRLERLRSRKSGKDENGSDGKDISHAMTQFLESFILKGPSPVEKAYCSGNADASNPDTHNYTSNEEANDLKQFLCKISKNFGPHHIGYMLLEEMAHLKVPFQDYFVKLIELDKLTRGWAEDRSASCNLFLAELYYDRALCSGSPPTSSELSDSSYHLCKIIESVALELPFNISVREIHSTNLDTESSRTGESSSELIERSHENGHINMLNDQKSKHDSSSNMNCAFWIRFFWLSGCLSLSSDCKEKAYKEFNIALSILKNSNKTKSYGEVILLPHTKLVKSLTTDRILREINLIRLESLLWNNDENINKITHTEFMQLLPPLLLSTKDAYVGNAYGPQRESENVISLELSALDVLISACEKAKPMNIQVYLDSHRRKIQVLTVAAGMVGSVTPLKAKGSSNVEFVEAMNRNRLENVVEAVKDVSRNASKAKDIIDQCDNSVPSITIVLIHKYISQGYQVDKSSRVDKASIKRRLSVALALRRAHRARRLARLPPWRKASAAAQCVRCGDGQDGWSPLMSIVGDIQSLLLTIMCAAVKIILSRKLSCSGTSYQVDHLECSCLIDAAIAFCKLQHLDPTISIKTQVDLIVAVHDLLAEYGLCCAGRDGEGEEGMFLKFAIKHLMALDVKLKSQLNSNGMEEDAVPKDVRAEDSVADEPSVSDNKQNSDDEEESELDEIQSCLDSALDQAFFCLYGLKINPDSCSEDDLAVHKNTSRGDYQTKEQCADVFQYVLPYAKALSKTGLVKLRRVLRAIRKHFPQPPYDLFVNNPIDNFLDGPDSCEKILSEICESNESREAILNVLFPGERGYEAFKKLSTASSEPYSDVYENLYYFIAQAEDISATDKHTGFVLKKEGEEFVEQSANIFKYDLLYNPLRFESWQKLSNLYDEEVDLLLNDGSKHISILDWRTNTDLIRRVEMGRRHSRRCLLMSSLLAKTAPEQSEAHELLALVYYDSLQNVVPFYDQRATLPVKDSSWETFCKNSMKHFEKAFEIKEQWLHAFYLGKLCEKLGHSFSKALSYYNKAMMLNPTAVDPVYRIHASRLKLLYTQGKQNLEAIQVVADYTYNQSTKENVLSMLGSMTKVLQSSSDKTSLDTKEENKFFESDILDKVWHILYDDCLYALGTCVEGELKHFHKARYKLAQGYYRRGEAGDLERAKEELSFCFKSSRSSFTVNMWEIDGTVRKGRRKNPNVGGSRKNLEVSLSESSRKFITCIRKYMILYLNLLEKNTDLWTLEKAYTYLRTDKRFALCLGDIVPVGLGKYILVLTAAIHNPEIRRASGDASVEQLLEKMFTVFMDHANMWADISNIPEVNSPELSESNLYSYIHQYIHLLESDVRLDVLEGLNEKIRKRFKTPKLSNSNFAKICKHASLAWCRCILIKLASITPLPESADATNQPAPLSNGLLLYVDLQPDELLISSPDGPAQFKGLDMNWFETLNRIKNIPVKQTSEDNLETAVTLMKSTYNFYRESPCGTFPSGINLYTVTPSQAPIEGLPPTAAVVETLDLSIPRKLLLWVYTLVHGRYSNISSVVKYCDEMKLRSKRGTPAASASSQVVQPVSHSTVSSQVVSKEKSSQVEPAEAAQNPSDLAATCVPAYQEVGGASASQSAIEAQKATAAASQLTRSGSSRAMENAQDGGERK

SEQ ID NO: 162312 - protein, 1491 aa, Zea Mays
MENCERTIKGFLTLKNLASVFLQQGFEFYDNALHCYLQAVELDSNDSVVWNHLGTLSCSMGLLSVSRWAFEQGLVCSPNNWNCMEKLLEVLISIRDEVACLSVANLILNSWPSHHRALHVKKTIECAEPVPFAPRGIDILEPKHAKLIFSNKRKSVDDEICQEIGTKKSKHSATLQLNEAKWLALLDGILSLISANTEKAGEYNCSNTVDRCSISEGSAKGLAYNIIDVVISTDTLKSVETAGGNGNDSHHGEILPYDCKATVKEKDGNSDREHPHERRSTRLERLRSRKSGKDENGSDGKDISHAMTQFLESFILKGPSPVEKAYCSGNADASNPDTHNYTSNEEANDLKQFLCKISKNFGPHHIGYMLLEEMAHLKVPFQDYFVKLIELDKLTRGWAEDRSASCNLFLAELYYDRALCSGSPPTSSELSDSSYHLCKIIESVALELPFNISVREIHSTNLDTESSRTGESSSELIERSHENGHINMLNDQKSKHDSSSNMNCAFWIRFFWLSGCLSLSSDCKEKAYKEFNIALSILKNSNKTKSYGEVILLPHTKLVKSLTTDRILREINLIRLESLLWNNDENINKITHTEFMQLLPPLLLSTKDAYVGNAYGPQRESENVISLELSALDVLISACEKAKPMNIQVYLDSHRRKIQVLTVAAGMVGSVTPLKAKGSSNVEFVEAMNRNRLENVVEAVKDVSRNASKAKDIIDQCDNSVPSITIVLIHKYISQGYQVDKSSRVDKASIKRRLSVALALRRAHRARRLARLPPWRKASAAAQCVRCGDGQDGWSPLMSIVGDIQSLLLTIMCAAVKIILSRKLSCSGTSYQVDHLECSCLIDAAIAFCKLQHLDPTISIKTQVDLIVAVHDLLAEYGLCCAGRDGEGEEGMFLKFAIKHLMALDVKLKSQLNSNGMEEDAVPKDVRAEDSVADEPSVSDNKQNSDDEEESELDEIQSCLDSALDQAFFCLYGLKINPDSCSEDDLAVHKNTSRGDYQTKEQCADVFQYVLPYAKALSKTGLVKLRRVLRAIRKHFPQPPYDLFVNNPIDNFLDGPDSCEKILSEICESNESREAILNVLFPGERGYEAFKKLSTASSEPYSDVYENLYYFIAQAEDISATDKHTGFVLKKEGEEFVEQSANIFKYDLLYNPLRFESWQKLSNLYDEVEVDLLLNDGSKHISILDWRTNTDLIRRVEMGRRHSRRCLLMSSLLAKTAPEQSEAHELLALVYYDSLQNVVPFYDQRATLPVKDSSWETFCKNSMKHFEKAFEIKEQWLHAFYLGKLCEKLGHSFSKALSYYNKAMMLNPTAVDPVYRIHASRLKLLYTQGKQNLEAIQVVADYTYNQSTKENVLSMLGSMTKVLQSSSDKTSLDTKEENKFFESDILDKVWHILYDDCLYALGTCVEGELKHFHKARYKLAQGYYRRGEAGDLERAKEELSFCFKSSRSSFTVNMWEIDGTVRKGRRKNPNVGGSRKNLEVILFLLVLGSIF

SEQ ID NO: 162313 - protein, 1804 aa, Zea Mays
MENCERTIKGFLTLKNLASVFLQQGFEFYDNALHCYLQAVELDSNDSVVWNHLGTLSCSMGLLSVSRWAFEQGLVCSPNNWNCMEKLLEVLISIRDEVACLSVANLILNSWPSHHRALHVKKTIECAEPVPFAPRGIDILEPKHAKLIFSNKRKSVDDEICQEIGTKKSKHSATLQLNEAKWLALLDGILSLISANTEKAGEYNCSNTVDRCSISEGSAKGLAYNIIDVVISTDTLKSVETAGGNGNDSHHGEILPYDCKATVKEKDGNSDREHPHERRSTRLERLRSRKSGKDENGSDGKDISHAMTQFLESFILKGPSPVEKAYCSGNADASNPDTHNYTSNEEANDLKQFLCKISKNFGPHHIGYMLLEEMAHLKVPFQDYFVKLIELDKLTRGWAEDRSASCNLFLAELYYDRALCSGSPPTSSELSDSSYHLCKIIESVALELPFNISVREIHSTNLDTESSRTGESSSELIERSHENGHINMLNDQKSKHDSSSNMNCAFWIRFFWLSGCLSLSSDCKEKAYKEFNIALSILKNSNKTKSYGEVILLPHTKLVKSLTTDRILREINLIRLESLLWNNDENINKITHTEFMQLLPPLLLSTKDAYVGNAYGPQRESENVISLELSALDVLISACEKAKPMNIQVYLDSHRRKIQVLTVAAGMVGSVTPLKAKGSSNVEFVEAMNRNRLENVVEAVKDVSRNASKAKDIIDQCDNSDGQDGWSPLMSIVGDIQSLLLTIMCAAVKIILSRKLSCSGTSYQVDHLECSCLIDAAIAFCKLQHLDPTISIKTQVDLIVAVHDLLAEYGLCCAGRDGEGEEGMFLKFAIKHLMALDVKLKSQLNSNGMEEDAVPKDVRAEDSVADEPSVSDNKQNSDDEEESELDEIQSCLDSALDQAFFCLYGLKINPDSCSEDDLAVHKNTSRGDYQTKEQCADVFQYVLPYAKALSKTGLVKLRRVLRAIRKHFPQPPYDLFVNNPIDNFLDGPDSCEKILSEICESNESREAILNVLFPGERGYEAFKKLSTASSEPYSDVYENLYYFIAQAEDISATDKHTGFVLKKEGEEFVEQSANIFKYDLLYNPLRFESWQKLSNLYDEEVDLLLNDGSKHISILDWRTNTDLIRRVEMGRRHSRRCLLMSSLLAKTAPEQSEAHELLALVYYDSLQNVVPFYDQRATLPVKDSSWETFCKNSMKHFEKAFEIKEQWLHAFYLGKLCEKLGHSFSKALSYYNKAMMLNPTAVDPVYRIHASRLKLLYTQGKQNLEAIQVVADYTYNQSTKENVLSMLGSMTKVLQSSSDKTSLDTKEENKFFESDILDKVWHILYDDCLYALGTCVEGELKHFHKARYKLAQGYYRRGEAGDLERAKEELSFCFKSSRSSFTVNMWEIDGTVRKGRRKNPNVGGSRKNLEFALCLGDIVPVGLGKYILVLTAAIHNPEIRRASGDASVEQLLEKMFTVFMDHANMWADISNIPEVNSPELSESNLYSYIHQYIHLLESDVRLDVLEGLNEKIRKRFKTPKLSNSNFAKICKHASLAWCRCILIKLASITPLPESADATNQPAPLSNGLLLYVDLQPDELLISSPDGPAQFKGLDMNWFETLNRIKNIPVKQTSEDNLETAVTLMKSTYNFYRESPCGTFPSGINLYTVTPSQAPIEGLPPTAAVVETLDLSIPRKLLLWVYTLVHGRYSNISSVVKYCDEMKLRSKRGTPAASASSQVVQPVSHSTVSSQVVSKEKSSQVEPAEAAQNPSDLAATCVPAYQEVGGASASQSAIEAQKATAAASQLTRSGSSRAMENAQDGGERK

SEQ ID NO: 162314 - protein, 1346 aa, Zea Mays
MENCERTIKGFLTLKNLASVFLQQGFEFYDNALHCYLQAVELDSNDSVVWNHLGTLSCSMGLLSVSRWAFEQGLVCSPNNWNCMEKLLEVLISIRDEVACLSVANLILNSWPSHHRALHVKKTIECAEPVPFAPRGIDILEPKHAKLIFSNKRKSVDDEICQEIGTKKSKHSATLQLNEAKWLALLDGILSLISANTEKAGEYNCSNTVDRCSISEGSAKGLAYNIIDVVISTDTLKSVETAGGNGNDSHHGEILPYDCKATVKEKDGNSDREHPHERRSTRLERLRSRKSGKDENGSDGKDISHAMTQFLESFILKGPSPVEKAYCSGNADASNPDTHNYTSNEEANDLKQFLCKISKNFGPHHIGYMLLEEMAHLKVPFQDYFVKLIELDKLTRGWAEDRSASCNLFLAELYYDRALCSGSPPTSSELSDSSYHLCKIIESVALELPFNISVREIHSTNLDTESSRTGESSSELIERSHENGHINMLNDQKSKHDSSSNMNCAFWIRFFWLSGCLSLSSDCKEKAYKEFNIALSILKNSNKTKSYGEVILLPHTKLVKSLTTDRILREINLIRLESLLWNNDENINKITHTEFMQLLPPLLLSTKDAYVGNAYGPQRESENVISLELSALDVLISACEKAKPMNIQVYLDSHRRKIQVLTVAAGMVGSVTPLKAKGSSNVEFVEAMNRNRLENVVEAVKDVSRNASKAKDIIDQCDNSVPSITIVLIHKYISQGYQVDKSSRVDKASIKRRLSVALALRRAHRARRLARLPPWRKASAAAQCVRCGDGQDGWSPLMSIVGDIQSLLLTIMCAAVKIILSRKLSCSGTSYQVDHLECSCLIDAAIAFCKLQHLDPTISIKTQVDLIVAVHDLLAEYGLCCAGRDGEGEEGMFLKFAIKHLMALDVKLKSQLNSNGMEEDAVPKDVRAEDSVADEPSVSDNKQNSDDEEESELDEIQSCLDSALDQAFFCLYGLKINPDSCSEDDLAVHKNTSRGDYQTKEQCADVFQYVLPYAKALSKTGLVKLRRVLRAIRKHFPQPPYDLFVNNPIDNFLDGPDSCEKILSEICESNESREAILNVLFPGERGYEAFKKLSTASSEPYSDVYENLYYFIAQAEDISATDKHTGFVLKKEGEEFVEQSANIFKYDLLYNPLRFESWQKLSNLYDEVEVDLLLNDGSKHISILDWRTNTDLIRRVEMGRRHSRRCLLMSSLLAKTAPEQSEAHELLALVYYDSLQNVVPFYDQRATLPVKDSSWETFCKNSMKHFEKAFEIKEQWLHAFYLGKLCEKLGHSFSKALSYYNKAMMLNPTAVDPVYRIHASRLKLLYTQGKQNLEAIQDFILDAIVG

SEQ ID NO: 162315 - protein, 1281 aa, Zea Mays
MAAMENCERTIKGFLTLKNLASVFLQQGFEFYDNALHCYLQAVELDSNDSVVWNHLGTLSCSMGLLSVSRWAFEQGLVCSPNNWNCMEKLLEVLISIRDEVACLSVANLILNSWPSHHRALHVKKTIECAEPVPFAPRGIDILEPKHAKLIFSNKRKSVDDEICQEIGTKKSKHSATLQLNEAKWLALLDGILSLISANTEKAGEYNCSNTVDRCSISEGSAKGLAYNIIDVVISTDTLKSVETAGGNGNDSHHGEILPYDCKATVKEKDGNSDREHPHERRSTRLERLRSRKSGKDENGSDGKDISHAMTQFLESFILKGPSPVEKAYCSGNADASNPDTHNYTSNEEANDLKQFLCKISKNFGPHHIGYMLLEEMAHLKVPFQDYFVKLIELDKLTRGWAEDRSASCNLFLAELYYDRALCSGSPPTSSELSDSSYHLCKIIESVALELPFNISVREIHSTNLDTESSRTGESSSELIERSHENGHINMLNDQKSKHDSSSNMNCAFWIRFFWLSGCLSLSSDCKEKAYKEFNIALSILKNSNKTKSYGEVILLPHTKLVKSLTTDRILREINLIRLESLLWNNDENINKITHTEFMQLLPPLLLSTKDAYVGNAYGPQRESENVISLELSALDVLISACEKAKPMNIQVYLDSHRRKIQVLTVAAGMVGSVTPLKAKGSSNVEFVEAMNRNRLENVVEAVKDVSRNASKAKDIIDQCDNSDGQDGWSPLMSIVGDIQSLLLTIMCAAVKIILSRKLSCSGTSYQVDHLECSCLIDAAIAFCKLQHLDPTISIKTQVDLIVAVHDLLAEYGLCCAGRDGEGEEGMFLKFAIKHLMALDVKLKSQLNSNGMEEDAVPKDVRAEDSVADEPSVSDNKQNSDDEEESELDEIQSCLDSALDQAFFCLYGLKINPDSCSEDDLAVHKNTSRGDYQTKEQCADVFQYVLPYAKALSKTGLVKLRRVLRAIRKHFPQPPYDLFVNNPIDNFLDGPDSCEKILSEICESNESREAILNVLFPGERGYEAFKKLSTASSEPYSDVYENLYYFIAQAEDISATDKHTGFVLKKEGEEFVEQSANIFKYDLLYNPLRFESWQKLSNLYDEVEVDLLLNDGSKHISILDWRTNTDLIRRVEMGRRHSRRCLLMSSLLAKTAPEQSEAHELLALVYYDSLQNVVPFYDQRATLPVKDSSWETFCKNSMKHFEKAFEIKEQWLHAFYLGKLCEKLGHSFSKALSYYNKAMMLNPTAVDPVYRIHASRLKLLYTQGKQNLEAIQDFILDAIVG

SEQ ID NO: 162316 - protein, 1827 aa, Zea Mays
MAAMENCERTIKGFLTLKNLASVFLQQGFEFYDNALHCYLQAVELDSNDSVVWNHLGTLSCSMGLLSVSRWAFEQGLVCSPNNWNCMEKLLEVLISIRDEVACLSVANLILNSWPSHHRALHVKKTIECAEPVPFAPRGIDILEPKHAKLIFSNKRKSVDDEICQEIGTKKSKHSATLQLNEAKWLALLDGILSLISANTEKAGEYNCSNTVDRCSISEGSAKGLAYNIIDVVISTDTLKSVETAGGNGNDSHHGEILPYDCKATVKEKDGNSDREHPHERRSTRLERLRSRKSGKDENGSDGKDISHAMTQFLESFILKGPSPVEKAYCSGNADASNPDTHNYTSNEEANDLKQFLCKISKNFGPHHIGYMLLEEMAHLKVPFQDYFVKLIELDKLTRGWAEDRSASCNLFLAELYYDRALCSGSPPTSSELSDSSYHLCKIIESVALELPFNISVREIHSTNLDTESSRTGESSSELIERSHENGHINMLNDQKSKHDSSSNMNCAFWIRFFWLSGCLSLSSDCKEKAYKEFNIALSILKNSNKTKSYGEVILLPHTKLVKSLTTDRILREINLIRLESLLWNNDENINKITHTEFMQLLPPLLLSTKDAYVGNAYGPQRESENVISLELSALDVLISACEKAKPMNIQVYLDSHRRKIQVLTVAAGMVGSVTPLKAKGSSNVEFVEAMNRNRLENVVEAVKDVSRNASKAKDIIDQCDNSDGQDGWSPLMSIVGDIQSLLLTIMCAAVKIILSRKLSCSGTSYQVDHLECSCLIDAAIAFCKLQHLDPTISIKTQVDLIVAVHDLLAEYGLCCAGRDGEGEEGMFLKFAIKHLMALDVKLKSQLNSNGMEEDAVPKDVRAEDSVADEPSVSDNKQNSDDEEESELDEIQSCLDSALDQAFFCLYGLKINPDSCSEDDLAVHKNTSRGDYQTKEQCADVFQYVLPYAKALSKTGLVKLRRVLRAIRKHFPQPPYDLFVNNPIDNFLDGPDSCEKILSEICESNESREAILNVLFPGERGYEAFKKLSTASSEPYSDVYENLYYFIAQAEDISATDKHTGFVLKKEGEEFVEQSANIFKYDLLYNPLRFESWQKLSNLYDEVEVDLLLNDGSKHISILDWRTNTDLIRRVEMGRRHSRRCLLMSSLLAKTAPEQSEAHELLALVYYDSLQNVVPFYDQRATLPVKDSSWETFCKNSMKHFEKAFEIKEQWLHAFYLGKLCEKLGHSFSKALSYYNKAMMLNPTAVDPVYRIHASRLKLLYTQGKQNLEAIQVVADYTYNQSTKENVLSMLGSMTKVLQSSSDKTSLDTKEENKFFESDILDKVWHILYDDCLYALGTCVEGELKHFHKARYKLAQGYYRRGEAGDLERAKEELSFCFKSSRSSFTVNMWEIDGTVRKGRRKNPNVGGSRKNLENTDLWTLEKAYTYLRTDKRFALCLGDIVPVGLGKYILVLTAAIHNPEIRRASGDASVEQLLEKMFTVFMDHANMWADISNIPEVNSPELSESNLYSYIHQYIHLLESDVRLDVLEGLNEKIRKRFKTPKLSNSNFAKICKHASLAWCRCILIKLASITPLPESADATNQPAPLSNGLLLYVDLQPDELLISSPDGPAQFKGLDMNWFETLNRIKNIPVKQTSEDNLETAVTLMKSTYNFYRESPCGTFPSGINLYTVTPSQAPIEGLPPTAAVVETLDLSIPRKLLLWVYTLVHGRYSNISSVVKYCDEMKLRSKRGTPAASASSQVVQPVSHSTVSSQVVSKEKSSQVEPAEAAQNPSDLAATCVPAYQEVGGASASQSAIEAQKATAAASQLTRSGSSRAMENAQDGGERK

SEQ ID NO: 162317 - protein, 572 aa, Zea Mays
MSIVGDIQSLLLTIMCAAVKIILSRKLSCSGTSYQVDHLECSCLIDAAIAFCKLQHLDPTISIKTQVDLIVAVHDLLAEYGLCCAGRDGEGEEGMFLKFAIKHLMALDVKLKSQLNSNGMEEDAVPKDVRAEDSVADEPSVSDNKQNSDDEEESELDEIQSCLDSALDQAFFCLYGLKINPDSCSEDDLAVHKNTSRGDYQTKEQCADVFQYVLPYAKALSKTGLVKLRRVLRAIRKHFPQPPYDLFVNNPIDNFLDGPDSCEKILSEICESNESREAILNVLFPGERGYEAFKKLSTASSEPYSDVYENLYYFIAQAEDISATDKHTGFVLKKEGEEFVEQSANIFKYDLLYNPLRFESWQKLSNLYDEVEVDLLLNDGSKHISILDWRTNTDLIRRVEMGRRHSRRCLLMSSLLAKTAPEQSEAHELLALVYYDSLQNVVPFYDQRATLPVKDSSWETFCKNSMKHFEKAFEIKEQWLHAFYLGKLCEKLGHSFSKALSYYNKAMMLNPTAVDPVYRIHASRLKLLYTQGKQNLEAIQESGCCRDLLPTTDLAWLFVNLACYISCLTAVG

SEQ ID NO: 162318 - protein, 1304 aa, Zea Mays
MAAMENCERTIKGFLTLKNLASVFLQQGFEFYDNALHCYLQAVELDSNDSVVWNHLGTLSCSMGLLSVSRWAFEQGLVCSPNNWNCMEKLLEVLISIRDEVACLSVANLILNSWPSHHRALHVKKTIECAEPVPFAPRGIDILEPKHAKLIFSNKRKSVDDEICQEIGTKKSKHSATLQLNEAKWLALLDGILSLISANTEKAGEYNCSNTVDRCSISEGSAKGLAYNIIDVVISTDTLKSVETAGGNGNDSHHGEILPYDCKATVKEKDGNSDREHPHERRSTRLERLRSRKSGKDENGSDGKDISHAMTQFLESFILKGPSPVEKAYCSGNADASNPDTHNYTSNEEANDLKQFLCKISKNFGPHHIGYMLLEEMAHLKVPFQDYFVKLIELDKLTRGWAEDRSASCNLFLAELYYDRALCSGSPPTSSELSDSSYHLCKIIESVALELPFNISVREIHSTNLDTESSRTGESSSELIERSHENGHINMLNDQKSKHDSSSNMNCAFWIRFFWLSGCLSLSSDCKEKAYKEFNIALSILKNSNKTKSYGEVILLPHTKLVKSLTTDRILREINLIRLESLLWNNDENINKITHTEFMQLLPPLLLSTKDAYVGNAYGPQRESENVISLELSALDVLISACEKAKPMNIQVYLDSHRRKIQVLTVAAGMVGSVTPLKAKGSSNVEFVEAMNRNRLENVVEAVKDVSRNASKAKDIIDQCDNSDGQDGWSPLMSIVGDIQSLLLTIMCAAVKIILSRKLSCSGTSYQVDHLECSCLIDAAIAFCKLQHLDPTISIKTQVDLIVAVHDLLAEYGLCCAGRDGEGEEGMFLKFAIKHLMALDVKLKSQLNSNGMEEDAVPKDVRAEDSVADEPSVSDNKQNSDDEEESELDEIQSCLDSALDQAFFCLYGLKINPDSCSEDDLAVHKNTSRGDYQTKEQCADVFQYVLPYAKALSKTGLVKLRRVLRAIRKHFPQPPYDLFVNNPIDNFLDGPDSCEKILSEICESNESREAILNVLFPGERGYEAFKKLSTASSEPYSDVYENLYYFIAQAEDISATDKHTGFVLKKEGEEFVEQSANIFKYDLLYNPLRFESWQKLSNLYDEVEVDLLLNDGSKHISILDWRTNTDLIRRVEMGRRHSRRCLLMSSLLAKTAPEQSEAHELLALVYYDSLQNVVPFYDQRATLPVKDSSWETFCKNSMKHFEKAFEIKEQWLHAFYLGKLCEKLGHSFSKALSYYNKAMMLNPTAVDPVYRIHASRLKLLYTQGKQNLEAIQESGCCRDLLPTTDLAWLFVNLACYISCLTAVG

SEQ ID NO: 162319 - protein, 341 aa, Zea Mays
MGAKPTSRSYQTQHSPVATPMLLVRAPPSPAPLSAAANFPADLERPLRLRGLSSSRAGVTTATATAKPAASSLGGQKRKQVTSVANPLVKHCVKLRLSAAYRRSCRRLLLVGLAPILEVCSFELEAIDYLLLLDGVEAPEALREFSGDILYVSAAVMKKVSGMQSVDSTEAVAVMHMPNHFRDLGSHQDGDALDGLFSYPKRILVLDGIQDPGNLGTLIRSACAFKWDGVFLLPACCDPFNEKAIRAARGASLQLPIVSGTWHDLHALVTKYRMKMMAGHPESSSDASKETYSLSNELADSLLNESLCLVLGSEGNGLSAETLQACELVNIPMEVAKCCKG

SEQ ID NO: 162320 - protein, 141 aa, Zea Mays
MAVLGKMDQMVAFKGVSLTIAPLGAVCCVLFSAPDSPAAKKYNMFVAQIACAAFGVLALSLFGPGWLARGAALSACIAFMTITGTSHPPAASLPLLFIDGPKFHSLQLWYALFPGAAGCIVLCLIVSKLDLTNGFLKEHDA

SEQ ID NO: 162321 - protein, 100 aa, Zea Mays
MMPLCTSTMAVVVRVATAGATTPASVVVPRLVVSRFVVVPASTATTILVSTTAILVPATSATTSSTTIRIASPAATTTTTTLVLVRPPLDELLVLLLLIL

SEQ ID NO: 162322 - protein, 53 aa, Zea Mays
MTQTPMVILPAPPLPSITTIAARPCPGLLRPRSVPQPAHANPTRFPTILMPGG

SEQ ID NO: 162323 - protein, 85 aa, Zea Mays
MCSRESVNHQGEENERKKNSRNQRVKIPTFFSMTQTPMVILPAPPLPSITTIAARPCPGLLRPRSVPQPAHANPTRFPTILMPGG

SEQ ID NO: 162324 - protein, 591 aa, Zea Mays
MEQSAGDESRVTKGENAVKDKKVYQEDAIDKQGAAEDGSGVKSQEDNMVVPGQCTDGLPVLDEGNVVPQYTSDQLRTTTDNNAAVDPELVEQEGVDSIVGAAKVGIAVEESREDIMVEKQVEGVLLQDQDEAVEQCTSDQLRTITDGRCSYGSSCHFNHPRLKAKLEVSSFPSEQRNHEAEFLELNRVGLPIREGARKCIYYMRNGTCRYGKKCCFNHPEQVLDVQRHTATGWDDTNLQSSPHSKKSPEHKTMDDISSGSEVLPPNILRMLLPPQNVPPSTKEKEIRIKKDPDWASASDDSDGCCSADSSDGPLCKQEHEDYPERPECPFLLRFGNCKFASSCQYYHPKDKFPSTYHPEDKFQSRYHQKEKSSRHHPKKEPALSGELMVYPDRPSEPDCPFYVKTGSCKFGANCKFHHPKDITPNMQGPASPKRSVAAKEHHAAARATLQDQMYQQQKFPERPGQPDCRYYMQFGKCKFQSACIFNHSKDILSSGWHPAECPFYMKTRTCQFGSACEFYHPKDRCSGRGGVIDGTDYGHDFATKSRNVLQELAIYPERPDELECSHYMKHGYCKYKMNCKFHHPRDRLPKK

SEQ ID NO: 162325 - protein, 293 aa, Zea Mays
MEQSAGDESRETEAENAVEYNKKVDQEDTINRQGTAKEDSGVEPQEENVVDPDQGVDDFSVLDEGNVVAQCTSDQLRTTMEDNAAEMQEVVEQEGAIFEKGVTSDGITVEDQDKEMEQSAGDESRVTKGENAVKDKKVYQEDAIDKQGAAEDGSGVKSQEDNMVVPGQCTDGLPVLDEGNVVPQYTSDQLRTTTDNNAAVDPELVEQEGVDSIVGAAKVGIAVEESREDIMVEKQVEGVLLQDQDEAVEQCTSDQLRTITDGNDVEDQEVHREKGGAHMGHRATSIIHGSKQN

SEQ ID NO: 162326 - protein, 351 aa, Zea Mays
MEQSAGDESRETEAENAVEYNKKVDQEDTINRQGTAKEDSGVEPQEENVVDPDQGVDDFSVLDEGNVVAQCTSDQLRTTMEDNAAEMQEVVEQEGAIFEKGVTSDGITVEDQDKEMEQSAGDESRVTKGENAVKDKKVYQEDAIDKQGAAEDGSGVKSQEDNMVVPGQCTDGLPVLDEGNVVPQYTSDQLRTTTDNNAAVDPELVEQEGVDSIVGAAKVGIAVEESREDIMVEKQVEGVLLQDQDEAVEQCTSDQLRTITDGNDVEDQEVHREKVGLSEGYPQKPGKLNCRFYMSTGRCSYGSSCHFNHPRLKAKLEVSSFPSEQRNHEAEFLELNRVGLPIREIWKEMLF

SEQ ID NO: 162327 - protein, 467 aa, Zea Mays
MEQSAGDESRETEAENAVEYNKKVDQEDTINRQGTAKEDSGVEPQEENVVDPDQGVDDFSVLDEGNVVAQCTSDQLRTTMEDNAAEMQEVVEQEGAIFEKGVTSDGITVEDQDKEMEQSAGDESRVTKGENAVKDKKVYQEDAIDKQGAAEDGSGVKSQEDNMVVPGQCTDGLPVLDEGNVVPQYTSDQLRTTTDNNAAVDPELVEQEGVDSIVGAAKVGIAVEESREDIMVEKQVEGVLLQDQDEAVEQCTSDQLRTITDGRCSYGSSCHFNHPRLKAKLEVSSFPSEQRNHEAEFLELNRVGLPIREGARKCIYYMRNGTCRYGKKCCFNHPEQVLDVQRHTATGWDDTNLQSSPHSKKSPEHKTMDDISSGSEVLPPNILRMLLPPQNVPPSTKEKEIRIKKGVIDGTDYGHDFATKSRNVLQELAIYPERPDELECSHYMKHGYCKYKMNCKFHHPRDRLPKK

SEQ ID NO: 162328 - protein, 504 aa, Zea Mays
MEQSAGDESRETEAENAVEYNKKVDQEDTINRQGTAKEDSGVEPQEENVVDPDQGVDDFSVLDEGNVVAQCTSDQLRTTMEDNAAEMQEVVEQEGAIFEKGVTSDGITVEDQDKEMEQSAGDESRVTKGENAVKDKKVYQEDAIDKQGAAEDGSGVKSQEDNMVVPGQCTDGLPVLDEGNVVPQYTSDQLRTTTDNNAAVDPELVEQEGVDSIVGAAKVGIAVEESREDIMVEKQVEGVLLQDQDEAVEQCTSDQLRTITDGNDVEDQEVHREKVGLSEGYPQKPGKLNCRFYMSTGRCSYGSSCHFNHPRLKAKLEVSSFPSEQRNHEAEFLELNRVGLPIREGARKCIYYMRNGTCRYGKKCCFNHPEQVLDVQRHTATGWDDTNLQSSPHSKKSPEHKTMDDISSGSEVLPPNILRMLLPPQNVPPSTKEKEIRIKKDPDWASASDDSDGCCSADSSDGPLCKQEHEDYPERPECPFLLRFGNWSSKSKKVGRCKRAPRSS

SEQ ID NO: 162329 - protein, 389 aa, Zea Mays
MRNGTCRYGKKCCFNHPEQVLDVQRHTATGWDDTNLQSSPHSKKSPEHKTMDDISSGSEVLPPNILRMLLPPQNVPPSTKEKEIRIKKDPDWASASDDSDGCCSADSSDGPLCKQEHEDYPERPECPFLLRFGNCKFASSCQYYHPKDKFPSTYHPEDKFQSRYHQKEKSSRHHPKKEPALSGELMVYPDRPSEPDCPFYVKTGSCKFGANCKFHHPKDITPNMQGPASPKRSVAAKEHHAAARATLQDQMYQQQKFPERPGQPDCRYYMQFGKCKFQSACIFNHSKDILSSGWHPAECPFYMKTRTCQFGSACEFYHPKDRCSGRGGVIDGTDYGHDFATKSRNVLQELAIYPERPDELECSHYMKHGYCKYKMNCKFHHPRDRLPKK

SEQ ID NO: 162330 - protein, 498 aa, Zea Mays
MAGVEDEDEFKDASVAADPPPCSPKPASKSMTATGSGGGLGRRLFASIPLPATLSAAIGRFSGPNPLATNVGLGLLLDAGPAASSDGPLASDAASGGSSLHLPSLPALQRQHGDDQVAGRGAGEWEEELGLLPAEEGWDTAEDSREKEGLAVDGRSANRNCFPTRGQEEGAQRQRPGDELGAAVAQDQEVVVKQQGATEDCAAVVEDESNYSAVEQCAGDETRAVKASNAVEINKRVIEQEWDTECYTAVEAVEQCTNHGSRADKDGNVVKRKEKAVEQEVSVGVRDAAKDCVTVEPQEENVVVVEHGEDGISVQDQHKAVEQCTSGQLRTTMDDTAAEGQRVVEQGGAIFYLDATAYDIAVEDQEKEMKESDGDESRSTRDRNPAEVKDKEVNQEDVVDRHNVIKDGSGVELLENNIVAIEQGEDGISLSDEDNMVELYTSDQLRATLDDHAAANRKVVEQEGDIVERVVTTDGISIEDYEKEVEQSTGFSQGQPRV

SEQ ID NO: 162331 - protein, 522 aa, Zea Mays
MAMEAAPVMAPLAVSPRSVAITVTSGSATTVGLTGIANPANHTYWSCVLDSLGQSTLMKQSQGLGIDMPHRSFPAFGDSKPIVWRDRCETDFELFTISGEMWIRFAVMHLEGSALYWLQLMKSRTKEMSWIKLWLALNTRVSSDQHNSLTMLQAEVMLNTGQMEDRMWDPGVSAQVSPRPGLMPLPPSPLSGGKATGLNEEHQTLGTFSTKDEDGRMAALKSYRKAKGLCLFILQLEATIRPDAVEQLLAVQSISVLTVTTVLEVLVYNFNLKYLVQHLETVFQLLCQQQQHLKLPKCLLEFLGHKVSASGISTDRPYQTVHESDESMSAIMFAVDQWLKGLHFWIVYRTWVDNRVAHILPRRPDLHQDDSSVCLNVVSSSSVIPRLVEVTKRYESDASAQKIMAIFSTGGQLEPFTLVHGVIRHKNKIWLVSSHEVQQRTMKTLHDSTLCGQSGFLVTYRCIKAVLSWPGMKPSVRDFVRSCVNCQQATTRHPFGFNLFTDKIGLHEFSNLSFPAGQSEGS

SEQ ID NO: 162332 - protein, 238 aa, Zea Mays
MAWPILEDPMAQLMAKIEEGNREIHRCMDSMQSAMERMEIAVKGLLTDPSDCQRWRPGTGAKEDKVTQKTIEDSSSASTSVADATNSMLSEITADGSTTRERTLDSKSRWNPRPEQIRIREVIFNSKLLVLVQQQPPSGLGQFWSGGGADHYQFGRNNTTVASNNASREVAHEDTTKLGLLQYDFGAIMAMEAAPVMAPLAVSPRSVAITVTSGSATTVGLTALGDSLSITLSTATTS

SEQ ID NO: 162333 - protein, 471 aa, Zea Mays
MAAMYSWSCKRSYKNGFVWHDLSEDDLVLPATDGEYVLKGSELVDQSPSAGPFYPVTVSNGNQKQQSRPKEGARQPLPRDQSDPSSPPSVTVREAKARRSPSVPSQDEEDDTPSPCRDRSMSQPQELEPQRNERRTQPPASGSASPVELRAHRPTTGCTDAATQTDDLGRRPAGRRALELPRKKSLSTDHDAVVREIAEYRQSHPRRSADLHGISRELLRQCITTPLTVPSTCAKSESLESLIRADNVMTDSFRILEEEDVVARTCPKLRPASVLMQLVTCGSLSVKGHGDAGVVRTCKPRFPNLRFLPSPLISRTMMMGELDYLSENPRLMGMKLEEKEYFSGSLVETKKTQRDGPAERYSALKRSSSYNAERAGEALDCTRREEDKADDVSSRTRCLPRTPILSSFLHPKGDSLRSPVSDCRRSSSARRDYDAASGDGSRRFADASVASATTGAESFRKEEKLVKIEES

SEQ ID NO: 162334 - protein, 542 aa, Zea Mays
MESRGRRPRSPERRRPAARKVPVVYYLTRSRHLEHPHFVEVPLASPEGLYLRDVINHLNMVRGKGMAAMYSWSCKRSYKNGFVWHDLSEDDLVLPATDGEYVLKGSELVDQSPSGPFYPVTVSNGNQKQQSRPKEGARQPLPRDQSDPSSPPSVTVREAKARRSPSVPSQDEEDDTPSPCRDRSMSQPQELEPQRNERRTQPPASGSASPVELRAHRPTTGCTDAATQTDDLGRRPAGRRALELPRKKSLSTDHDAVVREIAEYRQSHPRRSADLHGISRELLRQCITTPLTVPSTCAKSESLESLIRADNVMTDSFRILEEEDVVARTCPKLRPASVLMQLVTCGSLSVKGHGDAGVVRTCKPRFPNLRFLPSPLISRTMMMGELDYLSENPRLMGMKLEEKEYFSGSLVETKKTQRDGPAERYSALKRSSSYNAERAGEALDCTRREEDKADDVSSRTRCLPRTPILSSFLHPKGDSLRSPVSDCRRSSSARRDYDAASGDGSRRFADASVASATTGAESFRKEEKLVKIEESCRPEPVS

SEQ ID NO: 162335 - protein, 125 aa, Zea Mays
METTIPFRERLKILGRVANLEDLPLSAAERKLMHAYNEKPVLSRPQHEFYLSDNYFEIDIDMHRFSYISRKGFETFLDRLKACVLDVGLTIQGNKAEELPEQILCCVRLNGIDYTKYQPLLTHGA

SEQ ID NO: 162336 - protein, 197 aa, Zea Mays
MNCMSTCFKHIQFSQVPLYPASLFQNETDGEGMSFVLYFRLSDGYSKELPHSFIESIRRLVDDHVEKIKAFPMETTIPFRERLKILGRVANLEDLPLSAAERKLMHAYNEKPVLSRPQHEFYLSDNYFEIDIDMHRFSYISRKGFETFLDRLKACVLDVGLTIQGNKAEELPEQILCCVRLNGIDYTKYQPLLTHGA

SEQ ID NO: 162337 - protein, 165 aa, Zea Mays
MSFVLYFRLSDGYSKELPHSFIESIRRLVDDHVEKIKAFPMETTIPFRERLKILGRVANLEDLPLSAAERKLMHAYNEKPVLSRPQHEFYLSDNYFEIDIDMHRFSYISRKGFETFLDRLKACVLDVGLTIQGNKAEELPEQILCCVRLNGIDYTKYQPLLTHGA

SEQ ID NO: 162338 - protein, 444 aa, Zea Mays
MSGSIEEDWYDSLAMSESDAEDDFHSVQDDAFSLNGFENEAALSMKDGNGGSFNGAAQSGEQHHKKPKSSELSKGSSENGVRTSISHEDAVSVSGADTTHGGGRILDNCGLLPNNCLPCIASAVGVNEKKRTPSSPTHSMKMPSLKLSFKKKSGEAHPSSTLLSTKDFLERPLAGSQVQLCLLETNTLNSWSRIDPGTFRVRGANYFRDKKKELAPNYAAYYPFGVDVYLSPQKLNHISRFVQLPDIQLSSKLPPLLVVNVQVPLYPASLFQNETDGEGMSFVLYFRLSDGYSKELPHSFIESIRRLVDDHVEKIKAFPMETTIPFRERLKILGRVANLEDLPLSAAERKLMHAYNEKPVLSRPQHEFYLSDNYFEIDIDMHRFSYISRKGFETFLDRLKACVLDVGLTIQGNKAEELPEQILCCVRLNGIDYTKYQPLLTHGA

SEQ ID NO: 162339 - protein, 538 aa, Zea Mays
MGACVSRPSACVGKPHSPRSGDASGRSGGGGGTRRRRSRRVGKGRRTAPSRAASMETIQEAEVPGSPSAAAAAADHRTYSNPAFQVSGSIEEDWYDSLAMSESDAEDDFHSVQDDAFSLNGFENEAALSMKDGNGGSFNGAAQSGEQHHKKPKSSELSKGSSENGVRTSISHEDAVSVSGADTTHGGGRILDNCGLLPNNCLPCIASAVGVNEKKRTPSSPTHSMKMPSLKLSFKKKSGEAHPSSTLRKHFFISHLVSTKDFLERPLAGSQVQLCLLETNTLNSWSRIDPGTFRVRGANYFRDKKKELAPNYAAYYPFGVDVYLSPQKLNHISRFVQLPDIQLSSKLPPLLVVNVQVPLYPASLFQNETDGEGMSFVLYFRLSDGYSKELPHSFIESIRRLVDDHVEKIKAFPMETTIPFRERLKILGRVANLEDLPLSAAERKLMHAYNEKPVLSRPQHEFYLSDNYFEIDIDMHRFSYISRKGFETFLDRLKACVLDVGLTIQGNKAEELPEQILCCVRLNGIDYTKYQPLLTHGA

SEQ ID NO: 162340 - protein, 379 aa, Zea Mays
MPPVKAEDLVVHAVKEQFAGLDYCITSPPPWITTVLVGFQHYLVMLGTTVLIATIIVPLMGGGHAEKAIVIQTILFLSGINTLLQVHFGTRLPAVMSGSYTYIYPAVAIILSPRYALLIDPLERFVFTMRSLQGALIIAGVFQAVVGFFGIWRVFIRFLSPLAAVPFVTLTGLGLFFFAFPGVTKCIEVGLPALVLLVIFAEYASHVFAKGSFVFSRCAVLVTVVIIWIYAEILTAAGAYNERGPVTQFSCRADRSGIIQGSPWVRFPYPFQWGYPIFCFQDCFAMLAASFASLIESTGTLIAVSRYSGATFCPPSVFSRGIGWEGISIILDGMCGTLTGTAASVENAGLLAVTRVGSRRVIKISALFMIFFSLFVIPT

SEQ ID NO: 162341 - protein, 499 aa, Zea Mays
MPPVKAEDLVVHAVKEQFAGLDYCITSPPPWITTVLVGFQHYLVMLGTTVLIATIIVPLMGGGHAEKAIVIQTILFLSGINTLLQVHFGTRLPAVMSGSYTYIYPAVAIILSPRYALLIDPLERFVFTMRSLQGALIIAGVFQAVVGFFGIWRVFIRFLSPLAAVPFVTLTGLGLFFFAFPGVTKCIEVGLPALVLLVIFAEYASHVFAKGSFVFSRCAVLVTVVIIWIYAEILTAAGAYNERGPVTQFSCRADRSGIIQGSPWVRFPYPFQWGYPIFCFQDCFAMLAASFASLIESTGTLIAVSRYSGATFCPPSVFSRGIGWEGISIILDGMCGTLTGTAASVENAGLLAVTRVGSRRVIKISALFMIFFSLFVIAPDWYELQLNSQIWGGSCIHSIAYFRCTVLRPLRLFSWCRLQLTPVLQPQLLEDKVHTQHLVVPGAVHPTVLPGLRDVLRLRTSSHPFSSVQRDGQCHLLIAGDGGRHTGLPSGLHPPVLGG

SEQ ID NO: 162342 - protein, 328 aa, Zea Mays
MPPVKAEDLVVHAVKEQFAGLDYCITSPPPWITTVLVGFQHYLVMLGTTVLIATIIVPLMGGGHAEKAIVIQTILFLSGINTLLQVHFGTRLPAVMSGSYTYIYPAVAIILSPRYALLIDPLERFVFTMRSLQGALIIAGVFQAVVGFFGIWRVFIRFLSPLAAVPFVTLTGLGLFFFAFPGVTKCIEVGLPALVLLVIFAEYASHVFAKGSFVFSRCAVLVTVVIIWIYAEILTAAGAYNERGPVTQFSCRADRSGIIQGSPWVRFPYPFQWGYPIFCFQDCFAMLAASFASLIESTGTLIAVSRYSGATFCPPSVFSRGIGWEVTK

SEQ ID NO: 162343 - protein, 107 aa, Zea Mays
MDSNIPYGDTPTNKVEIMLRALVLDKVDREVDKVLLVRGLWSSFKSWWNQNASTTPFASAQHFSLSARVRDHMLPLRQPRDVIAPKNAVARGGPTCVRVTAALWWKG

SEQ ID NO: 162344 - protein, 87 aa, Zea Mays
MVNIILGGYDKDVGASLYYIDYIATLHKIDKVDLVDKCIKEIRLRLVVAPQNFVIKIVDKDGAREYARRELVGDNAPAEAATAVVAA

SEQ ID NO: 162345 - protein, 184 aa, Zea Mays
MECVLGVVGRDFALVAADTSAVQSILVHKTDEDKVMVLDSQKLMGASGEPGDRVQFTEFIQKNLHLYQFRNTIPLSTAAAANFTRGELATALRKNPYMVNIILGGYDKDVGASLYYIDYIATLHKIDKVDLVDKCIKEIRLRLVVAPQNFVIKIVDKDGAREYARRELVGDNAPAEAATAVVAA

SEQ ID NO: 162346 - protein, 508 aa, Zea Mays
MWRVFFTSAVVAVVVRSAMNWCNSGKCGHFGAGGFIIWDISGGQEDYSYQELFPMAIIGVIGGLLGALFNQLTLYITKWRRTCLHKKGKRVQIFEACLISLVTSTISFVLPLLRKCSPCPKLETNSGIECPHPPGTDGNFVNFYCSQDREYNDLATIFFNTQDDAIRNLFSAKTFHEYSAQSLITFLVMFYFLAVVTFGTAVPAGQFVPGIMIGSTYGRLVGMFVVKFYKKLNIEEGTYALLGAASFLGGSMRMTVSLCVIMVEITNNLKLLPLIMLVLLVSKAVGDFFNEGLYEEQARLRGIPLLDSRPKQVMRNMNARDACKNQKVVCLPRVSRVVDIISVLRTNKHNGFPVVDRGQNGESLVIGLILRSHLLVLLQAKVDFQNSAFPCGPGVLNRHNFSDFVKPASSKGKSIDDIHLTEDELGLYLDLAPFLNPSPYIVPEDMSLAKVYNLFRQLGLRHIFVVPRPSRVVGLITRKDLLLEEDNNNVMPELQSTSGLAERQNARG

SEQ ID NO: 162347 - protein, 734 aa, Zea Mays
MWSPQASFEEVDVAWRHYEQAGTGLAAIFINLAVENFSGWKYTATFAIIKHSYFVGFFVYTVFNLALVFSSVYIVTNFAPAAAGSGIPEIKGYLNGVDTHGILLFRTLVGKIFGSIGSVGGGLALGKEGPLVHTGACIASLLGQGGSAKYHLSSRWVRIFESDRDRRDLLIFVFEVSQLEILWPSHEAIVKVTCGCAAGVAAAFRAPVGGVLFALEEVTSWWRSHLMWRVFFTSAVVAVVVRSAMNWCNSGKCGHFGAGGFIIWDISGGQEDYSYQELFPMAIIGVIGGLLGALFNQLTLYITKWRRTCLHKKGKRVQIFEACLISLVTSTISFVLPLLRKCSPCPKLETNSGIECPHPPGTDGNFVNFYCSQDREYNDLATIFFNTQDDAIRNLFSAKTFHEYSAQSLITFLVMFYFLAVVTFGTAVPAGQFVPGIMIGSTYGRLVGMFVVKFYKKLNIEEGTYALLGAASFLGGSMRMTVSLCVIMVEITNNLKLLPLIMLVLLVSKAVGDFFNEGLYEEQARLRGIPLLDSRPKQVMRNMNARDACKNQKVVCLPRVSRVVDIISVLRTNKHNGFPVVDRGQNGESLVIGLILRSHLLVLLQAKVDFQNSAFPCGPGVLNRHNFSDFVKPASSKGKSIDDIHLTEDELGLYLDLAPFLNPSPYIVPEDMSLAKVYNLFRQLGLRHIFVVPRPSRVVGLITRKDLLLEEDNNNVMPELQSTSGLAERQNARG

SEQ ID NO: 162348 - protein, 525 aa, Zea Mays
MWRVFFTSAVVAVVVRSAMNWCNSGKCGHFGAGGFIIWDISGGQEDYSYQELFPMAIIGVIGGLLGALFNQLTLYITKWRRTCLHKKGKRVQIFEACLISLVTSTISFVLPLLRKCSPCPKLETNSGIECPHPPGTDGNFVNFYCSQDREYNDLATIFFNTQDDAIRNLFSAKTFHEYSAQSLITFLVMFYFLAVVTFGTAVPAGQFVPGIMIGSTYGRLVGMFVVKFYKKLNIEEGTYALLGAASFLGGSMRMTVSLCVIMVEITNNLKLLPLIMLVLLVSKAVGDFFNEGLYEEQARLRGIPLLDSRPKQVMRNMNARDACKNQKVVCLPRVSRVVDIISVLRTNKHNGFPVVDRGQNGESLVIGLILRSHLLVLLQAKVDFQNSAFPCGPGVLNRHNFSDFVKPASSKGKSIDDIHLTEDELGLYLDLAPFLNPSPYIVPEDMSLAKVYNLFRQLGLRHIFVVPRPSRVVGLITRKDLLLEEDNNNVMPELQSTSVRGLLNGKMLGGNIHLERPLLDNLVIE

SEQ ID NO: 162349 - protein, 495 aa, Zea Mays
MWSPQASFEEVDVAWRHYEQAGTGLAAIFINLAVENFSGWKYTATFAIIKHSYFVGFFVYTVFNLALVFSSVYIVTNFAPAAAGSGIPEIKGYLNGVDTHGILLFRTLVGKIFGSIGSVGGGLALGKEGPLVHTGACIASLLGQGGSAKYHLSSRWVRIFESDRDRRDLVTCGCAAGVAAAFRAPVGGVLFALEEVTSWWRSHLMWRVFFTSAVVAVVVRSAMNWCNSGKCGHFGAGGFIIWDISGGQEDYSYQELFPMAIIGVIGGLLGALFNQLTLYITKWRRTCLHKKGKRVQIFEACLISLVTSTISFVLPLLRKCSPCPKLETNSGIECPHPPGTDGNFVNFYCSQDREYNDLATIFFNTQDDAIRNLFSAKTFHEYSAQSLITFLVMFYFLAVVTFGTAVPAGQFVPGIMIGSTYGRLVGMFVVKFYKKLNIEEGTYALLGAASFLGGSMRMTVSLCVIMVEITNNLKLLPLIMLVLLVSKGYMKSKPD

SEQ ID NO: 162350 - protein, 246 aa, Zea Mays
MWMCSWSCCCLQSSCWWGTICLGGSYFLVWRSHLMWRVFFTSAVVAVVVRSAMNWCNSGKCGHFGAGGFIIWDISGGQEDYSYQELFPMAIIGVIGGLLGALFNQLTLYITKWRRTCLHKKGKRVQIFEACLISLVTSTISFVLPLLRKCSPCPKLETNSGIECPHPPGTDGNFVNFYCSQDREYNDLATIFFNTQDDAIRNLFSAKTFHEYSAQSLCSSGWPVRSRNNDWIYIWKACWNVCCQVL

SEQ ID NO: 162351 - protein, 416 aa, Zea Mays
MWSPQASFEEVDVAWRHYEQAGTGLAAIFINLAVENFSGWKYTATFAIIKHSYFVGFFVYTVFNLALVFSSVYIVTNFAPAAAGSGIPEIKGYLNGVDTHGILLFRTLVGKIFGSIGSVGGGLALGKEGPLVHTGACIASLLGQGGSAKYHLSSRWVRIFESDRDRRDLVTCGCAAGVAAAFRAPVGGVLFALEEVTSWWRSHLMWRVFFTSAVVAVVVRSAMNWCNSGKCGHFGAGGFIIWDISGGQEDYSYQELFPMAIIGVIGGLLGALFNQLTLYITKWRRTCLHKKGKRVQIFEACLISLVTSTISFVLPLLRKCSPCPKLETNSGIECPHPPGTDGNFVNFYCSQDREYNDLATIFFNTQDDAIRNLFSAKTFHEYSAQSLCSSGWPVRSRNNDWIYIWKACWNVCCQVL

SEQ ID NO: 162352 - protein, 630 aa, Zea Mays
MWSPQASFEEVDVAWRHYEQAGTGLAAIFINLAVENFSGWKYTATFAIIKHSYFVGFFVYTVFNLALVFSSVYIVTNFAPAAAGSGIPEIKGYLNGVDTHGILLFRTLVGKIFGSIGSVGGGLALGKEGPLVHTGACIASLLGQGGSAKYHLSSRWVRIFESDRDRRDLLIFVFEVSQLEILWPSHEAIVKVTCGCAAGVAAAFRAPVGGVLFALEEVTSWWRSHLMWRVFFTSAVVAVVVRSAMNWCNSGKCGHFGAGGFIIWDISGGQEDYSYQELFPMAIIGVIGGLLGALFNQLTLYITKWRRTCLHKKGKRVQIFEACLISLVTSTISFVLPLLRKCSPCPKLETNSGIECPHPPGTDGNFVNFYCSQDREYNDLATIFFNTQDDAIRNLFSAKTFHEYSAQSLITFLVMFYFLAVVTFGTAVPAGQFVPGIMIGSTYGRLVGMFVVKFYKKLNIEEGTYALLGAASFLGGSMRMTVSLCVIMVEITNNLKLLPLIMLVLLVSKAVGDFFNEGLYEEQARLRGIPLLDSRPKQVMRNMNARDACKNQKVVCLPRVSRVVDIISVLRTNKHNGFPVVDRGQNGESLVIGLILRSHLLVLLQAKVDFQNSAFPCGPGVLNRFLFFYL

SEQ ID NO: 162353 - protein, 471 aa, Zea Mays
MARLAWTRLPTADGEGAGPSTSEAADDELLSGAAIESLDYEVIENYAYREEQAQRSKFWVPYYVMLKWLFALLIGVGTGLAAIFINLAVENFSGWKYTATFAIIKHSYFVGFFVYTVFNLALVFSSVYIVTNFAPAAAGSGIPEIKGYLNGVDTHGILLFRTLVGKIFGSIGSVGGGLALGKEGPLVHTGACIASLLGQGGSAKYHLSSRWVRIFESDRDRRDLVTCGCAAGVAAAFRAPVGGVLFALEEVTSWWRSHLMWRVFFTSAVVAVVVRSAMNWCNSGKCGHFGAGGFIIWDISGGQEDYSYQELFPMAIIGVIGGLLGALFNQLTLYITKWRRTCLHKKGKRVQIFEACLISLVTSTISFVLPLLRKCSPCPKLETNSGIECPHPPGTDGNFVNFYCSQDREYNDLATIFFNTQDDAIRNLFSAKTFHEYSAQSLCSSGWPVRSRNNDWIYIWKACWNVCCQVL

SEQ ID NO: 162354 - protein, 523 aa, Zea Mays
MLSGVDHDVPDGIGMARLAWTRLPTADGEGAGPSTSEAADDELLSGAAIESLDYEVIENYAYREEQAQRSKFWVPYYVMLKWLFALLIGVGTGLAAIFINLAVENFSGWKYTATFAIIKHSYFVGFFVYTVFNLALVFSSVYIVTNFAPAAAGSGIPEIKGYLNGVDTHGILLFRTLVGKIFGSIGSVGGGLALGKEGPLVHTGACIASLLGQGGSAKYHLSSRWVRIFESDRDRRDLVTCGCAAGVAAAFRAPVGGVLFALEEVTSWWRSHLMWRVFFTSAVVAVVVRSAMNWCNSGKCGHFGAGGFIIWDISGGQEDYSYQELFPMAIIGVIGGLLGALFNQLTLYITKWRRTCLHKKGKRVQIFEACLISLVTSTISFVLPLLRKCSPCPKLETNSGIECPHPPGTDGNFVNFYCSQDREYNDLATIFFNTQDDAIRNLFSAKTFHEYSAQSLITFLVMFYFLAVVTFGTAVPAGQFVPGIMIGSTYGRLVGMFVVKFYKKLNIEEGMHSLVLHRFLEVQ

SEQ ID NO: 162355 - protein, 507 aa, Zea Mays
MLSGVDHDVPDGIGMARLAWTRLPTADGEGAGPSTSEAADDELLSGAAIESLDYEVIENYAYREEQAQRSKFWVPYYVMLKWLFALLIGVGTGLAAIFINLAVENFSGWKYTATFAIIKHSYFVGFFVYTVFNLALVFSSVYIVTNFAPAAAGSGIPEIKGYLNGVDTHGILLFRTLVGKIFGSIGSVGGGLALGKEGPLVHTGACIASLLGQGGSAKYHLSSRWVRIFESDRDRRDLLIFVFEVSQLEILWPSHEAIVKVTCGCAAGVAAAFRAPVGGVLFALEEVTSWWRSHLMWRVFFTSAVVAVVVRSAMNWCNSGKCGHFGAGGFIIWDISGGQEDYSYQELFPMAIIGVIGGLLGALFNQLTLYITKWRRTCLHKKGKRVQIFEACLISLVTSTISFVLPLLRKCSPCPKLETNSGIECPHPPGTDGNFVNFYCSQDREYNDLATIFFNTQDDAIRNLFSAKTFHEYSAQSLCSSGWPVRSRNNDWIYIWKACWNVCCQVL

SEQ ID NO: 162356 - protein, 803 aa, Zea Mays
MLSGVDHDVPDGIGMARLAWTRLPTADGEGAGPSTSEAADDELLSGAAIESLDYEVIENYAYREEQAQRSKFWVPYYVMLKWLFALLIGVGTGLAAIFINLAVENFSGWKYTATFAIIKHSYFVGFFVYTVFNLALVFSSVYIVTNFAPAAAGSGIPEIKGYLNGVDTHGILLFRTLVGKIFGSIGSVGGGLALGKEGPLVHTGACIASLLGQGGSAKYHLSSRWVRIFESDRDRRDLLIFVFEVSQLEILWPSHEAIVKVTCGCAAGVAAAFRAPVGGVLFALEEVTSWWRSHLMWRVFFTSAVVAVVVRSAMNWCNSGKCGHFGAGGFIIWDISGGQEDYSYQELFPMAIIGVIGGLLGALFNQLTLYITKWRRTCLHKKGKRVQIFEACLISLVTSTISFVLPLLRKCSPCPKLETNSGIECPHPPGTDGNFVNFYCSQDREYNDLATIFFNTQDDAIRNLFSAKTFHEYSAQSLITFLVMFYFLAVVTFGTAVPAGQFVPGIMIGSTYGRLVGMFVVKFYKKLNIEEGTYALLGAASFLGGSMRMTVSLCVIMVEITNNLKLLPLIMLVLLVSKAVGDFFNEGLYEEQARLRGIPLLDSRPKQVMRNMNARDACKNQKVVCLPRVSRVVDIISVLRTNKHNGFPVVDRGQNGESLVIGLILRSHLLVLLQAKVDFQNSAFPCGPGVLNRHNFSDFVKPASSKGKSIDDIHLTEDELGLYLDLAPFLNPSPYIVPEDMSLAKVYNLFRQLGLRHIFVVPRPSRVVGLITRKDLLLEEDNNNVMPELQSTSGLAERQNARG

SEQ ID NO: 162357 - protein, 772 aa, Zea Mays
MLSGVDHDVPDGIGMARLAWTRLPTADGEGAGPSTSEAADDELLSGAAIESLDYEVIENYAYREEQAQRSKFWVPYYVMLKWLFALLIGVGTGLAAIFINLAVENFSGWKYTATFAIIKHSYFVGFFVYTVFNLALVFSSVYIVTNFAPAAAGSGIPEIKGYLNGVDTHGILLFRTLVGKIFGSIGSVGGGLALGKEGPLVHTGACIASLLGQGGSAKYHLSSRWVRIFESDRDRRDLVTCGCAAGVAAAFRAPVGGVLFALEEVTSWWRSHLMWRVFFTSAVVAVVVRSAMNWCNSGKCGHFGAGGFIIWDISGGQEDYSYQELFPMAIIGVIGGLLGALFNQLTLYITKWRRTCLHKKGKRVQIFEACLISLVTSTISFVLPLLRKCSPCPKLETNSGIECPHPPGTDGNFVNFYCSQDREYNDLATIFFNTQDDAIRNLFSAKTFHEYSAQSLITFLVMFYFLAVVTFGTAVPAGQFVPGIMIGSTYGRLVGMFVVKFYKKLNIEEGTYALLGAASFLGGSMRMTVSLCVIMVEITNNLKLLPLIMLVLLVSKAVGDFFNEGLYEEQARLRGIPLLDSRPKQVMRNMNARDACKNQKVVDRGQNGESLVIGLILRSHLLVLLQAKVDFQNSAFPCGPGVLNRHNFSDFVKPASSKGKSIDDIHLTEDELGLYLDLAPFLNPSPYIVPEDMSLAKVYNLFRQLGLRHIFVVPRPSRVVGLITRKDLLLEEDNNNVMPELQSTSVRGLLNGKMLGGNIHLERPLLDNLVIE

SEQ ID NO: 162358 - protein, 485 aa, Zea Mays
MLSGVDHDVPDGIGMARLAWTRLPTADGEGAGPSTSEAADDELLSGAAIESLDYEVIENYAYREEQAQRSKFWVPYYVMLKWLFALLIGVGTGLAAIFINLAVENFSGWKYTATFAIIKHSYFVGFFVYTVFNLALVFSSVYIVTNFAPAAAGSGIPEIKGYLNGVDTHGILLFRTLVGKIFGSIGSVGGGLALGKEGPLVHTGACIASLLGQGGSAKYHLSSRWVRIFESDRDRRDLVTCGCAAGVAAAFRAPVGGVLFALEEVTSWWRSHLMWRVFFTSAVVAVVVRSAMNWCNSGKCGHFGAGGFIIWDISGGQEDYSYQELFPMAIIGVIGGLLGALFNQLTLYITKWRRTCLHKKGKRVQIFEACLISLVTSTISFVLPLLRKCSPCPKLETNSGIECPHPPGTDGNFVNFYCSQDREYNDLATIFFNTQDDAIRNLFSAKTFHEYSAQSLCSSGWPVRSRNNDWIYIWKACWNVCCQVL

SEQ ID NO: 162359 - protein, 755 aa, Zea Mays
MLSGVDHDVPDGIGMARLAWTRLPTADGEGAGPSTSEAADDELLSGAAIESLDYEVIENYAYREEQAQRSKFWVPYYVMLKWLFALLIGVGTGLAAIFINLAVENFSGWKYTATFAIIKHSYFVGFFVYTVFNLALVFSSVYIVTNFAPAAAGSGIPEIKGYLNGVDTHGILLFRTLVGKIFGSIGSVGGGLALGKEGPLVHTGACIASLLGQGGSAKYHLSSRWVRIFESDRDRRDLVTCGCAAGVAAAFRAPVGGVLFALEEVTSWWRSHLMWRVFFTSAVVAVVVRSAMNWCNSGKCGHFGAGGFIIWDISGGQEDYSYQELFPMAIIGVIGGLLGALFNQLTLYITKWRRTCLHKKGKRVQIFEACLISLVTSTISFVLPLLRKCSPCPKLETNSGIECPHPPGTDGNFVNFYCSQDREYNDLATIFFNTQDDAIRNLFSAKTFHEYSAQSLITFLVMFYFLAVVTFGTAVPAGQFVPGIMIGSTYGRLVGMFVVKFYKKLNIEEGTYALLGAASFLGGSMRMTVSLCVIMVEITNNLKLLPLIMLVLLVSKAVGDFFNEGLYEEQARLRGIPLLDSRPKQVMRNMNARDACKNQKVVDRGQNGESLVIGLILRSHLLVLLQAKVDFQNSAFPCGPGVLNRHNFSDFVKPASSKGKSIDDIHLTEDELGLYLDLAPFLNPSPYIVPEDMSLAKVYNLFRQLGLRHIFVVPRPSRVVGLITRKDLLLEEDNNNVMPELQSTSGLAERQNARG

SEQ ID NO: 162360 - protein, 104 aa, Zea Mays
MADRDRSGIYGGGAYGQQQGGGRPMGEQDFLVNKQIIHGCVRVNVSRVVVECSSLYVGNRLLVVFPECVINILVFVVCGAALGWGLGSAVYRYLFIAAPSRSEM

SEQ ID NO: 162361 - protein, 479 aa, Zea Mays
MATRRRLSPTFFGGLRAREHGGASGSSRATAGLPYLADLSSNPGGRGGGVIAVEHSGDPVIPFAISFGKTAQTCNLLAVADEDGYVGLYDTRRRLPSTSSSLEKSAETRVPDWVAHNNAIFDVCWIKEGSQILTASGDQTVKIWSVGNRKCIGVLSGHTGSVKSLSCHSSNPELIVSGSRDGSFALWDLRCDPKSPNSHGETCLTDNTNSMNKVVLHVRSSAVVREAHSPIQRNRTRSRAKAASTSITSVLYLKDGVSIATSGAADNVVKIWDTRNLEVPVSNKNSQAGALPLEGVKHGISCLSQDSYGAYIAASCMDNRIYLYSVLHVNKGPINVYTGSKIEFFFVKSAISPDGTHILGGSSDGNVYLWQVDQPESVTAVLKGHEGEATSVDWCASEVGKIATSSDDSTVRVWSTKKMDCTNVSSPTVIRKRAIAPNTEHRRSITHEPAATTSRGAVACARGDGEQQSGCHSPLQPRG

SEQ ID NO: 162362 - protein, 243 aa, Zea Mays
MFILGGSLGGRVTCQAYPELHSFAKDRRITLHKVKQMTDLYLLFHLPLSVEAFAQLQALQLELEGITLTHEMDWWTYIWGSHIYTSARAYKYLIGHTEIHPVFKWLWKSSCQHKHKVFFWLLLKERLSTRNVLRRKNMDLPSYDCILCTQCVEETVDHIFIKCDFAQQQDDSLAVLESFKRQLGVPLYTEITVLMCWSIWTASNDFIFRGLQPQTQHCKAIFKEFAWLSIEQRKSISHLLSNG

SEQ ID NO: 162363 - protein, 297 aa, Zea Mays
MLYEKRENYSRANPLKPKAGPKGIGRLPGLPLPCLAPPRRRSPATPERERQPPPPPDAPTSTVDASRPCVSPSCRASSNSAAPAPWRQRPARPCGHFPAFAYSRNLIPRSQARRMAPAFMELALEQAKFALDNLEVPVGCVIVEDGKVISSGSNKTNATRNATRHAEMEAIDVLLREWQSMGLDQPQVAEKFAGCDLYVTCEPCIMCATALSIIGIREVYFGCANDKFGGCGSIMSLHNGAASSSDELSGSQASTPKGFKCTGGIMAEEAVALFRCFYEQGNPNAPRPHRPVRMPQQ

SEQ ID NO: 162364 - protein, 283 aa, Zea Mays
MLYEKRENYSRANPLKPKAGPKGIGRLPGLPLPCLAPPRRRSPATPERERQPPPPPDAPTSTVDASRPCVSPSCRASSNSAAPAPWRQRPARPCGHFPAFAYSRNLIPRSQARRMAPAFMELALEQAKFALDNLEVPVGCVIVEDGKVISSGSNKTNATRNATRHAEMEAIDVLLREWQSMGLDQPQVAEKFAGCDLYVTWIREVYFGCANDKFGGCGSIMSLHNGAASSSDELSGSQASTPKGFKCTGGIMAEEAVALFRCFYEQGNPNAPRPHRPVRMPQQ

SEQ ID NO: 162365 - protein, 163 aa, Zea Mays
MLYEKRENYSRANPLKPKAGPKGIGRLPGLPLPCLAPPRRRSPATPERERQPPPPPDAPTSTVDASRPCVSPSCRASSNSAAPAPWRQRPARPCGHFPAFAYSRNLIPRSQARRMAPAFMELALEQAKFALDNLEVPVGCVIVEDGKVISSGSNKTNATRNTC

SEQ ID NO: 162366 - protein, 145 aa, Zea Mays
MTLGSAAHKIPLEVAHTLVEIAEVARYAYHHRPGRPATHEGDPTAPPAGADSSGGTNEDAARLLEENAMLRARLADDLALLRELHGAPCVSKECPPDLYNRLMAAVNNVSFLAHLEKLQDESARQLNELTSGDMTVLFHFLLQWN

SEQ ID NO: 162367 - protein, 248 aa, Zea Mays
MAAATEKTAEDIRRELQELQRQHREITERLRDPRGLRRGAPGPGPGPGAPRPLRGFARPAVGPESGDQPPQKRRLLSAVVKVDGAENNEEGTKDADAEGHGTGSGATEGSAGRGFNNGGFRRDGGLRMQRRVDYNSLPEPAPRELPRNEDPNLVRRNKRMLGQLLVGTLEKFQQEDKKLSNSEAFLRRSETQRKAEQKVREESERLRQKEREQIAEKRKRDMLLRRKKRGWSCCTFSGLSTIKGCPIS

SEQ ID NO: 162368 - protein, 284 aa, Zea Mays
MQRRVDYNSLPEPAPRELPRNEDPNLVRRNKRMLGQLLVGTLEKFQQEDKKLSNSEAFLRRSETQRKAEQKVREESERLRQKEREQIAEKRKRDMTLRARVAAKAEEKRLELLYIQWTEHHKRLSNFLRTKAEPPIYYMPTKPIIDDPAIVEQNKEKVFEEWKSMRRDELTRFQKQVEEQYLSNVERQLERIQNARNARKANGHANMQEMDKELDTHRAEHGPKTRRVPEEGGNDDDEDAEDMAAEDEVMDEVLGINDGINEDPSKPSEEATTEGGEPAPEEAQ

SEQ ID NO: 162369 - protein, 264 aa, Zea Mays
MTQGQILLKVARYRTKYQAAQKGKVGIVLDFNWYEALTNSPDDQAAAQRARDFHIGWFVDPLINGHYPQIMQDLVKERLPRFTPEQAKLVKGSADYIGINEYTSSYMKGQKLVQLAPSSYSADWQVQYVFARNGKPIGPQANSKWLYIAPTGMYGCVNYLKEKYGNPTIYITENGMDQPGNLTRDQYLRDATRVRFYRSYIGQLKKAIDQGANVAGYFAWSLLDNFEWLAGYSSKFGIVYVDFNTLERHPKASAYWFRDMLQKH

SEQ ID NO: 162370 - protein, 289 aa, Zea Mays
MKSLNFDAYRFSISWSRIFPDGEGKVNPEGVAYYNNLINYLLQQGMTPYINLYHYDLPLALEKKYGGWLSAKMADLFTDYADFCFKTYGDRVKHWFTFNEPRIVALLGYDTGSNPPQRCTRCAAGGNSATEPYIVAHNFLLAHATAVARYRTKYQAAQKGKVGIVLDFNWYEALTNSPDDQAAAQRARDFHIGWFVDPLINGHYPQIMQDLVKERLPRFTPEQAKLVKGSADYIGINEYTSSYMKGQKLVQLAPSSYSADWQLHAMANRLDHRRILSGSTSPRRGCTGA

SEQ ID NO: 162371 - protein, 295 aa, Zea Mays
MIAVRWAALLVALVVACGSAAAGAAAGEGPNWLGGLSRAAFPKDFVFGTATSAYQVEGAASTNGRGPSTWDAFVHTPGNIVYNQTADVAVDQYHRYREDVDLMKSLNFDAYRFSISWSRIFPDGEGRVNPEGVAYYNNLINYLLRKGITPYANLYHSDLPLALQNKYGGWLNAKMAKLFTDYADFCFKTFGDRVKHWFTFNEPRIVALLGYDAGSIPPQRCTKCSAGGNSATEPYIVAHNFLLSHAAAVSRYRNKYQAAQKGKVGIVLDFNWYEALTNSTEDQAAAQRARDFHVG

SEQ ID NO: 162372 - protein, 364 aa, Zea Mays
MIAVRWAALLVALVVACGSAAAGAAAGEGPNWLGGLSRAAFPKDFVFGTATSAYQVEGAASTNGRGPSTWDAFVHTPGNIVYNQTADVAVDQYHRYREDVDLMKSLNFDAYRFSISWSRIFPDGEGRVNPEGVAYYNNLINYLLRKGITPYANLYHSDLPLALQNKYGGWLNAKMAKLFTDYADFCFKTFGDRVKHWFTFNEPRIVALLGYDAGSIPPQRCTKCSAGGNSATEPYIVAHNFLLSHAAAVSRYRNKYQAAQKGKVGIVLDFNWYEALTNSTEDQAAAQRARDFHVGWFADPLINGHYPQIMQDIVKERLPKFTPEQAKLVKGSADYIGINQYTASYVKGQKLLQQKPTSYSADWQ

SEQ ID NO: 162373 - protein, 404 aa, Zea Mays
MKSLNFDAYRFSISWSRIFPDGEGRVNPEGVAYYNNLINYLLRKGITPYANLYHSDLPLALQNKYGGWLNAKMAKLFTDYADFCFKTFGDRVKHWFTFNEPRIVALLGYDAGSIPPQRCTKCSAGGNSATEPYIVAHNFLLSHAAAVSRYRNKYQAAQKGKVGIVLDFNWYEALTNSTEDQAAAQRARDFHVGWFADPLINGHYPQIMQDIVKERLPKFTPEQAKLVKGSADYIGINQYTASYVKGQKLLQQKPTSYSADWQVQYVLERNGKPIGPQANSKWLYIVPEGMYGCVNYLKHKYGNPTVFITENGMDQPGNLTRGQYLHDTTRVQFYKGYLAELRKAIDDGADVAGYFAWSLLDNFEWQSGYTSKFGIVYVDFSTPKLERHPKASAYWFRDMLQKHL

SEQ ID NO: 162374 - protein, 186 aa, Zea Mays
MACKLDRWYRLLRAHSIWLYIVPSGMYGVVNYLKEKYHNPIIIISENGMDQPGNLTREEYVHDAVRIDFYKNYLTELKRGIDGGANVIGYFAWSLLDNFEWLSGYTSKFGIVYVDFATLKRYPKDSAYWFRDMLSGTGSKAATPQTGSGGRPAGSASATSNGPALLVSLLVSLGVLLPSIFMVSSV

SEQ ID NO: 162375 - protein, 243 aa, Zea Mays
MQDIVKDRLPSFTPEQAKLVKGSSDYFGINQYTTYYIADQQTPPQGPPSYSSDWGVQYYFQRNGVQIGQMAHSIWLYIVPSGMYGVVNYLKEKYHNPIIIISENGMDQPGNLTREEYVHDAVRIDFYKNYLTELKRGIDGGANVIGYFAWSLLDNFEWLSGYTSKFGIVYVDFATLKRYPKDSAYWFRDMLSGTGSKAATPQTGSGGRPAGSASATSNGPALLVSLLVSLGVLLPSIFMVSSV

SEQ ID NO: 162376 - protein, 555 aa, Zea Mays
MDLLSIILVIASLLPFAASDGQGDALYDMKLKLNATGSQLSDWNQNQVNPCTWNSVICDNNNHVVQVTLASMGFTGVLSPRIGDLEYLNVLSLPGNNISGGIPEEFGNLSRLTSLDLEDNLLVGPIPASLGRLSKLQLLILSQNNLNGSIPDTLASILSLTDIRLAYNKLTGQIPSQLFQVARYNFSGNNLTCGANFLHPCASNMSYQGSSRGSTIGIVLGTVGGLMGLLIIWAVFIICNGRRKSHLREIFVDVSGEDDRRIAFGQLKRFAWRELQLATDNFSEKNVLGQGGFGKVYKGALPDGTKIAVKRLTDYESPGGEAAFLREVELISVAVHRNLLRLIGFCTTQTERLLVYPFMQNLSVAYRLRGFEPVVGDFGLAKLVDVQKTSVTTQVRGTMGHIAPEYLSTGKSSERTDVFGYGIMLLELVTGQRAIDFSRLEEEDDVLLLDHVKKLQREGHLDAIVDRNLNSCYNGQEVEMMIQIALLCTQASPEDRPSMSEVVRMLEGEGLAERWEEWQQVEVTRRQDYERMQQRFDWGEDSIYNQDAIELSAGR

SEQ ID NO: 162377 - protein, 847 aa, Zea Mays
MPNYVVGGIRRNLEQTQYSSSSSSGYSPCARSKVLQQQNDQHEDTHYDSDEAESKLSLLEPEDSVNEDNFAAVLSQFNDAHNKGSEGYGESGCGKHGEKSLAESVGSLNIGIIDFEFMDSTPLIHDKESCSLLEPEDSVNEDNFAAVLSKFNDAPNKESKGYGESGRGKHGEKSLAESVGSLNIGIVDSEFMDSSPLIHDKESCSPLEPEGSVNEDNFTAVLSQFNDAPNKESEGYGESGCGKHGEKSLVESVGSLNIGIVDSEFMDSSPLIHDKESCSPLEPEDSVNEDNFAAVLSQFNDAPNKESEGYGESGRGKHGEKSLAESVGSLNIGIIDSEFMDSSPLIHDKESCFPLEPEGSVNEDNFTAVLSQFNDAPNKESEGYGESGCGKHGEKSLVESVGSLNIGIVDSEFMDSSPLIHDKESCSPLEPEDSVNEDNFTAVLSQFNDAPNKESEAYGESGCGKHGENSLDESVGSLNIGVIDSEFMDSSPLIHDKESCSPLEPEDSVNEDNFAAVLSQYSDGPNEGNEGYGESGHYKHEEKSLDESVGSLTIGIIDSEFMDSSRPIHDKESCSTGSAADQCSRTIPAKYELSSEESDSTGSHLVFDSGKNYLELNNHSVTDLERIYNGHATSVDQYVRGNGETLADHPKKEEAGLQKDTGTIAQHRDTLACDGESVCSSCEEPRRGLNGEPSDFSSESHSRLTPTHNTGGKLSMVSEHPVHNMESDMTGMASDSTNPELNPEASTRNEMDGSRSTDNPVEPENVAQDSATRGRPEGDAPRSGKGVLRSVAGGITLVGAVFFMFHLSAALLQKKQGGKLCDGHTISFGKICSEQRKGQEHGQRKRP

SEQ ID NO: 162378 - protein, 730 aa, Zea Mays
MDSTPLIHDKESCSLLEPEDSVNEDNFAAVLSKFNDAPNKESKGYGESGRGKHGEKSLAESVGSLNIGIVDSEFMDSSPLIHDKESCSPLEPEGSVNEDNFTAVLSQFNDAPNKESEGYGESGCGKHGEKSLVESVGSLNIGIVDSEFMDSSPLIHDKESCSPLEPEDSVNEDNFAAVLSQFNDAPNKESEGYGESGRGKHGEKSLAESVGSLNIGIIDSEFMDSSPLIHDKESCFPLEPEGSVNEDNFTAVLSQFNDAPNKESEGYGESGCGKHGEKSLVESVGSLNIGIVDSEFMDSSPLIHDKESCSPLEPEDSVNEDNFTAVLSQFNDAPNKESEAYGESGCGKHGENSLDESVGSLNIGVIDSEFMDSSPLIHDKESCSPLEPEDSVNEDNFAAVLSQYSDGPNEGNEGYGESGHYKHEEKSLDESVGSLTIGIIDSEFMDSSRPIHDKESCSTGSAADQCSRTIPAKYELSSEESDSTGSHLVFDSGKNYLELNNHSVTDLERIYNGHATSVDQYVRGNGETLADHPKKEEAGLQKDTGTIAQHRDTLACDGESVCSSCEEPRRGLNGEPSDFSSESHSRLTPTHNTGGKLSMVSEHPVHNMESDMTGMASDSTNPELNPEASTRNEMDGSRSTDNPVEPENVAQDSATRGRPEGDAPRSGKGVLRSVAGGITLVGAVFFMFHLSAALLQKKQGGKLCDGHTISFGKICSEQRKGQEHGQRKRP

SEQ ID NO: 162379 - protein, 911 aa, Zea Mays
MSLHAARGGPHEDLSWSAIGRRAPRDVVTFGDREGGGGMRSAQQGPGAVRVDEASSASTFRELDEAFLQTQTKIWLGEVLHLRFGEDALVADLLADGELLFQVSKVLWKMLLKNNREQLKQSKVYIYERLSFGRSSGKYMPYSKVDSFLKICQILGLAGIDLFTPSDVVEKRNVRKVCICIRSVSKKSLILHLNVPDFDVVTYTISMPNYVVGGIRRNLEQTQYSSSSSSGYSPCARSKVLQQQIIFGGQNDQHEDTHYDSDEAESKLSLLEPEDSVNEDNFAAVLSQFNDAHNKGSEGYGESGCGKHGEKSLAESVGSLNIGIIDFEFMDSTPLIHDKESCSLLEPEDSVNEDNFAAVLSKFNDAPNKESKGYGESGRGKHGEKSLAESVGSLNIGIIDSEFMDSSPLIHDKESCFPLEPEGSVNEDNFTAVLSQFNDAPNKESEGYGESGCGKHGEKSLVESVGSLNIGIVDSEFMDSSPLIHDKESCSPLEPEDSVNEDNFTAVLSQFNDAPNKESEAYGESGCGKHGENSLDESVGSLNIGVIDSEFMDSSPLIHDKESCSPLEPEDSVNEDNFAAVLSQYSDGPNEGNEGYGESGHYKHEEKSLDESVGSLTIGIIDSEFMDSSRPIHDKESCSTGSAADQCSRTIPAKYELSSEESDSTGSHLVFDSGKNYLELNNHSVTDLERIYNGHATSVDQYVRGNGETLADHPKKEEAGLQKDTGTIAQHRDTLACDGESVCSSCEEPRRGLNGEPSDFSSESHSRLTPTHNTGGKLSMVSEHPVHNMESDMTGMASDSTNPELNPEASTRNEMDGSRSTDNPVEPENVAQDSATRGRPEGDAPRSGKGVLRSVAGGITLVGAVFFMFHLSAALLQKKQGGKLCDGHTISFGKICSEQRKGQEHGQRKRP

SEQ ID NO: 162380 - protein, 872 aa, Zea Mays
MSLHAARGGPHEDLSWSAIGRRAPRDVVTFGDREGGGGMRSAQQGPGAVRVDEASSASTFRELDEAFLQTQTKIWLGEVLHLRFGEDALVADLLADGELLFQVSKVLWKMLLKNNREQLKQSKVYIYERLSFGRSSGKYMPYSKVDSFLKVPDFDVVTYTISMPNYVVGGIRRNLEQTQYSSSSSSGYSPCARSKVLQQQIIFGGQNDQHEDTHYDSDEAESKLSLLEPEDSVNEDNFAAVLSQFNDAHNKGSEGYGESGCGKHGEKSLAESVGSLNIGIIDFEFMDSTPLIHDKESCSLLEPEDSVNEDNFAAVLSKFNDAPNKESKGYGESGRGKHGEKSLAESVGSLNIGIVDSEFMDSSPLIHDKESCFPLEPEGSVNEDNFTAVLSQFNDAPNKESEGYGESGCGKHGEKSLVESVGSLNIGIVDSEFMDSSPLIHDKESCSPLEPEDSVNEDNFTAVLSQFNDAPNKESEAYGESGCGKHGENSLDESVGSLNIGVIDSEFMDSSPLIHDKESCSPLEPEDSVNEDNFAAVLSQYSDGPNEGNEGYGESGHYKHEEKSLDESVGSLTIGIIDSEFMDSSRPIHDKESCSTGSAADQCSRTIPAKYELSSEESDSTGSHLVFDSGKNYLELNNHSVTDLERIYNGHATSVDQYVRGNGETLADHPKKEEAGLQKDTGTIAQHRDTLACDGESVCSSCEEPRRGLNGEPSDFSSESHSRLTPTHNTGGKLSMVSEHPVHNMESDMTGMASDSTNPELNPEASTRNEMDGSRSTDNPVEPENVAQDSATRGRPEGDAPRSGKGVLRSVAGGITLVGAVFFMFHLRRSKGGSFATVIPSLSGKSARSNARARNMGRENVPDAYPGGRLKA

SEQ ID NO: 162381 - protein, 1059 aa, Zea Mays
MSLHAARGGPHEDLSWSAIGRRAPRDVVTFGDREGGGGMRSAQQGPGAVRVDEASSASTFRELDEAFLQTQTKIWLGEVLHLRFGEDALVADLLADGELLFQVSKVLWKMLLKNNREQLKQSKVYIYERLSFGRSSGKYMPYSKVDSFLKICQILGLAGIDLFTPSDVVEKRNVRKVCICIRSVSKKSLILHLNVPDFDVVTYTISMPNYVVGGIRRNLEQTQYSSSSSSGYSPCARSKVLQQQIIFGGQNDQHEDTHYDSDEAESKLSLLEPEDSVNEDNFAAVLSQFNDAHNKGSEGYGESGCGKHGEKSLAESVGSLNIGIIDFEFMDSTPLIHDKESCSLLEPEDSVNEDNFAAVLSKFNDAPNKESKGYGESGRGKHGEKSLAESVGSLNIGIVDSEFMDSSPLIHDKESCSPLEPEGSVNEDNFTAVLSQFNDAPNKESEGYGESGCGKHGEKSLVESVGSLNIGIVDSEFMDSSPLIHDKESCSPLEPEDSVNEDNFAAVLSQFNDAPNKESEGYGESGRGKHGEKSLAESVGSLNIGIIDSEFMDSSPLIHDKESCFPLEPEGSVNEDNFTAVLSQFNDAPNKESEGYGESGCGKHGEKSLVESVGSLNIGIVDSEFMDSSPLIHDKESCSPLEPEDSVNEDNFTAVLSQFNDAPNKESEAYGESGCGKHGENSLDESVGSLNIGVIDSEFMDSSPLIHDKESCSPLEPEDSVNEDNFAAVLSQYSDGPNEGNEGYGESGHYKHEEKSLDESVGSLTIGIIDSEFMDSSRPIHDKESCSTGSAADQCSRTIPAKYELSSEESDSTGSHLVFDSGKNYLELNNHSVTDLERIYNGHATSVDQYVRGNGETLADHPKKEEAGLQKDTGTIAQHRDTLACDGESVCSSCEEPRRGLNGEPSDFSSESHSRLTPTHNTGGKLSMVSEHPVHNMESDMTGMASDSTNPELNPEASTRNEMDGSRSTDNPVEPENVAQDSATRGRPEGDAPRSGKGVLRSVAGGITLVGAVFFMFHLSAALLQKKQGGKLCDGHTISFGKICSEQRKGQEHGQRKRP

SEQ ID NO: 162382 - protein, 735 aa, Zea Mays
MDSTPLIHDKESCSLLEPEDSVNEDNFAAVLSKFNDAPNKESKGYGESGRGKHGEKSLAESVGSLNIGIVDSEFMDSSPLIHDKESCSPLEPEGSVNEDNFTAVLSQFNDAPNKESEGYGESGCGKHGEKSLVESVGSLNIGIVDSEFMDSSPLIHDKESCSPLEPEDSVNEDNFAAVLSQFNDAPNKESEGYGESGRGKHGEKSLAESVGSLNIGIIDSEFMDSSPLIHDKESCFPLEPEGSVNEDNFTAVLSQFNDAPNKESEGYGESGCGKHGEKSLVESVGSLNIGIVDSEFMDSSPLIHDKESCSPLEPEDSVNEDNFTAVLSQFNDAPNKESEAYGESGCGKHGENSLDESVGSLNIGVIDSEFMDSSPLIHDKESCSPLEPEDSVNEDNFAAVLSQYSDGPNEGNEGYGESGHYKHEEKSLDESVGSLTIGIIDSEFMDSSRPIHDKESCSTGSAADQCSRTIPAKYELSSEESDSTGSHLVFDSGKNYLELNNHSVTDLERIYNGHATSVDQYVRGNGETLADHPKKEEAGLQKDTGTIAQHRDTLACDGESVCSSCEEPRRGLNGEPSDFSSESHSRLTPTHNTGGKLSMVSEHPVHNMESDMTGMASDSTNPELNPEASTRNEMDGSRSTDNPVEPENVAQDSATRGRPEGDAPRSGKGVLRSVAGGITLVGAVFFMFHLRRSKGGSFATVIPSLSGKSARSNARARNMGRENVPDAYPGGRLKA

SEQ ID NO: 162383 - protein, 628 aa, Zea Mays
MPNYVVGGIRRNLEQTQYSSSSSSGYSPCARSKIIFGGQNDQHEDTHYDSDEAESKLSLLEPEDSVNEDNFAAVLSQFNDAHAPNKESEGYGESGRGKHGEKSLAESVGSLNIGIIDSEFMDSSPLIHDKESCFPLEPEGSVNEDNFTAVLSQFNDAPNKESEGYGESGCGKHGEKSLVESVGSLNIGIVDSEFMDSSPLIHDKESCSPLEPEDSVNEDNFTAVLSQFNDAPNKESEAYGESGCGKHGENSLDESVGSLNIGVIDSEFMDSSPLIHDKESCSPLEPEDSVNEDNFAAVLSQYSDGPNEGNEGYGESGHYKHEEKSLDESVGSLTIGIIDSEFMDSSRPIHDKESCSTGSAADQCSRTIPAKYELSSEESDSTGSHLVFDSGKNYLELNNHSVTDLERIYNGHATSVDQYVRGNGETLADHPKKEEAGLQKDTGTIAQHRDTLACDGESVCSSCEEPRRGLNGEPSDFSSESHSRLTPTHNTGGKLSMVSEHPVHNMESDMTGMASDSTNPELNPEASTRNEMDGSRSTDNPVEPENVAQDSATRGRPEGDAPRSGKGVLRSVAGGITLVGAVFFMFHLSAALLQKKQGGKLCDGHTISFGKICSEQRKGQEHGQRKRP

SEQ ID NO: 162384 - protein, 409 aa, Zea Mays
MDPSTPADETSPIARAVSAPGAQPTRSFPAPIPEESLHSSPASTATESAEEPTVAAPEESPNAAPASAVVAPVGGLPLPSPRRGGGEVGIRGARPPLLSPPPPIGALAPPPVRRSFVDNDMTGSAWDIVQSFAPRDQGSELGLGGSVDSRCNSDKEEENDVEDGDAAVEGELKELRIGETFEGFTGTSSLSTTNDDDASSTTTEAMFIISPNGKFKRNIKSWMRGALLGSGSFGMVYEGISDEGAFFAVKEVSLLDQGSNAQQSIVALEQEIALLSQFEHENIVQYYGTDKEESKLYIFIELVTQGSLSSLYQKYKLRESQVSAYTRQILNGLVYLHERNVVHRDIKCANILVHANGSVKLADFGLAKEMSKINMLRSCKGSVYWMAPEVTKWRSCKRQETIGNSAIAP

SEQ ID NO: 162385 - protein, 448 aa, Zea Mays
MDPSTPADETSPIARAVSAPGAQPTRSFPAPIPEESLHSSPASTATESAEEPTVAAPEESPNAAPASAVVAPVGGLPLPSPRRGGGESFAPRDQGSELGLGGSVDSRCNSDKEEENDVEDGDAAVEGELKELRIGETFEGFTGTSSLSTTNDDDASSTTTEAMFIISPNGKFKRNIKSWMRGALLGSGSFGMVYEGISDEGAFFAVKEVSLLDQGSNAQQSIVALEQEIALLSQFEHENIVQYYGTDKEESKLYIFIELVTQGSLSSLYQKYKLRESQVSAYTRQILNGLVYLHERNVVHRDIKCANILVHANGSVKLADFGLAKEMSKINMLRSCKGSVYWMAPEVINPKKMYGPSADIWSLGCTVLEMLTRQIPFPNVEWTNAFFMIGRGEQPTIPNYLSKEAQDFIGQCVRVDPESRPSASQLLEHPFVNRPLRASFESSSPPAI

SEQ ID NO: 162386 - protein, 142 aa, Zea Mays
MTASTSSTLTSSRGYSGRASSRKRGIEAVSDSNIYDVTIESPSDYLQYVRSSIDCLCLLMFDPIKPALGAIVSSLKETNLSKRAQSLRMVPPVDLMETQPEDLRTQEQQLNELVDIQIEEIDGVAKNVTSRGKDKMAELAVQ

SEQ ID NO: 162387 - protein, 350 aa, Zea Mays
MARGSGTRPRRLLEQRNPTERSNANLQSQIRAARKVSLLWLLLVCVCPLMRSALQLLLPNAEAAVYITGSICAAFVANIDGHSDKTVTFNGRMLSWKKLDSQVLRPNLYVPPKQYPNCKKHDMVTFSYCYRTAVTNGSAIKHDGSYESDPAVEIVRVELQGSTPIYIGEHGWEMLLVVKKATQEAGSKFELLGFASVHNFYHYPESIRLRISQILVLPPYQGEGHGLGLLEAINYIAQSENIYDVTIESPSDYLQYVRSSIDCLCLLMFDPIKPALGAIVSSLKETNLSKRAQSLRMVPPVDLMETQPEDLRTQEQQLNELVDIQIEEIDGVAKNVTSRGKDKMAELAVQ

SEQ ID NO: 162388 - protein, 78 aa, Zea Mays
MQSRLGCLRWRLRIVRYHMSARELLSPLTITNFVTKIWWLVDLLKNQKSDKVDITIQPEEQEAMNDVLAARTVFLVRV

SEQ ID NO: 162389 - protein, 88 aa, Zea Mays
MARGSGTRPRRLLEQRNPTERSNANLQSQIRAARKGSSHKWYGSIEVIWICDAIEIHGLKIGVTSSRGWLSTCCLASRLKAAAGITWL

SEQ ID NO: 162390 - protein, 576 aa, Zea Mays
MRRVAPAMTAASSAAGGEETAVVEKTLLNGDVYRGGSPHGKGRYVWADGCMYEGNWRRGKASGKGRFSWPSGATFEGQFRRGRIDGQGVFVGPDGATYRGAWVADRRHGLGNKTYANGDCYEGQWRRNLQDGHGRYVWANGNQYIGEWRAGVLSGRGALICANGSRYDGVWENGVPKGSGVFTWPTGGSWPGSSVDLPAMSATFFAPPGAVAVSRRSSVEGVGDKATPRICIWESEGEAGDITCDIVDALEASMPMLFKEAAAIAGGATYMRSASGVPRWASAVATTPQSKRPGRTISKRHKNYELMLQLQLGIMHSVGKSSAVPMRELEQGDFDPRENALSWTEFPPEGSKATLPHSTGYFCWKDYCPMVFRHLRKLFAVDTGDYMLSICGNDPLRELSSPGKSGSFFYLTQDDQFMIKTVKKSEVKLLLKMLNSYCKHVDRYKNSLITRFYGVHCVKRHNGQKVRFIVMGNLFCSEYQIHRRFDLKGSSYGRTADKFEDEIDETTTLKDLDLNFVFRLQKSWYTDLHEQLRRDCDFLESEGIMDYSFLIGIHFCDDISASKMGSSTFTASPRNL

SEQ ID NO: 162391 - protein, 382 aa, Zea Mays
MRRVAPAMTAASSAAGGEETAVVEKTLLNGDVYRGGSPHGKGRYVWADGCMYEGNWRRGKASGKGRFSWPSGATFEGQFRRGRIDGQGVFVGPDGATYRGAWVADRRHGLGNKTYANGDCYEGQWRRNLQDGHGRYVWANGNQYIGEWRAGVLSGRGALICANGSRYDGVWENGVPKGSGVFTWPTGGSWPGSSVDLPAMSATFFAPPGAVAVSRRSSVEGVGDKATPRICIWESEGEAGDITCDIVDALEASMPMLFKEAAAIAGGATYMRSASGVPRWASAVATTPQSKRPGRTISKRHKNYELMLQLQLGIMHSVGKSSAVPMRELEQGDFDPRENALSWTEFPPEGSKATLPHSTGYFCWKDYCPMVFRGLHAFDLWQ

SEQ ID NO: 162392 - protein, 344 aa, Zea Mays
MCKWRFYYGSASCRHSVGKSSAVPMRELEQGDFDPRENALSWTEFPPEGSKATLPHSTGYFCWKDYCPMVFRHLRKLFAVDTGDYMLSICGNDPLRELSSPGKSGSFFYLTQDDQFMIKTVKKSEVKLLLKMLNSYCKHVDRYKNSLITRFYGVHCVKRHNGQKIHRRFDLKGSSYGRTADKFEDEIDETTTLKDLDLNFVFRLQKSWYTDLHEQLRRDCDFLESEGIMDYSFLIGIHFCDDISASKMGSSTFTASPSGGTTELCFSDDAFDMVPDCSRKSLIRLGAHMPGRAEQASRRSGVKKRLEHSYKSLQTDPNSISAVEPKLYSRRFQEFIGRIFVEDG

SEQ ID NO: 162393 - protein, 369 aa, Zea Mays
MRRVAPAMTAASSAAGGEETAVVEKTLLNGDVYRGGSPHGKGRYVWADGCMYEGNWRRGKASGKGRFSWPSGATFEGQFRRGRIDGQGVFVGPDGATYRGAWVADRRHGLGNKTYANGDCYEGQWRRNLQDGHGRYVWANGNQYIGEWRAGVLSGRGALICANGSRYDGVWENGVPKGSGVFTWPTGGSWPGSSVDLPAMSATFFAPPGAVAVSRRSSVEGVGDKATPRICIWESEGEAGDITCDIVDALEASMPMLFKEAAAIAGGATYMRSASGVPRWASAVATTPQSKRPGRTISKRHKNYELMLQLQLGIILRLCRCENWNREILIQGKMLCPGQSSHQRVRRPHCRIQLGTSAGRTTAPWCSGI

SEQ ID NO: 162394 - protein, 660 aa, Zea Mays
MRRVAPAMTAASSAAGGEETAVVEKTLLNGDVYRGGSPHGKGRYVWADGCMYEGNWRRGKASGKGRFSWPSGATFEGQFRRGRIDGQGVFVGPDGATYRGAWVADRRHGLGNKTYANGDCYEGQWRRNLQDGHGRYVWANGNQYIGEWRAGVLSGRGALICANGSRYDGVWENGVPKGSGVFTWPTGGSWPGSSVDLPAMSATFFAPPGAVAVSRRSSVEGVGDKATPRICIWESEGEAGDITCDIVDALEASMPMLFKEAAAIAGGATYMRSASGVPRWASAVATTPQSKRPGRTISKRHKNYELMLQLQLGIMHSVGKSSAVPMRELEQGDFDPRENALSWTEFPPEGSKATLPHSTGYFCWKDYCPMVFRHLRKLFAVDTGDYMLSICGNDPLRELSSPGKSGSFFYLTQDDQFMIKTVKKSEVKLLLKMLNSYCKHVDRYKNSLITRFYGVHCVKRHNGQKVRFIVMGNLFCSEYQIHRRFDLKGSSYGRTADKFEDEIDETTTLKDLDLNFVFRLQKSWYTDLHEQLRRDCDFLESEGIMDYSFLIGIHFCDDISASKMGSSTFTASPSGGTTELCFSDDAFDMVPDCSRKSLIRLGAHMPGRAEQASRRSGVKKRLEHSYKSLQTDPNSISAVEPKLYSRRFQEFIGRIFVEDG

SEQ ID NO: 162395 - protein, 670 aa, Zea Mays
MRRVAPAMTAASSAAGGEETAVVEKTLLNGDVYRGGSPHGKGRYVWADGCMYEGNWRRGKASGKGRFSWPSGATFEGQFRRGRIDGQGVFVGPDGATYRGAWVADRRHGLGNKTYANGDCYEGQWRRNLQDGHGRYVWANGNQYIGEWRAGVLSGRGALICANGSRYDGVWENGVPKGSGVFTWPTGGSWPGSSVDLPAMSATFFAPPGAVAVSRRSSVEGVGDKATPRICIWESEGEAGDITCDIVDALEASMPMLFKEAAAIAGGATYMRSASGVPRWASAVATTPQSKRPGRTISKRHKNYELMLQLQLGIMHSVGKSSAVPMRELEQGDFDPRENALSWTEFPPEGSKATLPHSTGYFCWKDYCPMVFRHLRKLFAVDTGDYMLSICGNDPLRELSSPGKSGSFFYLTQDDQFMIKTVKKSEVKLLLKMLNSYCKHVDRYKNSLITRFYGVHCVKRHNGQKVRFIVMGNLFCSEYQIHRRFDLKGSSYGRTADKFEDEIDETTTLKDLDLNFVFRLQKSWYTDLHEQLRRDCDFLESEGIMDYSFLIGIHFCDDISASKMGSSTFTASPKRLIKSESFQGGGTTELCFSDDAFDMVPDCSRKSLIRLGAHMPGRAEQASRRSGVKKRLEHSYKSLQTDPNSISAVEPKLYSRRFQEFIGRIFVEDG

SEQ ID NO: 162396 - protein, 78 aa, Zea Mays
MYFSVLLQIELFPSVVRAIYTAFKWGCVQAQLVSRSCIGWLQNAQFFGTVRCSMYVLILMCGTYEYALLHRYNFFGRF

SEQ ID NO: 162397 - protein, 83 aa, Zea Mays
MYSRAQLWCYIHQIELFPSVVRAIYTAFKWGCVQAQLVSRSCIGWLQNAQFFGTVRCSMYVLILMCGTYEYALLHRYNFFGRF

SEQ ID NO: 162398 - protein, 81 aa, Zea Mays
MHLVWSSFIFFHGEERNILQPFATATLNHFVEKAGSISPSRVQWWWEGDQCQSSPSLRAVGGCVLQRRRVLDRADVDLGDA

SEQ ID NO: 162399 - protein, 96 aa, Zea Mays
MVRGDRAGVRLRTTGRRSSPPPAGAPSRHEMHWEQLAWDAISSPANAARPIPQRSSISRTLVRLPSNSLLYIQPIGERLRQLMSYEIICNPFTVRI

SEQ ID NO: 162400 - protein, 430 aa, Zea Mays
MQRRRGHTWAGVGKTAQAASAHAALFCFTLLLALRVDGRTTYSWWIIFIPLWLFHGIVARGRFSMPAPSLPHGRHWAPCHSIVAAPLLIAFELLLCIYLESIRVRNHPSFDLKIVFLPLLAFEAIILIDNFRMCRALMPGDEESMSDEAIWETLPHFWVAISMVFLIAATTFTLLKLSGDVGALGWWDLFINYGIAECFAFLVCTRWFNPMIHKSPTHGEASSSSAAIRYRDWESGLVLPSLEDHEQEKLCGLPDIGGHVMKIPLVAFQVLLCMRLEGTPPSARYIPIFALFSPLFILQGFLVGGLLMKGARKNKPGYFILNLLGTIPFVAIRQRWLGKCLKRTLQKRFGGYRQLWENNLKSPSVPNRNMKGFKMRRFFVGFVMRGRYAWCYFPAGTELYANLVLRNARSVQSAVCQLKSACLYMMFKPH

SEQ ID NO: 162401 - protein, 447 aa, Zea Mays
MQRRRGHTWAGVGKTAQAASAHAALFCFTLLLALRVDGRTTYSWWIIFIPLWLFHGIVARGRFSMPAPSLPHGRHWAPCHSIVAAPLLIAFELLLCIYLESIRVRNHPSFDLKIVFLPLLAFEAIILIDNFRMCRALMPGDEESMSDEAIWETLPHFWVAISMVFLIAATTFTLLKLSGDVGALGWWDLFINYGIAECFAFLVCTRWFNPMIHKSPTHGEASSSSAAIRYRDWESGLVLPSLEDHEQEKLCGLPDIGGHVMKIPLVAFQVLLCMRLEGTPPSARYIPIFALFSPLFILQGPHQKFAIALLFFIMVQGFLVGGLLMKGARKNKPGYFILNLLGTIPFVAIRQRWLGKCLKRTLQKRFGGYRQLWENNLKSPSVPNRNMKGFKMRRFFVGFVMRGRYAWCYFPAGTELYANLVLRNARSVQSAVCQLKSACLYMMFKPH

SEQ ID NO: 162402 - protein, 470 aa, Zea Mays
MQRRRGHTWAGVGKTAQAASAHAALFCFTLLLALRVDGRTTYSWWIIFIPLWLFHGIVARGRFSMPAPSLPHGRHWAPCHSIVAAPLLIAFELLLCIYLESIRVRNHPSFDLKIVFLPLLAFEAIILIDNFRMCRALMPGDEESMSDEAIWETLPHFWVAISMVFLIAATTFTLLKLSGDVGALGWWDLFINYGIAECFAFLVCTRWFNPMIHKSPTHGEASSSSAAIRYRDWESGLVLPSLEDHEQEKLCGLPDIGGHVMKIPLVAFQVLLCMRLEGTPPSARYIPIFALFSPLFILQGAGVLFSLARLVEKVVLLLRNGPVSPNYLTASSKVRDCFAFLHHGSRLLGWWSIDEGSKEEQARLFYTESTGYNTFCGYPPEVVRKMPKKDLAEEVWRLQAALGEQSEITKCTKQEYERLQNEKVLCRICYEGEICMVLLPCRHRTLCNRKMSAEICDRNASSAAWWLFTM

SEQ ID NO: 162403 - protein, 145 aa, Zea Mays
MYIFKQPGIGGEVVPHQDNTFLYTEPRTCTGLWLALEDATINNGCLWAIPGSHKKGLVRRMVRDENGTHFDRPSPVYDQKEFVPLEVKSGALVVIHGDLIHQSFENLSPASRHAFSLHVVDTEGCKWSEDNWIQRKTAPEPLYVS

SEQ ID NO: 162404 - protein, 73 aa, Zea Mays
MCATSWRAPRLPTRPKLTTRYMEIIKDIACLVLSISCSYHCITVQNKYKKVSSCCFSLLGQCNLHSCSLRCCK

SEQ ID NO: 162405 - protein, 797 aa, Zea Mays
MQTKPWMPLLIITLEDDSGLEVKDQKISFEDEVFEGEQAEQVTQQQELCAMPTDPSDHEFVERLDRSTELEHFPLAESKHKMNSMPVEASKHVAVTQIEGKQVQQAEVNQELDSIPKCSREHADEELQGERTAQAGLEQECDSVPIDYGEHGSLTSYAHTDDEQDEAMQKVTSVTRIEEKQVQQAEVNQELDSIPKCSREHADEELQGERTAQAGLEQECDSVPIDSGEHGCLTSYAHTDDEQDEAKQKVTSVTRIEEMQVQQAEVNQELDSIPKRSREHADQELEVERTAQAGLEQECDSVPIDSEEHGCLFSYAHTDDEQDEVKQKVTSETADVLHYAADTFNVNTNSWKDIEEDSTEAALTAIHQICYEPLTSIVKFSLDHSVSEEDREPDTPTHIEGICDSQELLDSKAVVSDAKSVDSSVATLSTDLESTELVSVDQLKSALASTRKSLNTLYSELENERNAAAIAADETMAMINRLQEQKAAMQMEAIQYQRLMEEQSEYDQEALQRLNELVVKREKEKQDLERELELYRHKVHLYEVKVRKLSRHKADDQNGSSSTSSSAEDSDDLSQSFYEGDESSHGINGSNGSIPTDVVLQETARHLVTLDGSLADFEEERLSILEQLKVLEDKLFDLDDEESDNMKHFSEENHLSGASNGFSDDDSCFKLHDKRKNVTYRGKKLLPLFDDATVEAGNVPQGNDAQHSTEVTLDLAREQHKLAIANEIDQVHERLHALEADREYIKQCVRTLKKGGKGFDLLQEILQHLRDLRRIEQRASARNSGELSPHYLHHHTD

SEQ ID NO: 162406 - protein, 798 aa, Zea Mays
MQTKPWMPLLIITLEDDSGLEVKDQKISFEDEVFEGEQAEQVTQQQELCAMPTDPSDHEFVERLDRSTELEHFPLAESKHKMNSMPVEASKHVAVTQIEGKQVQQAEVNQELDSIPKCSREHADEELQGERTAQAGLEQECDSVPIDYGEHGSLTSYAHTDDEQDEAMQKVTSVTRIEEKQVQQAEVNQELDSIPKCSREHADEELQGERTAQAGLEQECDSVPIDSGEHGCLTSYAHTDDEQDEAKQKVTSVTRIEEMQVQQAEVNQELDSIPKRSREHADQELEVERTAQAGLEQECDSVPIDSEEHGCLFSYAHTDDEQDEVKQKVTSETADVLHYAADTFNVNTNSWKEDIEEDSTEAALTAIHQICYEPLTSIVKFSLDHSVSEEDREPDTPTHIEGICDSQELLDSKAVVSDAKSVDSSVATLSTDLESTELVSVDQLKSALASTRKSLNTLYSELENERNAAAIAADETMAMINRLQEQKAAMQMEAIQYQRLMEEQSEYDQEALQRLNELVVKREKEKQDLERELELYRHKVHLYEVKVRKLSRHKADDQNGSSSTSSSAEDSDDLSQSFYEGDESSHGINGSNGSIPTDVVLQETARHLVTLDGSLADFEEERLSILEQLKVLEDKLFDLDDEESDNMKHFSEENHLSGASNGFSDDDSCFKLHDKRKNVTYRGKKLLPLFDDATVEAGNVPQGNDAQHSTEVTLDLAREQHKLAIANEIDQVHERLHALEADREYIKQCVRTLKKGGKGFDLLQEILQHLRDLRRIEQRASARNSGELSPHYLHHHTD

SEQ ID NO: 162407 - protein, 77 aa, Zea Mays
MELLGLADRSGGIAHFLLSRWQHVGASSKEVTVSSSRCYQGWSPPCRLYKVLGVWALVSPRPWPSESMEKQVLHYLA

SEQ ID NO: 162408 - protein, 144 aa, Zea Mays
MAVSIELTKEYGYVVLVLVAYVFLNLWMGFQVGKARRKYKVFYPTMYAIESENKDAKLFNCVQNSLEWMPVFFVILLLGGLQHPTIAAGLGGIYIVARFFYFKGYATGVPDNRLKIGGLNYLALLGLIICTASFGINLLIREML

SEQ ID NO: 162409 - protein, 238 aa, Zea Mays
MNKRPRDDHSFASAPKRQYGAGGGYGPQQGYSEERSSARRVADHYSARSNQTLEERENSPIIHLKKLNNWIKSVLVQLYARPGDCVLDLACGKGGDLIKWDKAKVGYYVGVDIAEGSIKDCMTRYNGDTDQQRRKRLVWMNIYMRMLRLIYVAVSLLYTIHGQLKHALDKPWQMCLHYFVLEAFLLGQCLMPMSLSKGFENLKGWNLGTVFTGLALAMSTLKRNSLHPDRLVSSTSFT

SEQ ID NO: 162410 - protein, 331 aa, Zea Mays
MNKRPRDDHSFASAPKRQYGAGGGYGPQQGYSEERSSARRVADHYSARSNQTLEERENSPIIHLKKLNNWIKSVLVQLYARPGDCVLDLACGKGGDLIKWDKAKVGYYVGVDIAEGSIKDCMTRYNGDTDQQRRKRLVWMNIYMRMLRLIYVAVSLLYTIHGQLKHALDKPWQMCLHYFVLEAFLLGQCLMPMSLSKGFENKFPASRPFGIKYKFHLEDAVDCPEWVVPFHLFKLLAEEYDLELVLMKNFHEFVHEYLQKPEFAELMRRLGALGDGRQDQSTLSQDEWEVSYLYLAFVLRKRGQPPTQRRASNANRGKMFLTEGDIEVLGV

SEQ ID NO: 162411 - protein, 96 aa, Zea Mays
MAEGRGSARAIGAMAFAVACCYCCVAIADAATTYYVGDSNGWSFSSPSWPNGKHFRAGDTLGTSPGSTTWWPWTRTGTTAARRRRGRGPTRPAPTA

SEQ ID NO: 162412 - protein, 180 aa, Zea Mays
MLGFRQMPWSSAQEQEQAPSEQLCEGVSAVVAARQGMEKPLTAVAEAFEELARGMEADGGELRLAPFSDSCALVSVLFSSLGMAFRFAEIEYVTKVNDLIGAGKSYRTLSDILDKDIQNDCVKKQGSHSRNLRRVRLGLGLIKALFEQFLDTEYVSLHSTKHEHISSLSLNISGKIGHID

SEQ ID NO: 162413 - protein, 102 aa, Zea Mays
MVILSHCFFHESEILGCWSLLFLPVLAMLSPSLRGLEDVPFAQYEWQSCRRFLFETVWQSVWSVHGSYVQDGDRLPWFQIQPWIRELAFNFPLSQNTTQMSL

SEQ ID NO: 162414 - protein, 75 aa, Zea Mays
MNLTSYYILIMCMCTCVCFYTQTLKELALFTLRSISCLRLLLVHYQINAIDLMKLVLLLLVLLHIVWIKTKNMHH

SEQ ID NO: 162415 - protein, 134 aa, Zea Mays
MAFWQTRDFLFCGICGTLLTFDSVRSASCPLCGFKRDAKEIEGKEIQYTMTAEDIRRGLKTQTEDVVGQRPVTNKACPKCDHPKAEFYNIQMRERRRSTCVKDAAVISKTNEELSYHFYGYMALVPKKFPALTD

SEQ ID NO: 162416 - protein, 342 aa, Zea Mays
MRAPPSAGGFNSPWTLAIRAAADQGRPRRAIALYLASLRSSCRPCPFALAAVLKSVPRLPEHAVLPAAASLHAHLLRLGLLSHPYPHAALSHLYSHLLPPHHNHARGLLDDAPTPLNRHSLVSSNSLLASLLRAGDIPAARAMFEAMPARDVVSWNSMVAGLAKAGHLDEAIEMFDQMPETNVASWNALVSGFMAQGHLAQAQELFERMPTRNNVSWITMISGYAKAGDVQAAANLFDRMGSKDLYAWNAMISCYAQNGCAREALGIFNRMLKPHIWVVPNEKTFSSVISACSQLGDLSTMTHLGGNASTASIDNDVLDRSRNFYERRREGKKMVAVAIVTQ

SEQ ID NO: 162417 - protein, 1080 aa, Zea Mays
MCASFHPKEDLVVSASLDQTVRVWDIGALRKKTVSPADDILRLTQMNTDLFGGVDAVVKYVLEGHDRGVNWASFHPTLPLIVSGADDRQVKLWRMNDTKAWEVDTLRGHMNNVSCVMFHAKQDIIVSNSEDKSIRIWDATKRTGIQTFRREHDRFWILAAHPEMNLLAAGHDSGMIVFKLERERPAFCVSGDTVFYLKDRFLRFFEYSTQKEVQVAPIRRPGSVSLNQSPRTLSYSPTENAVLICSDADGGSYELYIVPKDSAGRSDYLQEAKKGAGGSAVFVARNRFAVLEKSSNQVLVKNLKNEILKKSPLPIATDAIYYAGTGNLLCKGEDRVAIFDLQQRLVLGELQTPAIKYVVWSSDMESVALLSKHAVVIASKKLVHKCTLHETIRVKSGAWDENGVFIYTTLNHMKYCLPNGDSGIIKTLDVPIYITRVVGNNIFCLDRDGKNKLIAVDASEYIFKLALLRKRYDHVMSMIKNSQLCGQAVISYLQQKGFPEVALHFVKDEKTRFNLALESGNIQIAVASAKEIDDKDHWYKLGIEALRQGNVGIVEYAYQRTKNFERLAFLYLITGYLDKVGFMCKIAGQNNNLMGQFHNALYLGDAKKRVEILENAGQLPLAYVTAVTHGLTEIAERIASELGENVPSLPEGKSHSLLIPPAPLTACGDWPLLRVVRGIFEGGLDATGRADLEEDDEAAGADWGDEDLDIVDVSEVVANGGDGVDVEEGEPNEEDGEEGGWDLEDLELPPETETPKAVGNARSALFVAPTPGIPVSQIWTQRSSLAGEQAAAGNFDTAMRLLSRQLGIKNFVPLKPLFIDLHMGSHTYMCAFAAAPVISVAVEKGWNESASPNVRGPPALVFSFSQMEDRLKAAYKATTEGKFPEALRQFLSILHTIPVIVVDSRREVDEVKELIEIVREYVLGLRMELKRKELRDDVTRQQELAAYFTNCKLQRVHMRLVLASAMALCFKQKNYATAAHFARMLLENSPQEAQAKKARQVLQACQDKDDSHQLNYDFRNPFVVCGATYVPIYRGQKDVSCPYCGSRFVPSIEGQLCTICELGAVGADASGLLCSPTQSR

SEQ ID NO: 162418 - protein, 373 aa, Zea Mays
MALLSDLINLDLSGRTGKIIAEYIWVGGSGMDVRSKARTLSGPVDDPSKLPKWNFDGSSTGQAPGDDSEVILCPRAIFRDPFRKGQNILVMCDCYEPNGEPIPSNKRHGAAKIFSHPDVKAEEPWFGIEQEYTLLQKDTKWPLGWPLGGYPGPQGPYYCAVGADKSYGRDIVDAHYKACLYAGIDISGINGEVMPGQWEFQVGPAVGVSAGDQLWVARYILEVDEDHRDRRRGCLLRPQANSGGLEWRWCTHQLQHQVDEERRRVRGDQEGDRQAGPPAPGAHRRVRGRQRAPPHRPPRDRRHQHLRLGRREPRGVGAGGPRHREGRQRLLRGPEAGVQHGPVRGDLADRGDNHAVGAQPLQRRRQGRRGSLI

SEQ ID NO: 162419 - protein, 615 aa, Zea Mays
MRKAASTATAGAGATFRRRAMEGLATVLLLYALLVLALESPLVSTSPFGGAAGGTARKLHLSFGAGERAAPARPASASVPGASAHGQDHRLSRFATGLDVRLLDSARSGALRRSIADAVAAGARAFSDLEALDPAVVAAPSGESDAARCPHSIALTAEELGARGRVVELPCGLALGSHITVAATPRAPHEERNPAIVVLRDGERHAMVSQFMVELQGLRAVDGEDPPRVLHFNPRLRGDWSGHPVIERNTCYRMSWGAVQRCDGWRSRPDEETVDGLVKCEKWIRDDDDRLEKSKTTSKTAWWLNRLIGQKEEVNFGWPFPFVEGRLFVLTLSAGLEGYHVSVDGRHVTSFPYRTGFVLEDATGLSLNGDLDVHSVIAGSLPTTHPSFVPQNYLEFSTVWQAPLLPDEPVEIFIGILSAANHFAERMGVRKTWMSVVHKSPNMVARFFVALHGRTEVNAELKKEAEFFRDIVFVPFLDNYDLVVMKTLAICEYGLANFGLARVFGIPVRTFTHEVVTLWYRAPEILLGERQYSMPVDVWVLGTPNEQSWPGVTSLPDFKSAFPKCQSQDLAAVVPNLEPAGLDLLSKMLRYEPSKRITARQALEHDYFKDLEMVQ

SEQ ID NO: 162420 - protein, 106 aa, Zea Mays
MAELKAKRGSRTYLTWTDAMDLALLEVLVEHHNNGDRGQNGWKPHVYNAAIRNVKDKCNVDITKDNISARCKTFDKHYEIISKILSQSGFGWDWENNRLSMDNEDV

SEQ ID NO: 162421 - protein, 1378 aa, Zea Mays
MTQHSFHQQHLCCPRLQRVMTHNIRLLSSPGAVASKGFDSPLVEKPDTASDVKIIHLYRIPFLQESETMELLRKVKAKVSANIVDILTEQCFNIQLDNSLTPEKLTMLHWLLAETYEPEKLQTRSFLEDEVSRNSCTVIVEVGPRMTFSTAFSTNAVSICKSLSLVEVTRLERSRRYLLCLEPGSDPLDEGQLKEFTALVHDRMTECIYRNKLTSFQSDVVPEPVCIVPVIERGEEALKEINVKMGLAFDKQDIDYYTHLFRDDIKRNPTTVELFDIAQSNSEHSRHWFFNGKLVIDGETMPTTLFQLVKSPLKANLNNSVIGFKDNSSAIKGFPVNQLRPTIPGFTSPLSIIMRELDILFTAETHNFPCAVAPYPGAETGAGGRIRDTHATGKGSFVVASTAGYCVGNLRIDNSNAPWEDPSFSYPVNLASPLQILVDASDGASDYGNKFGEPLIQGYTRTFGMRLLNGERREWLKPIMFSGAIGQIDHAHISKGDPEIGMLVVKIGGPAYRIGMGGGAASSMVSGQNDAELDFNAVQRGDAEMAQKLYRVVRACAEMGESNPIISIHDQGAGGNCNVVKEIIYPKGAEIDIRSIVVGDHTLSVLEIWGAEYQEQDALLVKLESRSLLESLCERERVSMAVIGKIDGSGKIVLIDSAAVEYSKLNDLPPPTPVEELELEKVLGDMPQKTFEFRRVSQVTEPLDIAPGVTLLDALKRVLRLPSVCSKRFLTTKVDRCVTGLVAQQQTVGPLQLPLADVAVIAQTYTDLTGGACSIGEQPIKGLLNPKAMARLAVGEALTNLVWAKVTSLADVKASGNWMYAAKLDGEGADMYDAAVALADCMIELGIAIDGGKDSLSMAAQCDGEVIKAPGNLVISTYVTCPDITLTVTPDLKLGEDGILLHIDLAKGNRRLGGSALAQAFDQIGNDCPDIDDVLYLKKVFEAIQELLSQRLISAGHDISDGGLIVCVLEMAFAGNCGFKLDIDLEDRSLIEGLFAEELGLIIEVHSKYLNIVKQKLEIAGISANVIGEVTNSPEIEVFIDGNLHLKEKTSDLRDLWEETSFQLEELQRLKSCVKLEKEGLKCRTSPSWSLSFTPKFTDGKLLTASLKPKVAIIREEGSNGDREMAAAFHAAGFEPWDITMSDLLAGKSSLKEFRGIAFVGGFSYADVLDSAKGWAASIRFNQPLIQQFQDFYHRPDTFSLGVCNGCQLMALLGWVPGSGVGGSLGTGGDMSQPRFIHNESGRFECRFTSVSIGDSPAIMFKGMEGSTLGVWSAHGEGRAFFPDENVLATVVKSNLAPVRYCDDSNNITETYPFNPNGSPLGIAALCSPDGRHLAMMPHPERCFMMWQYPWYPKEWQVEKSGPSPWLRMFQNAREWCS

SEQ ID NO: 162422 - protein, 1369 aa, Zea Mays
MASPGQMTASNLLRTEGFPGNMVKICGLNPARSLGSRRLRMTQHSFHQQHLCCPRLQRVMTHNIRLLSSPGAVASKGFDSPLVEKPDTASDVKIIHLYRIPFLQESETMELLRKVKAKVSANIVDILTEQCFNIQLDNSLTPEKLTMLHWLLAETYEPEKLQTRSFLEDEVSRNSCTVIVEVGPRMTFSTAFSTNAVSICKSLSLVEVTRLERSRRYLLCLEPGSDPLDEGQLKEFTALVHDRMTECIYRNKLTSFQSDVVPEPVCIVPVIERGEEALKEINVKMGLAFDKQDIDYYTHLFRDDIKRNPTTVELFDIAQSNSEHSRHWFFNGKLVIDGETMPTTLFQLVKSPLKANLNNSVIGFKDNSSAIKGFPVNQLRPTIPGFTSPLSIIMRELDILFTAETHNFPCAVAPYPGAETGAGGRIRDTHATGKGSFVVASTAGYCVGNLRIDNSNAPWEDPSFSYPVNLASPLQILVDASDGASDYGNKFGEPLIQGYTRTFGMRLLNGERREWLKPIMFSGAIGQIDHAHISKGDPEIGMLVVKIGGPAYRIGMGGGAASSMVSGQNDAELDFNAVQRGDAEMAQKLYRVVRACAEMGESNPIISIHDQGAGGNCNVVKEIIYPKGAEIDIRSIVVGDHTLSVLEIWGAEYQEQDALLVKLESRSLLESLCERERVSMAVIGKIDGSGKIVLIDSAAVEYSKLNDLPPPTPVEELELEKVLGDMPQKTFEFRRVSQVTEPLDIAPGVTLLDALKRVLRLPSVCSKRFLTTKVDRCVTGLVAQQQTVGPLQLPLADVAVIAQTYTDLTGGACSIGEQPIKGLLNPKAMARLAVGEALTNLVWAKVTSLADVKASGNWMYAAKLDGEGADMYDAAVALADCMIELGIAIDGGKDSLSMAAQCDGEVIKAPGNLVISTYVTCPDITLTVTPDLKLGEDGILLHIDLAKGNRRLGGSALAQAFDQIGNDCPDIDDVLYLKKVFEAIQELLSQRLISAGHDISDGGLIVCVLEMAFAGNCGFKLDIDLEDRSLIEGLFAEELGLIIEVHSKYLNIVKQKLEIAGISANVIGEVTNSPEIEVFIDGNLHLKEKTSDLRDLWEETSFQLEELQRLKSCVKLEKEGLKCRTSPSWSLSFTPKFTDGKLLTASLKPKVAIIREEGSNGDREMAAAFHAAGFEPWDITMSDLLAGKSSLKEFRGIAFVGGFSYADVLDSAKGWAASIRFNQPLIQQFQDFYHRPDTFSLGVCNGCQLMALLGWVPGSGVGGSLGTGGDMSQPRFIHNESGRFECRFTSVSIGDSPAIMFKGMEGSTLGVWSAHALCSPDGRHLAMMPHPERCFMMWQYPWYPKEWQVEKSGPSPWLRMFQNAREWCS

SEQ ID NO: 162423 - protein, 623 aa, Zea Mays
MEQFSDSHVDITYVLSLYPSIVLPQTNIIGDHDKLLDMPELARESSDVTDEMESYSLQLQEPDDKSPLEVKKMSHNALAALVKYLQKKRSGIIERATAEVTEEVVSGAVHHSLKLSEPYKSKKLSKKRAQTHTSSIAREMATVLDTCLLQALILTGQSSGAIELLKGLNYCDLKICEEFLKERREYMVLLELYKSNEMHRDALQLLNQLVEESKSEMENTYFNKKFNSQMILEYLRPLCRSDPMLVLESSLYVLERNPSETIELFLSENVPADLVNSYLKQHAPNLQSTYLELMLSMNDTGINPNLQNELVQLYLSEVLDWYKILKEEGNWTEKTYSPTRKKLISTLESNSGYNTDALLKRLPQDALFEERAILYGKINQHLRALSLYVHKLQMPERAVAYCDRVYEEREQQPSKSNIYFNLLQIHLNPRKAEKEFEQKIIPVASQYSGIQKASATKPKGGRVGKKVVEIEGADDIRFSPSGTDSGRSDGDGDDVNDRGPIMLNEALELLSQRWDRINGAQALRLLPRDTKLQDLVSFLEPLLRNSSEHRRNYLVIKNLILRANLQVKEDLYNRCQAVVKIDGDSLVDASLWNSLSLASHWILVDCFRSFYWSNLHSLQRSSL

SEQ ID NO: 162424 - protein, 586 aa, Zea Mays
MPELARESSDVTDEMESYSLQLQEPDDKSPLEVKKMSHNALAALVKYLQKKRSGIIERATAEVTEEVVSGAVHHSLKLSEPYKSKKLSKKRAQTHTSSIAREMATVLDTCLLQALILTGQSSGAIELLKGLNYCDLKICEEFLKERREYMVLLELYKSNEMHRDALQLLNQLVEESKSEMENTYFNKKFNSQMILEYLRPLCRSDPMLVLESSLYVLERNPSETIELFLSENVPADLVNSYLKQHAPNLQSTYLELMLSMNDTGINPNLQNELVQLYLSEVLDWYKILKEEGNWTEKTYSPTRKKLISTLESNSGYNTDALLKRLPQDALFEERAILYGKINQHLRALSLYVHKLQMPERAVAYCDRVYEEREQQPSKSNIYFNLLQIHLNPRKAEKEFEQKIIPVASQYSGIQKASATKPKGGRVGKKVVEIEGADDIRFSPSGTDSGRSDGDGDDVNDRGPIMLNEALELLSQRWDRINGAQALRLLPRDTKLQDLVSFLEPLLRNSSEHRRNYLVIKNLILRANLQVKEDLYNRCQAVVKIDGDSLVDASLWNSLSLASHWILVDCFRSFYWSNLHSLQRSSL

SEQ ID NO: 162425 - protein, 962 aa, Zea Mays
MVHSAYDAVELVADVPGHIEAVASHAGKLLVAVSDTEGFLWGSDCSLRIYSAPSPSDGGGEIRWDGPYALERQEPRFWRRPPLAMEVSASRDLLISLSEWIALHRLPGLETVAVVSSKTKGANVFAWDERRGFLAVGRQKRLTVFRLDSGREFVEVKEFGVPDILKSMAWCGDNICLGIRREYMIINSMTGALTEVFSSGRIAPPLVVPLLTGELILGKDNIGVFVDQNGKLIQDGRIIWSDTPASVVIHKPYAVARLPRHVEIRSLRPPNALVQTVVLRDVQKLVQTDHCILAALSNSVHGLLPVPIGAQIVQLTASGEFEEALALCKLLPPEDSNLRAAKESSIHIRYGHFLFDNGSYEEAMEQFSDSHVDITYVLSLYPSIVLPQTNIIGDHDKLLDMPELARESSDVTDEMESYSLQLQEPDDKSPLEVKKMSHNALAALVKYLQKKRSGIIERATAEVTEEVVSGAVHHSLKLSEPYKSKKLSKKRAQTHTSSIAREMATVLDTCLLQALILTGQSSGAIELLKGLNYCDLKICEEFLKERREYMVLLELYKSNEMHRDALQLLNQLVEESKSEMENTYFNKKFNSQMILEYLRPLCRSDPMLVLESSLYVLERNPSETIELFLSENVPADLVNSYLKQHAPNLQSTYLELMLSMNDTGINPNLQNELVQLYLSEVLDWYKILKEEGNWTEKTYSPTRKKLISTLESNSGYNTDALLKRLPQDALFEERAILYGKINQHLRALSLYVHKIHLNPRKAEKEFEQKIIPVASQYSGIQKASATKPKGGRVGKKVVEIEGADDIRFSPSGTDSGRSDGDGDDVNDRGPIMLNEALELLSQRWDRINGAQALRLLPRDTKLQDLVSFLEPLLRNSSEHRRNYLVIKNLILRANLQVKEDLYNRCQAVVKIDGDSTCSLCHKRVANSAFAIYPNGQALVHFVCFKESQQIKAVRGANSVKRR

SEQ ID NO: 162426 - protein, 69 aa, Zea Mays
MELITGRKALDETRPEDSMHLVTWFRRMQLNKETFRKAIDPVIDLDEETYASKFGNQLIQTRTTATVLT

SEQ ID NO: 162427 - protein, 158 aa, Zea Mays
MELITGRKALDETRPEDSMHLVTWFRRMQLNKETFRKAIDPVIDLDEETYASVSTVSELAGHCCAREAHQRPDMGHAVNVLSTLSEVWKPTDPDSDDSYGIDLNMTLPQALKRWQAFEDSSHFDGATSSFVASLDNTQTSIPTRPPGFAESFTSADGR

SEQ ID NO: 162428 - protein, 873 aa, Zea Mays
MPFPTAFTARRRRHEGAAGRWCGLVVLVLMALEAGAAAETSPSDVAAMRAVAKALGADKTLGWDVAGDPCSPKRWDGVSCDSSGRVTAIQVGARGLTGTLPPEVGDLTELTRLEVFDNKLSGPLPLLPGLSSLQVLLAHNNSFASIPADFFKGLTGLTAVAIDYNPFASWTLPASLAACASLANFSAISANVSGTLPDFLGAMPALQRLSLSFNQLSGPVPASLAGAPLVQLWLNGAHLNGSISFVSNMTSLEQLWLHSNEFTGPLPDFAGFDDLWDLQLRDNMLTGPVPESLFKLKALKNVTLTNNLLQGPMPQIPNGLHADIEADTERFCVQEAGKPCNPLVSLLLEVAAGFMYPKALAEDWRGNDPCMFPGVTCIQGNITGLTFANKGLSGSISPAIGKISSLKVLDLANNNITGTVPEEVAVLPLLTKIDLSNNNLYGKLPTFASKNVAVNTAGNPNIGKDAPAPTAGPGSSNNSPSGGSSSGSSGNNGNGGSSSSSVGVIAGSVAGTVAGLGLVAALGFYCYKRKQKPFGRVQSPHAMVIHPRHSGSDDMVKITVAGGNANGGARASETYSQASSGPRDIHVVESGNMVISIQVLRNVTNNFSEDNILGRGGFGTVYKGELHDGTKIAVKRMEAGVMGNKGLNEFKSEIAVLTKVRHRNLVSLLGYCLDGNERILVYEYMPQGTLSQHLFEWSENNLRPLEWKKRLSIALDVARGVEYLHSLAQQTFIHRDLKPSNILLGDDMKAKVADFGLVRLAPDDGKCVSIETRLAGTFGYLAPEYAVTGRVTTKADVFSFGVILMELITGRKALDETRPEDSMHLVTWFRRMQLNKETFRKAIDPVIDLDEETYASKFGNQLIQTRTTATVLT

SEQ ID NO: 162429 - protein, 76 aa, Zea Mays
MRPSPIQSNVIPNPSTDAIATSPNLLSLPPHINGSTRPAFFSFNFSHNMQAIHSRRLSLYVSYCSPLLHPSRSVQS

SEQ ID NO: 162430 - protein, 180 aa, Zea Mays
MMRSLWKKLRICCLFYRISPRGILISPGPGTPQDSGISLQTVTELGPSIPLFGVCMGLQCIGEAFGGKVVRSPYGVVHGKGSLVHYDEKLDGTLFYDIPNPFQAGRYHSLVIEKDSFPHDTLEIVAWTDDGLIMAARHRIYKHIQGVQFHPESIITTEGRLMVNNFIKIIEGYEASNCSP

SEQ ID NO: 162431 - protein, 200 aa, Zea Mays
MFAGHSVLVLETPRHTAGHGCYYFAGCGAISTGALSRSTTVQRQKFVAKSAISAVESGDTFVGVKQNTRPIIVIDNYDSFTYNLCQYMGEVGANFEVYRNDEITVEEIKKISPRGILISPGPGTPQDSGISLQTVTELGPSIPLFGVCMGLQCIGEAFGGKVVRSPYGVVHGKGSLVHYDEKLDGTLFYDIPKLEGITAL

SEQ ID NO: 162432 - protein, 167 aa, Zea Mays
MARAATCVSMPRPAHAEMEAPCPATGRHSSGSCSRTRFFFFFFTLPSRCRRSGTMQAALLRRERTSRQRRGYDTNPPYRTHCPCPVETRGLEGVEGRRERYEPGDGPTRLHFPCRDAIIFTWALTPTCRVSRGGSQGSCQYVRYEYFTWYGIPTRCSRLHVSVFLLH

SEQ ID NO: 162433 - protein, 231 aa, Zea Mays
MKDDEILAPSQELSKQGCILEAVIEASATEIINLMDSLNEWDSKVGDGDCGSTMYRGATAILEDMKKRYPMNDAAGTINEIGATIRRVMGGTSGILYAILCKAAYASLKQSSTVTANKWADALEASIAAVSKYGGASAGYRTMLDALIPASAVLKQRLEAGDDPVTAFIASSEAASAGAESTKQMQAKAGRSSYIAPDLLASIPDPGAMAAAAWYRAAALAVKNKVHGSKS

SEQ ID NO: 162434 - protein, 566 aa, Zea Mays
MALQGKKLINNPDDVVTEFIEGLVETYPGLQYLDGFPQIKVVLRADVERGSYDKVAVISGGGSGHEPSHAGFVGPGMLTAAVSGDVFASPPVDSILAAIRAVTGPMGCLLIVKNYTGDRLNFGLAAEQAKSEGYKMEMVIVGDDCALPPPRGIAGRRGLAGTILVHKVAGAAADAGLSLAEVAAEAKHASEVVGTMGVALSVCTLPGQITSDRLGPRQMELGLGIETQYLPVTRGCNAVLLVNGLGATPIMELMIAARKAVPELQLVYGIAVDRVYTGTLMTSLDMAGLSITIMKSGESILKRLDAPTKAPAWPVGSEGNRPPAKFPVPLPPSPSMKDDEILAPSQELSKQGCILEAVIEASATEIINLMDSLNEWDSKVGDGDCGSTMYRGATAILEDMKKRYPMNDAAGTINEIGATIRRVMGGTSGILYAILCKAAYASLKQSSTVTANKWADALEASIAAVSKYGGASAGYRTMLDALIPASAVLKQRLEAGDDPVTAFIASSEAASAGAESTKQMQAKAGRSSYIAPDLLASIPDPGAMAAAAWYRAAALAVKNKVHGSKS

SEQ ID NO: 162435 - protein, 588 aa, Zea Mays
MALQGKKLINNPDDVVTEFIEGLVETYPGLQYLDGFPQIKVVLRADVERGSYDKVAVISGGGSGHEPSHAGFVGPGMLTAAVSGDVFASPPVDSILAAIRAVTGPMGCLLIVKNYTGDRLNFGLAAEQAKSEGYKMEMVIVGDDCALPPPRGIAGRRGLAGTILVHKVAGAAADAGLSLAEVAAEAKHASEVVGTMGVALSVCTLPGQITSDRLGPRQMELGLGIHGEPGVAVVELQPVDVVVEHVLKQILSQETQYLPVTRGCNAVLLVNGLGATPIMELMIAARKAVPELQLVYGIAVDRVYTGTLMTSLDMAGLSITIMKSGESILKRLDAPTKAPAWPVGSEGNRPPAKFPVPLPPSPSMKDDEELSKQGCILEAVIEASATEIINLMDSLNEWDSKVGDGDCGSTMYRGATAILEDMKKRYPMNDAAGTINEIGATIRRVMGGTSGILYAILCKAAYASLKQSSTVTANKWADALEASIAAVSKYGGASAGYRTMLDALIPASAVLKQRLEAGDDPVTAFIASSEAASAGAESTKQMQAKAGRSSYIAPDLLASIPDPGAMAAAAWYRAAALAVKNKVHGSKS

SEQ ID NO: 162436 - protein, 389 aa, Zea Mays
MLVYLLQRLPQKQNMHLRLLHGEPGVAVVELQPVDVVVEHVLKQILSQETQYLPVTRGCNAVLLVNGLGATPIMELMIAARKAVPELQLVYGIAVDRVYTGTLMTSLDMAGLSITIMKSGESILKRLDAPTKAPAWPVGSEGNRPPAKFPVPLPPSPSMKDDEILAPSQELSKQGCILEAVIEASATEIINLMDSLNEWDSKVGDGDCGSTMYRGATAILEDMKKRYPMNDAAGTINEIGATIRRVMGGTSGILYAILCKAAYASLKQSSTVTANKWADALEASIAAVSKYGGASAGYRTMLDALIPASAVLKQRLEAGDDPVTAFIASSEAASAGAESTKQMQAKAGRSSYIAPDLLASIPDPGAMAAAAWYRAAALAVKNKVHGSKS

SEQ ID NO: 162437 - protein, 560 aa, Zea Mays
MALQGKKLINNPDDVVTEFIEGLVETYPGLQYLDGFPQIKVVLRADVERGSYDKVAVISGGGSGHEPSHAGFVGPGMLTAAVSGDVFASPPVDSILAAIRAVTGPMGCLLIVKNYTGDRLNFGLAAEQAKSEGYKMEMVIVGDDCALPPPRGIAGRRGLAGTILVHKVAGAAADAGLSLAEVAAEAKHASEHGEPGVAVVELQPVDVVVEHVLKQILSQETQYLPVTRGCNAVLLVNGLGATPIMELMIAARKAVPELQLVYGIAVDRVYTGTLMTSLDMAGLSITIMKSGESILKRLDAPTKAPAWPVGSEGNRPPAKFPVPLPPSPSMKDDEILAPSQELSKQGCILEAVIEASATEIINLMDSLNEWDSKVGDGDCGSTMYRGATAILEDMKKRYPMNDAAGTINEIGATIRRVMGGTSGILYAILCKAAYASLKQSSTVTANKWADALEASIAAVSKYGGASAGYRTMLDALIPASAVLKQRLEAGDDPVTAFIASSEAASAGAESTKQMQAKAGRSSYIAPDLLASIPDPGAMAAAAWYRAAALAVKNKVHGSKS

SEQ ID NO: 162438 - protein, 601 aa, Zea Mays
MALQGKKLINNPDDVVTEFIEGLVETYPGLQYLDGFPQIKVVLRADVERGSYDKVAVISGGGSGHEPSHAGFVGPGMLTAAVSGDVFASPPVDSILAAIRAVTGPMGCLLIVKNYTGDRLNFGLAAEQAKSEGYKMEMVIVGDDCALPPPRGIAGRRGLAGTILVHKVAGAAADAGLSLAEVAAEAKHASEVVGTMGVALSVCTLPGQITSDRLGPRQMELGLGIHGEPGVAVVELQPVDVVVEHVLKQILSQETQYLPVTRGCNAVLLVNGLGATPIMELMIAARKAVPELQLVYGIAVDRVYTGTLMTSLDMAGLSITIMKSGESILKRLDAPTKAPAWPVGSEGNRPPAKFPVPLPPSPSMKDDEILAPSQELSKQGCILEAVIEASATEIINLMDSLNEWDSKVGDGDCGSTMYRGATAILEDMKKRAFFLYSSYPMNDAAGTINEIGATIRRVMGGTSGILYAILCKAAYASLKQSSTVTANKWADALEASIAAVSKYGGASAGYRTMLDALIPASAVLKQRLEAGDDPVTAFIASSEAASAGAESTKQMQAKAGRSSYIAPDLLASIPDPGAMAAAAWYRAAALAVKNKVHGSKS

SEQ ID NO: 162439 - protein, 566 aa, Zea Mays
MALQGKKLINNPDDVVTEFIEGLVETYPGLQYLDGFPQIKVVLRADVERGSYDKVAVISGGGSGHEPSHAGFVGPGMLTAAVSGDVFASPPVDSILAAIRAVTGPMGCLLIVKNYTGDRLNFGLAAEQAKSEGYKMEMVIVGDDCALPPPRGIAGRRGLAGTILVHKVAGAAADAGLSLAEVAAEAKHASEVVGTMGVALSVCTLPGQITSDRLGPRQMELGLGIHGEPGVAVVELQPVDVVVEHVLKQILSQETQYLPVTRGCNAVLLVNGLGATPIMELMIAARKAVPELQLVYGIAVDRVYTGTLMTSLDMAGLSITIMKSGESILKRLDAPTKAPAWPVGSEGNRPPAKFPVPLPPSPSMKDDEILAPSQELSKQGCILEAVIEASATEIINLMDSLNEWDSKVGDGDCGSTMYRGATAILEDMKKRYAILCKAAYASLKQSSTVTANKWADALEASIAAVSKYGGASAGYRTMLDALIPASAVLKQRLEAGDDPVTAFIASSEAASAGAESTKQMQAKAGRSSYIAPDLLASIPDPGAMAAAAWYRAAALAVKNKVHGSKS

SEQ ID NO: 162440 - protein, 287 aa, Zea Mays
MSSSPISRKKTFLLPTTGHGTDFCPHRAEVSVHGVPQERPAGVARPRGPAGQIHGPARVHGRHPREDGLRDPPPDVVPAAAPAPDRGAAAGAARRRRPGDRPQGLAGAVRAGLVRGQVPQALRRAAARPPDRAREGQGDGRHRRVAEPQGLTPPARCGAGRRTRAAFRSSAGQGRLASGWWVMTRSGLVGCGPRESGCAFSPPWCAELLSADTIRGAGQEYGELLLPTAMGDGFTRASRCVPRFFFGDTYELCNGVRFAVPHARAVSDTPIENDFPYCELCDVFTQL

SEQ ID NO: 162441 - protein, 868 aa, Zea Mays
MSENIDLVLEFLRKNRFAKAEAALRGELTGRADSNDMATQRRVAELKEGEEQQEGLVGSNVGPKGAAAARSADSSREFIVKEIDVGALPNGSDGKKGSGIGQPQDNVGDLYPWTFSIANSTAEQLAELLVSEEVPRHRRGAVLAEKRDRGVGTEQPGPVLEQKVSFGRGKGKVDAAGRTENSEQCHFRDKSLVPEKEEMLNGCTVKTVLPFPTENPSSSYNSTHHENERKEVKRSSNADGVGKGAKGHLDEGNRQYYFEKSLDTDLVSDRCFDLQLVGDSQREELPKLPPVRLKSEDKLVNMNWEEKINHHGSGAKQSSADHAFMIGSYLDVPIGQEITSSGGRRTIGSSWLSVSQGIAEDTSDLVSGFATLADDSLEYPIGEYWDSDEYDDDDDVGYTRQPIEDETWFLAHEIDYPSDNEKATGHTRGNDRHDRPTKDEDDDQSFVEEDSYISGEQYFHGKNIAQIGTSEGPMVHGIPDNDMIAQYDGQLLDSEELNLMHSEPAWQGFVSQNSELGMLGNGKFLNDSERPHPDDLFVEDDQHGSVRSIGVGISSDAADIGSEVRESLIGGSSEGDIEYFNESSLSVSGKRHPHQDTEKKRVGAKGVKHDQIIYAADIQKGNLPPGAADVGFSFPPPLHSGKNHESDAKSLWSKKDEMYCINDPDDCQNGMVSDDMLATWRKKNSESSLRSSRDEMTSDVVRSRNSSASYDETEDTSNARHHKLDDAQEEDTGTNLDDEEAAALQEQVRQIKAQEEEFETFNLKIVHRKNRTGFEEDKNFHVVLNSVIAGRYHVSEYLGSAAFSKAIQAHDLHTGMDVCVKIIKNNKDFFDQSLDEIKLLKYVNKHDPADKYHLLRLYDYFYYRSVNF

SEQ ID NO: 162442 - protein, 915 aa, Zea Mays
MSENIDLVLEFLRKNRFAKAEAALRGELTGRADSNDMATQRRVAELKEGEEQQEGLVGSNVGPKGAAAARSADSSREFIVKEIDVGALPNGSDGKKGSGIGQPQDNVGDLYPWTFSIANSTAEQLAELLVSEEVPRHRRGAVLAEKRDRGVGTEQPGPVLEQKVSFGRGKGKVDAAGRTENSEQCHFRDKSLVPEKEEMLNGCTVKTVLPFPTENPSSSYNSTHHENERKEVKRSSNADGVGKGAKGHLDEGNRQYYFEKSLDTDLVSDRCFDLQLVGDSQREELPKLPPVRLKSEDKLVNMNWEEKINHHGSGAKQSSADHAFMIGSYLDVPIGQEITSSGGRRTIGSSWLSVSQGIAEDTSDLVSGFATLADDSLEYPIGEYWDSDEYDDDDDVGYTRQPIEDETWFLAHEIDYPSDNEKATGHTRGNDRHDRPTKDEDDDQSFVEEDSYISGEQYFHGKNIAQIGTSEGPMVHGIPDNDMIAQYDGQLLDSEELNLMHSEPAWQGFVSQNSELGMLGNGKFLNDSERPHPDDLFVEDDQHGSVRSIGVGISSDAADIGSEVRESLIGGSSEGDIEYFNESSLSVSGKRHPHQDTEKKRVGAKGVKHDQIIYAADIQKGNLPPGAADVGFSFPPPLHSGKNHESDAKSLWSKKDEMYCINDPDDCQNGMVSDDMLATWRKKNSESSLRSSRDEMTSDVVRSRNSSASYDETEDTSNARHHKLDDAQEEDTGTNLDDEEAAALQEQVRQIKAQEEEFETFNLKIVHRKNRTGFEEDKNFHVVLNSVIAGRYHVSEYLGSAAFSKAIQAHDLHTGMDVCVKIIKNNKDFFDQSLDEIKLLKYVNKHDPADKYHLLRLYDYFYYREHLLIVCELLKANLYEFQKFNRESGGEVYFTMPRLQLFSVWRRCSFCMVSV

SEQ ID NO: 162443 - protein, 199 aa, Zea Mays
MRTCLPGESPESWASSSRSRASLLRSTHPSSCLDLDMAEFVLQDVVVSAVSQVLIGCQGKGIRVACNLPERSMKQKVYGDGIRLQQILSDFLFVSVKFSPAGGSVDISSKLTKNSIGENLHLIDFELRIKHQGAGVPAEILSQMYGEDNREQSEEGLSLLVSRNLLRLMNGDIRHLREAGMSTFILTAELAAAPSAAGH

SEQ ID NO: 162444 - protein, 282 aa, Zea Mays
MEGMSIHIRCLDKAATVTEVDVKTADFNNPWRICTVTQVEELKILVRMFPVWATTIVFSAVYAQMSTMFVEQGMVLDPSLGSFKIPPASLSTFDTLSVIICVPMYDYIVVPIARRFTGNERGFTELQRMGIGLVISIMAMSVAAVLEIKRLAVAREAHLVDQNVPVPLSIFWQIPQYFLIGLAEIFTFIGALEFFYDQSPDAMRSLCSALNLLTTAFGNYLSTFILTMVAYFTTRGGNPGWIPDNLNEGHLDYFFLLIAGISFLNLIVYVLCAGKYKSKKAA

SEQ ID NO: 162445 - protein, 507 aa, Zea Mays
MEGMSIHISSVTTWSGTCYLTPLIGAILADAYWGRYWTIATFSTVYFIGMTLLTLSASVPMLMPPSCEGSFCPAASPFQYTVFFLGLYLIALGTGGIKPCVSSFGADQFDDTDPAERIQKGSFFNWFYFSINIGALISSSFLVWVQDNVGWGLGFGIPTVFMGLAIISFFSGTSLYRFQKPGGSPITRVCQVIVASLRKWNVPVPEDSSLLYELPNGVSTIEGSRQIEHTDELRCLDKAATVTEVDVKTADFNNPWRICTVTQVEELKILVRMFPVWATTIVFSAVYAQMSTMFVEQGMVLDPSLGSFKIPPASLSTFDTLSVIICVPMYDYIVVPIARRFTGNERGFTELQRMGIGLVISIMAMSVAAVLEIKRLAVAREAHLVDQNVPVPLSIFWQIPQYFLIGLAEIFTFIGALEFFYDQSPDAMRSLCSALNLLTTAFGNYLSTFILTMVAYFTTRGGNPGWIPDNLNEGHLDYFFLLIAGISFLNLIVYVLCAGKYKSKKAA

SEQ ID NO: 162446 - protein, 506 aa, Zea Mays
MEGMSIHISVTTWSGTCYLTPLIGAILADAYWGRYWTIATFSTVYFIGMTLLTLSASVPMLMPPSCEGSFCPAASPFQYTVFFLGLYLIALGTGGIKPCVSSFGADQFDDTDPAERIQKGSFFNWFYFSINIGALISSSFLVWVQDNVGWGLGFGIPTVFMGLAIISFFSGTSLYRFQKPGGSPITRVCQVIVASLRKWNVPVPEDSSLLYELPNGVSTIEGSRQIEHTDELRCLDKAATVTEVDVKTADFNNPWRICTVTQVEELKILVRMFPVWATTIVFSAVYAQMSTMFVEQGMVLDPSLGSFKIPPASLSTFDTLSVIICVPMYDYIVVPIARRFTGNERGFTELQRMGIGLVISIMAMSVAAVLEIKRLAVAREAHLVDQNVPVPLSIFWQIPQYFLIGLAEIFTFIGALEFFYDQSPDAMRSLCSALNLLTTAFGNYLSTFILTMVAYFTTRGGNPGWIPDNLNEGHLDYFFLLIAGISFLNLIVYVLCAGKYKSKKAA

SEQ ID NO: 162447 - protein, 181 aa, Zea Mays
MCASFIPICVDRRKPVIGMSFHSCNDAEEFYKSYAHDGGFSVRVGSQNKALGEVINKRYMCSRAGFKKVKEVDDPPKNQKNHALTRCGCDANMYVKLGPDKKYHITSMVEEHNHPLCSPNKIPFLRSNRVVSQRAKNTLFTCHKASIGTSQAFRILQVSDGGFAPLYQLQDICTSISASGT

SEQ ID NO: 162448 - protein, 239 aa, Zea Mays
MNPNISLRRRRRLPAACAVQRRRRLGQPVGAGAVRRCAAPAGGREQPWRGRPQPRHGGPATAASRGAAAIALALAAPVPACLPVARLPTVARRAGAQLRERARAGPPSLARQRAARPRLDAGAARRRAAPAKQATARPLGRGSTGAWPRRGNPCAGARPRDRQQRGLTATARREGAAQAIRATSHQWSVHPRHGGPCVDLGERATAMAQLKRMFAWPRPAQCGFVPGGRTTLAWSPGLC

SEQ ID NO: 162449 - protein, 415 aa, Zea Mays
MAREARGFQAGKFEELEAEWPSDCSSICASASASGARFCRSASRPPTALLSIDGAPSFDGKSHPVASRPPAARPSRINVVFPTRCARLPSPARPLPRSLRAKTKGCEKTKGCAGAVCGGASHCSAEAAGEVEKVSRKEAVSRGRARVSAMPRTGSGAAAREKGMGSGGSAWVEAEWTARARVSSRRSPECSVERVSTAEVCMVEAAKSRASRRRSAVCGGASHCSAEAAGEVEKVSRKEAVSRGRARISAVPRTGSGATAREKGMGSGGLAWVEAEWTARARVSRRRSSECGAERVSTAEACARMLQHSNSANELLLRRKLEEQQQAAELQHAIELQSRRLMGLQLLDLKARAAATAAAASALPTPVANAFASSHPLSTMAVESPLESAQAEQWVCSGGEAQRWRQGRICLRGEP

SEQ ID NO: 162450 - protein, 153 aa, Zea Mays
MEKMVAEILRKMVRKYSEKRPDVIAVAMENTTASFSEHLDAKSSGNFEPSSATSHLSRSPAIICTRLVFSAFGYVHKIATFEKLQALIQYTDAATASAARESLDGRSIPSGNLLMLHSKQRPVYGGWEQHLGLEHTTTTPKRSYLGNNQMNRI

SEQ ID NO: 162451 - protein, 347 aa, Zea Mays
MAKVGDSFAYDQIANATSGFGEERLIKHGHSGDLYHGVLQDGTAVVVKRITLRVARKDAYMAELDLFAKGLHERLVPFLGHCLDKEEEKVLVYRFVRNGDLSSALHKKSREEDEGLQSLDWIKRLKIATGVAEALCYLHHECSPPMVHRTADQGSSGSPSATCPYDVYCFGKVLLELVTGRLGISASNDASTSEWLDATLRYVNIYEKELMSKIIDPTLIIDEDHLEEVWAMAIVAKSCLNPRSSKRPPMKYILKALENPLKVVREDNGNGSGRLRATSSRGSWNAALFGSWRHSSSDIGPSREDNILKRSETIKSSGGSNGDHSSSRRRQSKEIFPEPSGSRDTED

SEQ ID NO: 162452 - protein, 255 aa, Zea Mays
MSVLHRWFIVLYYRDVQASSILLDDKFDVRLGSLSEVCPQEGEGHQNVITKLLRFSSTADQGSSGSPSATCPYDVYCFGKVLLELVTGRLGISASNDASTSEWLDATLRYVNIYEKELMSKIIDPTLIIDEDHLEEVWAMAIVAKSCLNPRSSKRPPMKYILKALENPLKVVREDNGNGSGRLRATSSRGSWNAALFGSWRHSSSDIGPSREDNILKRSETIKSSGGSNGDHSSSRRRQSKEIFPEPSGSRDTED

SEQ ID NO: 162453 - protein, 59 aa, Zea Mays
MAPSASMLFLSYHQLHRPTEATLHERDAGEEIKSSAPADADKELESKFEEALRLSCWSS

SEQ ID NO: 162454 - protein, 235 aa, Zea Mays
MVGRGEKLLDMTEDRIILDEPRGNGDKGTHYLLFWGLFGDLTLWSRQNYVQSKPVETKEVNEQDSSRGHATLSKKSQNPQPDNSLVNQVEEDASDDENHEDSRKGRSKLERWTSHKEIEYSNIDDDNTETFPTIKADVEADEVGKSEVSAAVGNSDINSNVDTGQTSDKSDRHLDTVERLKRRSERFKLPMPGEKDTPQSKKVDTEVQPPQNESTAADMEVKPERPARKRRWTGS

SEQ ID NO: 162455 - protein, 223 aa, Zea Mays
MEHTKTGAMSHTVPIPCSGRGTLYCSAFLASEGLDPVGQYRRFPRSGTTLPLVVAMVRMTRKASSGRRRKRYHLGDLEPNGKTAKSSEGSEVETKEVNEQDSSRGHATLSKKSQNPQPDNSLVNQVEEDASDDENHEDSRKGRSKLERWTSHKEIEYSNIDDDNTETFPTIKADVEADELRGSRDEVSVSNFPCLARRIRLKAKRWIPKCSLPKMNLLLLIWK

SEQ ID NO: 162456 - protein, 208 aa, Zea Mays
MGGGAEDSGPAIPGLSSSAAAGAAGSDQWDSDSEDDIQIVLNETDGRRGLGDDEGDDEDGEDLVIVADGPHITGIDEQDWGEDPVAAGAEGERKDGGDPGKTAAAPGGRIGYSGGGQGFHQQHHSMFKYVRPGAPVASAGGVPGGPGQFRPAGPSGPFSGRGRGDWRPAAGRGMNKSFHSGYGTAPWGGSGRGFGGGLDFTLPPHKLF

SEQ ID NO: 162457 - protein, 615 aa, Zea Mays
MNKSFHSGYGTAPWGGSGRGFGGGLDFTLPPHKTIFDIDVETTFEDKPWKYPGADISDFFNFGLDEEKWKDFCKQLDQLRLESTMQSRIRVYESGRSEQDYDPDLPPELAAVTGHPDISADNRNKMDNGHTDFSAQGRGPANVRTPVMTGRPIQVETNYTDRFPSIDSRSHRMRESYSVIEIVCQGRDSMDDETVDQTEKDSQRGYKGVHDVEEGKPYPTDKINNSGHNSNLVIKTEHKRQPPVSPECDMLSTDVNAPSPPSYKTRGSPREARSLKGSSLSQNSIREIESSNDIIPHQISSERRHDSRNENLVEGDSEGSLAANDNTTDKLSTEDHFDGGGGDDDDATLVGSVEVDGDDATLDPNMPSDANEDDDLVHSDKKQKHIAGVEQPTGHNGSEPVELRTNENSKGMSGSSKDQQKRLELGEEVLQDRQSRRVNNARRHHDAEEHNLRRKDEYSRDVKSDLERSHLPSRGREDIHQSYVNRDRVDMRGRSYDKVRETEILPRRDDGVHSRRAKEEDLRLEYNVEGGARHRNKMRPIDRNDRDEDLSRKRLDDGEWRGSRQRERGDVVLNRRESLDDSHIKRNKDDENLRRLKPENEDMVMAHGHRARDIK

SEQ ID NO: 162458 - protein, 732 aa, Zea Mays
MGGGAEDSGPAIPGLSSSAAAGAAGSDQWDSDSEDDIQIVLNETDGRRGLGDDEGDDEDGEDLVIVADGPHITGIDEQDWGEDPVAAGAEGERKDGGDPGKTAAAPGGRIGYSGGGQGFHQQHHSMFKYVRPGAPVASAGGVPGGPGYGTAPWGGSGRGFGGGLDFTLPPHKTIFDIDVETTFEDKPWKYPGADISDFFNFGLDEEKWKDFCKQLDQLRLESTMQSRIRVYESGRSEQDYDPDLPPELAAVTGHPDISADNRNKMDNGHTDFSAQGRGPANVRTPVMTGRPIQVETNYTDRFPSIDSRSHRMRESYSVIEIVCQGRDSMDDETVDQTEKDSQRGYKGVHDVEEEHKRQPPVSPECDMLSTDVNAPSPPSYKTRGSPREARSLKGSSLSQNSIREIESSNDIIPHQISSERRHDSRNENLVEGDSEGSLAANDNTTDKLSTEDHFDGGGGDDDDATLVGSVEVDGDDATLDPNMPSDANEDDDLVHSDKKQKHIAGVEQPTGHNGSEPVELRTNENSKGMSGSSKDQQKRLELGEEVLQDRQSRRVNNARRHHDAEEHNLRRKDEYSRDVKSDLERSHLPSRGREDIHQSYVNRDRVDMRGRSYDKVRETEILPRRDDGVHSRRAKEEDLRLEYNVEGGARHRNKMRPIDRNDRDEDLSRKRLDDGEWRGSRQRERGDVVLNRRESLDDSHIKRNKDDENLRRLKPENEDMVMAHGHRARDIK

SEQ ID NO: 162459 - protein, 531 aa, Zea Mays
MQSRIRVYESGRSEQDYDPDLPPELAAVTGHPDISADNRNKMDNGHTDFSAQGRGPANVRTPVMTGRPIQVETNYTDRFPSIDSRSHRMRESYSVIEIVCQGRDSMDDETVDQTEKDSQRGYKGVHDVEEGKPYPTDKINNSGHNSNLVIKTEHKRQPPVSPECDMLSTDVNAPSPPSYKTRGSPREARSLKGSSLSQNSIREIESSNDIIPHQISSERRHDSRNENLVEGDSEGSLAANDNTTDKLSTEDHFDGGGGDDDDATLVGSVEVDGDDATLDPNMPSDANEDDDLVHSDKKQKHIAGVEQPTGHNGSEPVELRTNENSKGMSGSSKDQQKRLELGEEVLQDRQSRRVNNARRHHDAEEHNLRRKDEYSRDVKSDLERSHLPSRGREDIHQSYVNRDRVDMRGRSYDKVRETEILPRRDDGVHSRRAKEEDLRLEYNVEGGARHRNKMRPIDRNDRDEDLSRKRLDDGEWRGSRQRERGDVVLNRRESLDDSHIKRNKDDENLRRLKPENEDMVMAHGHRARDIK

SEQ ID NO: 162460 - protein, 451 aa, Zea Mays
MVMEGRTGSLYGRLNKSSTRGFLAYTAAGAACAAVLACFVLSAADSPASAARNDGERLRLSSRSPRVWPDLAFNWRVVVATVVGFLGSAFGTVGGVGGGGIFVPMLNLVVGFDTKSAAALSKCMIMGASASSVWYNLQVSHPTKEAPVIDYKLALLFQPMLMLGITIGVELSVIFPYWLITVLIIILFVGTSSRSFYKGILMWREESRILMETRGREEQSKSTCAASDVVIDPSYGEPLLTQPQPKKSAWETFMFNLRWKNILVLMSVWSLFLVLQVLKNNSKSCSSFYWVINVLQVPVAVSVFLWEAMQLCRESHARRMNGNLECVCEASIEWSPAQLIFCAFCGLLGGTVGGLLGSGGGFILGPLLLELGCIPQVASATATFVMMFSSSLSVLATSSSFPYWLDSGASVWLGRSCMCSREHRLLSSSSPLLSSSVLLRWVSLEPRRAFR

SEQ ID NO: 162461 - protein, 429 aa, Zea Mays
MVMEGRTGSLYGRLNKSSTRGFLAYTAAGAACAAVLACFVLSAADSPASAARNDGERLRLSSRSPRVWPDLAFNWRVVVATVVGFLGSAFGTVGGVGGGGIFVPMLNLVVGFDTKSAAALSKCMIMGASASSVWYNLQVSHPTKEAPVIDYKLALLFQPMLMLGITIGVELSVIFPYWLITVLIIILFVGTSSRSFYKGILMWREESRILMETRGREEQSKSTCAASDVVIDPSYGEPLLTQPQPKKSAWETFMFNLRWKNILVLMSVWSLFLVLQVLKNNSKSCSSFYWVINVLQVPVAVSVFLWEAMQLCRESHARRMNGNLECVCEASIEWSPAQLIFCAFCGLLGGTVGGLLGSGGGFILGPLLLELGCIPQVASATATFVMMFSSSLSVVEFYFLHRFPLPFGKSIWLPHLHFHIGWILGPVFG

SEQ ID NO: 162462 - protein, 213 aa, Zea Mays
MLQVSWLHSHEESTYLTDSVSVMHWQIPLLRGSNKLEKMAYRLSWIAGRSGKHLFLKDMEDEKPPLLLQMVTDYGGLHFMSALRSFKRRVAYSNVCNDFIVGWRTSSIRRQHELPEPRSFINNNRYPHIVYVEGPKVEDVDFLDAMIYEAKTTSEMEEVMLKGLNRVSWERVDVSFKKSRQRIFAHSTIQVKTYFLNSDGADVINHMIDHFVY

SEQ ID NO: 162463 - protein, 185 aa, Zea Mays
MGRRLADEVASIVDSRPELCKISFVAHSLGGLIARYAIALLYESETQKDSHEKFENHAVDYSSNQHSKGKIVGLEPINFITFATPHLGTISHKQIPLLRGSNKLEKMAYRLSWIAGRSGKHLFLKDMEDEKPPLLLQMVTDYGGLHFMSALRSFKRRVAYSNVCNDFIVGWRTSSIRRQHELPER

SEQ ID NO: 162464 - protein, 117 aa, Zea Mays
MLQVSWLHSHEESTYLTDSVSVMHWQIPLLRGSNKLEKMAYRLSWIAGRSGKHLFLKDMEDEKPPLLLQMVTDYGGLHFMSALRSFKRRVAYSNVCNDFIVGWRTSSIRRQHELPER

SEQ ID NO: 162465 - protein, 430 aa, Zea Mays
MVLPALPNAHTVLLLFASMAWSQEEASSRIAEPHASSYMTARTSVDRRDRVGAEQLVRATGDDGAFCVTFCIVDELGIQGGFIYWRSHCPKGYPESAPSISADIPYLPKIQWSKSSRSKHVLWRLQAVTVAASCCILTHASPTPYQSARTPQLQRSLPFRVPQRLAALRHHDQAVRPFDAPVRELCPLPQRSRGRQDHRPLTPNFQVLVGVYKVRQAIVTTHFKVTFDFVPCHREGKKKEETSSQLGCAVPVRENAAGMESQQADDSDSHGSRAPSIHTLLQDRRALNRSTCCASASPKDSLASLGLDRGRLPESRLPARRARAYIRKKIRGPSTRGRVRAPVPEGGGNGERGREEAEQTAAAAAAAVGGVPPAAGVLHGVRRRRGPVGSRCRRGGEQAQAHASGRHGQWDRRKCRKLAFCGKALHQETP

SEQ ID NO: 162466 - protein, 380 aa, Zea Mays
MYMKTRLVRVRGPGGRLTFGPSGEAEVVSARGRGSGGRGFMSGAGETELQLQRRRIQERRVSLLAQIEDVRRTRAIQRSSRKRHGGSFGQELVTVAVVGYTNAGKSTLVSALSEADLYSDDRLFATVDPRLRSVILPSGRKALLSDTVGFISDLPVQLVEAFHATLEEVVEADMLVHVLDSSASNLEEHRSTVLQVLQQIGVSQEKINNMIEVWNKIDLVDENVKSDGIDDEVFLTEGEQEDDIFSEDDAPSEQTSFDSVDVDDGADSEYLSEENSEDSNELPSKKSFAEPTEMGAMKELSSKECFGELRVLDTNGHTFPQPASTCHVKTSAVTGTGLQELLALIERKLTEQQTVVQRSYGPFDRKWRPTSMDCEKAAEP

SEQ ID NO: 162467 - protein, 189 aa, Zea Mays
MWMQFLSMRFSLESNRETWRRGSGGRGFMSGAGETELQLQRRRIQERRVSLLAQIEDVRRTRAIQRSSRKRHGGSFGQELVTVAVVGYTNAGKSTLVSALSEADLYSDDRLFATVDPRLRSVILPSGRKALLSDTVGFISDLPVQLVEAFHATLEEVVEADMLVCSMCWIQVHLILKSIDLLYCKYCSR

SEQ ID NO: 162468 - protein, 249 aa, Zea Mays
MSDEHSGGVKKRKGVEDCVTLLPNAGDQQTEGSSQPERNSMEEGNRKISPKIQSKEDSSDGDGTKEDYVHIRAKRGQATNSHSLAERLRRKKISERMKLLQDLVPGCSKITGKAVMLDEIINYVQSLQRQVEFLSMKLSTVNPELGFDIEQIISKQMMLSQDRHLAFYGVDPGSSSLTAPFNQGIVQPAMMCNISNPADVLHGTIHDVSTMNQIPSMWEGLQSMPQMNFNPGVAADSGTNNSGSMKIEQ

SEQ ID NO: 162469 - protein, 202 aa, Zea Mays
MLLVSQAANGSLSARRLPSKPPGPSTTNPYPLFANPRLLRRRLALSGAGADQAPRRAAPTPAAAGEGPSASSTEDPVLVRVADDGVPLEGVIQIEKPGDAAAESKLVSYAKLGLLAGGDVFCLLLFSAIGRFSHGLPVLDAETFKTADPFIAGWLLSAYLLGGFGDDAKGRNGVGSAVITAAKSWAVGIPVTFNSLILLFQA

SEQ ID NO: 162470 - protein, 256 aa, Zea Mays
MATAISFPRAPLVTPRACTPRRLVHVSAARASPPRGGGRVGRRSPTVPAVAGASSSSSGLAPDTSVPAWDALGGVSVLAAGTGNAVALTDLWDSAEGVAVVALLRHFGCFCCWELASVLKDAMAEFDSAGAKLIAIGVGTPEKARILADRLPFPMDSLYADPERKAYSVLGLYHGLGRTLFSPASIYSRLDYIKKATENYTLEGTPADLTGVLQQGGMFVFRGKELLYSWRDQGTGDHAPLDDVHSACRKIPSRLT

SEQ ID NO: 162471 - protein, 188 aa, Zea Mays
MATAISFPRAPLVTPRACTPRRLVHVSAARASPPRGGGRVGRRSPTVPAVAGASSSSSGLAPDTSVPAWDALGGVSVLAAGTGNAVALTDLWDSAEGVAVVALLRHFGCFCCWELASVLKDAMAEFDSAGAKLIAIGVGTPEKARILADRLPFPMDSLYADPERKVTDYGLQRAWTVPWSGPDALQSS

SEQ ID NO: 162472 - protein, 464 aa, Zea Mays
MDVGRRLSLARVPAVAALMVMLSLSSSFCVSSSAARAVARPGAAEQLQRHPVVLIPGAGGNQLEARLTEGYEPSSLVCRVWPLVRGRGGWFRLWFDPSVLVAPLTRCFAERMTLSYDADADDYRNAPGVETRVSDFGSTSTLRGGPRPQSQAPHGVHEHSGEHAGGGRLRGRPRPVRRAVRLPVRAGRAGAPVAGGQRVPAAPQAAGGVGVRGQRREARDPGGAQPGRPLRAAAAGAQPAAVARGARAAPRHALHAVGRLRAGDAHLRLRQHARGALRRPVPHPRRAADRREQPLAAADAQRVRQHHAGAVAGPQPLLLRQEHDAVPPGHRLRGRRGAVPRADTAARRGPAGARRAPDVPRGHRRRHGGEPRVRRPRLRRGPREGGLWRRRRDGEPGQPHRPDQGVVGLAGAGRRGGGAAQGVAFRHAQRQERAGADHKDHRFYQPERHELSSFLLECFALVDN

SEQ ID NO: 162473 - protein, 106 aa, Zea Mays
MAINLCGVIFKPVRSVIHPWSNLWLVGSIILTMLLHVAVLYIEPLSALFSVSPLSWVEWKIVLYLSFPVILIDEVLKFFSRRSPRGRRFPLRLWRREILPKESRDN

SEQ ID NO: 162474 - protein, 680 aa, Zea Mays
MARLNAIVRSLPSVETLGCTTVICSDKTGTLTTNMMSVSKVCVVRSVHQRPMTDEYSISGTTFAPDGFIYDADGLQLEFPPQSPCLLHLAMCSALCNESTLQYNPDKKSYEKIGESTEVALRVLVEKVGLPGFDSMPSSLNMLTKHERASYCNHYWENQFRKISVLEFSRDRKMMSVLCSRKHQEIMFSKGAPESIMARCTHILCNDDGSSVPLTMDIRNELEARFQSFAGKDTLRCLALALKRMPAGQQSICYGDEANLTFIGLVGMLDPPREEVWDAIHSCMSAGIRVIVVTGDNKSTAESLCRQIGAFEHLNDFSGYSYTASEFEGLPPLERTNALQRMVLFSRVEPSHKKMLVEALQAHNEVVAMTGDGVNDAPALKKADIGIAMGSGTAVAKSASDMVLADDNFATIVAAVAEGRAIYNNTKQFIRYMISSNIGEVVCIFVAAVLGMPDTLIPVQLLWVNLVTDGLPATAIGFNKPDGNIMSVKPRKVNEAVVSGWLFFRYLVIGAYVGLATIAGFVWWFVYSDNGPKLPYSELVNFDSCSTRQTSYSCSIFEDRHPSTVSMTVLVVVEMFNALNNLSENQSLLVIHPWSNLWLVGSIILTMLLHVAVLYIEPLSALFSVSPLSWVEWKIVLYLSFPVILIDEVLKFFSRRSPRGRRFPLRLWRREILPKESRDN

SEQ ID NO: 162475 - protein, 808 aa, Zea Mays
MNAVYQDKTNILFSGTVVVAGRARAIVIGIGSNTAMGSIRDAMLRTEDEATPLKKKLDEFGTFLAKVIAGICILVWVVNIGHFRDPSHGGFVRGAIHYFKVAVALAVAAIPEGLPAVVTTCLALGTKRMARLNAIVRSLPSVETLGCTTVICSDKTGTLTTNMMSVSKVCVVRSVHQRPMTDEYSISGTTFAPDGFIYDADGLQLEFPPQSPCLLHLAMCSALCNESTLQYNPDKKSYEKIGESTEVALRVLVEKVGLPGFDSMPSSLNMLTKHERASYCNHYWENQFRKISVLEFSRDRKMMSVLCSRKHQEIMFSKGAPESIMARCTHILCNDDGSSVPLTMDIRNELEARFQSFAGKDTLRCLALALKRMPAGQQSICYGDEANLTFIGLVGMLDPPREEVWDAIHSCMSAGIRVIVVTGDNKSTAESLCRQIGAFEHLNDFSGYSYTASEFEGLPPLERTNALQRMVLFSRVEPSHKKMLVEALQAHNEVVAMTGDGVNDAPALKKADIGIAMGSGTAVAKSASDMVLADDNFATIVAAVAEGRAIYNNTKQFIRYMISSNIGEVVCIFVAAVLGMPDTLIPVQLLWVNLVTDGLPATAIGFNKPDGNIMSVKPRKVNEAVVSGWLFFRYLVIGAYVGLATIAGFVWWFVYSDNGPKLPYSELVNFDSCSTRQTSYSCSIFEDRHPSTVSMTVLVVVEMFNALNNLSENQSLLVIHPWSNLWLVGSIILTMLLHVAVLYIEPLSALFSVSPLSWVEWKIVLYLSFPVILIDEVLKFFSRRSPRGRRFPLRLWRREILPKESRDN

SEQ ID NO: 162476 - protein, 460 aa, Zea Mays
MNAVYQDKTNILFSGTVVVAGRARAIVIGIGSNTAMGSIRDAMLRTEDPHPSIYMVIILLTVKNLTILQEATPLKKKLDEFGTFLAKVIAGICILVWVVNIGHFRDPSHGGFVRGAIHYFKVAVALAVAAIPEGLPAVVTTCLALGTKRMARLNAIVRSLPSVETLGCTTVICSDKTGTLTTNMMSVSKVCVVRSVHQRPMTDEYSISGTTFAPDGFIYDADGLQLEFPPQSPCLLHLAMCSALCNESTLQYNPDKKSYEKIGESTEVALRVLVEKVGLPGFDSMPSSLNMLTKHERASYCNHYWENQFRKISVLEFSRDRKMMSVLCSRKHQEIMFSKGAPESIMARCTHILCNDDGSSVPLTMDIRNELEARFQSFAGKDTLRCLALALKRMPAGQQSICYGDEANLTFIGLVGMLDPPREEVWDAIHSCMSAGIRVIVVTGDNKQNRCVGKLVLLST

SEQ ID NO: 162477 - protein, 842 aa, Zea Mays
MRMVEMLSHQLRVDQAILTGESCSVAKEVESTPAMNAVYQDKTNILFSGTVVVAGRARAIVIGIGSNTAMGSIRDAMLRTEEEATPLKKKLDEFGTFLAKVIAGICILVWVVNIGHFRDPSHGGFVRGAIHYFKVAVALAVAAIPEGLPAVVTTCLALGTKRMARLNAIVRSLPSVETLGCTTVICSDKTGTLTTNMMSVSKVCVVRSVHQRPMTDEYSISGTTFAPDGFIYDADGLQLEFPPQSPCLLHLAMCSALCNESTLQYNPDKKSYEKIGESTEVALRVLVEKVGLPGFDSMPSSLNMLTKHERASYCNHYWENQFRKISVLEFSRDRKMMSVLCSRKHQEIMFSKGAPESIMARCTHILCNDDGSSVPLTMDIRNELEARFQSFAGKDTLRCLALALKRMPAGQQSICYGDEANLTFIGLVGMLDPPREEVWDAIHSCMSAGIRVIVVTGDNKSTAESLCRQIGAFEHLNDFSGYSYTASEFEGLPPLERTNALQRMVLFSRVEPSHKKMLVEALQAHNEVVAMTGDGVNDAPALKKADIGIAMGSGTAVAKSASDMVLADDNFATIVAAVAEGRAIYNNTKQFIRYMISSNIGEVVCIFVAAVLGMPDTLIPVQLLWVNLVTDGLPATAIGFNKPDGNIMSVKPRKVNEAVVSGWLFFRYLVIGAYVGLATIAGFVWWFVYSDNGPKLPYSELVNFDSCSTRQTSYSCSIFEDRHPSTVSMTVLVVVEMFNALNNLSENQSLLVIHPWSNLWLVGSIILTMLLHVAVLYIEPLSALFSVSPLSWVEWKIVLYLSFPVILIDEVLKFFSRRSPRGRRFPLRLWRREILPKESRDN

SEQ ID NO: 162478 - protein, 466 aa, Zea Mays
MRMVEMLSHQLRVDQAILTGESCSVAKEVESTPAMNAVYQDKTNILFSGTVVVAGRARAIVIGIGSNTAMGSIRDAMLRTEDEATPLKKKLDEFGTFLAKVIAGICILVWVVNIGHFRDPSHGGFVRGAIHYFKVAVALAVAAIPEGLPAVVTTCLALGTKRMARLNAIVRSLPSVETLGCTTVICSDKTGTLTTNMMSVSKVCVVRSVHQRPMTDEYSISGTTFAPDGFIYDADGLQLEFPPQSPCLLHLAMCSALCNESTLQYNPDKKSYEKIGESTEVALRVLVEKVGLPGFDSMPSSLNMLTKHERASYCNHYWENQFRKISVLEFSRDRKMMSVLCSRKHQEIMFSKGAPESIMARCTHILCNDDGSSVPLTMDIRNELEARFQSFAGKDTLRCLALALKRMPAGQQSICYGDEANLTFIGLVGMLDPPREEVWDAIHSCMSAGIRVIVVTGDNKVGEVLA

SEQ ID NO: 162479 - protein, 105 aa, Zea Mays
MAPLYLLHLAVCGLRTAPTSTPPSSPSTPSAPPPRMRYPTRWTCCRLCSTPCRCRPRPAMHLEFTMWRHGLSTGRRGPDAIIVGYIRQFVIKPLFGFLFGTLMEY

SEQ ID NO: 162480 - protein, 320 aa, Zea Mays
MATITTPLRSALFSPAASSAGRHRGGRRRAPSSVRCDASPPSHAAAASLDPDFDKKAFRHNLTRSDNYNRKGFGHKKETLELMSQEYTSNVIKTLKENGNQYTWGPVTVKLAEAYGFCWGVERAVQIAYEARKQFPEERIWLTNEIIHNPTVNKRLDEMGVEIIPVDAGIKDFNVVEQGDVVVLPAFGAAVEEMYTLNEKKVQIVDTTCPWVSKVWNMVEKHKKSEYTSIIHGKYSHEETVATASFAGKYIIVKNMAEATYVCDYILGGQLDGSSSTKEEFLEKFKKAVSPGFDPDVHLDMVGIANQTTMLKGETEEIAY

SEQ ID NO: 162481 - protein, 350 aa, Zea Mays
MCKLRDCSVCECPENEFPEPFRKPYNGLSPDSMMCQEGKPQAAVDKTLDSKVFKGWVETDNPWTSDDETDNNEMTYVNLQLNPERYTGYTGDSARRIWDAIYKENCPKYPSEELCHEKKALYKLISGLHSSISVHIAYDYLLDESTNSWGQNLPLLYDRVLKYPERVQNLYFTYLFVLRAVTKAANYLEQAEYNTGNPEDDLKTESLVKQLLYNSKLRSACPLPFDEAKLWQGENGPELKQEIQKQFRNISAIMDCVGCEKCRLWGKLQVHGLGTALKILFSVDGDSHMNQPLQLQRNEVIALFNLLNRLSESVKFVHEKGSSIEEVIEEQIPSTVQKSVSMPNLKLDFL

SEQ ID NO: 162482 - protein, 471 aa, Zea Mays
MTMTPAPVANGAAAGAGGGMKRRGGRLWYAAAGALLVALLAVAVSYRSFPGVPSSPSSPGSCGCPAARKYTGMVEDCCCDYETVDAINEEVLHPILQELVKLPFFRYFKVKLWCDCPFWPDDGMCKLRDCSVCECPENEFPEPFRKPYNGLSPDSMMCQEGKPQAAVDKTLDSKVFKGWVETDNPWTSDDETDNNEMTYVNLQLNPERYTGYTGDSARRIWDAIYKENCPKYPSEELCHEKKALYKLISGLHSSISVHIAYDYLLDESTNSWGQNLPLLYDRVLKYPERVQNLYFTYLFVLRAVTKAANYLEQAEYNTGNPEDDLKTESLVKQLLYNSKLRSACPLPFDEAKLWQGENGPELKQEIQKQFRNISAIMDCVGCEKCRLWGKLQVHGLGTALKILFSVDGDSHMNQPLQRNEVIALFNLLNRLSESVKFVHEKGSSIEEVIEEQIPSTVQKSVSMPNLKLDFL

SEQ ID NO: 162483 - protein, 448 aa, Zea Mays
MTMTPAPVANGAAAGAGGGMKRRGGRLWYAAAGALLVALLAVAVSYRSFPGVPSSPSSPGSCGCPAARKYTGMVEDCCCDYETVDAINEEVLHPILQELVKLPFFSVCECPENEFPEPFRKPYNGLSPDSMMCQEGKPQAAVDKTLDSKVFKGWVETDNPWTSDDETDNNEMTYVNLQLNPERYTGYTGDSARRIWDAIYKENCPKYPSEELCHEKKALYKLISGLHSSISVHIAYDYLLDESTNSWGQNLPLLYDRVLKYPERVQNLYFTYLFVLRAVTKAANYLEQAEYNTGNPEDDLKTESLVKQLLYNSKLRSACPLPFDEAKLWQGENGPELKQEIQKQFRNISAIMDCVGCEKCRLWGKLQVHGLGTALKILFSVDGDSHMNQPLQLQRNEVIALFNLLNRLSESVKFVHEKGSSIEEVIEEQIPSTVQKSVSMPNLKLDFL

SEQ ID NO: 162484 - protein, 480 aa, Zea Mays
MTMTPAPVANGAAAGAGGGMKRRGGRLWYAAAGALLVALLAVAVSYRSFPGVPSSPSSPGSCGCPWRIGPFQAARKYTGMVEDCCCDYETVDAINEEVLHPILQELVKLPFFRYFKVKLWCDCPFWPDDGMCKLRDCSVCECPENEFPEPFRKPYNGLSPDSMMCQEGKPQAAVDKTLDSKVFKGWVETDNPWTSDDETDNNEMTYVNLQLNPERYTGYTGDSARRIWDAIYKENCPKYPSEELCHEKKALYKLISGLHSSISVHIAYDYLLDESTNSWGQNLPLLYDRVLKYPERVQNLYFTYLFVLRAVTKAANYLEQAEYNTGNPEDDLKTESLVKQLLYNSKLRSACPLPFDEAKLWQGENGPELKQEIQKQFRNISAIMDCVGCEKCRLWGKLQVHGLGTALKILFSVDGDSHMNQPLQLQRNEVIALFNLLNRLSESVKFVHEKGSSIEEVIEEQIPSTVQKSVSMPNLKLDFL

SEQ ID NO: 162485 - protein, 315 aa, Zea Mays
MGLRVAATAPAPAGVRVLGRGAARVTPRPWAAVGGRRRFSVRMSVATTEATTTIAVGASEDQALEARNSKTVVAVILGGGAGTRLFPLTRRRAKPAVPIGGAYRLIDVPMSNCINSGINKVYILTQFNSQSLNRHLSRAYDFSNGVAIGDGFVEVLAATQRPGTEGKRWFQGTADAVRQFDWLFDDAKSKDIEDVLILSGDHLYRMDYMDFVQSHRQRGAGISICCLPIDGSRASDFGLMKIDDTGRVISFSEKPKGDELKAMQVDTTVLGLSKEEAENKPYIASMGIYIFKKDILLNLLRSDGVFPLQMILVLK

SEQ ID NO: 162486 - protein, 384 aa, Zea Mays
MGLRVAATAPAPAGVRVLGRGAARVTPRPWAAVGGRRRFSVRMSVATTEATTTIAVGASEDQALEARNSKTVVAVILGGGAGTRLFPLTRRRAKPAVPIGGAYRLIDVPMSNCINSGINKVYILTQFNSQSLNRHLSRAYDFSNGVAIGDGFVEVLAATQRPGTEGKRWFQGTADAVRQFDWLFDDAKSKDIEDVLILSGDHLYRMDYMDFVQSHRQRGAGISICCLPIDGSRASDFGLMKIDDTGRVISFSEKPKGDELKAMQVDTTVLGLSKEEAENKPYIASMGIYIFKKDILLNLLRWRFPTANDFGSEIIPASAKEIDVKAYLFNDYWEDIGTIKSFFEANLALAEQPPRFSFYDADKPMYTSRRNLPPSMVNNSKDRT

SEQ ID NO: 162487 - protein, 349 aa, Zea Mays
MDRYHRVERARNQSTIEENEIRITAQGLIRNYVSYATFLLQERRIKEIVLKAMGQAISKSVAVAEIIKKRAPELHQDTNISSVSITDVWEPIEEGLVPLEMTRHVSMISITLSPRELDKHTPGYQAPAYVEHPRQQQVAMVDMETIKVAITKVVGITTIKVDMVAMMIKVGMVVDMATTKADMETIKKMVDITEVEEVVCEEEAIGVTVEAMKEAGVVAMKEAGSAAAMKVAGVVAMKEAGSAAAMKVAGVVVVLVEGDMVAEEGVEWVAADERTKCMQTSGVSFNACLINISGKIRAFYVGSSSVTCEVCCFFPWARGLVVSIMHMQVLSCKSSFNFPAAEVVFHFFP

SEQ ID NO: 162488 - protein, 295 aa, Zea Mays
MDRYHRVERARNQSTIEENEIRITAQGLIRNYVSYATFLLQERRIKEIVLKAMGQAISKSVAVAEIIKKRAPELHQDTNISSVSITDVWEPIEEGLVPLEMTRHVSMISITLSPRELDKHTPGYQAPAYVEHPRQQQVPPLQRQPRRPSGQQFQQLEYEDSYARGRGRGRGRGRGRGWARGGYGGYGNNQGGYNQGGGYYDNQGDMVAEEGVEWVAADERTKCMQTSGVSFNACLINISGKIRAFYVGSSSVTCEVCCFFPWARGLVVSIMHMQVLSCKSSFNFPAAEVVFHFFP

SEQ ID NO: 162489 - protein, 131 aa, Zea Mays
MLNIPGNSRCHHCSANLADHQDNNSSSWSMKIPMHGVEEEGGAVGVEGVGLEVAMVDMETIKVAITKVVGITTIKVDMVAMMIKVGMVVDMATTKADMETIKKMVDITEVEEVVCEEEAIGVTVEPYRAQP

SEQ ID NO: 162490 - protein, 260 aa, Zea Mays
MDRYHRVERARNQSTIEENEIRITAQGLIRNYVSYATFLLQERRIKEIVLKAMGQAISKSVAVAEIIKKRAPELHQDTNISSVSITDVWEPIEEGLVPLEMTRHVSMISITLSPRELDKHTPGYQAPAYVEHPRQQQVPPLQRQPRRPSGQQFQQLEYEDSYARGRGRGRGRGRGRGWARGGYGGYGNNQGGYNQGGGYYDNQGGYGGYDDQGGYGGGYGYNQGRYGNYQENGGYNRGRGGGMRGRGNWGYRGGCGLPVE

SEQ ID NO: 162491 - protein, 160 aa, Zea Mays
MTRHVSMISITLSPRELDKHTPGYQAPAYVEHPRQQQVPPLQRQPRRPSGQQFQQLEYEDSYARGRGRGRGRGRGRGWARGGYGGYGNNQGGYNQGGGYYDNQGGYGGYDDQGGYGGGYGYNQGRYGNYQENGGYNRGRGGGMRGRGNWGYRGGCGLPVE

SEQ ID NO: 162492 - protein, 72 aa, Zea Mays
MMLSKIWDEQAEDVTTNWNKFAAKMKKVNDNMVELKKMNASMVELKNMFIAFYASMMFIVLLFLVINSNCKC

SEQ ID NO: 162493 - protein, 614 aa, Zea Mays
MFGRDPWGGPLEISNADSATDDDRSRDLDRAALMRQLDETQQSWLLAGPGDQAGKKKKRYVDLGCVVVDRKVFMWTVGTILGLGVFIGFVIMIVKLVPHKRPPPPPPDQYTQALHKALMFFNAQRSGPLPKHNGVSWRGNSCMKDGLSDSTVRRSLVGGFYDAGDAIKFNYPMAWSMTMLSWSVIEYRAKYEAIGELDHIRELIKWGTDYILKTFNSSADTIDRIVAQVGVGDTSKGSSQPNDHYCWMRPEDIDYKRPVTECHSCSDLASEMAAALAAASIVFKNSKTYSDKLVKGAKALYKFGRLQRGRYSPNGSDQAIFYNSTSYWDEFVWGGAWMYFATGNNSYLTVATAPGMAKHAGAYWFGSPNYGVFTWDDKLPGAQVLLSRLRLFLSPGYPYEEILRTFHNQTDNVMCSYLPVFNSFNFTKGGLIQLNHGRPQPLQYAVNAAFLASLYSDYLEAADTPGWYCGPNFYTIEVLRKFARSQNPLKMSYVVGFGNKYPKRPHHRGASIPHNGVKYGCKGGYKWRDTKKANPNILVGAMVAGPDRRDGYKDVRTNYNYTEPTLAANAGLVAALISISDIKTGRFGIDKNTIFSAIPPMFPTPPPPPSAWKP

SEQ ID NO: 162494 - protein, 209 aa, Zea Mays
MLKKMQRAVQAVRSHGNVLKYAVLQHISAPKPAMLPAAFSRFMSVSSARLEDRGFETATVADVLKSKGKSADGSWLWCTTEDSVYDAVKSMTQHNVGALVVVKPGQNKSIAGIVTERDYLRKIIVQGRSSKSTKVGDIMTEENKLITVNPDTKVLQAMQLMTENRVRHIPVIDGTGMLGMVSIGDVVRAVVAEHREELNRLNDYIQGGY

SEQ ID NO: 162495 - protein, 746 aa, Zea Mays
MMRSKLSQLQKFATQLAGIYSVLEVMVSSFTEAVSAHVNDLHQLIENTLKAKQHLEAMIWCIRHSFIQDICSRYADHTSWSSDVIQRKAYAETKWPGFSDEVSDVNQASKSTLFIEQALQNLGIEQSYMDKEEEIAITCLQNEQSSSMFCSTITTDHFSIDRYPFKNLREAVDVLFLHGASDMVIAKQAILLYYLFDRHWSRPDSEWRYLVDDFAATFGITNRTLLECLVFCLLDDYSSEALEEACSHLPKISSKETHPKIAQVLLERQKYDMALLVLKCTGHGSFSATENFKKDDISSLSEAVTVVRVRIECRLLTEAFMYHRSYCSKVKEQHSADMTHAEDALKNSWVYHVEMMVTEFCAICIKRNLVDKMIDLPWDSEEEKHLHKSLFDSAHEMPMKPNGSLLVVYYLRRYRYLEAYEVDRSLQKFEQKILENTTEEIASKIRAIARWRESLVVKCLDMLPEVQRENVKAINSGEQSQFARTAQLSSPAHVGKSQSPVMDLSTTFTTSLQNKSSLLRKNNALTDSGGLIRSSRSEFGRKVPSVLDTRASPHGPPTSNMRSSAGDMFPTVGQRVESPFLRGAKDISSRKGEEGFKKGIKYGDHDPVPMYLNLSSGDTPMKDYRTSLLKTAVNKTTIFQGKDSVGKGELHFGSRAEKPFILNGTGVGQNGLAKVSGYAGFREDYKVPTKENILSSSKRSSIDGAEASKGVSRWRSDESSEDEEERTNRESGASLVTRRRPRFSRR

SEQ ID NO: 162496 - protein, 739 aa, Zea Mays
MMRSKLSQLQKFATQLAGIYSVLEVMVSSFTEAVSAHVNDLHQLIENTLKAKQHLEAMIWCIRHSFIQDICSRYADHTSWSSDVIQRKAYAETKWPGFSDEVSDVNQASKSTLFIEQALQNLGIEQSYMDKEEEIAITCLQNEQSSSMFCSTITTDHFSIDRYPFKNLREAVDVLFLHGASDMLLYYLFDRHWSRPDSEWRYLVDDFAATFGITNRTLLECLVFCLLDDYSSEALEEACSHLPKISSKETHPKIAQVLLERQKYDMALLVLKCTGHGSFSATENFKKDDISSLSEAVTVVRVRIECRLLTEAFMYHRSYCSKVKEQHSADMTHAEDALKNSWVYHVEMMVTEFCAICIKRNLVDKMIDLPWDSEEEKHLHKSLFDSAHEMPMKPNGSLLVVYYLRRYRYLEAYEVDRSLQKFEQKILENTTEEIASKIRAIARWRESLVVKCLDMLPEVQRENVKAINSGEQSQFARTAQLSSPAHVGKSQSPVMDLSTTFTTSLQNKSSLLRKNNALTDSGGLIRSSRSEFGRKVPSVLDTRASPHGPPTSNMRSSAGDMFPTVGQRVESPFLRGAKDISSRKGEEGFKKGIKYGDHDPVPMYLNLSSGDTPMKDYRTSLLKTAVNKTTIFQGKDSVGKGELHFGSRAEKPFILNGTGVGQNGLAKVSGYAGFREDYKVPTKENILSSSKRSSIDGAEASKGVSRWRSDESSEDEEERTNRESGASLVTRRRPRFSRR

SEQ ID NO: 162497 - protein, 88 aa, Zea Mays
MVPTSGGSLYIRSLRPLHYYSAGKAVRDRFYLAIADEEMKTTEQLSCGACTHHVFSAEQVRIFELSGIRAVNFLPFYMSTSTKRKQNQ

SEQ ID NO: 162498 - protein, 345 aa, Zea Mays
MEVRVKILFTSLCHTDVYFWEAKGQTPVFPRIFGHEAGGIIESVGEGVTDVAPGDHVLPVFTGECKECAHCKSAESNMCDLLRINTDRGVMIADGKSRFSINGKPIYHFVGTSTFSEYTVMHVGCVAKINPQAPLDKVCVLSCGISTGLGASINVAKPPKGSTVAVFGLGAVGLAAAEGARIAGASRIIGVDLNPSRFEEARKFGCTEFVNPKDHNKPVQEVLAEMTNGGVDRSVECTGNINAMIQAFECVHDGWGVAVLVGVPHKDAEFKTHPMNFLNERTLKGTFFGNYKPRTDLPNVVELYMKKELEVEKFITHSVPFAEINKAFDLMAKGEGIRCIIRMEN

SEQ ID NO: 162499 - protein, 317 aa, Zea Mays
MEVLERVGKETMEFIVEETGMEVDKGSTGEGDQQTEEEQFEEVSFDRCFYIYGGPDQLEELEALSSHYALLFNRKKGKLNSDQKTYYDGKLKEIEQIFSLSTNADEDGPESDKGKKTESADTDTDAEMKKLCEYSVRKAAKMAAGFTTALGGLSPNEIMKRTTSRLETIHSEGVHRLSEMCCLAVSQLLVLGKSVISSANKSKNEDGENDVKIDWPEDAISKAKIIRWKAQSISVDMEKVSTSFATGISDVAEAYAAAMQSALADKQDDLPNQKSLQEKVKSISIHLNSDQTSAVSKLQDALRYLAYVVVCASMPSV

SEQ ID NO: 162500 - protein, 480 aa, Zea Mays
MSDESPPPAPAAEKSQPAEQAAGGWGGWGLSIFSEISRNAVEVAKSAIADIQQPPEQDTVPGSGEKDQEKEPEGEEEEEERRKAALDKLEKGLKAFDSSVETITTGTWQALGTAWRSGSLFVQKLENSASSLAETIQQGELPAKASAIAPTILETGKSFTAKGMEVLERVGKETMEFIVEETGMEVDKGSTGEGDQQTEEEQFEEVSFDRCFYIYGGPDQLEELEALSSHYALLFNRKKGKLNSDQKTYYDGKLKEIEQIFSLSTNADEDGPESDKGKKTESADTDTDAEMKKLCEYSVRKAAKMAAGFTTALGGLSPNEIMKRTTSRLETIHSEGVHRLSEMCCLAVSQLLVLGKSVISSANKSKNEDGENDVKIDWPEDAISKAKIIRWKAQSISVDMEKVSTSFATGISDVAEAYAAAMQSALADKQDDLPNQKSLQEKVKSISIHLNSDQTSAVSKLQDALRYLAYVVVCASMPSV

SEQ ID NO: 162501 - protein, 360 aa, Zea Mays
MEEWFTICSKIGKFSFKLGRNHSARRTACKSICDSTDHFRAKGMEVLERVGKETMEFIVEETGMEVDKGSTGEGDQQTEEEQFEEVSFDRCFYIYGGPDQLEELEALSSHYALLFNRKKGKLNSDQKTYYDGKLKEIEQIFSLSTNADEDGPESDKGKKTESADTDTDAEMKKLCEYSVRKAAKMAAGFTTALGGLSPNEIMKRTTSRLETIHSEGVHRLSEMCCLAVSQLLVLGKSVISSANKSKNEDGENDVKIDWPEDAISKAKIIRWKAQSISVDMEKVSTSFATGISDVAEAYAAAMQSALADKQDDLPNQKSLQEKVKSISIHLNSDQTSAVSKLQDALRYLAYVVVCASMPSV

SEQ ID NO: 162502 - protein, 84 aa, Zea Mays
MFILNKRSNRVPKIVFPTSMYDERRLSQPSHGFKIASPASVYSTTPHKGGRLAVGLPLYVTKGNYQNHRYSMYIIFEPDKVYIS

SEQ ID NO: 162503 - protein, 135 aa, Zea Mays
MAQARDPAWAWPARRVPVRARGLATGVRPRPGPGAVSTLGVPLLGGRGLDGTGAAGMAPSGRGCPRRGHGPSSPGGVAWPQQPKRSGRETPLAQVLAGSATTVCPQDCSTHVCKNSAIADEDRQIHNKTDAVGHC

SEQ ID NO: 162504 - protein, 132 aa, Zea Mays
MAQARDPAWAWPARRVPVRARGLATGVRPRPGPGAVSTLGVPLLGGRGLDGTGAAGMAPSGRGCPRRGHGPSSPGGVAWPQQPKRSGRETPLAQVLAGSATTVCPQDCSTHVCKNSAIADEDRQIHNKTEES

SEQ ID NO: 162505 - protein, 199 aa, Zea Mays
MRDSVETSPLLQYRAQTVVPGRVLKMEEAIKNRDFESFAKLTCADSNQFHAVCLDTSPPIFYMNDTSHRIISLVEKWNHSEGTPQVAYTFDAGPNAVLIAQNRKTAAHFLQKLLYYFPPQDNDLSSYLVGDKSILGDAGLHSMKDVEALPAPPDTKIPDQKFKGDVSYFICSRLGAGPKVVVDEGQALIDSVTGLPKGV

SEQ ID NO: 162506 - protein, 927 aa, Zea Mays
MPWSGMNPMQVVGAVGFQDRRLDIPKEVDPLVARIIFECWQNDQQRTGIYLVHLKAGARASTTHRAPAPAPARNVFLPAIPPPPTPSLPFPASRPRRPSLQSRPRQRRVPAAHLSHLFLSLALLTRRRSVGCRLSCLLARPLFMVMVDEGGKGEAQPPGLDPRTRRSAATRATDDMDGGGRGEEWEGAPPATCSRSRRRRCPCPSSSPAWTPPSGARGATISATVAIRRAGPAAPAPGPHTPTPAEERSAKRVRMCLQCGAAVTPQWRSGPMGQGTLCNAYRVRLKVAGVLRDQGRLLPEYRPLASPTFEPSEHANKHSQVMQLHRQRKSQGQHHPLPAEHPRAMDVLQFPQRWQAYTALRSAGKSVEIIFVSLDRDEASFRDHFQGMSWLAVPFDAAGLLRQKLCARFAIERIPALIPLSASATPSSGLGCGEDAVRLVGEYGVDAYPFSAQRRRELESMDDARRGGGRLQELLGCEERDYVISADDIKIPIADLAGKTVGLYFGAHWCPPCHVFTKQLKEVYNELKILRPVSFEVIFVSIDRSKGEFQASMSSMPWLAIPYSDAVRKKLTRIFVVKGIPGLLILGLDGKALKTDVHRPELLPTYEGSRCNKIKGIKAPRITPKNVIRFSSYTDTFYFITPEAWYWSEYLYLKKESLTVVISDVKCDDLKEEGKVQQTKRGNSIHDHSSSHSIRSFSALTESGPGLTSVHPSSRTRPPPFYALLPRSDGPFAGDEHTPQQELSGVEQREARDPMAAAEGQWVLMATGRTPTNIAVIKYWGKRDEALILPINDSISVTLDPDHLSATTTVAVSPSFPSDRMWLNGKEISLLGGRFQSCLREIRKRARDFEDKEKGVKIKKEDWDKLHVHIASYNNFPTAAGLASSAAGLACFVFTLGKLMNVKEDYGELSSIARDLGVHAAVYMVVL

SEQ ID NO: 162507 - protein, 1174 aa, Zea Mays
MPWSGMNPMQVVGAVGFQDRRLDIPKEVDPLVARIIFECWQNDQQRTGIYLVHLKAGARASTTHRAPAPAPARNVFLPAIPPPPTPSLPFPASRPRRPSLQSRPRQRRVPAAHLSHLFLSLALLTRRRSVGCRLSCLLARPLFMVMVDEGGKGEAQPPGLDPRTRRSAATRATDDMDGGGRGEEWEGAPPATCSRSRRRRCPCPSSSPAWTPPSGARGATISATVAIRRAGPAAPAPGPHTPTPAEERSAKRVRMCLQCGAAVTPQWRSGPMGQGTLCNAYRVRLKVAGVLRDQGRLLPEYRPLASPTFEPSEHANKHSQVMQLHRQRKSQGQHHPLPAEHPRAMDVLQFPQRWQAYTALRSAGKSVEIIFVSLDRDEASFRDHFQGMSWLAVPFDAAGLLRQKLCARFAIERIPALIPLSASATPSSGLGCGEDAVRLVGEYGVDAYPFSAQRRRELESMDDARRGGGRLQELLGCEERDYVISADDIKIPIADLAGKTVGLYFGAHWCPPCHVFTKQLKEVYNELKILRPVSFEVIFVSIDRSKGEFQASMSSMPWLAIPYSDAVRKKLTRIFVVKGIPGLLILGLDGKALKTDVHRPELLPTYEGSRCNKIKGIKAPRITPKNVIRFSSYTDTFYFITPEAWYWSEYLYLKKESLTVVISDVKCDDLKEEGKVQQTKRGNSIHDHSSSHSIRSFSALTESGPGLTSVHPSSRTRPPPFYALLPRSDGPFAGDEHTPQQELSGVEQREARDPMAAAEGQWVLMATGRTPTNIAVIKYWGKRDEALILPINDSISVTLDPDHLSATTTVAVSPSFPSDRMWLNGKEISLLGGRFQSCLREIRKRARDFEDKEKGVKIKKEDWDKLHVHIASYNNFPTAAGLASSAAGLACFVFTLGKLMNVKEDYGELSSIARQGSGSACRSIYGGFVKWCMGEKDDGSDSIAVQLADETHWNDLVIIIAVVSSKQKETSSTSGMRDSVETSPLLQYRAQTVVPGRVLKMEEAIKNRDFESFAKLTCADSNQFHAVCLDTSPPIFYMNDTSHRIISLVEKWNHSEGTPQVAYTFDAGPNAVLIAQNRKTAAHFLQKLLYYFPPQDNDLSSYLVGDKSILGDAGLHSMKDVEALPAPPDTKIPDQKFKGDVSYFICSRLGAGPKVVVDEGQALIDSVTGLPKGV

SEQ ID NO: 162508 - protein, 102 aa, Zea Mays
MSVEGNDVRSERATAAAAPPRASDQASFPVTHGDGSDPPSFPCCRAGVRRPCSHQQGRQEGSLRTSEQGSNLNPCKIPCTRTSQWHHEEPRHSETNVLSNIP

SEQ ID NO: 162509 - protein, 306 aa, Zea Mays
MKLPSKSENGDQKTDKSCPSQSTKAATSANKTENQDQKKTKKISAKQSTRAATPAKKKQRNTDAQVSSKPSSEKRKNSKTADKDGLRKSSKVPRSTPKIHAVNEEQIKEKEGEPPTRKGEADNKVVIPGTSVREHSNNSNLKEKNDGTSPEPSPLKDKTATEDSYRGSLGSAKGLHGPVTTPVWFSLISLPNQKEDPQLPQLPKTYMRIKDGSLQISSIQRYIMKKLDLANENEVEIICHGEPICPSSTLRGLMELWHRRQPTEPVEASVGAPAEEFVMVLGYRCHRRHPYLAPGTTVAVPPELPS

SEQ ID NO: 162510 - protein, 463 aa, Zea Mays
MGAARGLARVRREALAACMTCPLCRGLLREATAITVCLHTFCRECILEKINDEEIDCCPVCNIDLGCDPEEKLRPDHNLQDIRNKVFPIKKINVDSPKALTTLPAKRKQRSISSLVVDTPSVVKQTGLTGKRTKAKRRAAASLATSPVNNGTMKLPSKSENGDQKTDKSCPSQSTKAATSANKTENQDQKKTKKISAKQSTRAATPAKKKQRNTDAQVSSKPSSEKRKNSKTADKDGLRKSSKVPRSTPKIHAVNEEQIKEKEGEPPTRKGEADNKVVIPGTSVREHSNNSNLKEKNDGTSPEPSPLKDKTATEDSYRGSLGSAKGLHGPVTTPVWFSLISLPNQKEDPQLPQLPKTYMRIKDGSLQISSIQRYIMKKLDLANENEVIYSDVEIICHGEPICPSSTLRGLMELWHRRQPTEPVEASVGAPAEEFVMVLGYRCHRRHPYLAPGTTVAVPPELPS

SEQ ID NO: 162511 - protein, 455 aa, Zea Mays
MGAARGLARVRREALAACMTCPLCRGLLREATAITVCLHTFCRECILEKINDEEIDCCPVCNIDLGCDPEEKLRPDHNLQDIRNKVFPIKKINVDSPKALTTLPAKRKQRSISSLVVDTPSVVKQTGLTGKRTKAKRRAAASLATSPVNNGTMKLPSKSENGDQKTDKSCPSQSTKAATSANKTENQDQKKTKKISAKQSTRAATPAKKKQRNTDAQVSSKPSSEKRKNSKTADKDGLRKSSKVPRSTPKIHAVNEEQIKEKEGEPPTRKGEADNKVVIPGTSVREHSNNSNLKEKNDGTSPEPSPLKDKTATEDSYRGSLGSAKGLHGPVTTPVWFSLISLPNQKEDPQLPQLPKTYMRINLQISSIQRYIMKKLDLANENEVEIICHGEPICPSSTLRGLMELWHRRQPTEPVEASVGAPAEEFVMVLGYRCHRRHPYLAPGTTVAVPPELPS

SEQ ID NO: 162512 - protein, 166 aa, Zea Mays
MADLYLSRKLAGASSPVSGSGGPNWFPASPTIGSKISRASRASAATVHGNENDVEELEMLLEAYFMQVDGTLNKLTTLREYIDDTEDYINIQLDNHRNQLIQLELFLSSGTVCLSLYSLVAGVFGMNIPYTWNDGHGYIFKWGFFVPLYLSPLLLTHDTRGSSDPE

SEQ ID NO: 162513 - protein, 374 aa, Zea Mays
MAAAGAGTGSEGKKRGASRSWILLDAAGEEQLLDADKYAIMRRVDINARDLRILDPLLSYPSTILGRERAIVLNLEHIKAIITSNEVLLRDPSDENVIPVVEELHRRLAPSSATQHDGKENLSGQHDVEGAEEDESPFEFRALEVTLEAICSFLDARTTELETDAYPALDELTSKISSRNLDRVRKLKSGMTRLTARVQKVRDELEQLLDDDDDMADLYLSRKLAGASSPVSGSGGPNWFPASPTIGSKISRASRASAATVHGNENDVEELEMLLEAYFMQVDGTLNKLTTLREYIDDTEDYINIQLELFLSSGTVCLSLYSLVAGVFGMNIPYTWNDGHGYIFKWVVLVSGLFCAFIFVSIVAYARHKGLVGS

SEQ ID NO: 162514 - protein, 192 aa, Zea Mays
MEEAAAAAAAKPEPAAEKAKRPAEAPAADAEKPPAPKAQAVGWPPVRSYRRNVMTVQSVKSKKEEEPEKQQSAANAGGNGSAFVKVSMDGAPYLRKVDLKMYNSYTELSVALKKMFSTFTTSGNNMNEGKLVDPVSGADVVTTYEDKDGDWMLVGDVPWEMFVESCRRLRIMKSSEAIGLAPRTKDKCKNRS

SEQ ID NO: 162515 - protein, 1079 aa, Zea Mays
MAPAFSVPDAEDLPARRSDASDVAGNVWDLATLPTPPAGGGREIYIYRNTFNLVPRSIGGRARGLRSLKFFGNDVEVLPADSGDELDGLESLQVKVSAPRVSGAPLRRMQALKELELSMVPPRPSSCSILAEVARLKCLTKLTICHFSIRYLPPEIGSLKKLQELDLSFNKLKNFPNCIIELSALKFLKVTNNKLVDVPSGISSLRCLESLDLSNNRLTSLGSVKLISMLTLQYLNLQFNRLSHSYVIPSWICCDMRGNVENTMKGCKLKYTGVATMNSLAEPSTSSHACDSALLCVQSESSPNLKHHAPHKIKKGWRRRDCLQQRARQERLESSRSKLNEKYIDEMAVNMAEDECPSSLHDMENKLGIRTIDEETSVQDSLKETSSISEDLFSIVDDDLDGLTKDCGTMVQDHYDEEKPGFNMRGYNDDNSCISGEPACFSRSRVCSVEKELDDTASSVHDVGEIARDNSSVTPKFALKSKRHPDMDSNPKPSKCPRPIDERSKLSYKYSVESFCSIDDHLPDGFYDAGRDMPFMSLEEYERSLGLYAREVILLDREQDEELDTIASSAQLLLSSLTRPSSCEMEEDAGHDLLRASVLALFVSDCFGGCDRSASLGRTRRAIVSLRKEQPFVCTCSAGNLGDNNEAKQTNILSGHFDFAGLCNRSIHLIKERRNSGIVPIGSLQLGVCRHRAVLMKYLCDRADPPIPCELVRGHLDYTPHAWNIVPVKKRNGWVRMIVDACYPTNIKEETDPEYFCRYIPLSRLQIVLDDEGYTPRCSFPSVSSCKEIEVTPSSSVYHCKIGAVDAAAKIRYLDTRRVSNDEVKLFEYKLLGEVRMLGALRKHRSIVDIYGHQLSSKWVQVDGDKEYRILQSIILMEYVNGGSLKGYLTKLLKEGKKCVPIDLSVYIAREVACALLEMHKKLVIHRDIKSENVLIDLDPKRNAGAPIVKLSDFDRSVPLYSLSHTCCISQLGTHPPDVCVGTPCWMAPEVVKAMHEKHHYGLRKKQRPRLTQELEAFWTMDEPATRLKLGITSDAHADKLRHLIDLFYQCTRGHASRRPKAVQIYNSLCSLPTCYDMR

SEQ ID NO: 162516 - protein, 1032 aa, Zea Mays
MAPAFSVPDAEDLPARRSDASDVAGNVWDLATLPTPPAGGGREIYIYRNTFNLVPRSIGGRARGLRSLKFFGNDVEVLPADSGDELDGLESLQVKVSAPRVSGAPLRRMQALKELELSMVPPRPSSCSILAEVARLKCLTKLTICHFSIRYLPPEIGSLKKLQELDLSFNKLKNFPNCIIELSALKFLKVTNNKLVDVPSGISSLRCLESLDLSNNRLTSLGSVKLISMLTLQYLNLQFNRLSHSYVIPSWICCDMRGNVENTMKGCKLKYTGVATMNSLAEPSTSSHACDSALLCVQSESSPNLKHHAPHKIKKGWRRRDCLQQRARQERLESSRSKLNEKYIDEMAVNMAEDECPSSLHDMENKLGIRTIDEETSVQDSLKETSSISEDLFSIVDDDLDGLTKDCGTMVQDHYDEEKPGFNMRGYNDDNSCISGEPACFSRSRVCSVEKELDDTASSVHDVGEIARDNSSVTPKFALKSKRHPDMDSNPKPSKCPRPIDERSKLSYKYSVESFCSIDDHLPDGFYDAGRDMPFMSLEEYERSLGLYAREVILLDREQDEELDTIASSAQLLLSSLTRPSSCEMEEDAGHDLLRASVLALFVSDCFGGCDRSASLGRTRRAIVSLRKEQPFVCTCSAGNLGDNNEAKQTNILSGHFDFAGLCNRSIHLIKERRNSGIVPIGSLQLGVCRHRAVLMKYLCDRADPPIPCELVRGHLDYTPHAWNIVPVKKRNGWVRMIVDACYPTNIKEETDPEYFCRYIPLSRLQIVLDDEGYTPRCSFPSVSSCKEIEVTPSSSVYHCKIGAVDAAAKIRYLDTRRVSNDEVKLFEYKLLGEVRMLGALRKHRSIVDIYGHQLSSKWVQVDGDKEYRILQSIILMEYVNGGSLKGYLTKLLKEGKKCVPIDLSVYIAREVACALLEMHKKLVIHRDIKSENVLIDLDPKRNAGAPIVKLSDFDRSVPLYSLSHTCCISQLGTHPPDVCVGTPCWMAPEVVKAMHEKHHYGLISGHLDVFYWRCLRFRCLTRDFLTLKYMI

SEQ ID NO: 162517 - protein, 760 aa, Zea Mays
MAPAFSVPDAEDLPARRSDASDVAGNVWDLATLPTPPAGGGREIYIYRNTFNLVPRSIGGRARGLRSLKFFGNDVEVLPADSGDELDGLESLQVKVSAPRVSGAPLRRMQALKELELSMVPPRPSSCSILAEVARLKCLTKLTICHFSIRYLPPEIGSLKKLQELDLSFNKLKNFPNCIIELSALKFLKVTNNKLVDVPSGISSLRCLESLDLSNNRLTSLGSVKLISMLTLQYLNLQFNRLSHSYVIPSWICCDMRGNVENTMKGCKLKYTGVATMNSLAEPSTSSHACDSALLCVQSESSPNLKHHAPHKIKKGWRRRDCLQQRARQERLESSRSKLNEKYIDEMAVNMAEDECPSSLHDMENKLGIRTIDEETSVQDSLKETSSISEDLFSIVDDDLDGLTKDCGTMVQDHYDEEKPGFNMRGYNDDNSCISGEPACFSRSRVCSVEKELDDTASSVHDVGEIARDNSSVTPKFALKSKRHPDMDSNPKPSKCPRPIDERSKLSYKYSVESFCSIDDHLPDGFYDAGRDMPFMSLEEYERSLGLYAREVILLDREQDEELDTIASSAQLLLSSLTRPSSCEMEEDAGHDLLRASVLALFVSDCFGGCDRSASLGRTRRAIVSLRKEQPFVCTCSAGNLGDNNEAKQTNILSGHFDFAGLCNRSIHLIKERRNSGIVPIGSLQLGVCRHRAVLMKYLCDRADPPIPCELVRGHLDYTPHAWNIVPVKKRNGWVRMIVDACYPTNIKEETDPEYFCSLW

SEQ ID NO: 162518 - protein, 60 aa, Zea Mays
MGHLDPTRITTQLVSLASLTKHSRVRSEKEKKAKPSKQEQQRNTNDHLTSLNVLELNWRL

SEQ ID NO: 162519 - protein, 197 aa, Zea Mays
MVWFVFVRVLRLRLFGAVNDIFCLFQGHIENIANLKQHYGLSKTANEVTILIEAYRTLRDRGPVPASQVVRDLSGKFAFILYDTLSKSTFVAADADGSIPFFWGVDYENHLVFSDDVGILKTGCGNSYAPFPKGCFYTTSGGLQSFEHPLHEVKAVPRVDSQGQMCGSIFKVDSESKKKQDASIPRVGSAADWSNQF

SEQ ID NO: 162520 - protein, 2013 aa, Zea Mays
MKWSTLLSKVVFAGGQQQQPPPPPSPPPESPFHGQQAVQDLATPRLSSASTGGDEGGFDAAAGSSPSAAASSARGRNELESDFRRLWEEFRSSSSEKEKERALNLAVDVFCRLVKQYSSVAQLVTKLVEGHIFSFVIGRAFVTDVEKLRIHSKGRPLRVADVIGFFSDTTELGICPGSNLLYAVEVLVTETNDRQPLLDSGILCCLIYILNSLLSPNENSTDTLPVHQEGSRNEKNKNLDPMQSRRLEFRDGIVPLHTIQLHRHAMQVLGLLLANDNGTSAKYIRKHQLIKVLLMAVKDFNPQSGDAAYTMGIVDLLLECVELSYRPESGAIRLREDIHNAHGYQFLVQFALTLCSLHKNQTLQSSSKLASEADASVPSHRLEQDIFSCDLSPQLSRLLDVLVNLSQIGPSENGGVSSPKALRGYHLLALFLHRRMSLFDMQSLDIFFRIAACEASFPEPQKSKINRTAGYASGMSPEASLDDLTLPRFADDMSSGGSHGDLDDFSAQKDSFSHLSELENADLAGETSEFIVLSNADMVEHILLDWTIWVAAPISVQITLLGFLERMVSMHWFRNHNLTMLRRINLVQHLLVTLQRGDVEIPVLEKLVVLLGVILEDGFLASELELVVRFIIMTFDPPELTPNRQIVREAMGKHVIVRNMLLEMLIDLQVTINAEELLEQWHKVVSSRLVTYFLDEAVHPTSMRWITTLLGVCLTSSTTFALKFRTSGGFQGLNHVLPSFHDSPEIYYILFCLVFGKPVYPRVPEVRMLDFHALMPSDGNYGELKFVDLLDTIIAMAKATFDSLIMKSMLAHENNNLSHLNGTLVADLVEATSDMGGDLQGEALMHKTYAARLMGGEAAAPAVATSILRFMVDLAKMCPPFSAVCRRHDFLESCIDLYFSCVRSDFALRMAKDLTTVATGEMNEHDDDNGSLKDALSSLPHDQDQSTKTLSATSFPQEQKSSSSESTGMPNPFETAEAKADDSSNQEFSNKILNGEANQIFNNARDQGRITASGANGISEFHHVTDSPNSVAMNNVGSPVLSERSTHRAASTPTASPMAPFTSWPGSAGSYTDGRHLTASPSMASSISGIDLDSSPDLRTNIQGPSAANTLFPINSKLLLDIDDLGYGGGPCSAGATAVLDFVAQILADTISDQLKAALFIENILESVPLFVDIDSALVFQGLCLSRLMNFLERKLLLDDEEDGKKLDKSRWSVNLDPLCWMIVDRVYMGCFPTPLRVLQTLEFLMSMLQLASKDGRVEDAVPPGKGILSIARGSRQLDPYIHAILKNTNRMIMYCFLPIFLKSMGEDDLLANLAFLTETGRSLASKRYQEDFSIDICTVLQLLVANKRLVLCPSNVDTDLMCCFCINLMSLLHDKRVTAQNLAVDLLKYLVVHRRQSLEDLLVCKPNQGQQLDILHGGLDKLVTGSTSTFFEWLQSSQQTISKVLDQCALIMWVQYITGSAKFPGVRIKGMEVRRKKEMGRKFRESAKVDARHWEQINERRYNLDLVRDVMSTELRAIRQDKYGWILHGESEWQSQLQELVHERGIFPMRQPSTEPEWQLCGVEGPYRMRKKLEHSKFKIDTIQNVLTSNLGSNGGKIINKEDGELLLTSGSDTMSGLNLLTYDTEQRDLDAVEFSSFKDDDDIFKGGSTISGPIGWTDDKSSVNEQSLHSATEFGAKSSSLSFHMTESHQGKSELSSPRRAPSVKGTDARTSEDKSEKELLDNGEYLIRPYLEPYEKIRHKYNCERVAGLDKHDGIFLIGELCLYIIENFYIDDSNCICEKGSEDELSVIDQALGVNKDIMGGSESQLKSPTTWGGTAKVLLGGRSWAYNGGAWGKEKLCNSSNLPHPWHMWKLDSVHELLKRDYQLRPVAIEIFSMDGCNELLVFHKKEREEVFKNLIAMNLPRNSMLDTTISASSKQESGEGSRLFKVMAKSFSKRWQSGEITNFQYLMHLNTLAGRGHFAGLINPWDAKRRKVKRNSARDMIAGMTLMYQSSIMALIIQVLELSFSIS

SEQ ID NO: 162521 - protein, 2597 aa, Zea Mays
MKWSTLLSKVVFAGGQQQQPPPPPSPPPESPFHGQQAVQDLATPRLSSASTGGDEGGFDAAAGSSPSAAASSARGRNELESDFRRLWEEFRSSSSEKEKERALNLAVDVFCRLVKQYSSVAQLVTKLVEGHIFSFVIGRAFVTDVEKLRIHSKGRPLRVADVIGFFSDTTELGICPGSNLLYAVEVLVTETNDRQPLLDSGILCCLIYILNSLLSPNENSTDTLPVHQEGSRNEKNKNLDPMQSRRLEIEGSVIHIMKALASHQSAAPSLIEDDALQVLFHMVANGSLSVLSQFRDGIVPLHTIQLHRHAMQVLGLLLANDNGTSAKYIRKHQLIKVLLMAVKDFNPQSGDAAYTMGIVDLLLECVELSYRPESGAIRLREDIHNAHGYQFLVQFALTLCSLHKNQTLQSSSKLASEADASVPSHRLEQDIFSCDLSPQLSRLLDVLVNLSQIGPSENGGVSSPKALRGYHLLALFLHRRMSLFDMQSLDIFFRIAACEASFPEPQKSKINRTAGYASGMSPEASLDDLTLPRFADDMSSGGSHGDLDDFSAQKDSFSHLSELENADLAGETSEFIVLSNADMVEHILLDWTIWVAAPISVQITLLGFLERMVSMHWFRNHNLTMLRRINLVQHLLVTLQRGDVEIPVLEKLVVLLGVILEDGFLASELELVVRFIIMTFDPPELTPNRQIVREAMGKHVIVRNMLLEMLIDLQVTINAEELLEQWHKVVSSRLVTYFLDEAVHPTSMRWITTLLGVCLTSSTTFALKFRTSGGFQGLNHVLPSFHDSPEIYYILFCLVFGKPVYPRVPEVRMLDFHALMPSDGNYGELKFVDLLDTIIAMAKATFDSLIMKSMLAHENNNLSHLNGTLVADLVEATSDMGGDLQGEALMHKTYAARLMGGEAAAPAVATSILRFMVDLAKMCPPFSAVCRRHDFLESCIDLYFSCVRSDFALRMAKDLTTVATGEMNEHDDDNGSLKDALSSLPHDQDQSTKTLSATSFPQEQKSSSSESTGMPNPFETAEAKADDSSNQEFSNKILNGEANQIFNNARDQGRITASGANGISEFHHVTDSPNSVAMNNVGSPVLSERSTHRAASTPTASPMAPFTSWPGSAGSYTDGRHLTASPSMASSISGIDLDSSPDLRTNIQGPSAANTLFPINSKLLLDIDDLGYGGGPCSAGATAVLDFVAQILADTISDQLKAALFIENILESVPLFVDIDSALVFQGLCLSRLMNFLERKLLLDDEEDGKKLDKSRWSVNLDPLCWMIVDRVYMGCFPTPLRVLQTLEFLMSMLQLASKDGRVEDAVPPGKGILSIARGSRQLDPYIHAILKNTNRMIMYCFLPIFLKSMGEDDLLANLAFLTETGRSLASKRYQEDFSIDICTVLQLLVANKRLVLCPSNVDTDLMCCFCINLMSLLHDKRVTAQNLAVDLLKYLVVHRRQSLEDLLVCKPNQGQQLDILHGGLDKLVTGSTSTFFEWLQSSQQTISKVLDQCALIMWVQYITGSAKFPGVRIKGMEVRRKKEMGRKFRESAKVDARHWEQINERRYNLDLVRDVMSTELRAIRQDKYGWILHGESEWQSQLQELVHERGIFPMRQPSTEPEWQLCGVEGPYRMRKKLEHSKFKIDTIQNVLTSNLGSNGGKIINKEDGELLLTSGSDTMSGLNLLTYDTEQRDLDAVEFSSFKDDDDIFKGGSTISGPIGWTDDKSSVNEQSLHSATEFGAKSSSLSFHMTESHQGKSELSSPRRAPSVKGTDARTSEDKSEKELLDNGEYLIRPYLEPYEKIRHKYNCERVAGLDKHDGIFLIGELCLYIIENFYIDDSNCICEKGSEDELSVIDQALGVNKDIMGGSESQLKSPTTWGGTAKVLLGGRSWAYNGGAWGKEKLCNSSNLPHPWHMWKLDSVHELLKRDYQLRPVAIEIFSMDGCNELLVFHKKEREEVFKNLIAMNLPRNSMLDTTISASSKQESGEGSRLFKVMAKSFSKRWQSGEITNFQYLMHLNTLAGRGYSDLTQYPVFPWVLADYESDVLDLRNPQTFRRLDKPMGCQTEEGEEEFCKRYDSWDDPDVPKFHYGSHYSSAGIVLFYLLRLPPFSTENQKLQGGQFDHADRLFNSVKDTWVSAAGKSNTSDVKELIPEFYYLPEFLENRFNLDLGEKQSGEKVGDVVLPPWAKGSAREFIRKHREALESDYVSENLHHWIDLIFGYKQRGKAAEDAVNVFYHYTYEGNVDIDAVSDPTMKASILAQINHFGQTPKQLFQKPHPQRRTDRKVPPHPLRYCAYLTQQEIRKTASSVSQIVSYNDKILIAAVNCLLKPLTYNEYISWGFPDRSLRILTYDQDRLLSTHENLHGGSQIQCTGVSHDGNILITGGDDGVVAVWRFVKDGIRRLLRMEKALCAHTGKITCVSVSQPYSLIVSGSDDCSVILWDLTSLVFVKQLPRFPASVSALHVNSLTGEILTGAGVLFAVWSINGDCLAVVNTSQLPSDLILSVTSATHSDWQDTNWYVTGHQSGAVKVWKMLHCSSDEAVNSKSKSPAVSSGGLSLNGQAPEYRLLLQKVLKSHKHPVTALCIPPDLKQLLSGDGSGHLLSWSLKDDSFKGS

SEQ ID NO: 162522 - protein, 2510 aa, Zea Mays
MKWSTLLSKVVFAGGQQQQPPPPPSPPPESPFHGQQAVQDLATPRLSSASTGGDEGGFDAAAGSSPSAAASSARGRNELESDFRRLWEEFRSSSSEKEKERALNLAVDVFCRLVKQYSSVAQLVTKLVEGHIFSFVIGRAFVTDVEKLRIHSKGRPLRVADVIGFFSDTTELGICPGSNLLYAVEVLVTETNDRQPLLDSGILCCLIYILNSLLSPNENSTDTLPVHQEGSRNEKNKNLDPMQSRRLEFRDGIVPLHTIQLHRHAMQVLGLLLANDNGTSAKYIRKHQLIKVLLMAVKDFNPQSGDAAYTMGIVDLLLECVELSYRPESGAIRLREDIHNAHGYQFLVQFALTLCSLHKNQTLQSSSKLASEADASVPSHRLEQDIFSCDLSPQLSRLLDVLVNLSQIGPSENGGVSSPKALRGYHLLALFLHRRMSLFDMQSLDIFFRIAACEASFPEPQKSKINRTAGYASGMSPEASLDDLTLPRFADDMSSGGSHGDLDDFSAQKDSFSHLSELENADLAGETSEFIVLSNADMVEHILLDWTIWVAAPISVQITLLGFLERMVSMHWFRNHNLTMLRRINLVQHLLVTLQRGDVEIPVLEKLVVLLGVILEDGFLASELELVVRFIIMTFDPPELTPNRQIVREAMGKHVIVRNMLLEMLIDLQVTINAEELLEQWHKVVSSRLVTYFLDEAVHPTSMRWITTLLGVCLTSSTTFALKFRTSGGFQGLNHVLPSFHDSPEIYYILFCLVFGKPVYPRVPEVRMLDFHALMPSDGNYGELKFVDLLDTIIAMAKATFDSLIMKSMLAHENNNLSHLNGTLVADLVEATSDMGGDLQGEALMHKTYAARLMGGEAAAPAVATSILRFMVDLAKMCPPFSAVCRRHDFLESCIDLYFSCVRSDFALRMAKDLTTVATGEMNEHDDDNGSLKDALSSLPHDQDQSTKTLSATSFPQEQKSSSSESTGMPNPFETAEAKADDSSNQEFSNKILNGEANQIFNNARDQGRITASGANGISEFHHVTDSPNSVAMNNVGSPVLSERSTHRAASTPTASPMAPFTSWPGSAGSYTDGRHLTASPSMASSISGIDLDSSPDLRTNIQGPSAANTLFPINSKLLLDIDDLGYGGGPCSAGATAVLDFVAQILADTISDQLKAALFIENILESVPLFVDIDSALVFQGLCLSRLMNFLERKLLLDDEEDGKKLDKSRWSVNLDPLCWMIVDRVYMGCFPTPLRVLQTLEFLMSMLQLASKDGRVEDAVPPGKGILSIARGSRQLDPYIHAILKNTNRMIMYCFLPIFLKSMGEDDLLANLAFLTETGRSLASKRYQEDFSIDICTVLQLLVANKRLVLCPSNVDTDLMCCFCINLMSLLHDKRVTAQNLAVDLLKYLVVHRRQSLEDLLVCKPNQGQQLDILHGGLDKLVTGSTSTFFEWLQSSQQTISKVLDQCALIMWVQYITGSAKFPGVRIKGMEVRRKKEMGRKFRESAKVDARHWEQINERRYNLDLVRDVMSTELRAIRQDKYGWILHGESEWQSQLQELVHERGIFPMRQPSTEPEWQLCGVEGPYRMRKKLEHSKFKIDTIQNVLTSNLGSNGGKIINKEDGELLLTSGSDTMSGLNLLTYDTEQRDLDAVEFSSFKDDDDIFKGGSTISGPIGWTDDKSSVNEQSLHSATEFGAKSSSLSFHMTESHQGKSELSSPRRAPSVKGTDARTSEDKSEKELLDNGEYLIRPYLEPYEKIRHKYNCERVAGLDKHDGIFLIGELCLYIIENFYIDDSNCICEKGSEDELSVIDQALGVNKDIMGGSESQLKSPTTWGGTAKVLLGGRSWAYNGGAWGKEKLCNSSNLPHPWHMWKLDSVHELLKRDYQLRPVAIEIFSMDGCNELLVFHKKEREEVFKNLIAMNLPRNSMLDTTISASSKQESGEGSRLFKVMAKSFSKRWQSGEITNFQYLMHLNTLAGRGYSDLTQYPVFPWVLADYESDVLDLRNPQTFRRLDKPMGCQTEEGEEEFCKRYDSWDDPDVPKFHYGSHYSSAGIVLFYLLRLPPFSTENQKLQGGQFDHADRLFNSVKDTWVGDVVLPPWAKGSAREFIRKHREALESDYVSENLHHWIDLIFGYKQRGKAAEDAVNVFYHYTYEGNVDIDAVSDPTMKASILAQINHFGQTPKQLFQKPHPQRRTDRKVPPHPLRYCAYLTQQEIRKTASSVSQIVSYNDKILIAAVNCLLKPLTYNEYISWGFPDRSLRILTYDQDRLLSTHENLHGGSQIQCTGVSHDGNILITGGDDGVVAVWRFVKDGIRRLLRMEKALCAHTGKITCVSVSQPYSLIVSGSDDCSVILWDLTSLVFVKQLPRFPASVSALHVNSLTGEILTGAGVLFAVWSINGDCLAVVNTSQLPSDLILSVTSATHSDWQDTNWYVTGHQSGAVKVWKMLHCSSDEAVNSKSKSPAVSSGGLSLNGQAPEYRLLLQKVLKSHKHPVTALCIPPDLKQLLSGDGSGHLLSWSLKDDSFKGS

SEQ ID NO: 162523 - protein, 2468 aa, Zea Mays
MKWSTLLSKVVFAGGQQQQPPPPPSPPPESPFHGQQAVQDLATPRLSSASTGGDEGGFDAAAGSSPSAAASSARGRNELESDFRRLWEEFRSSSSEKEKERALNLAVDVFCRLVKQYSSVAQLVTKLVEGHIFSFVIGRAFVTDVEKLRIHSKGRPLRVADVIGFFSDTTELGICPGSNLLYAVEVLVTETNDRQPLLDSGILCCLIYILNSLLSPNENSTDTLPVHQEGSRNEKNKNLDPMQSRRLEFRDGIVPLHTIQLHRHAMQVLGLLLANDNGTSAKYIRKHQLIKVLLMAVKDFNPQSGDAAYTMGIVDLLLECVELSYRPESGAIRLREDIHNAHGYQFLVQFALTLCSLHKNQTLQSSSKLASEADASVPSHRLEQDIFSCDLSPQLSRLLDVLVNLSQIGPSENGGVSSPKALRGYHLLALFLHRRMSLFDMQSLDIFFRIAACEASFPEPQKSKINRTAGYASGMSPEASLDDLTLPRFADDMSSGGSHGDLDDFSAQKDSFSHLSELENADLAGETSEFIVLSNADMVEHILLDWTIWVAAPISVQITLLGFLERMVSMHWFRNHNLTMLRRINLVQHLLVTLQRGDVEIPVLEKLVVLLGVILEDGFLASELELVVRFIIMTFDPPELTPNRQIVREAMGKHVIVRNMLLEMLIDLQVTINAEELLEQWHKVVSSRLVTYFLDEAVHPTSMRWITTLLGVCLTSSTTFALKFRTSGGFQGLNHVLPSFHDSPEIYYILFCLVFGKPVYPRVPEVRMLDFHALMPSDGNYGELKFVDLLDTIIAMAKATFDSLIMKSMLAHENNNLSHLNGTLVADLVEATSDMGGDLQGEALMHKTYAARLMGGEAAAPAVATSILRFMVDLAKMCPPFSAVCRRHDFLESCIDLYFSCVRSDFALRMAKDLTTVATGEMNEHDDDNGSLKDALSSLPHDQDQSTKTLSATSFPQEQKSSSSESTGMPNPFETAEAKADDSSNQEFSNKILNGEANQIFNNARDQGRITASGANGISEFHHVTDSPNSVAMNNVGSPVLSERSTHRAASTPTASPMAPFTSWPGSAGSYTDGRHLTASPSMASSISGIDLDSSPDLRTNIQGPSAANTLFPINSKLLLDIDDLGYGGGPCSAGATAVLDFVAQILADTISDQLKAALFIENILESVPLFVDIDSALVFQGLCLSRLMNFLERKLLLDDEEDGKKLDKSRWSVNLDPLCWMIVDRVYMGCFPTPLRVLQTLEFLMSMLQLASKDGRVEDAVPPGKGILSIARGSRQLDPYIHAILKNTNRMIMYCFLPIFLKSMGEDDLLANLAFLTETGRSLASKRYQEDFSIDICTVLQLLVANKRLVLCPSNVDTDLMCCFCINLMSLLHDKRVTAQNLAVDLLKYLVVHRRQSLEDLLVCKPNQGQQLDILHGGLDKLVTGSTSTFFEWLQSSQQTISKVLDQCALIMWVQYITGSAKFPGVRIKGMEVRRKKEMGRKFRESAKVDARHWEQINERRYNLDLVRDVMSTELRAIRQDKYGWILHGESEWQSQLQELVHERGIFPMRQPSTEPEWQLCGVEGPYRMRKKLEHSKFKIDTIQNVLTSNLGSNGGKIINKEDGELLLTSGSDTMSGLNLLTYDTEQRDLDAVEFSSFKDDDDIFKGGSTISGPIGWTDDKSSVNEQSLHSATEFGAKSSSLSFHMTESHQGKSELSSPRRAPSVKGTDARTSEDKSEKELLDNGEYLIRPYLEPYEKIRHKYNCERVAGLDKHDGIFLIGELCLYIIENFYIDDSNCICEKGSEDELSVIDQALGVNKDIMGGSESQLKSPTTWGGTAKVLLGGRSWAYNGGAWGKEKLCNSSNLPHPWHMWKLDSVHELLKRDYQLRPVAIEIFSMDGCNELLVFHKKEREEVFKNLIAMNLPRNSMLDKPMGCQTEEGEEEFCKRYDSWDDPDVPKFHYGSHYSSAGIVLFYLLRLPPFSTENQKLQGGQFDHADRLFNSVKDTWVSAAGKSNTSDVKELIPEFYYLPEFLENRFNLDLGEKQSGEKVGDVVLPPWAKGSAREFIRKHREALESDYVSENLHHWIDLIFGYKQRGKAAEDAVNVFYHYTYEGNVDIDAVSDPTMKASILAQINHFGQTPKQLFQKPHPQRRTDRKVPPHPLRYCAYLTQQEIRKTASSVSQIVSYNDKILIAAVNCLLKPLTYNEYISWGFPDRSLRILTYDQDRLLSTHENLHGGSQIQCTGVSHDGNILITGGDDGVVAVWRFVKDGIRRLLRMEKALCAHTGKITCVSVSQPYSLIVSGSDDCSVILWDLTSLVFVKQLPRFPASVSALHVNSLTGEILTGAGVLFAVWSINGDCLAVVNTSQLPSDLILSVTSATHSDWQDTNWYVTGHQSGAVKVWKMLHCSSDEAVNSKSKSPAVSSGGLSLNGQAPEYRLLLQKVLKSHKHPVTALCIPPDLKQLLSGDGSGHLLSWSLKDDSFKGS

SEQ ID NO: 162524 - protein, 2175 aa, Zea Mays
MKWSTLLSKVVFAGGQQQQPPPPPSPPPESPFHGQQAVQDLATPRLSSASTGGDEGGFDAAAGSSPSAAASSARGRNELESDFRRLWEEFRSSSSEKEKERALNLAVDVFCRLVKQYSSVAQLVTKLVEGHIFSFVIGRAFVTDVEKLRIHSKGRPLRVADVIGFFSDTTELGICPGSNLLYAVEVLVTETNDRQPLLDSGILCCLIYILNSLLSPNENSTDTLPVHQEGSRNEKNKNLDPMQSRRLEFRDGIVPLHTIQLHRHAMQVLGLLLANDNGTSAKYIRKHQLIKVLLMAVKDFNPQSGDAAYTMGIVDLLLECVELSYRPESGAIRLREDIHNAHGYQFLVQFALTLCSLHKNQTLQSSSKLASEADASVPSHRLEQDIFSCDLSPQLSRLLDVLVNLSQIGPSENGGVSSPKALRGYHLLALFLHRRMSLFDMQSLDIFFRIAACEASFPEPQKSKINRTAGYASGMSPEASLDDLTLPRFADDMSSGGSHGDLDDFSAQKDSFSHLSELENADLAGETSEFIVLSNADMVEHILLDWTIWVAAPISVQITLLGFLERMVSMHWFRNHNLTMLRRINLVQHLLVTLQRGDVEIPVLEKLVVLLGVILEDGFLASELELVVRFIIMTFDPPELTPNRQIVREAMGKHVIVRNMLLEMLIDLQVTINAEELLEQWHKVVSSRLVTYFLDEAVHPTSMRWITTLLGVCLTSSTTFALKFRTSGGFQGLNHVLPSFHDSPEIYYILFCLVFGKPVYPRVPEVRMLDFHALMPSDGNYGELKFVDLLDTIIAMAKATFDSLIMKSMLAHENNNLSHLNGTLVADLVEATSDMGGDLQGEALMHKTYAARLMGGEAAAPAVATSILRFMVDLAKMCPPFSAVCRRHDFLESCIDLYFSCVRSDFALRMAKDLTTVATGEMNEHDDDNGSLKDALSSLPHDQDQSTKTLSATSFPQEQKSSSSESTGMPNPFETAEAKADDSSNQEFSNKILNGEANQIFNNARDQGRITASGANGISEFHHVTDSPNSVAMNNVGSPVLSERSTHRAASTPTASPMAPFTSWPGSAGSYTDGRHLTASPSMASSISGIDLDSSPDLRTNIQGPSAANTLFPINSKLLLDIDDLGYGGGPCSAGATAVLDFVAQILADTISDQLKAALFIENILESVPLFVDIDSALVFQGLCLSRLMNFLERKLLLDDEEDGKKLDKSRWSVNLDPLCWMIVDRVYMGCFPTPLRVLQTLEFLMSMLQLASKDGRVEDAVPPGKGILSIARGSRQLDPYIHAILKNTNRMIMYCFLPIFLKSMGEDDLLANLAFLTETGRSLASKRYQEDFSIDICTVLQLLVANKRLVLCPSNVDTDLMCCFCINLMSLLHDKRVTAQNLAVDLLKYLVVHRRQSLEDLLVCKPNQGQQLDILHGGLDKLVTGSTSTFFEWLQSSQQTISKVLDQCALIMWVQYITGSAKFPGVRIKGMEVRRKKEMGRKFRESAKVDARHWEQINERRYNLDLVRDVMSTELRAIRQDKYGWILHGESEWQSQLQELVHERGIFPMRQPSTEPEWQLCGVEGPYRMRKKLEHSKFKIDTIQNVLTSNLGSNGGKIINKEDGELLLTSGSDTMSGLNLLTYDTEQRDLDAVEFSSFKDDDDIFKGGSTISGPIGWTDDKSSVNEQSLHSATEFGAKSSSLSFHMTESHQGKSELSSPRRAPSVKGTDARTSEDKSEKELLDNGEYLIRPYLEPYEKIRHKYNCERVAGLDKHDGIFLIGELCLYIIENFYIDDSNCICEKGSEDELSVIDQALGVNKDIMGGSESQLKSPTTWGGTAKVLLGGRSWAYNGGAWGKEKLCNSSNLPHPWHMWKLDSVHELLKRDYQLRPVAIEIFSMDGCNELLVFHKKEREEVFKNLIAMNLPRNSMLDTTISASSKQESGEGSRLFKVMAKSFSKRWQSGEITNFQYLMHLNTLAGRGYSDLTQYPVFPWVLADYESDVLDLRNPQTFRRLDKPMGCQTEEGEEEFCKRYDSWDDPDVPKFHYGSHYSSAGIVLFYLLRLPPFSTENQKLQGGQFDHADRLFNSVKDTWVSAAGKSNTSDVKELIPEFYYLPEFLENRFNLDLGEKQSGEKVGDVVLPPWAKGSAREFIRKHREALESDYVSENLHHWIDLIFGYKQRGKSLLILYGTVPI

SEQ ID NO: 162525 - protein, 500 aa, Zea Mays
MWYPKAREKKRNVFLHVGPTNSGKTYSALKRLEASSSGVYCGPLRLLAREVAQRLNKVNVPCNLITGQERNEIEGAKHSSVTVEMADMTTNYQCAVIDEIQMVGCKSRGYSFTRALLGLCSDELHVCGDPAAVPLIQRILEATGDVVTVQYYERLSPLVPLKSPLGSFSNIKAGDCLVSFSRRGIYKLKKRIEREGKHLCSVVYGSLPPETRTKQATMFNDDTSDLNVLVASDAIGMGLNLNISRIIFSTMMKFDGFCNRELTVAEIKQIAGRAGRYGSKFPVGEVTCLNPQDLPLLHSSLKSASSIIERAGLFPTFDLLSLYSRLHGTDFFHPILERFLEKAKLSPDYFITDCEDMLKVAAIVDDLPLGLYDKYLFCMSPVDFAENYARKGIVRLKEIFTPGTLQVPKTDNQLKELESVHKVLELYVWLSFRMDDSFPDREVAASQKSICSMLIEEYLERFGWQPQDRRKVLGGAQKLLQEYDVSQMNKYFQEVNPGPK

SEQ ID NO: 162526 - protein, 575 aa, Zea Mays
MCSVECQNQARLLQTLPNSGAVYTSGLFSNSDLHSKVNSTSLRFWRTYHNSGKFDLTDLTHPHMWYPKAREKKRNVFLHVGPTNSGKTYSALKRLEASSSGVYCGPLRLLAREVAQRLNKVNVPCNLITGQERNEIEGAKHSSVTVEMADMTTNYQCAVIDEIQMVGCKSRGYSFTRALLGLCSDELHVCGDPAAVPLIQRILEATGDVVTVQYYERLSPLVPLKSPLGSFSNIKAGDCLVSFSRRGIYKLKKRIEREGKHLCSVVYGSLPPETRTKQATMFNDDTSDLNVLVASDAIGMGLNLNISRIIFSTMMKFDGFCNRELTVAEIKQIAGRAGRYGSKFPVGEVTCLNPQDLPLLHSSLKSASSIIERAGLFPTFDLLSLYSRLHGTDFFHPILERFLEKAKLSPDYFITDCEDMLKVAAIVDDLPLGLYDKYLFCMSPVDVSDDISAQGLVQFAENYARKGIVRLKEIFTPGTLQVPKTDNQLKELESVHKVLELYVWLSFRMDDSFPDREVAASQKSICSMLIEEYLERFGWQPQDRRKVLGGAQKLLQEYDVSQMNKYFQEVNPGPK

SEQ ID NO: 162527 - protein, 574 aa, Zea Mays
MAVAVLLRQRALSSPHAVSCRNAVYTSGLFSNSDLHSKVNSTSLRFWRTYHNSGKFDLTDLTHPHMWYPKAREKKRNVFLHVGPTNSGKTYSALKRLEASSSGVYCGPLRLLAREVAQRLNKVNVPCNLITGQERNEIEGAKHSSVTVEMADMTTNYQCAVIDEIQMVGCKSRGYSFTRALLGLCSDELHVCGDPAAVPLIQRILEATGDVQYYERLSPLVPLKSPLGSFSNIKAGDCLVSFSRRGIYKLKKRIEREGKHLCSVVYGSLPPETRTKQATMFNDDTSDLNVLVASDAIGMGLNLNISRIIFSTMMKFDGFCNRELTVAEIKQIAGRAGRYGSKFPVGEVTCLNPQDLPLLHSSLKSASSIIERAGLFPTFDLLSLYSRLHGTDFFHPILERFLEKAKLSPDYFITDCEDMLKVAAIVDDLPLGLYDKYLFCMSPVDVSDDISAQGLVQFAENYARKGIVRLKEIFTPGTLQVPKTDNQLKELESVHKVLELYVWLSFRMDDSFPDREVAASQKSICSMLIEEYLERFGWQPQDRRKVLGGAQKLLQEYDVSQMNKYFQEVNPGPK

SEQ ID NO: 162528 - protein, 564 aa, Zea Mays
MPGVFRIFSAVYTSGLFSNSDLHSKVNSTSLRFWRTYHNSGKFDLTDLTHPHMWYPKAREKKRNVFLHVGPTNSGKTYSALKRLEASSSGVYCGPLRLLAREVAQRLNKVNVPCNLITGQERNEIEGAKHSSVTVEMADMTTNYQCAVIDEIQMVGCKSRGYSFTRALLGLCSDELHVCGDPAAVPLIQRILEATGDVVTVQYYERLSPLVPLKSPLGSFSNIKAGDCLVSFSRRGIYKLKKRIEREGKHLCSVVYGSLPPETRTKQATMFNDDTSDLNVLVASDAIGMGLNLNISRIIFSTMMKFDGFCNRELTVAEIKQIAGRAGRYGSKFPVGEVTCLNPQDLPLLHSSLKSASSIIERAGLFPTFDLLSLYSRLHGTDFFHPILERFLEKAKLSPDYFITDCEDMLKVAAIVDDLPLGLYDKYLFCMSPVDVSDDISAQGLVQFAENYARKGIVRLKEIFTPGTLQVPKTDNQLKELESVHKVLELYVWLSFRMDDSFPDREVAASQKSICSMLIEEYLERFGWQPQDRRKVLGGAQKLLQEYDVSQMNKYFQEVNPGPK

SEQ ID NO: 162529 - protein, 432 aa, Zea Mays
MPPSRFRGAAPKKLGFASRGFASRLQVEEFVKREFPDVDPSTFFSMFIWKIPAEGYRIQKGTRQVRIHEPEPVVADPGGLCKARNSLCNLQREGFVESSPARVCNICCKEPGFCRECCCLLCNRTVDYSLGSYSCIKCEAVVEENLICGHFAHLECALRCYMAGTVGGSFGLDVQYLCRLCDNKTNLMTHVEKLMETCQSLESRDQIKPMLNLGLCLLRGSKQMRARNLENHMRSAMEKLECGFDFVEVWKLEGDEGRTTLNAGENSPTTNGVTVLGARQVPEAGALTGHPDLIDPLVDNDFETVIENLPVFITGDQNAASAKFEDEIDLALQELKKSQEAEYSVAEQKLYAQKDHILCLYRQLDAERAELADPMPLSDASNYGAMLANVLSRVDQVKREEEKFRSMLKVAGGFAKAPQSVTREMFGLPADK

SEQ ID NO: 162530 - protein, 113 aa, Zea Mays
MEARPSRIECSEPNEQPEPKDPGRVFHAERVAPRDATESVTEKLAHGGCGHDGVIDETYDTRIKIAEAEAANDPRAKTNPRGVSAALGMAAKHNCGHESARTGTAFPDEAKQD

SEQ ID NO: 162531 - protein, 68 aa, Zea Mays
MPWIWDRVSLNPAIPYMKRQSRTRSGEMARVARTLLAKDRLKRVVCSRVARTCSCSGGSVGMVDICKG

SEQ ID NO: 162532 - protein, 75 aa, Zea Mays
MQKNMANTGTIENIMVLLLWKKKETEPADLVVKDSTRCTPHLFQDSCLITIFETGSCSFFLFVILCWVYQTKRVS

SEQ ID NO: 162533 - protein, 201 aa, Zea Mays
MLEKQSLSDFIDHINSDKAVIVSVSPQSRASLAAFFGLSQSQVLRKLTALFKSIGVKAVFDTSSSRDLSLIEACNEFVSRYQKNHSCSGQEAGANLPMISSACPGWICYAEKTLGSYILPYISSVKSPQQAIGAAIKHHVVDKLGLKPYDVYHVTVMPCYDKKLEAVRDDFTFSVDGKEVKEVDSVLTTGEVLDLIQVNKC

SEQ ID NO: 162534 - protein, 238 aa, Zea Mays
MPCYDKKLEAVRDDFTFSVDGKEVKEVDSVLTTGEVLDLIQSKSIDFKTVEESSLDRLLTNVDEEGHLYGVSGGSGGYAETVFRYGANVIYKREIEGPLDFRILRNSDFREITLEVEGKPVLKFALCYGFRNLQNIVRKIKMGKCEYHFIEVMACPSGCLNGGGQLKPVQGQSAKELIQQLESVYTQDISISDPFSNPIAKKLYDEWLGQPGSENAKKYLHTEYHPVVKSVASQLQNW

SEQ ID NO: 162535 - protein, 471 aa, Zea Mays
MSSSRFSPVLQASDLNDFIAPSQDCIISLNKNTSSSRRLQKNQKETTVSSKPPEEAVKISLKDCLACSGCITSAETVMLEKQSLSDFIDHINSDKAVIVSVSPQSRASLAAFFGLSQSQVLRKLTALFKSIGVKAVFDTSSSRDLSLIEACNEFVSRYQKNHSCSGQEAGANLPMISSACPGWICYAEKTLGSYILPYISSVKSPQQAIGAAIKHHVVDKLGLKPYDVYHVTVMPCYDKKLEAVRDDFTFSVDGKEVKEVDSVLTTGEVLDLIQSKSIDFKTVEESSLDRLLTNVDEEGHLYGVSGGSGGYAETVFRYGANVIYKREIEGPLDFRILRNSDFREITLEVEGKPVLKFALCYGFRNLQNIVRKIKMGKCEYHFIEVMACPSGCLNGGGQLKPVQGQSAKELIQQLESVYTQDISISDPFSNPIAKKLYDEWLGQPGSENAKKYLHTEYHPVVKSVASQLQNW

SEQ ID NO: 162536 - protein, 438 aa, Zea Mays
MSATLNAELFSSYFGGAPTIHIPGFTHPVRAHFLEDILERSGYKLTSSNQLDDYGQDKVWKTQRQLLPRKRKNQITTLVEEALKNSSFEIYGSRTRDSLVNWNPDCIGFNLIEAVLCHICRKERPGAVLVFMTGWDDISCLKDQLKAHPLLGDPNRVFLLACHGSMATSEQRLIFEKPPPNVRKVVLATNMAEASITINDIVFVVDCGKAKETTYDALNNTPCLLPSWISKASARQRRGRAGRVQPGECYHLYPRCVYDAFADYQLPELLRTPLNSLCLQIKSLQVGSIGEFLSAALQPPEPRAVENAVEFLKMIGALDGNENLTDLGRYLSMLPVDPKLGKMLIMGAVFRCIDPILTVVAGLSVRDPFLLPQEKKDEQQKLDSQQRIIVIIWPLFGLMKDGRMQREKGLLMNTAGEISFLLKHYKPFTLSGSNSAIF

SEQ ID NO: 162537 - protein, 806 aa, Zea Mays
MRRGLRRGLGILLVPLPHAPSRLPPISLAALLPRRFNGFSRHSFCSFPVGERAVEQFSDDEYDHEYEDLRPSSSVANIDEWRWKLSMLQRNAEEQEIISRDRRDRRDYDQIANLAKRMGLYSEMYGRVVVASKVPLPNYRPDLDDKRPQREVVIPLGLQRRVEGLVQEHLDRAFLPLNKCGGNTKNGSDMTENANLDEQHDSLLDRSVMEKILQRKSIRMRNFQRSWQESPEGAKMLEFRRSLPADKEKERLLAAIARNQVIVISGETGCGKTTQLPQFVLESEIESGRGAFCNIICTQPRRISAMAVAERVSTERGENLGESVGYKVRLEGIKGKDTHLLFCTSGILLRRLLSDRNLNGVTHVFVDEIHERGMNEDFLLIVLKELLSRRRDLRLILMSATLNAELFSSYFGGAPTIHIPGFTHPVRAHFLEDILERSGYKLTSSNQLDDYGQDKVWKTQRQLLPRKRKNQITTLVEEALKNSSFEIYGSRTRDSLVNWNPDCIGFNLIEAVLCHICRKERPGAVLVFMTGWDDISCLKDQLKAHPLLGDPNRVFLLACHGSMATSEQRLIFEKPPPNVRKVVLATNMAEASITINDIVFVVDCGKAKETTYDALNNTPCLLPSWISKASARQRRGRAGRVQPGECYHLYPRCVYDAFADYQLPELLRTPLNSLCLQIKSLQVGSIGEFLSAALQPPEPRAVENAVEFLKMIGALDGNENLTDLGRYLSMLPVDPKLGKMLIMGAVFRCIDPILTVVAGLSVRDPFLLPQEKKDEQQKLDSQQLFSKKLILHEGKKACFSYYYFIY

SEQ ID NO: 162538 - protein, 344 aa, Zea Mays
MRRGLRRGLGILLVPLPHAPSRLPPISLAALLPRRFNGFSRHSFCSFPVGERAVEQFSDDEYDHEYEDLRPSSSVANIDEWRWKLSMLQRNAEEQEIISRDRRDRRDYDQIANLAKRMGLYSEMYGRVVVASKVPLPNYRPDLDDKRPQREVVIPLGLQRRVEGLVQEHLDRAFLPLNKCGGNTKNGSDMTENANLDEQHDSLLDRSVMEKILQRKSIRMRNFQRSWQESPEGAKMLEFRRSLPADKEKERLLAAIARNQVIVISGETGCGKTTQLPQFVLESEIESGRGAFCNIICTQPRRISAMAVAERVSTERGENLGESSDWRELRGKIHICFSAPVASY

SEQ ID NO: 162539 - protein, 462 aa, Zea Mays
MNEDFLLIVLKELLSRRRDLRLILMSATLNAELFSSYFGGAPTIHIPGFTHPVRAHFLEDILERSGYKLTSSNQLDDYGQDKVWKTQRQLLPRKRKNQITTLVEEALKNSSFEIYGSRTRDSLVNWNPDCIGFNLIEAVLCHICRKERPGAVLVFMTGWDDISCLKDQLKAHPLLGDPNRVFLLACHGSMATSEQRLIFEKPPPNVRKVVLATNMAEASITINDIVFVVDCGKAKETTYDALNNTPCLLPSWISKASARQRRGRAGRVQPGECYHLYPRCVYDAFADYQLPELLRTPLNSLCLQIKSLQVGSIGEFLSAALQPPEPRAVENAVEFLKMIGALDGNENLTDLGRYLSMLPVDPKLGKMLIMGAVFRCIDPILTVVAGLSVRDPFLLPQEKKDEQQKLDSQQRIIVIIWPLFGLMKDGRMQREKGLLMNTAGEISFLLKHYKPFTLSGSNSAIF

SEQ ID NO: 162540 - protein, 482 aa, Zea Mays
MAVAERVSTERGENLGESVGYKVRLEGIKGKDTHLLFCTSGILLRRLLSDRNLNGVTHVFVDEIHERGMNEDFLLIVLKELLSRRRDLRLILMSATLNAELFSSYFGGAPTIHIPGFTHPVRAHFLEDILERSGYKLTSSNQLDDYGQDKVWKTQRQLLPRKRKNQITTLVEEALKNSSFEIYGSRTRDSLVNWNPDCIGFNLIEAVLCHICRKERPGAVLVFMTGWDDISCLKDQLKAHPLLGDPNRVFLLACHGSMATSEQRLIFEKPPPNVRKVVLATNMAEASITINDIVFVVDCGKAKETTYDALNNTPCLLPSWISKASARQRRGRAGRVQPGECYHLYPRCVYDAFADYQLPELLRTPLNSLCLQIKSLQVGSIGEFLSAALQPPEPRAVENAVEFLKMIGALDGNENLTDLGRYLSMLPVDPKLGKMLIMGAVFRCIDPILTVVAGLSVRDPFLLPQEKKDVSLLISAISVYIY

SEQ ID NO: 162541 - protein, 956 aa, Zea Mays
MRRGLRRGLGILLVPLPHAPSRLPPISLAALLPRRFNGFSRHSFCSFPVGERAVEQFSDDEYDHEYEDLRPSSSVANIDEWRWKLSMLQRNAEEQEIISRDRRDRRDYDQIANLAKRMGLYSEMYGRVVVASKVPLPNYRPDLDDKRPQREVVIPLGLQRRVEGLVQEHLDRAFLPLNKCGGNTKNGSDMTENANLDEQHDSLLDRSVMEKILQRKSIRMRNFQRSWQESPEGAKMLEFRRSLPADKEKERLLAAIARNQVIVISGETGCGKTTQLPQFVLESEIESGRGAFCNIICTQPRRISAMAVAERVSTERGENLGESVGYKVRLEGIKGKDTHLLFCTSGILLRRLLSDRNLNGVTHVFVDEIHERGMNEDFLLIVLKELLSRRRDLRLILMSATLNAELFSSYFGGAPTIHIPGFTHPVRAHFLEDILERSGYKLTSSNQLDDYGQDKVWKTQRQLLPRKRKNQITTLVEEALKNSSFEIYGSRTRDSLVNWNPDCIGFNLIEAVLCHICRKERPGAVLVFMTGWDDISCLKDQLKAHPLLGDPNRVFLLACHGSMATSEQRLIFEKPPPNVRKVVLATNMAEASITINDIVFVVDCGKAKETTYDALNNTPCLLPSWISKASARQRRGRAGRVQPGECYHLYPRCVYDAFADYQLPELLRTPLNSLCLQIKSLQVGSIGEFLSAALQPPEPRAVENAVEFLKMIGALDGNENLTDLGRYLSMLPVDPKLGKMLIMGAVFRCIDPILTVVAGLSVRDPFLLPQEKKDLAGTAKARFSAKDYSDHMALVRAYEGWKDAEREGSAYEYCWRNFLSSQTLQAIHSLRKQFSYILKDSGLIDSDGNTNNSLSHNQSLVRGIICSGLFPGIASVVHRESSMSFKTMDDGQVLLYANSVNAKYQTIPYPWLVFGEKVKVNAVFIRDSTGVSDSILILFGGAVAKGGMLLCFRPGT

SEQ ID NO: 162542 - protein, 188 aa, Zea Mays
MIFCLDKGDGSDAETGMSEEDILLQDEICKSRLMSIKREEEQYMRERDRYELEKGRLIREMKRLRDEDGSRFNNFQILHHRYALLNLLGKGGFSEVYRAFDLVEYKYVACKLHGLNAQWSEEKKQSYIRHAIREYNIHKTLVHPNIVRLWDIFEIDHNTFCTVLEYCSEPYQKTMGSDGIMFSSLLLF

SEQ ID NO: 162543 - protein, 337 aa, Zea Mays
MSGSSAAGEDIVQHLSSNSNPSSSKLAKLEARMAGKAVSAPSSPPHHPMSAPVISFMDQEELPETSSSDDDNCEEFLIQKNTLKRPRSPDGDNMLALGNFEGSVNEAAKILGVTDTKPSLDNSSRKKQGRGRGRAGTGRGRGSRAADQTRLTSTSSAAVTNGQLDKLTNKEPRSSVQLGHDDRAALQDELSTLRGKVAFLEEDLSKSHQEATNYHELSDRLAKELKDLKDHDQQMRLKQMKILSDLLIAVSKAERQEARMRIRQESFRLGNVAVMRAGTIISETWEDGQAIKDLNAHLKSLLETKETIERHRKSLKKRQSGDFISEVHFSLYCILLT

SEQ ID NO: 162544 - protein, 305 aa, Zea Mays
MAGKAVSAPSSPPHHPMSAPVISFMDQEELPETSSSDDDNCEEFLIQKNTLKRPRSPDGDNMLALGNFEGSVNEAAKILGVTDTKPSLDNSSRKKQGRGRGRAGTGRGRGSRAADQTRLTSTSSAAVTNGQLDKLTNKEPRSSVQLGHDDRAALQDELSTLRGKVAFLEEDLSKSHQEATNYHELSDRLAKELKDLKDHDQQMRLKQMKILSDLLIAVSKAERQEARMRIRQESFRLGNVAVMRAGTIISETWEDGQAIKDLNAHLKSLLETKETIERHRKSLKKRQSGDFISEVHFSLYCILLT

SEQ ID NO: 162545 - protein, 417 aa, Zea Mays
MASSSPDLADDGFAAPRLFSQGVSYTYDDVIFLPGYIGFPADAVDLSTRLSRRVPLSIPCVASPMDTVSEAAMAAAMASLGAAAVVHCNTEPHSQAAIVRAAKSRRLPFVSSVPFFSPSSSPTLNDFAGSEYALVTERGDSLSRLVGIAVAADAASREVPISVSEYMRPTPRSASSAFDFEEAATFLADEGLDYAPLVSDDGEVVDLITAKDVERIRSYPKLGKPSLGANGKFVVAASIGTREDDKGRLEQLVKAGANAIVIDSSQGNSIYQLDMIKFAKKMYPEVDLIGGNVVTIAQAQNLIQAGVDGLRVGMGSGSICTTQEVCAVGRGQATAVYKVSSYAKDHNVPVIADGGISNSGHIVKALSLGASTVMMGSFLAGSHEAPGTYEYKDGRRVKKYRGMGSLEAMTKGSDASS

SEQ ID NO: 162546 - protein, 307 aa, Zea Mays
MALLMEPGAEPLTESEQADLAGIAAIKESAAREYKEQGNQFVRMGRRHYAAAVSCYTKAIAQMEPLSSLDASAAADASVLFANRAHVNILLGNHRRALDDAEQAIRLSPSSVKAYYRAVKAALALDLLTDAASFCRKGLEQDPPNEEFKKLLSEVDSKLREQDRQRAKVAQAIAKAKDLAAAMGKRGVKLGKAAYQELTGVKKPVLDEQGVLHWPVLLLYPEVMSSDFIEDFPDTDTFSPHLDVMFSETSPPLPWDDNHVYTRDSIELYYQIRRRFQIAFLTGKTKNMTVPNVPLLHQLIAPVSGSR

SEQ ID NO: 162547 - protein, 265 aa, Zea Mays
MSTSSSVTTDGPSTTPSRPSASLPPASRKGLEQDPPNEEFKKLLSEVDSKLREQDRQRAKVAQAIAKAKDLAAAMGKRGVKLGKAAYQELTGVKKPVLDEQGVLHWPVLLLYPEVMSSDFIEDFPDTDTFSPHLDVMFSETSPPLPWDDNHVYTRDSIELYYQGGFGKPLSRSEVLRYLLEGNVDSKALPDSLLDGEDEEHDSTKCTTVTSTDSSSKWIKVKEGKTLQEVLQDKGYIVPAIPVFFVVSRKSTFYKDFKAGNWSLP

SEQ ID NO: 162548 - protein, 263 aa, Zea Mays
MEFKETDSETDRELKLRVLRIYLSRLDERKRRKEFILERNLLFPNPLEKDLTNEDREVYHRYKVFMRFLSKEEHEALVRSVIEERKIRRRIQELQECRSAGCRTLAEAKIHIEQKRKKEYELNAQKAKESNHLIANTKLVQKMNRPMKIESDGNLDPKKGGVGLDSPKTTGLTSVKQWDDWDIVGLPGAELLSASEKLLCCQNRLLPSHYLRMQEVLMQEIFKGSVLKKEDAHVLFKVDPTKVDSVYDMVTKKLGNHVELPTV

SEQ ID NO: 162549 - protein, 465 aa, Zea Mays
MGRSRGVQNSGDDDTVHRSKRRRVASGGDATDSVSAGIGGAGEGGGKKALYHCNYCNKDISGKIRIKCSKCPDFDLCVECFSVGAEVTPHRSNHPYKVMDNLSFPLICPDWNADEEILLLEGIEMYGLGNWLEVAEHVGTKSKLQCIDHYTTAYMNSPCYPLPDMSHVNGKNRKELLAMAKVQGESKKGTSLLPGELTPKAESPFSPSRVKVEDALGEGLAGRSPSHIAVGANKKASNVGHIKDGSNVSKVEDGHVDRSVGVKKPRYSADEGPSLTELSGYNAKRHEFDPEYDNDAEQALAEMEFKETDSETDRELKLRVLRIYLSRLDERKRRKEFILERNLLFPNPLEKDLTNEDREVYHRYKVFMRFLSKEEHEALVRSVIEERKIRRRIQELQEKLLCCQNRLLPSHYLRMQEVLMQEIFKGSVLKKEDAHVLFKVDPTKVDSVYDMVTKKLGNHVELPTV

SEQ ID NO: 162550 - protein, 1035 aa, Zea Mays
MSLPSNNRRTCSRSSSARSKHSARVVAQTPVDAQLHAEFEGSQRHFDYSSSVGAANRPSASTSTVSTYLQNMQRGRYIQPFGCLLAVHPDTFALLAYSENAPEMLDLTPHAVPTIDQRDALGIGVDVRTLFRSQSSVALHKAAAFGEVNLLNPILVHARTSGKPFYAILHRIDVGLVIDLEPVNPADVPVTAAGALKSYKLAAKAISRLQSLPSGNLSLLCDVLVREVSELTGYDRVMAYKFYEDEHGEVISECRRSDLEPYLGLHYPATDIPQASRFLFMKNKVRMICDCCATPVKVIQDDSLAQPLSLCGSTLRASHGCHAQYMANMGSVASLAMSVTINEDEEEDGDTGSDQQPKGRKLWGLVVCHHTSPRFVPFPLRYACEFLLQVFGIQLNKEVELAAQAKERHILRTQTLLCDMLLRDAPVGIFTRSPNVMDLVKCDGAALYYQNQLLVLGSTPSESEIKSIATWLQDNHDGSTGLSTDSLVEAGYPGAVALREVVCGMAAIKISSKDFIFWFRSHTTKEIKWGGAKHEPVDADDDGRRMHPRSSFKAFLEVVKWRSVPWEDVEMDAIHSLQLILRGSLPDEDANRNNVRSIVKAPSDDMKKIQGLLELRTVTNEMVRLIETATAPVLAVDIAGNINGWNNKAAELTGLPVMEAIGRPLIDLVVTDSIEVVKQILDSALQGIEEQNMEIKLKTFHEHECNGPVILKVNSCCSRDLSEKVIGVCFVAQDLTRQKMIMDKYTRIQGDYVAIVKNPTELIPPIFMINDLGSCLEWNKAMQKITGIKREDAINKLLIGEVFTLHDYGYGKYIESLLTVNKRTDAEEEQRQLLSSNVLCQDQLKKILHDTDLESIEQCYMEMNTVEFNLEQALNTVLMQGIPLGKEKQISIERNWPVEVSCMYLYGDNLRLQQILADYLACALQFTQTAEGPIVLQVMSKKENIGSGMQIAHLEFRIVHPAPGVPEALIQEMFQHNPGVSREGLGLYISQKLVKTMSGTVQYLREADTSSFIILMEFPVAQLSSKRSKPSTSKF

SEQ ID NO: 162551 - protein, 885 aa, Zea Mays
MSLPSNNRRTCSRSSSARSKHSARVVAQTPVDAQLHAEFEGSQRHFDYSSSVGAANRPSASTSTVSTYLQNMQRGRYIQPFGCLLAVHPDTFALLAYSENAPEMLDLTPHAVPTIDQRDALGIGVDVRTLFRSQSSVALHKAAAFGEVNLLNPILVHARTSGKPFYAILHRIDVGLVIDLEPVNPADVPVTAAGALKSYKLAAKAISRLQSLPSGNLSLLCDVLVREVSELTGYDRVMAYKFYEDEHGEVISECRRSDLEPYLGLHYPATDIPQASRFLFMKNKVRMICDCCATPVKVIQDDSLAQPLSLCGSTLRASHGCHAQYMANMGSVASLAMSVTINEDEEEDGDTGSDQQPKGRKLWGLVVCHHTSPRFVPFPLRYACEFLLQVFGIQLNKEVELAAQAKERHILRTQTLLCDMLLRDAPVGIFTRSPNVMDLVKCDGAALYYQNQLLVLGSTPSESEIKSIATWLQDNHDGSTGLSTDSLVEAGYPGAVALREVVCGMAAIKISSKDFIFWFRSHTTKEIKWGGAKHEPVDADDDGRRMHPRSSFKAFLEVVKWRSVPWEDVEMDAIHSLQLILRGSLPDEDANRNNVRSIVKAPSDDMKKIQGLLELRTVTNEMVRLIETATAPVLAVDIAGNINGWNNKAAELTGLPVMEAIGRPLIDLVVTDSIEVVKQILDSALQGIEEQNMEIKLKTFHEHECNGPVILKVNSCCSRDLSEKVIGVCFVAQDLTRQKMIMDKYTRIQGDYVAIVKNPTELIPPIFMINDLGSCLEWNKAMQKITGIKREDAINKLLIGEVFTLHDYGYGKYIESLLTVNKRTDAEGKITGALCFLHVASPELQHALQVQKMSEQAATNSFKELTYIRQELRNPLNGPAEKDFT

SEQ ID NO: 162552 - protein, 701 aa, Zea Mays
MSLPSNNRRTCSRSSSARSKHSARVVAQTPVDAQLHAEFEGSQRHFDYSSSVGAANRPSASTSTVSTYLQNMQRGRYIQPFGCLLAVHPDTFALLAYSENAPEMLDLTPHAVPTIDQRDALGIGVDVRTLFRSQSSVALHKAAAFGEVNLLNPILVHARTSGKPFYAILHRIDVGLVIDLEPVNPADVPVTAAGALKSYKLAAKAISRLQSLPSGNLSLLCDVLVREVSELTGYDRVMAYKFYEDEHGEVISECRRSDLEPYLGLHYPATDIPQASRFLFMKNKVRMICDCCATPVKVIQDDSLAQPLSLCGSTLRASHGCHAQYMANMGSVASLAMSVTINEDEEEDGDTGSDQQPKGRKLWGLVVCHHTSPRFVPFPLRYACEFLLQVFGIQLNKEVELAAQAKERHILRTQTLLCDMLLRDAPVGIFTRSPNVMDLVKCDGAALYYQNQLLVLGSTPSESEIKSIATWLQDNHDGSTGLSTDSLVEAGYPGAVALREVVCGMAAIKISSKDFIFWFRSHTTKEIKWGGAKHEPVDADDDGRRMHPRSSFKAFLEVVKWRSVPWEDVEMDAIHSLQLILRGSLPDEDANRNNVRSIVKAPSDDMKKIQGLLELRTVTNEMVRLIETATAPVLAVDIAGNINGWNNKAAELTGLPVMEAIGRPLIDLVVTDSIEVVKQILDSALQGLSLCFQSIFLWSPA

SEQ ID NO: 162553 - protein, 212 aa, Zea Mays
MTSIYVGNFHIPELIERARYNIMQSESMDKILERYERYSYAEKVLISAEYETQGNWCHEYRKLKAKVETIQKCQKHLMGEDLETLNLKELQQLEQQLESSLKHIRTRKSQLMVESISALQRKEKSLQEENKVLQKEKALLLHAARGEAERPAAASATGPNSTADQFVFHVLHVKGSCPNNKCQHLPCGSRREGGGRGSSAAAGSRWTATMDA

SEQ ID NO: 162554 - protein, 149 aa, Zea Mays
MSATPMQKRFSFPQNMKLRHLMGEDLETLNLKELQQLEQQLESSLKHIRTRKSQLMVESISALQRKEENKVLQKELAEKQKDQRQQVQRDQTQQQTSSSSTSFMLREAAPTTNVSIFPVAAGGRVVEGAAAQPQARVGLPPWMLSHLSC

SEQ ID NO: 162555 - protein, 210 aa, Zea Mays
MTSIYVGNFHIPELIERARYNIMQSESMDKILERYERYSYAEKVLISAEYETQGNWCHEYRKLKAKVETIQKCQKHLMGEDLETLNLKELQQLEQQLESSLKHIRTRKSQLMVESISALQRKEKSLQEENKVLQKELAEKQKDQRQQVQRDQTQQQTSSSSTSFMLREAAPTTNVSIFPVAAGGRVVEGAAAQPQARVGLPPWMLSHLSC

SEQ ID NO: 162556 - protein, 112 aa, Zea Mays
MPQGPHPSSQLSGSQKNPEREQRASAGSCVQCVCARGRRARTAFVNNCGTNGANPSFKEVADSACWWRERESSRIAEGSSIRRGKKAERSGRAPWGAGRWCCSGSRTRSAGR

SEQ ID NO: 162557 - protein, 153 aa, Zea Mays
MQNNYQEYVKLKARVEVLQHSQRNLLGEDLALLSPSELDQLENQVDKTLKQIRSRKTQVLLDELCDLKRKEQMLQDANRVLKRKLGEFEAEAASPPQLAWQGEGGMLSHDPPQPEHFFQALESNPCLQPTYHTMDMNQQPVPAPGGCYPAWMS

SEQ ID NO: 162558 - protein, 51 aa, Zea Mays
MHTSQAKRTQIPENKVVLCSISNQLVALTHQMVTNGNVIFPFLQHSPGAFS

SEQ ID NO: 162559 - protein, 184 aa, Zea Mays
MRALLADGGMALAMAPEVNESSGGAALSQGLLWWASECHGVLYSLAVMLPSLAFVGFLAWQARRSFRRISYGRSHVVVVAYYALLWVVAVLNLLWCFLQAWQCMPDRAFSWNVLSLFTKSGMLFLEVSLIAFLLQGNDASGFESLARTFVISGAVVAADALLKELVGNGAYGFSTNLCLLEFMG

SEQ ID NO: 162560 - protein, 226 aa, Zea Mays
MVSARANVGLLLTMPFTMILRISGLPSNLLHGRSAASMTGMSGDDTGVYGVRFALTTFINDAILNHLGNKRPQREDGGRVGREQGDAHAHRAGQVQHPVHGDISHDPPSPLSSGQLLKAAEHRRRQALGQPNDVRAVAIGAHAVRERDQVDPGVGSCPGLSSSCRQGRDDAGVVEVRVHEVDLEAMVDEAVRQLHERHDMALGREGQHHDTRPGRSRGHGSEAGSS

SEQ ID NO: 162561 - protein, 537 aa, Zea Mays
MQKLLPRHVEIIETIDEELINNIVSKYGTTDTELLKKKLKEMRILDNVDLPASISQLFVKPKDKKESPAKSKQKLLVKSLETIVDVEEKTELEEEAEVLSEIEEEKLESEEVEAEEESSEDELDPFVKSDPKLPRVVRMANLCVVGGHSVNGVAEIHSEIVKQDVFNSFYEMWPTKFQNKTNGVTPRRWIRFCNPALSALISKWIGSDDWVLNTDKLAELKKFADNEDLHSEWRAAKKANKMKVVSLIREKTGYIVSPDAMFDVQVKRIHEYKRQLLNILGIVYRYKKMKEMSTEERAKSFVPRVCIFGGKAFATYIQAKRIVKFITDVAATVNHDSDIGDLLKVVFVPDYNVSVAEALIPASELSQHISTAGMEASGTSNMKFAMNGCILIGTLDGANVEIREEVGEENFFLFGAEAHEIAGLRKERAEGKFVPDPRFEEVKEFVRSGVFGTYSYDELMGSLEGNEGYGRADYFLVGKDFPSYIECQEKVDEAYRDQKLWTRMSILNTAGSSKFSSDRTIHEYAKDIWDISPAILP

SEQ ID NO: 162562 - protein, 840 aa, Zea Mays
MATTTSPPLQLASASRPHASASGGGGGGGVLLAGGSGGGVAPGWGRGRLQRRVSARSVASDRDVQGPVSPAEGLPSVLNSIGSSAIASNIKHHAEFAPLFSPDHFSPLKAYHATAKSVLDALLINWNATYDYYNKMNVKQAYYLSMEFLQGRALTNAIGNLEITGEYAEALKQLGQNLEDVASQEPDAALGNGGLGRLASCFLDSLATLNYPAWGYGLRYEYGLFKQIITKDGQEEIAENWLEMGYPWEVVRNDVSYPVKFYGKVVEGTDGRKHWIGGENIKAVAHDVPIPGYKTRTTNNLRLWSTTVPAQDFDLAAFNSGDHTKAYEAHLNAKKICHILYPGDESLEGKVLRLKQQYTLCSASLQDIIARFESRAGESLNWEDFPSKVAVQMNDTHPTLCIPELMRILMDVKGLSWSEAWSITERTVAYTNHTVLPEALEKWSLDIMQKLLPRHVEIIETIDEELINNIVSKYGTTDTELLKKKLKEMRILDNVDLPASISQLFVKPKDKKESPAKSKQKLLVKSLETIVDVEEKTELEEEAEVLSEIEEEKLESEEVEAEEESSEDELDPFVKSDPKLPRVVRMANLCVVGGHSVNGVAEIHSEIVKQDVFNSFYEMWPTKFQNKTNGVTPRRWIRFCNPALSALISKWIGSDDWVLNTDKLAELKKFADNEDLHSEWRAAKKANKMKVVSLIREKTGYIVSPDAMFDVQVKRIHEYKRQLLNILGIVYRYKKMKEMSTEERAKSFVPRVCIFGGKAFATYIQAKRIVKFITDVAATVNHDSDIGDLLKVVFVPDYNVSVAEALIPASELSQHIRWCKCGNQRGGWRGKLFPFWCRGT

SEQ ID NO: 162563 - protein, 967 aa, Zea Mays
MATTTSPPLQLASASRPHASASGGGGGGGVLLAGGSGGGVAPGWGRGRLQRRVSARSVASDRDVQGPVSPAEGLPSVLNSIGSSAIASNIKHHAEFAPLFSPDHFSPLKAYHATAKSVLDALLINWNATYDYYNKMNVKQAYYLSMEFLQGRALTNAIGNLEITGEYAEALKQLGQNLEDVASQEPDAALGNGGLGRLASCFLDSLATLNYPAWGYGLRYEYGLFKQIITKDGQEEIAENWLEMGYPWEVVRNDVSYPVKFYGKVVEGTDGRKHWIGGENIKAVAHDVPIPGYKTRTTNNLRLWSTTVPAQDFDLAAFNSGDHTKAYEAHLNAKKICHILYPGDESLEGKVLRLKQQYTLCSASLQDFPSKVAVQMNDTHPTLCIPELMRILMDVKGLSWSEAWSITERTVAYTNHTVLPEALEKWSLDIMQKLLPRHVEIIETIDEELINNIVSKYGTTDTELLKKKLKEMRILDNVDLPASISQLFVKPKDKKESPAKSKQKLLVKSLETIVDVEEKTELEEEAEVLSEIEEEKLESEEVEAEEESSEDELDPFVKSDPKLPRVVRMANLCVVGGHSVNGVAEIHSEIVKQDVFNSFYEMWPTKFQNKTNGVTPRRWIRFCNPALSALISKWIGSDDWVLNTDKLAELKKFADNEDLHSEWRAAKKANKMKVVSLIREKTGYIVSPDAMFDVQVKRIHEYKRQLLNILGIVYRYKKMKEMSTEERAKSFVPRVCIFGGKAFATYIQAKRIVKFITDVAATVNHDSDIGDLLKVVFVPDYNVSVAEALIPASELSQHISTAGMEASGTSNMKFAMNGCILIGTLDGANVEIREEVGEENFFLFGAEAHEIAGLRKERAEGKFVPDPRFEEVKEFVRSGVFGTYSYDELMGSLEGNEGYGRADYFLVGKDFPSYIECQEKVDEAYRDQKLWTRMSILNTAGSSKFSSDRTIHEYAKDIWDISPAILP

SEQ ID NO: 162564 - protein, 207 aa, Zea Mays
MMGRTSVAAAAAALLVLAACAALPARTAANKISINWKPNVNYTDWLKQHSPFYKDDWLGGRGGLQQVRLHQRHLQLQQGAQLRLPAQRDQDLLLHLQLRLLLRRDAPRHQGREVAAAVAAAVRQRPLRRRHRRLRQVPRARHLRRRRRARRAAQDGLAGKNLPAGPFVGSNWDSFFFLFVHPLHLFRSVLGLSRGAVAGAGVLRWVH

SEQ ID NO: 162565 - protein, 403 aa, Zea Mays
MQLLRSIANAEAYDQSEQPADKSDDDDSNVAATATNNSGSCNNDEGCCSSTLKELQAAMSPRPFPASVPSNKVQPMPVVGVSPVPPPHQQQQQQKKKTAVVRLSFRRRSYEGDEMTEMSGSANYLYRPRAGFTVPCSTGEKLPQGCWSVLEPSTFRVRGESFFKDKRKYPAPGCSPYTPIGVDMFAYTRKIHHIAQHLSLPSLKTHETFPTLLIVNIQLPTYPATVFGDNDGDGISLVLYFKLSDSFDKEISPQLQDSIKRLMNEETEKVKGFPVDSIVPYTERLKILAGLANPEDLQLSTAERKLVQTYNMKPVLSRPQHKFYKGSNYFEIDLDVHRFSFISRKGLETFQERLKHGVLDLGLTIQAQKAEELPEHVLCCMRLNKIDFANNGQIPTLITAADE

SEQ ID NO: 162566 - protein, 373 aa, Zea Mays
MGSCVSVSSTRHRRRRSRKLSVAARKFRRKLSTAIAADAPIVRGAGSAATCLARHGVVHVEAPDSNVTLRLTKLQWQHSQMDAGSVVCEEAWYDSVSILESPDSDDDLDNDFASVSGDPLPDVTGGSDAPQCKEAACFLDTMQLLRSIANAEAYDQSEQPADKSDDDDSNVAATATNNSGSCNNDEGCCSSTLKELQAAMSPRPFPASVPSNKVQPMPVVGVSPVPPPHQQQQQQKKKTAVVRLSFRRRSYEGDEMTEMSGSANYLYRPRAGFTVPCSTGEKLPQGCWSVLEPSTFRVRGESFFKYEARQEEVPSSRLLPLHPHRSGHVRLHEEDSPHCAAPLASVSEDTRDISYPAHRQHSVAHLPCYSVWR

SEQ ID NO: 162567 - protein, 493 aa, Zea Mays
MASSGNEGRVVVDLGSAAESVAADEEAHATPLHEIESLCMRCGENGITRLLLTLIPHFREVVLMAFECPHCGERNNEIQFAGQLQPKGCCYSLEVPLGQSEMLNRQVVKSDSATIKIPELDFEIPPEAQRGTLSTVEGIIMRAVDELQALQDERKKAEAIDQFLLKLRSLGSGEAAFTFILDDPAGNSFIENPHAPLLDPLLSVRFYERTREQQAALGFLAEPPKEQPGEAVLPASAVESNSDGLQSVPHGSVGAVAGRRAIAQGNPDEVAAALCRYSAPEEVDTLPSTCGACGTECVTRFFATKIPYFREVIVMATTCDMCGYRNSELKPGGEIPAKGKKITLRVQNAQDLTRDVIKSDSASVKVPELELELSCGTLGGMVTTVEGLIVKICEALERIHGFQLGDSTLEWKKKKWDDFKERLSKLLSLQEAWTLIIDDGLAASFVAPATDSLEDDSQLTIEEYQRSWEQNEELGLNDMDTSSADAAYNTTNT

SEQ ID NO: 162568 - protein, 694 aa, Zea Mays
MRRHGEVRVILAMAAAAAAALLASAAVAGRDGRQTYIVHMSHSAMPDEFAEHEEWYAASLQAVSDAATVLYTYSTLLHGYSARLTRAEAAALESQPGVIVVNPEVRYELHTTRTPEFLGLDGTDALFPQSGTGTDVVVGVLDTGVWPERPSYDDTGFGPVPAGWKGKCEDGNDFNASACNKKLIGARFFLTGYEAAKGPVDTSKESRSPRDNDGHGTHTSSTAAGGAVQGADLLGYAAGTAKGMAPRARVATYKVCWVGGCFSSDILKAMEVAVTDGVDVLSLSLGGGTAEYYRDSIAVGAFSAMEKGIFVSCSAGNAGPGAATLSNGAPWITTVGAGTIDRDFPAYVTLGNGKNYTGVSLYSGKPLPTTPMPFIYAGNASNSSMGQLCMSGSLIPEKVAGKIVLCDRGTNARVQKGFVVKDAGGAGMVLANTAANGEELVADAHVLPGSGVGEKAGNAMRDYAMSDPKATATIVFAGTKVGVKPSPVVAAFSSRGPNTVTSSVLKPDIIAPGVNAAGRGRRPRRPREGRRPGAGVRHRGGGLRGLPLRQQLRGGADRGAHQAARVRGVQRQPHLRGDRAQLPVLLRGVPGRRRHGEAHPHGNQRRAARDVQGGRERRRRRHPGDGDRGAVDAELQQGRREAELHGELHGGRDAVGHQRVRAARLVQRPPRGRQPDRGDVDLMASGGRTVAIAR

SEQ ID NO: 162569 - protein, 239 aa, Zea Mays
MVLSLRVASLFVMIVLFFHIFIADWWDQYGGDYPELQEFARRIVSQCMSSSGCERNWSTFALVHTKLRNRLSYDKLHKLVYVHYNLKLRIQHYETDMESLEQMKNSKDRNIDPCSIMIDVAMYDEGNPIMEWLCSSRSESLPTLDENDEPESPNRPSGFVLEELGGLNEEEMVLLNSRIGSRRKNVRKRNAEEDIGDDFLSDSSEGAGSPTYDESGDSESNDGGGDDEDGDPSGPSSAA

SEQ ID NO: 162570 - protein, 205 aa, Zea Mays
MVLSLRVASLFVMIVLFFHIFIADWWDQYGGDYPELQEFARRIVSQCMSSSGCERNWSTFALVHTKLRNRLSYDKLHKLVYVHYNLKLRIQHYETDMESLEQMKNSKDRNIDPCSIMIDVAMYDEGNPIMEWLCSSRSESLPTLDENDEPESPNRPSGFVLEELGGLNEEEMVLLNSRIGSRRKNVRKRNAEEDIGDDFLSDSSE

SEQ ID NO: 162571 - protein, 179 aa, Zea Mays
MYGSVSQLGTGNAILIILQLFFAGIIVICLDELLQKGYGLGSGISLFIATNICENIIWKAFSPTTINSGRGAEFEGAVIALFHLLITRTDKVRALREAFYRQNLPNVTNLLATVLVFLIVIYFQGFRVVLPVRSKNARGQQGSYPIKLFYTSNMPIILHSALITNLYFISQEIQWKFPC

SEQ ID NO: 162572 - protein, 68 aa, Zea Mays
MVWSYTNLWGEISALASFCEVDLDSAVQKKWRLQLSTSAASPSHGRCEASAEAVAPDEPCRVVYLKDF

SEQ ID NO: 162573 - protein, 405 aa, Zea Mays
MHPKLFPENHVSRPDGNGSASFHPLPLPPASKGKLLGSGTFGCVYEATNRHTGALCAMKEVNIIPDDAKSVESLKQLEQEIKFLSQFKHENIVQYYGSETIEDRFYIYLEYVHPGSIHKYVHQHCGSLTEAVIRNFTRHILKGLAFLHSQKIMHRDIKGANLLVDINGVVKLADFGMAKHLSTAAPNLSLKGTPYWMAPEVVRATLDKSAGYDLAVDIWSLGCTIIEMFTGKPPWSGLEGPAAMFKVLRTDPPIPDNLSPEGKDFLRCCFKRNPTERPTANKLLEHPFIQTLNHYSPHSVVHSFSGIKSPDTVHSSARDKVPWKSDSYMRGKHANGETSSARSSESLAYRLMTPLPNLGTNSLSPPPLSSASSSGSAAHTPNTCHLSQHLGKVHINSASVSVPSV

SEQ ID NO: 162574 - protein, 400 aa, Zea Mays
MHPKLFPENHVSRPDGNGSASFHPLPLPPASVSPKQTNASHQLVPKAEMPSVAGQWQKGKLLGSGTFGCVYEATNRHTGALCAMKEVNIIPDDAKSVESLKQLEQEIKFLSQFKHENIVQYYGSETIEDRFYIYLEYVHPGSIHKDIKGANLLVDINGVVKLADFGMAKHLSTAAPNLSLKGTPYWMAPEVVRATLDKSAGYDLAVDIWSLGCTIIEMFTGKPPWSGLEGPAAMFKVLRTDPPIPDNLSPEGKDFLRCCFKRNPTERPTANKLLEHPFIQTLNHYSPHSVVHSFSGIKSPDTVHSSARDKVPWKSDSYMRGKHANGETSSARSSESLAYRLMTPLPNLGTNSLSPPPLSSASSSGSAAHTPNSMHFSVPYHQPSPLPKPNGKEAINLVSH

SEQ ID NO: 162575 - protein, 334 aa, Zea Mays
MAIRITVSYSGYVAQNLAASFGLRCTVAAGASAALGPGCRFLQDALSHPFCLFASSRRADPHHDAEDHNHPKPRSKALAPAAAARGGGHSLLLPRSCSGKAAPPVDDPPASLAVGLLSVFASGMGSTGGIAGASSLAASPSISAGFNPAALLPFLQASKWLPCSDIVTVATTSRSSGRPAGSTASPVPRTTAPSPRPTQRAAAPSPCPVPSPAVAAPSKVGIQALVGSASIASGSAEIGRGAIASGVAGMVKKSGASIPAGAGVRRKTGWLSKWVSSCSDDAKTVFAAVTVPLLYKSSLAEPRSIPSRSMFPTFDVGDRILAEKEDWLALKVGE

SEQ ID NO: 162576 - protein, 185 aa, Zea Mays
METCGACGWSQTARERWGGVGAAREDRGFGGRATGEVAAGCCGSRASRPHLGTWAAATRSPPYHGTVSRARGDHAGDGHFRRGQARRLPPFIICCHDRCRCCRPGQAHHLPLFLCCHDRCWGLGGGVEISRATSALETGFARLGIAEDRGITVDMDAYTIVLKSSIDVIKYKYPQSFFSSTENRI

SEQ ID NO: 162577 - protein, 168 aa, Zea Mays
METCGACGWSQTARERWGGVGAAREDRGFGGRATGEVAAGCCGSRASRPHLGTWAAATRSPPYHGTVSRARGDHAGDGHFRRGQARRLPPFIICCHDRCRCCRPGQAHHLPLFLCCHDRCWGLGGGVEISRATSALETGFARLGIAEDRGITVDMDAYTIVLKSSIDV

SEQ ID NO: 162578 - protein, 56 aa, Zea Mays
MQTLQAVALSKKMSQDQSFCNISTTCLPVGKNLLMWCQTRHYWRTNIMTCCSFKFR

SEQ ID NO: 162579 - protein, 80 aa, Zea Mays
MTLSLAALGSLMWLRKNKPRTLVPIIYACALLLATMPSITSYLRRSLEWQTPKVVGFELFSSLVMAFISWQLFSACQRPM

SEQ ID NO: 162580 - protein, 103 aa, Zea Mays
MLTAQSGNRSSTRSGWKAFPTLPFWIRKEMRKAMLLGDFQSSISLTTWLRSLLVIPVYPMHEWSVSSRALSLGKFTKLLMPGVMASSCLCGGSSGSSLTGKTM

SEQ ID NO: 162581 - protein, 521 aa, Zea Mays
MGHNHNKILQLEKHLKDQQAVRGALEKALGPNAGPVSLSPENPMPQAANELIREIATLELEVKNMEQYLLTLYRKAFEQQQAPAFSPPDRREASKPSVSSRSGQLRETPMATKSSCKSRGDAALRSSYPPAHKKLNDPLADCCTSARFDRVVDSDVLRCQSALSYRGVCSSRILPSEDDSLARALRSCHSQPFSFVEEGDTGASGMISLAEYLGTNVADHIPETPNNLSEEMVRCMAGIYCRLADPPLVHHGSSSSPSSSFSSTSAISPQYVGDMWSPKYRREATLDSRLINPFHVDGLKEFSGPYNTMVEVPMISRDSRRLKEAEDLLQTYKLILYRLEAVDLRRMTDEEKIAFWVNIHNALLMHAYLKNGVPQNNLKKTSLLVKAACKIAGRNINAAVIQSIVLGCNTHCPGQVRVYTPKRLFHQLESAKEEFIRATAGVWKEQKLLLPKLVEAYAKDVKLSPQGLVDMVQRYLPESMRMAVQRCQHGGRSSGKVVEWVSYNPAFRYLLARDLAFPHLS

SEQ ID NO: 162582 - protein, 495 aa, Zea Mays
MEVEALEKKGHAAFAKAMKSFGSSERYKRSTSGRYFEDMYATDALRSSDKTIVLPMPEVVKAKVKCDITKEAQPGRGAQSTLRKEILQLEKHLKDQQAVRGALEKALGPNAGPVSLSPENPMPQAANELIREIATLELEVKNMEQYLLTLYRKAFEQQQAPAFSPPDRREASKPSVSSRSGQLRETPMATKSSCKSRGDAALRSSYPPAHKKLNDPLADCCTSARFDRVVDSDVLRCQSALSYRGVCSSRILPSEDDSLARALRSCHSQPFSFVEEGDTGASGMISLAEYLGTNVADHIPETPNNLSEEMVRCMAGIYCRLADPPLVHHGSSSSPSSSFSSTSAISPQYVGDMWSPKYRREATLDSRLINPFHVDGLKEFSGPYNTMVEVPMISRDSRRLKEAEDLLQTYKLILYRLEAVDLRRMTDEEKIAFWVNIHNALLMHAYLKNGVPQNNLKKTSLLVKAACKIAGRNINAAVIQSIVLGCNTHCPGQAC

SEQ ID NO: 162583 - protein, 643 aa, Zea Mays
MEVEALEKKGHAAFAKAMKSFGSSERYKRSTRYFEDMYATDALRSSDKTIVLPMPEVVKAKVKCDITKEAQPGRGAQSTLRKEILQLEKHLKDQQAVRGALEKALGPNAGPVSLSPENPMPQAANELIREIATLELEVKNMEQYLLTLYRKAFEQQQAPAFSPPDRREASKPSVSSRSGQLRETPMATKSSCKSRGDAALRSSYPPAHKKLNDPLADCCTSARFDRVVDSDVLRCQSALSYRGVCSSRILPSEDDSLARALRSCHSQPFSFVEEGDTGASGMISLAEYLGTNVADHIPETPNNLSEEMVRCMAGIYCRLADPPLVHHGSSSSPSSSFSSTSAISPQYVGDMWSPKYRREATLDSRLINPFHVDGLKEFSGPYNTMVEVPMISRDSRRLKEAEDLLQTYKLILYRLEAVDLRRMTDEEKIAFWVNIHNALLMHAYLKNGVPQNNLKKTSLLVKAACKIAGRNINAAVIQSIVLGCNTHCPGQWLRTLLYPRIKSKVSKAGHEWRAFAVAQPEPLLRFALCSGSHSDPAVRVYTPKRLFHQLESAKEEFIRATAGVWKEQKLLLPKLVEAYAKDVKLSPQGLVDMVQRYLPESMRMAVQRCQHGGRSSGKVVEWVSYNPAFRYLLARDLAFPHLS

SEQ ID NO: 162584 - protein, 215 aa, Zea Mays
MALSVSSLAAALSHLSLPSTSTPKPHPAPLLRLRSTYRRAVSLALRASAAEAAESFEADLPAEEVMAVEEEAEEDALSGIALRKYVKQRLPGGFAAQRITATGRRKTAIARVVLQEGTGKEYLQGNPMWMEYCKVPLMTLGFEKNYDVFVKVHGGGLSGQAQAICLGVARALVKISNANRVPLKSEGLLTRDTRIVERKKAGLKKARKRPQFSKR

SEQ ID NO: 162585 - protein, 348 aa, Zea Mays
MPSPTSYLLLNPSKPSSFRRLSAPRLSRFHVSCDAPRGGGRREVIPAGASKAKKQIVFFDAAPPVSQEGGGAVKKAGSEKLTQVGSGNAALALLRRATKMTLSVLSNLPLAISEMFAIAALMALGTVIDQGEAPSYYFEKFPEDNPVFGFITWRWILTPGFDHMFSSPVFLGLLALLATSLMACTYTTQLPMVKVARRWSFTHSGERIRKQEFADSLPQASIQDLGVILMGAGYEVFTKGPSLYAFKGLAGRYAPIGVHLAMLFIMAGATLSATGSFKGSVDVPQGLNFVIGDVMKPRGVLSVAPDVFNTEVHVNRFYMEYYDSGEVVSLLIILKPFCAVICARQIGN

SEQ ID NO: 162586 - protein, 327 aa, Zea Mays
MPSPTSYLLLNPSKPSSFRRLSAPRLSRFHVSCDAPRGGGRREVIPAGASKAKKQIVFFDAAPPVSQEGGGAVKKAGSEKLTQVGSGNAALALLRRATKMTLSVLSNLPLAISEMFAIAALMALGTVIDQGEAPSYYFEKFPEDNPVFGFITWRWILTPGFDHMFSSPVFLGLLALLATSLMACTYTTQLPMVKVARRWSFTHSGERIRKQEFADSLPQASIQDLGVILMGAGYEVFTKGPSLYAFKGLAGRYAPIGVHLAMLFIMAGATLSATGSFKGSVDVPQGLNFVIGDVMKPRGVLSVAPDVFNTEVHVNRFYMEYYDSGEK

SEQ ID NO: 162587 - protein, 288 aa, Zea Mays
MLFIMAGATLSATGSFKGSVDVPQGLNFVIGDVMKPRGVLSVAPDVFNTEVHVNRFYMEYYDSGEVSQFYSDLSLFNLDGKEVMRKTIKVNDPLRYGGVTIYQTDWGFSALQVKKNGEGPFNLAMAPLKLNGDKKLFGTFLPLEDSDSSNPNVKGISMLARDLQSIVLYDQDGKFVGVRRPSSKLPIEINGNEILIEDAIGSTGLDLKTDPGVPIVYAGFGALMLTTCISYLSHSQIWALQDGSTVVVGGKTNRAKLEFSEEMNRLLDKVPELISADENLLDTKSTAT

SEQ ID NO: 162588 - protein, 234 aa, Zea Mays
MQLFRLCLPDIIKCKIAFWKKANLIFLFFLLRKLILPFYSFTLFCIILPMTMFVPEAELPDWVVCYVPALMSLLNILPSPKSFPFIIPYLLFENTMSVTKFNAMISGLFQLGSAYEWVVTKKSGRSSEGDLIALAPPKEPVKHATRTGSAPNLDAVAKEEQQQQQLAASRKDAAAKKKEKHNRIYKKELALSMLLLTAAARSLLSKQGIHFYFLLFQGVSFLLVGLDLIGEQVE

SEQ ID NO: 162589 - protein, 94 aa, Zea Mays
MWAPSSIVLLYVSLYYMKQMVTDTSRNSGAINDHTKDASNHAHMTSTQVCHIVWILLPYCRSRSRDKANSVATVRLSTSRTVLKLLASYLFGDP

SEQ ID NO: 162590 - protein, 156 aa, Zea Mays
MCLVNHCSHRKEKKRTCNSWQTNIWQKQVEYPASTVSDVRTRNTHRIIMAHGLESGRSHTVTPFSELPFNSRSLDFGFLWCCSPDCTAPLKLPSLPSSLMLNAASFSKPCEKGSSCTLEIVFDIRLAHRQAIVPSLLNAPGHCSMRYPRNHVRSHW

SEQ ID NO: 162591 - protein, 164 aa, Zea Mays
MAVSAQGYRTRVPGAVTVRAWDRAPVPPHLAVTAHQGSVVACGGCGRARRSGPRPVPARLRCQGAVPRAAEPGPPSGLPHRARRRGWGPRRLRCRGWVPRTRLAACTAGAARGETVTAPGRADHRRVGARARARLAEAGEGGRARRSWPGHPLASRGWGLRQPQ

SEQ ID NO: 162592 - protein, 543 aa, Zea Mays
MLPRCCRRRSGASCLAVLLLLLLHAGAASAQGALARQDVAALHGLRASLGVRASDWPDRADPCTFWSGVVCRAGRVAELRLSGLRRTRAGARSAAFAVDQLPRLAALQAFNASGFPLPGRIPSWFGRGLPPSLAVVDLRSARVNGELPVDLGMSGNLTTLVLSGNNLSGPIPLSLLSIAGLRVLDLSANNLTGPLPNVSFSGSGGAGVLFNASGNALYGAVGDATGSLRKRFWVVDVSDNYFDQVLGTGFQNGTDGVVDLRMNCLSGAASQRTRGDCEAFYTRNGVRLALDPKPPSPLPEPQPPQVLMPSTKKRGGKWKFVLTGVLGGAAILVTLGLSVLVFCLLRRKGRKPRGRGVEQTEEGIRSGRRSSSVNPVTMSPMASPRASGSPKGVPIITDEFTYEQLHHAAGGFGDDNLVKHGHSGDMYYGVLESGFQVVIKKIDLKTRKKCQGELSFLTKHTHGRIVPLLGHLAKDEEELLVYKYMAKGDLTTALHKKSVEVEQGLRSLDWITRLKIAIGVAEALCFLHDECNPPLVHSQQCAS

SEQ ID NO: 162593 - protein, 529 aa, Zea Mays
MNCLSGAASQRTRGDCEAFYTRNGVRLALDPKPPSPLPEPQPPQVLMPSTKKRGGKWKFVLTGVLGGAAILVTLGLSVLVFCLLRRKGRKPRGRGVEQTEEGIRSGRRSSSVNPVTMSPMASPRASGSPKGVPIITDEFTYEQLHHAAGGFGDDNLVKHGHSGDMYYGVLESGFQVVIKKIDLKTRKKCQGELSFLTKHTHGRIVPLLGHLAKDEEELLVYKYMAKGDLTTALHKKSVEVEQGLRSLDWITRLKIAIGVAEALCFLHDECNPPLVHRDIQASSVLLEDKFEVCLGSLSEICTQQSAGSQSFFSRILRSSKSLDKNIPGPPASCSYDIYCFGKVLLELITGNFGASGSTNADSEEWLARTLDYINANDKEGVSGIVDPTLVVDDDHLEEVWAVSIVAKTCLNPKPSRRPLARYILKALENPLRVVREQEEFQSSPSHLRSTPSQGSWRFAFHGNKYHSWEAMPTSGQALARKNTAKSQGTEGSDEDEENSFSFKRASRDDFPDPIEFEGGVVVKEYPQTS

SEQ ID NO: 162594 - protein, 158 aa, Zea Mays
MTPKIVLEVRFDCLKSQEDATLETSLEAKISERLKWRKSPSYSKLNKKEIFATIIFSGFVTPKLVLFCSVATLGKGERLHRCSCMHNFEHLNGGRAERPCARTAQTGPASIVVIGSIMRGGAAATTCARRPYISSMVIFKMTDSIKMSSSRRQRVHGR

SEQ ID NO: 162595 - protein, 196 aa, Zea Mays
MQGHLRTYMNAGIPKRFKEEEEKEQLAKDIAKDWNAVFERSINTLFLTEMVRGLMLTLKYFFERNVTINYPFEKGPLSPRFRGEHALRRYESGEERCIACKLCEAICPAQAITIEAEEREDGSRRTTRYDIDMTKCIYCGFCQEACPVDAIVEGPNFEFATETHEELLYDKEKLLENGDRWETEIAENLRSESLYR

SEQ ID NO: 162596 - protein, 221 aa, Zea Mays
MAALLARQAAQALRARQSLGPTTSAMQGHLRTYMNAGIPKRFKEEEEKEQLAKDIAKDWNAVFERSINTLFLTEMVRGLMLTLKYFFERNVTINYPFEKGPLSPRFRGEHALRRYESGEERCIACKLCEAICPAQAITIEAEEREDGSRRTTRYDIDMTKCIYCGFCQEACPVDAIVEGPNFEFATETHEELLYDKEKLLENGDRWETEIAENLRSESLYR

SEQ ID NO: 162597 - protein, 78 aa, Zea Mays
MAALLARQAAQALRARQSAQLGPTTSAMQGHLRTYMNAGIPKRFKEEEEKEQLAKDIAKDWNAVFERSINTLFLTEMD

SEQ ID NO: 162598 - protein, 53 aa, Zea Mays
MKTGYQNSRFAHQVERFACLYSSQVTNFGLYSPDKYYRPSEDYMPHEFDVLGL

SEQ ID NO: 162599 - protein, 425 aa, Zea Mays
MVRGLVLDKKRGNILKMDRHKYVKVAYHGFKELSKEEKVAAYGSTLIRDSFDEPDYALIDTLFSLGEAYLFAQLVDFIDKNPGKVPAGTDYPLMYRDVRSAVDLCHRDGTLKRMVAKDPARYINEDLAIVPMLEMIRKSGRSTFLVTNSLWDYTDVVMNYLCGPYTSGVGSGLNHKWLQYFDIVITGSSKPSFFHDDNRAGLFEVEPDSGKLLNADIQIGSPRSSHQHSTPVQKVYQGGNVGHLHRLLSVASSSQILYVGDHIYGDILRSKKVLGWRTMLVIPELEQELKLLSESKSTRKELRHLRMERDSIEDKIHHLEWSLKLDDISENQKEKLFSEHDNLLKQRGHVRGLHQEAQRQHHQKFHKVWGQLMKTGYQNSRFAHQVERFACLYSSQVTNFGLYSPDKYYRPSEDYMPHEFDVLGL

SEQ ID NO: 162600 - protein, 332 aa, Zea Mays
MYRDVRSAVDLCHRDGTLKRMVAKDPARYINEDLAIVPMLEMIRKSGRSTFLVTNSLWDYTDVVMNYLCGPYTSGVGSGLNHKWLQYFDIVITGSSKPSFFHDDNRAGLFEVEPDSGKLLNADIQIGSPRSSHQHSTPVQKVYQGGNVGHLHRLLSVASSSQILYVGDHIYGDILRSKKVLGWRTMLVIPELEQELKLLSESKSTRKELRHLRMERDSIEDKIHHLEWSLKLDDISENQKEKLFSEHDNLLKQRGHVRGLHQEAQRQHHQKFHKVWGQLMKTGYQNSRFAHQVERFACLYSSQVTNFGLYSPDKYYRPSEDYMPHEFDVLGL

SEQ ID NO: 162601 - protein, 150 aa, Zea Mays
MYRDVRSAVDLCHRDGTLKRMVAKDPARYINEDLAIVPMLEMIRKSGRSTFLVTNSLWDYTDVVMNYLCGPYTSGVGSGLNHKWLQYFDIVITGRSEAQDQVINTQHQFRKFIRGAMLVISTDYFLLLLVHRFSMLVITYTEIFCGARKF

SEQ ID NO: 162602 - protein, 335 aa, Zea Mays
MDSGAVETASTGAVWSSPSAEPRSISVGKEVFCNRSLNMRNITAVGFDMDYTLAQYKPETFESLAYYGTIEKLVKDLRYPEELLTWEFDWKYMVRGLVLDKKRGNILKMDRHKYVKVAYHGFKELSKEEKVAAYGSTLIRDSFDEPDYALIDTLFSLGEAYLFAQLVDFIDKNPGKVPAGTDYPLMYRDVRSAVDLCHRDGTLKRMVAKDPARYINEDLAIVPMLEMIRKSGRSTFLVTNSLWDYTDVVMNYLCGPYTSGVGSGLNHKWLQYFDIVITGRSEAQDQVINTQHQFRKFIRGAMLVISTDYFLLLLVHRFSMLVITYTEIFCGARKF

SEQ ID NO: 162603 - protein, 564 aa, Zea Mays
MLFSRRPLAAAFHLAPLSPPLLLFFASASSSCSPAASAAAASVSGSRGCTAARMDSGAVETASTGAVWSSPSAEPRSISVGKEVFCNRSLNMRNITAVGFDMDYTLAQYKPETFESLAYYGTIEKLVKDLRYPEELLTWEFDWKYMVRGLVLDKKRGNILKMDRHKYVKVAYHGFKELSKEEKVAAYGSTLIRDSFDEPDYALIDTLFSLGEAYLFAQLVDFIDKNPGKVPAGTEDVRSAVDLCHRDGTLKRMVAKDPARYINEDLAIVPMLEMIRKSGRSTFLVTNSLWDYTDVVMNYLCGPYTSGVGSGLNHKWLQYFDIVITGSSKPSFFHDDNRAGLFEVEPDSGKLLNADIQIGSPRSSHQHSTPVQKVYQGGNVGHLHRLLSVASSSQILYVGDHIYGDILRSKKVLGWRTMLVIPELEQELKLLSESKSTRKELRHLRMERDSIEDKIHHLEWSLKLDDISENQKEKLFSEHDNLLKQRGHVRGLHQEAQRQHHQKFHKVWGQLMKTGYQNSRFAHQVERFACLYSSQVTNFGLYSPDKYYRPSEDYMPHEFDVLGL

SEQ ID NO: 162604 - protein, 388 aa, Zea Mays
MLFSRRPLAAAFHLAPLSPPLLLFFASASSSCSPAASAAAASVSGSRGCTAARMDSGAVETASTGAVWSSPSAEPRSISVGKEVFCNRSLNMRNITAVGFDMDYTLAQYKPETFESLAYYGTIEKLVKDLRYPEELLTWEFDWKYMVRGLVLDKKRGNILKMDRHKYVKVAYHGFKELSKEEKVAAYGSTLIRDSFDEPDYALIDTLFSLGEAYLFAQLVDFIDKNPGKVPAGTDYPLMYRDVRSAVDLCHRDGTLKRMVAKDPARYINEDLAIVPMLEMIRKSGRSTFLVTNSLWDYTDVVMNYLCGPYTSGVGSGLNHKWLQYFDIVITGRSEAQDQVINTQHQFRKFIRGAMLVISTDYFLLLLVHRFSMLVITYTEIFCGARKF

SEQ ID NO: 162605 - protein, 578 aa, Zea Mays
MSSNSSTGPRPRPSPSPPPPKSSPSPSHSTAPPPSADSSSPGPSLPSDSSPPPAASRSHGAQASSPAKPHSPREQPSRGSADDGGRPPPAPAHRGGPTMVEIVFAAAGAAALLVILIAACVCCSRKTAPRRRKRPHNPMHYYADFPSSACKATGNSSTYYPNGPQPQWQNDTVAAATRSTFGPPGGGWHAPPPDMTSGPHGARPPPPTTPHEALLGLGKGTFSYEELAAATGDFSAANLLGQGGFGYVHKGVLPGGMVVAVKQLKSDSGQGEREFQAEVDIISRVHHRHLVSLVGHCIAGARRVLVYQFVPNKTLEFHLHGQPVMEWSTRLRIALGSAKGLAYLHEDCEPSPDHSPRHQVGQHSSRQQLPSQGRRLRAGQADVGQQHARVDPCDGDVRVPGAGVRVEREADGQVGRLLLRRGAAGAPDGAAPHRRRRRALVPRRRRQPRGLGEAGAVARAGRRRLRRRRGPEAAGQLRHHGDGAHGRQRRGSRAPLGQEAPQDESDREGTRGGHLAGGPQRQRGGATWAEHGVRHGGRGLVQGQSSRTVHARRGTDQAGAHGVQRRGGPSLYDRQRRR

SEQ ID NO: 162606 - protein, 578 aa, Zea Mays
MSSNSSTGPRPRPSPSPPPPKSSPSPSHSTAPPPSADSSSPGPSLPSDSSPPPAASRSHGAQASSPAKPHSPREQPSRGSADDGGRPPPAPAHRGGPTMVEIVFAAAGAAALLVILIAACVCCSRKTAPRRRKRPHNPMHYYADFPSSACKGNSSTYYPNGPQPQWQNDTVAAATRSTFGPPGGGWHAPPPDMTSGPHGARPPPPTTPHEALLGLGKGTFSYEELAAATGDFSAANLLGQGGFGYVHKGVLPGGMVVAVKQLKSDSGQGEREFQAEVDIISRVHHRHLVSLVGHCIAGARRVLVYQFVPNKTLEFHLHGKGQPVMEWSTRLRIALGSAKGLAYLHEDCEPSPDHSPRHQVGQHSSRQQLPSQGRRLRAGQADVGQQHARVDPCDGDVRVPGAGVRVEREADGQVGRLLLRRGAAGAPDGAAPHRRRRRALVPRRRRQPRGLGEAGAVARAGRRRLRRRRGPEAAGQLRHHGDGAHGRQRRGSRAPLGQEAPQDESDREGTRGGHLAGGPQRQRGGATWAEHGVRHGGRGLVQGQSSRTVHARRGTDQAGAHGVQRRGGPSLYDRQRRR

SEQ ID NO: 162607 - protein, 364 aa, Zea Mays
MDQELVHQAIIQRSCGALLQTTNNIQGALIKYADSVHQKETHSGCLPVVSDDLHFMEAPKVEKCETPSRSHQSFTVPDATSSSKTNDELQTSATSLANNVKDSMNENNMEALVQDEEQHQALDLEECGVSKEESFHPEKTEEPKCAKNHHVVSMEISISDECSLFQSSEGSVPSSYKIRESMNTTSVEKSPKTEATIHATRKKLPKSDNSELELPSLAQWLKPPNPKKTFRDEAMAGDRSHSGKSSDEDRPIIGMVAAHWKDKVPLPANFTSKLRDGNGIPNSTNKYKEDQKVSWHATPFEERLEKALSEEKLLSERSCSSGKTSQFLGVEGEESDMAESNRLYTTAYACQFSSASHEPQKLSV

SEQ ID NO: 162608 - protein, 1091 aa, Zea Mays
MVDRAAARAQAVSSDPPPPALLEPDPRLSQPGAADGQEVASAGATAGPPSLPQASDAEEDALASPAGQPGERCRAMMEVVAKDGAWKVTKLVVEHCHELQVAPGHVAVTVPALGMEFDSVDDAKGFYYGYGEQVGFKARMGSNRRSVGDGEKILQRFLCWKGNYANRSRCKDSDAGKETDEVLEGLSAAAGKRKREPYKTRSRNPGRSTEVIEVEKGVGLGGAGNGLELDNGRRSRRGRSKKAEVEHGEDSVVGFEAEEVAKAVSDADEEEDEGDEDQEAAEQEVEVEVKEQRARGRPRKAVMEDNALQARVLRELGVRALQYNNEERKKILNKYRSKRQSRSVSSRPTKISSRQALAERRKRGNGGRFLSSEEQPLPSERRSKRLKKQNLKMQKAESKEDETMEAEPDPEIDVVPGPGGEPKVGMVFLNEDKAYEFYANYAETAGFSVRKGWLDKTAKNVTKSRAYVCSKEGFRPRSASIESKKPSLEARTGCQAHMTIKITASTKYVVTEFVADHNHDLETPLVDIQILKSEKLLAKVQQPPDPPKVVLIPNEYKNYTRTKRTKNMQLGDTQAICEYLQRMKGENPSFFYAIQVDEDDMFTNVFWADAKSIMDYNYFGDVVCVDTRYCTSDYGRPLLLFTGVNHHNQLIIFGSALIYDDSAQSFRWLFETFKSAMSGKQPKTVLTDQSAALSDAVSSWPGTIHRFSLLHLYLNATKISRDTLQGLETFASDFSRWLYEYEEDNFYSSWEILSEKYNIKDNEWFCKLYEDRERWALPYGRDTFCADIATTLRRDNTNTILTDLIKPEIDLQNFFNNYDKFLEEKRLAEQQADYLGAQITQRVAPLHLLWQAANLYTPTLFEMFRMEYEQISKCVVYSCGEIGPISEYQVTVKDRPQGQFVRFDSTECMVVCSCKKFEFMGLLCCHVLKILDLRNIKELPRHYILKRWRKDAQSESPENYGFAAIDEDPKFSLSKRYNALYRNLYKIAAKASESVEAYAFLENQYEQLVEQVEVLLQAKLHDKSSLSTVLKGNQPNMLNSEVNSSEHRRATGKKIKNVEVRRQQQSLDPNKKKKGRQGLNLPRYQMISKII

SEQ ID NO: 162609 - protein, 850 aa, Zea Mays
MEVDFCQVKNSRSLLLCYLMNWLKFFQSLPSERRSKRLKKQNLKMQKAESKEDETMEAEPDPEIDVVPGPGGEPKVGMVFLNEDKAYEFYANYAETAGFSVRKGWLDKTAKNVTKSRAYVCSKEGFRPRSASIESKKPSLEARTGCQAHMTIKITASTKYVVTEFVADHNHDLETPLVDIQILKSEKLLAKVQQPPDPPKVVLIPNEYKNYTRTKRTKNMQLGDTQAICEYLQRMKGENPSFFYAIQVDEDDMFTNVFWADAKSIMDYNYFGDVVCVDTRYCTSDYGRPLLLFTGVNHHNQLIIFGSALIYDDSAQSFRWLFETFKSAMSGKQPKTVLTDQSAALSDAVSSWPGTIHRFSLLHLYLNATKISRDTLQGLETFASDFSRWLYEYEEDNFYSSWEILSEKYNIKDNEWFCKLYEDRERWALPYGRDTFCADIATTLRRDNTNTILTDLIKPEIDLQNFFNNYDKFLEEKRLAEQQADYLGAQITQRVAPLHLLWQAANLYTPTLFEMFRMEYEQISKCVVYSCGEIGPISEYQVTVKDRPQGQFVRFDSTECMVVCSCKKFEFMGLLCCHVLKILDLRNIKELPRHYILKRWRKDAQSESPENYGFAAIDEDPKFSLSKRYNALYRNLYKIAAKASESVEAYAFLENQYEQLVEQVEVLLQAKLHDKSSLSTVLKGNQPNMLNSEVNSSEHRRATGKKIKNVEVRRQQQSLDPNKKKKGRQVLLEPEIEIPLRVEPPTVSNDIQNHLRTTNQFLAPSHMMQAPYVAQQFGLGSLQGFPGMSPFGQIQEPTPLQQPHLQPPSFHSGPQITQQSSAWPPDHGSRPVHHSSLGFPVTYSILLFGC

SEQ ID NO: 162610 - protein, 62 aa, Zea Mays
MCDFSRRSLCNYWSLHPRLSPLPPSRTLAPAATTADLEDATARPPVHSASRTGEAVKKHCRR

SEQ ID NO: 162611 - protein, 100 aa, Zea Mays
MHPGAPPAAELASAGEAGGDYICDVGDISAGDREHSEAAPEAEHGQPAIDDDTSYFHYYPLATVLGCTAETRSTVYCDGSFTTFGAGGYEVLISGTWVAF

SEQ ID NO: 162612 - protein, 286 aa, Zea Mays
MDGNARSAATNQKKPVVADDDLVELLWHNGSVVAQPQAHQRPAPTYDPDRPGTSGLTGEETAAWFPDTLDDALEKDLYTQLWYSTIADAAPQHEGTLPGPTSQPSPSPPVGSSGVESSWAGDICSTFCGSNQVLRTPARIRGKDAALQSELPSNTGAHDGTSSSGGSGSNYGGFGLPSDSVHVQKRKGRCRDDSDSPSEDAECEEASEETKPSRRYGTKRRTRAAEVHNLSERRRRDRINEKMRALQELIPHCNKTDKASILDETIEYLKSLQMQVQVSSYSYLKS

SEQ ID NO: 162613 - protein, 229 aa, Zea Mays
MDGNARSAATNQKKPVVADDDLVELLWHNGSVVAQPQAHQRPAPTYDPDRPGTSGLTGEETAAWFPDTLDDALEKDLYTQLWYSTIADAAPQHEGTLPGPTSQPSPSPPVGSSGVESSWAGDICSTFCGSNQVLRTPARIRGKDAALQSELPSNTGAHDGTSSSGGSGSNYGGFGLPSDSVHVQKRKGRCRDDSDSPSEVFLGLLCSSFLEIGMLEWNIIDEEIAGCRV

SEQ ID NO: 162614 - protein, 415 aa, Zea Mays
MRGRRQRIRRSPSSRTTTSWSCCGTTGASSRSPRRTRGRRPPTTPTARAPAASPAKRPPRGSRTPSTTRWRRTCTRSSGTAPSPTPPRSTRARSRALPRSLRLRRPLGAAASSRAGLATSARPSAEATRCSGRRQGSGGRTRHCSRSCRAIPARTTAHRHPAGLEATMGDSGCPVTASMYRRGRGGVETTQIDAECEEASEETKPSRRYGTKRRTRAAEVHNLSERRRRDRINEKMRALQELIPHCNKTDKASILDETIEYLKSLQMQVQIMWMTSGMAPMMFPGVHQFIPQMALGMNPGCIPAAQGLSQMPRLPYMNHTLPNHIHLNSSPAMNLMNPLNAANQVQIGHLRDASSHLLHLDGGRAAVVPQVPGPGPHVHGHQIAQAEEHNKILEVAASTVIPTSKAGQPPTLHRV

SEQ ID NO: 162615 - protein, 362 aa, Zea Mays
MSRVNGVTDALSIGPSAGYILFLVIVHILLFFTAYDRSYTLLAIQKVTLLCSACKAPRTDGGDDSQGSSARARQQQHAAVLRSESGEKTLFSGHSSRSPDEMDGNARSAATNQKKPVVADDDLVELLWHNGSVVAQPQAHQRPAPTYDPDRPGTSGLTGEETAAWFPDTLDDALEKDLYTQLWYSTIADAAPQHEGTLPGPTSQPSPSPPVGSSGVESSWAGDICSTFCGSNQVLRTPARIRGKDAALQSELPSNTGAHDGTSSSGGSGSNYGGFGLPSDSVHVQKRKGRCRDDSDSPSEDAECEEASEETKPSRRYGTKRRTRAAEVHNLSERVRSESDCASNQSLFSGRQLVGKLFLQQY

SEQ ID NO: 162616 - protein, 197 aa, Zea Mays
MVGTANANLQERAASVYADGGGAANGMGTLTVGTDGIGGKATLGTTDGTTAGIGGRVSLGSTDGMAGIGGSGTATLGAAGMGGSVICGTVTAGTAGMGGSATCGTATHAGRARGHRAPDDAAAHASGSQGVRAVAANARRPVRAAQADPATDARCRSICRPQGGLAADAVSPYRAHAVRGTDSIGVDARAPAGLRSP

SEQ ID NO: 162617 - protein, 176 aa, Zea Mays
MLCASPGHALRQLNDANGGGLEFSLGSKAAAAGAKTEPLDPSLSDDYENDTSHVEFEPELGRATAVPAATTVTVTAAAGPTTEPLTSRNAAAAAGSHSMRWWLPPSTLPSFPLFPTPGAGGMPAIPGLPLPGMPFHPIGGWGAPAPPAPSQPAPSAAEAAASTNANDPNTRGGGVN

SEQ ID NO: 162618 - protein, 175 aa, Zea Mays
MEGKPARSVDLAEHEKEAIKHLYLLTMKPVIYVANVTESDLAEPDSNSHVKEVAKAASDLQSGMVTISAQVEAELAELPLEERVEYLKSLGVAESGLGNLVKATYNLLGLRTYFTTGDKETKAWTILSGMTAPQAAGVIHSDFQKGFIRAETVSYDDFVAAGSLGVAREKGLWFL

SEQ ID NO: 162619 - protein, 204 aa, Zea Mays
MTTVSRALGSAFAGFTRAPAVAQTATTLPSPYGSSALHQHWRWSRACRTRRFSSGRAARISMSLRAGIVGLPNVGKSTLFNAIVENGKAQAANFPFCTISPNVGVVAIPDPRLQVLSKLSKSQQTVPTSIELVDIAGLVKGASKGEGLGNQFLSNIREVDSILQVVRCFEDDDIVHVNGKVDPRSDIDVINLELIFSDLEQRRG

SEQ ID NO: 162620 - protein, 223 aa, Zea Mays
MISVGFHPYLIGTPTCTCVLRGSRAISSIHPAALVSGNRTPNRVPAPPTNYSPALPMTTVSRALGSAFAGFTRAPAVAQTATTLPSPYGSSALHQHWRWSRACRTRRFSSGRAARISMSLRAGIVGLPNVGKSTLFNAIVENGKAQAANFPFCTISPNVGVVAIPDPRLQVLSKLSKSQQTVPTSIELVDIAGLVKGASKGEVPVLPLSSINLQDTSNSAEQM

SEQ ID NO: 162621 - protein, 466 aa, Zea Mays
MISVGFHPYLIGTPTCTCVLRGSRAISSIHPAALVSGNRTPNRVPAPPTNYSPALPMTTVSRALGSAFAGFTRAPAVAQTATTLPSPYGSSALHQHWRWSRACRTRRFSSGRAARISMSLRAGIVGLPNVGKSTLFNAIVENGKAQAANFPFCTISPNVGVVAIPDPRLQVLSKLSKSQQTVPTSIELVDIAGLVKGASKGEGLGNQFLSNIREVDSILQVVRCFEDDDIVHVNGKVDPRSDIDVINLELIFSDLEQEQAEKSGLEKIQQALMEGKPARSVDLAEHEKEAIKHLYLLTMKPVIYVANVTESDLAEPDSNSHVKEVAKAASDLQSGMVTISAQVEAELAELPLEERVEYLKSLGVAESGLGNLVKATYNLLGLRTYFTTGDKETKAWTILSGMTAPQAAGVIHSDFQKGFIRAETVSYDDFVAAGSLGVAREKGLLRLEGKDYVVQEGDVMLFRFNV

SEQ ID NO: 162622 - protein, 204 aa, Zea Mays
MVVQEFTVDLNKPLVFQVGHLEERYQEWVHQPIVSKEGPRFFGNDVLEDVAMMALFGIFIWTLIEYTLHRFLFHIETKTYWWNTAHYLLHGCHHKHPMDSLRLVFPPTATAILCFPFWNLVAFFATPSTTPALFGGGLLGYVMYDCTHYYLHHGQPSKDPAKHLKRYHLNHHFRIQDKGFGITSSLWDAVFGTLPPSMTSGKKN

SEQ ID NO: 162623 - protein, 351 aa, Zea Mays
MDCTMMGNLNFPNAAQGPTIMWAPIQTGNTSSKLTMLPASQSAMYWNHYMNFVRNPFADSFLGSNPSTPLQGSNTVPSIPVKLESDAEHSVQDINSPVKNPAPVNKPKKTKEQNFTAPEDLILCTTWLQISSDPIVHTGQRKEGLWAQIEKRYNEQRAKFHCRLNRALSSRWDKIRADVNFQGGYIVCTRREQTIPFYALLASTEGGTQLGEHLSRKCISRNTWKINWIFWKHPLGRDSSKTERKKAVSSSSTEYLSRLQDLTEKQLQRCIEKGEKKEKCTEQDRELEKKRLELEAKLSIRERELKLEELQSAKQQLQMLQSTSEDEVDPEVWIMMKEHKKRLQQFIFSFQ

SEQ ID NO: 162624 - protein, 383 aa, Zea Mays
MPKILRRCQTIQVVSNFPPPLIWPRGFVHQQPMDCTMMGNLNFPNAAQGPTIMWAPIQTGNTSSKLTMLPASQSAMYWNHYMNFVRNPFADSFLGSNPSTPLQGSNTVPSIPVKLESDAEHSVQDINSPVKNPAPVNKPKKTKEQNFTAPEDLILCTTWLQISSDPIVHTGQRKEGLWAQIEKRYNEQRAKFHCRLNRALSSRWDKIRADVNFQGGYIVCTRREQTIPFYALLASTEGGTQLGEHLSRKCISRNTWKINWIFWKHPLGRDSSKTERKKAVSSSSTEYLSRLQDLTEKQLQRCIEKGEKKEKCTEQDRELEKKRLELEAKLSIRERELKLEELQSAKQQLQMLQSTSEDEVDPEVWIMMKEHKKRLQQFIFSFQ

SEQ ID NO: 162625 - protein, 128 aa, Zea Mays
MMGSFLAGSHEAPGTYEYKDGRRVKKYRGMGSLEAMTKGSDARYLGDTLKLKVAQGVVGAVADKGSVLRFIPYTMQAVKQGLQDLGADSLQSAHDLLRSETLRLEVRTGAAQAEGGIHGLVSYEKKAF

SEQ ID NO: 162626 - protein, 193 aa, Zea Mays
MRRGKEGGIPRATPTTRGRKGRLEKSKRRVTQLRCTTFSLERWNWETWARRSRELLTPTGSRIQRQKSTRLWGSRQEKAIDLVSSRGDDGDVIRIIQLRIVMHLMADGVVVLIVLIGEKKQMSDANHLHIIMINNKRGESSYKVPMDPAQRETVDSSFSVGHSRCLHCSIWSRGTHVLDAGEGDERAGHAGRP

SEQ ID NO: 162627 - protein, 84 aa, Zea Mays
MSDAQATGDGPRCVGCGGRVKTLFVQYSPGNIRLMKCDKCKAVADPYIECEFMIILIDLVLHKTRAYRHVLFNKLSMGSSVDKV

SEQ ID NO: 162628 - protein, 171 aa, Zea Mays
MTIYNLIPFLKCLLCSGLQGILYRSTLIHIALDTFRISFSKGNRAGGASSRSIFSTVSNCTEVVGDALLGNIVFIFMLLLGVRFFLKLSFDIIRDILFAVIISSYFKLFLFTMMVWEFPSSVIFIVEMFVLSSNVVALRVVSQFPRAHCFAVCLLAHAAKYLTQRWILGTP

SEQ ID NO: 162629 - protein, 115 aa, Zea Mays
MTIYNLIPFLKCLLCSGLQGILYRSTLIHIALDTFRISFSKGNRAGGASSRSIFSTVSNCTEVVGDALLGNIVFIFMLLLGVRFFLKLSFDIIRFGSFRHLLYSLLRCLFSHQTL

SEQ ID NO: 162630 - protein, 128 aa, Zea Mays
MTIYNLIPFLKCLLCSGLQGILYRSTLIHIALDTFRISFSKGNRAGGASSRSIFSTVSNCTEVVGDALLGNIVFIFMLLLGVRFFLKLSFDIISCLAVSKSPLFRGLLTSARSKILDPAMDPWNAMRA

SEQ ID NO: 162631 - protein, 261 aa, Zea Mays
MGSLHALRAPTPLVGSTRIGFSSGLRFCSNRVLRGLTPIGAMKSYRLSELSDTEVSGLKARPRIDFSSIFGTVNPIVEDVRVRGDAAVKHYTEKFDKVMLDDVVVCVSDLPDAELDPAVKEAFDVAYDNIYAFHVSQKIPEKTVENMKGVRCKRITRCIGSVGLYVPGGTAVLPSTALMLAVPAQIAGCKTIVLATPPSRDGSICKEVLYCAKKAGVTHILKAGGAQAISAMAWGTASCPKAEKIFGPGNQYVTAAKMILQ

SEQ ID NO: 162632 - protein, 273 aa, Zea Mays
MEMLTHQVLQHFFMISCIGCALSFNHITFANFITMSIQAEKIFGPGNQYVTAAKMILQNSEAMVSIDMPAGPSEVLVIADKYANPVHVAADLLSQAEHGPDSQVVLVVAGDGVDLGAIEAEVSKQCNALPRGEFASKALSHSFTVFAKDMVEAISFSNLYAPEHLIINVKDAEQWEEFIENAGSVFLGQWTPESVGDYASGTNHVLPTYGYARMYSGVSLNSFLKYITVQSLTEEGLRKLGPYVAKMAEVEGLEAHKRAVTLRLQEVEANVTV

SEQ ID NO: 162633 - protein, 248 aa, Zea Mays
MLCGRRRRSLGALGLASVRGSAFAPTESSESYRLSELSDTEVSGLKARPRIDFSSIFGTVNPIVEDVRVRGDAAVKHYTEKFDKVMLDDVVVCVSDLPDAELDPAVKEAFDVAYDNIYAFHVSQKIPEKTVENMKGVRCKRITRCIGSVGLYVPGGTAVLPSTALMLAVPAQIAGCKTIVLATPPSRDGSICKEVLYCAKKAGVTHILKAGGAQAISAMAWGTASCPKAEKIFGPGNQYVTAAKMILQ

SEQ ID NO: 162634 - protein, 211 aa, Zea Mays
MVSIDMPAGPSEVLVIADKYANPVHVAADLLSQAEHGPDSQVVLVVAGDGVDLGAIEAEVSKQCNALPRGEFASKALSHSFTVFAKDMVEAISFSNLYAPEHLIINVKDAEQWEEFIENAGSVFLGQWTPESVGDYASGTNHVLPTYGYARMYSGVSLNSFLKYITVQSLTEEGLRKLGPYVAKMAEVEGLEAHKRAVTLRLQEVEANVTV

SEQ ID NO: 162635 - protein, 694 aa, Zea Mays
MSSSSPDNCSSSSEWPDRAAASRSNRYLFDANAQARCAGYLDLMRLEVDAQLGRLRGGVTGLESYALPGNGRAIGGAHLGMSLDVMLIEIDERFNTLKLLMGSVFRQAKEMLGSVNSSVSDLQSENELQLEVFGAIIGECVSGLQEELERKLYEQISITNTMGRNWKEAITQFAAMREDLGALCKLLLPLAPEAHISNGKNESPGSKSNRWKYNFFGKKSREDRSPRAEDSKSFRKQKSFGAKDVISEKSDFHHLNGMTREQVITYFKSEISKMKRMHESALQEKTEELFRLKREKGSHSLKNDIEFEPLRKKIPELVLRMDQIISKNIKVPAICMTHDELDERCRLMSRIDALFYENQHFRGLLADRMKDVKALSSQLSEASTELSMQMLSEEELLRQIDKVREDCEDLRIECDVREGMYQTVTKHLLDDYKDSMDGAALNLSAKLSSLESAVSEKDKALCIYNEENHRLKEKLAELEKERLIHGDQEVPEAIKQDSTEIVLRDIEVEPCTSPRRSNVNNSRYDELVKLDSSLEQTSCVLKEMNNKNMDRSSSLSRNEQEKQLECILVSIMKLSKDFVEIEKKMSAERTENRSEELSDHCNHMVRQAMVLTKIGLWYKQMIEARRSELQKAEAKVMVLGDKITAQLSLLRKIYLALDHYSPTLHQHPGLLDAFMKTCKLVADLRSKQNEGDAT

SEQ ID NO: 162636 - protein, 746 aa, Zea Mays
MEAVQTALSERTNPLLNRSSGPSVVTRLQPDAGNGAGFYDGAYSFLDTTKACATRFSSGSVTSDDSPAVTPRLLSLMSSSSPDNCSSSSEWPDRAAASRSNRYLFDANAQARCAGYLDLMRLEVDAQLGRLRGGVTGLESYALPGNGRAIGGAHLGMSLDVMLIEIDERFNTLKLLMGSVFRQAKEMLGSVNSSVSDLQSENELQLEVFGAIIGECVSGLQEELERKLYEQISITNTMGRNWKEAITQFAAMREDLGALCKLLLPLAPEAHISNGKNESPGSKSNRWKYNFFGKKSREDRSPRAEDSKSFRKQKSFGAKDVISEKSDFHHLNGMTREQVITYFKSEISKMKRMHESALQEKTEELFRLKREKGSHSLKNDIEFEPLRKKIPELVLRMDQIISKNIKVPAICMTHDELDERCRLMSRIDALFYENQHFRGLLADRMKDVKALSSQLSEASTELSMQMLSEEELLRQIDKVREDCEDLRIECDVREGMYQTVTKHLLDDYKDSMDGAALNLSAKLSSLESAVSEKDKALCIYNEENHRLKEKLAELEKERLIHGDQEVPEAIKQDSTEIVLRDIEVEPCTSPRRSNVNNSRYDELVKLDSSLEQTSCVLKEMNNKNMDRSSSLSRNEQEKQLECILVSIMKLSKDFVEIEKKMSAERTENRSEELSDHCNHMVRQAMVLTKIGLWYKQMIEARRSELQKAEAKVMVLGDKITAQLSLLRKIYLALDHYSPTLHQHPGI

SEQ ID NO: 162637 - protein, 125 aa, Zea Mays
MVERDIQTDTVRKPGSHTRNLLRVKRGIDMVKVLFEQILVTEGNSLRDAASVAYAQVFAPHHGWAIRKAVSAGMYALPSKSQLLKKLNEDEESAKVQMQNFVRSSAPVICYVDDLFTSRNLGIDW

SEQ ID NO: 162638 - protein, 143 aa, Zea Mays
MVVDDLVEASKSISTLPSMVERDIQTDTVRKPGSHTRNLLRVKRGIDMVKVLFEQILVTEGNSLRDAASVAYAQVFAPHHGWAIRKAVSAGMYALPSKSQLLKKLNEDEESAKVQMQNFVRSSAPVICYVDDLFTSRNLGIDW

SEQ ID NO: 162639 - protein, 184 aa, Zea Mays
MNALKHRKASRQHQTFLLKILQKNKKGEGKNSRLLPRACQHPRSASSPKAAAMGSSQADKPLRRIAVSFEELAAVAKQQPAVPMDAGAFSRACSNVSVLFGCLGIAFKFAEMDYVAKVDDLVEASKSISTLPSMVERDIQTDTVRKPGSHTRNLLRVKRGIDMVKVLFEQILVTESLLLTMDGQ

SEQ ID NO: 162640 - protein, 54 aa, Zea Mays
MEAWMSFRPTPGNGIGKWKSSWLERARTLEEQLNIFISKENPVWPFNPQDSNGV

SEQ ID NO: 162641 - protein, 616 aa, Zea Mays
MRSPLLDCNLCGATVRMRDFRPVLCPSRFSPNNIVVPGTGRKLTLTHGVSAASGINEWVTDGVERGQDEGRDEAATNEGKPLSLVGVDLNLTMAGGLPSPQSAMPAMSERFNNGGMGRDLMIGQPTGSEVGDCETSYESRGPSSRKRNLEEGGSTADNPQDRLQHADSIQGNFIDRDGEEVDDAAQDSDVPNKKSRGFDLFDAYRPSSGAGPSRNLSFGPHEDAGMFSHSRAIDLAAVERPTARDSLRASSVIAMHTIHTSEEDSMESVEYYPGDGNDIDMPSSSTQRNIEMNDALDLNYSNQAQQSANAHAGAGSDAREIGGSSTNEGEEVINAETVPPFGRDQLSLGISGGSVGMGASHEAEIHGNAGSLHRTESVVGDAEPIAELTETMGQTGESAPGPGLMDEFVPEVDRDEPHGDSQDTVSRSVGQADSGSKIYGYTKADSVESGEKIGHATGNGSSMRPSLSCNAGMCAGFDLSKDDVTHTGKILTTDDALMGLDYDPGNGLGATNGENDYESGLLEFDPVKHHNTYCPWVNGNVAAACCNNIGSSSSSSAPSGWQLTIDAVDTYQSLGQAQNQIMQSDSAASLYMQDDQITHNRKVGRRPSVSRSFGKC

SEQ ID NO: 162642 - protein, 915 aa, Zea Mays
MREEVRSSSGAVAETPMAVARSSSPPHTPVASFDAAGTAMDSAPSCRPWERGDLLRRLATFKPSTWASKPKAASSLACAQRGWVNVDMDKIECESCGTHLIFNALTSWSPVEVANAGESFAEQLDAAHQNSCPWRGNNCADSLVQLHLTQSALIGGFKDRCDGLLQFTSLPVIAPSAIENMKLTRSVQIDHLLSQSITFLSGILGCRAESTAGIDIHQDFSCSYSQAQKLISLCGWEPRWLPNVQDCEENSTHSAKNLPSVGPDERLYPHFVEHNKNSFSASAKKDKGKGKLPVGDSGCSMRSPLLDCNLCGATVRMRDFRPVLCPSRFSPNNIVVPGTGRKLTLTHGVSAASGINEWVTDGVERGQDEGRDEAATNEGKPLSLVGVDLNLTMAGGLPSPQSAMPAMSERFNNGGMGRDLMIGQPTGSEVGDCETSYESRGPSSRKRNLEEGGSTADNPQDRLQHADSIQGNFIDRDGEEVDDAAQDSDVPNKKSRGFDLFDAYRPSSGAGPSRNLSFGPHEDAGMFSHSRAIDLAAVERPTARDSLRASSVIAMHTIHTSEEDSMESVEYYPGDGNDIDMPSSSTQRNIEMNDALDLNYSNQAQQSANAHAGAGSDAREIGGSSTNEGEEVINAETVPPFGRDQLSLGISGGSVGMGASHEAEIHGNAGSLHRTESVVGDAEPIAELTETMGQTGESAPGPGLMDEFVPEVDRDEPHGDSQDTVSRSVGQADSGSKIYGYTKADSVESGEKIGHATGNGSSMRPSLSCNAGMCAGFDLSKDDVTHTGKILTTDDALMGLDYDPGNGLGATNGENDYESGLLEFDPVKHHNTYCPWVNGNVAAACCNNIGSSSSSSAPSGWQLTIDAVDTYQSLGQAQNQIMQSDSAASLYMDDQITHNRKVGRRPSVSRSFGKC

SEQ ID NO: 162643 - protein, 615 aa, Zea Mays
MRSPLLDCNLCGATVRMRDFRPVLCPSRFSPNNIVVPGTGRKLTLTHGVSAASGINEWVTDGVERGQDEGRDEAATNEGKPLSLVGVDLNLTMAGGLPSPQSAMPAMSERFNNGGMGRDLMIGQPTGSEVGDCETSYESRGPSSRKRNLEEGGSTADNPQDRLQHADSIQGNFIDRDGEEVDDAAQDSDVPNKKSRGFDLFDAYRPSSGAGPSRNLSFGPHEDAGMFSHSRAIDLAAVERPTARDSLRASSVIAMHTIHTSEEDSMESVEYYPGDGNDIDMPSSSTQRNIEMNDALDLNYSNQAQQSANAHAGAGSDAREIGGSSTNEGEEVINAETVPPFGRDQLSLGISGGSVGMGASHEAEIHGNAGSLHRTESVVGDAEPIAELTETMGQTGESAPGPGLMDEFVPEVDRDEPHGDSQDTVSRSVGQADSGSKIYGYTKADSVESGEKIGHATGNGSSMRPSLSCNAGMCAGFDLSKDDVTHTGKILTTDDALMGLDYDPGNGLGATNGENDYESGLLEFDPVKHHNTYCPWVNGNVAAACCNNIGSSSSSSAPSGWQLTIDAVDTYQSLGQAQNQIMQSDSAASLYMDDQITHNRKVGRRPSVSRSFGKC

SEQ ID NO: 162644 - protein, 958 aa, Zea Mays
MREEVRSSSGAVAETPMAVARSSSPPHTPVASSVGASSPAMQTNVASIDWLGGKQASRVDSSSQVAAHAYHPSHSFDAAGTAMDSAPSCRPWERGDLLRRLATFKPSTWASKPKAASSLACAQRGWVNVDMDKIECESCGTHLIFNALTSWSPVEVANAGESFAEQLDAAHQNSCPWRGNNCADSLVQLHLTQSALIGGFKDRCDGLLQFTSLPVIAPSAIENMKLTRSVQIDHLLSQSITFLSGILGCRAESTAGIDIHQDFSCSYSQAQKLISLCGWEPRWLPNVQDCEENSTHSAKNLPSVGPDERLYPHFVEHNKNSFSASAKKDKGKGKLPVGDSGCSMRSPLLDCNLCGATVRMRDFRPVLCPSRFSPNNIVVPGTGRKLTLTHGVSAASGINEWVTDGVERGQDEGRDEAATNEGKPLSLVGVDLNLTMAGGLPSPQSAMPAMSERFNNGGMGRDLMIGQPTGSEVGDCETSYESRGPSSRKRNLEEGGSTADNPQDRLQHADSIQGNFIDRDGEEVDDAAQDSDVPNKKSRGFDLFDAYRPSSGAGPSRNLSFGPHEDAGMFSHSRAIDLAAVERPTARDSLRASSVIAMHTIHTSEEDSMESVEYYPGDGNDIDMPSSSTQRNIEMNDALDLNYSNQAQQSANAHAGAGSDAREIGGSSTNEGEEVINAETVPPFGRDQLSLGISGGSVGMGASHEAEIHGNAGSLHRTESVVGDAEPIAELTETMGQTGESAPGPGLMDEFVPEVDRDEPHGDSQDTVSRSVGQADSGSKIYGYTKADSVESGEKIGHATGNGSSMRPSLSCNAGMCAGFDLSKDDVTHTGKILTTDDALMGLDYDPGNGLGATNGENDYESGLLEFDPVKHHNTYCPWVNGNVAAACCNNIGSSSSSSAPSGWQLTIDAVDTYQSLGQAQNQIMQSDSAASLYMDDQITHNRKVGRRPSVSRSFGKC

SEQ ID NO: 162645 - protein, 57 aa, Zea Mays
MAVDTTGQSGPEARVVRLTDGASIGTDSPRINRIRRLKLLSPYVFSSLIPRELLENA

SEQ ID NO: 162646 - protein, 129 aa, Zea Mays
MPARAQTHATPTALLLSSFLRARHLPLCCAVPVPPAVVTYVRRPATGTGGAGRGGAGMSSLCMLARRGARTANQFTDAIGVQMAIYFLFGPRPILLGSCFKKQVDVQQNPFSTQRVFFIGYYLFITIFT

SEQ ID NO: 162647 - protein, 172 aa, Zea Mays
MVVHSETSATDMLCPCSAGTCLILTTKTGKNVGRQFFCCPLNQGGGGGSCGFFKWCDELQPRVGAPLQASAQYQADSMPSIQNPSQRSSSSCFKCGQENHWARDCPNQPSDPYPDKGGRPVAPAGSPGACYNCGRSGHWSRDCPTSNSGGGGTGTSRARSSSALSSWNSQRY

SEQ ID NO: 162648 - protein, 249 aa, Zea Mays
MSVSDGDDDEAFLIALDAAEAAALDSSKRRRLSTTSSSPTPSTSPAATEGPYLAALKGSHSSTWKQQLQDLGYAHKRPDGSKSLAPGTGASGSCFKCGDPGHWARECPQSVPNTGGGGQIGGGGGGGGGGGGGYVNAGVEVEDKACPCGVGSCLVLTSNTPKNPGRKFYKCPMRDGGCNFFEWCDAPSPAPANARNNMVVHSETSATDMLCPCSAGTCLILTTKTGKNVGRQFFCCPLNQVNSGFTNVT

SEQ ID NO: 162649 - protein, 358 aa, Zea Mays
MGISARWLKSLVGLRKVGRQQQQRRKDDADVGRMARRARRALKGLVRLQALVRGHIVRKRAATTLRCMQALVRVQARVRARRVRMALENQTDRQNTSPEHTIEARVREIEDGWCDSIGSVGDIQAKLLKRQEAAAKRERAMAYALAHQWQASSRQPTAFEPDKNSWGWNWLERWMAVRPWESRFLGTYGTDGIFVVNETRQPDRSATKTPYRKPVKKHDSTLQSNMLNQKVFPSNSEGGGSSTNRSSGLVSTKSRLKVLPREGSEEASSHPSVIVRSTSNPKERISSINSKERTGDLDFQVHKRSSLPGIGPEAGKHLTKKGMVNRSLKATKDSQILGSRHHLASSIDPVPTRVELET

SEQ ID NO: 162650 - protein, 291 aa, Zea Mays
MQALVRVQARVRARRVRMALENQTDRQNTSPEHTIEARVREIEDGWCDSIGSVGDIQAKLLKRQEAAAKRERAMAYALAHQWQASSRQPTAFEPDKNSWGWNWLERWMAVRPWESRFLGTYGTDGIFVVNETRQPDRSATKTPYRKPVKKHDSTLQSNMLNQKVFPSNSEGGGSSTNRSSGLVSTKSRLKVLPREGSEEASSHPSVIVRSTSNPKERISSINSKERTGDLDFQVHKRSSLPGIGPEAGKHLTKKGMVNRSLKATKDSQILGSRHHLASSIDPVPTRVELET

SEQ ID NO: 162651 - protein, 406 aa, Zea Mays
MKTDVADQFHFQIQHSQDDNSIAAQEIPEVSYGNDPPEDDSNVPSCFEPARSSAHMPFCQTEEAQKEIWAATIIQTAFRAFLARRARRALKGLVRLQALVRGHIVRKRAATTLRCMQALVRVQARVRARRVRMALENQTDRQNTSPEHTIEARVREIEDGWCDSIGSVGDIQAKLLKRQEAAAKRERAMAYALAHQWQASSRQPTAFEPDKNSWGWNWLERWMAVRPWESRFLGTYGTDGIFVVNETRQPDRSATKTPYRKPVKKHDSTLQSNMLNQKVFPSNSEGGGSSTNRSSGLVSTKSRLKVLPREGSEEASSHPSVIVRSTSNPKERISSINSKERTGDLDFQVHKRSSLPGIGPEAGKHLTKKGMVNRSLKATKDSQILGSRHHLASSIDPVPTRVELET

SEQ ID NO: 162652 - protein, 1235 aa, Zea Mays
MSIFSALAKADKVASRPTPPTGFSKLTTSEAEKAVSGNLCRCTGYRPIVDACKSFAADVDLEDLGLNCFWRKGDEPATVSKLPGYSSAAVCTFPEFLKSEIKSSRENADGAAVAVSSDGWYHPQSIEELHRLFDSYWFDESSVKIVAANTGSGVYKDQDLYDKYIDIKGIPELSVINSSVKGIELGSVVSISTAIEVLSDGNLIFRKIADHLSKVASPFVRNTATIGGNIIMAQRLPFESDIATVLLAAGTTVTIQTASKRLCLTLEEFLQQSPCDSRTLLMSIFIPKWDSDGITFETFRAAPRPFGNAASYVNAALLARTSTDAASGKNIMEDICLVFGAYGADHAIRASKVEDFLKGKSLSSSVILKAVQLLKETVSPPEGTTHPEYRVSLAVSFLFTFLSSLTNSMNETAKVNVINGSLTNRTTNISGGYSLKENLEVDRNYLPIHSRQEMVFGDEYKPVGKPIKKVGAELQASGEAVYVDDIPVPKGCLYGAFIYSTRPHAHVKGINFKSSLASQKVITVITAKDIPRGGQNIGSSFPMLGEEVLFADQVVEFAGQNIGIVISETQRYAYMAAKQAVVEYSTENLQPPILTIQDAIQQSSYFQIPTFLSPKPVGDYNQGVSKADHTLSAEVKLESQYYFYMETQVALAIPDEDNCITIYSSTQFVEITQDVVARCLGIPLHNVRVITRRVGGGFGGKAMKAIHIACACAVAAFKLQRPVKMYLDRKTDMIIAGGRHPMKTKYSVGFKSDGKITAVHLDLGLNAGITPDLSAILPNTIIGSFKKYNWGALAFDIKLCKTNVSPKSTMRAPGEVQGSFIAEAIVEHVASVLSVDTNTIRRKNLHDFKSLAAFYGESAGEAPTYTLATMFDKLALSPDYQHRATMVEHFNSSNKWKKRGISCVPITYEVSLRAAPGKVSIMNDGSIAVEIGGVEIGQGLWTKVKQMTAFGLGQLCADGGECLLDKVRIIQVDSLSMIQGGFTGGSTTSENSCEAVRHSCLRLVERLKPVKESLEAKGATMEWGALIAQASMASVNLSAHAYWNPTSRSYLNYGAGISEVEVDVLTGATTILRSDLIHDCGQSLNPAVDLGQVEGAFIQGVGFFTNEEYKTNTDGMVIHDGTWTYKIPTVDTIPKQFNVELINSAGDRKRVLSSKASGEPPLLLASSVHCAMREAIRAARKEFSICTGPANSAVTFQMDVPATMPVVKELCGLDVVERYLQSVSAGPTTPRAISK

SEQ ID NO: 162653 - protein, 1047 aa, Zea Mays
MSIFSALAKADKVASRPTPPTGFSKLTTSEAEKAVSGNLCRCTGYRPIVDACKSFAADVDLEDLGLNCFWRKGDEPATVSKLPGYSSAAVCTFPEFLKSEIKSSRENADGAAVAVSSDGWYHPQSIEELHRLFDSYWFDESSVKIVAANTGSGVYKDQDLYDKYIDIKGIPELSVINSSVKGIELGSVVSISTAIEVLSDGNLIFRKIADHLSKVASPFVRNTATIGGNIIMAQRLPFESDIATVLLAAGTTVTIQTASKRLCLTLEEFLQQSPCDSRTLLMSIFIPKWDSDGITFETFRAAPRPFGNAASYVNAALLARTSTDAASGKNIMEDICLVFGAYGADHAIRASKVEDFLKGKSLSSSVILKAVQLLKETVSPPEGTTHPEYRVSLAVSFLFTFLSSLTNSMNETAKVNVINGSLTNRTTNISGGYSLKENLEVDRNYLPIHSRQEMVFGDEYKPVGKPIKKVGAELQASGEAVYVDDIPVPKGCLYGAFIYSTRPHAHVKGINFKSSLASQKVITVITAKDIPRGGQNIGSSFPMLGEEVLFADQVVEFAGQNIGIVISETQRYAYMAAKQAVVEYSTENLQPPILTIQDAIQQSSYFQIPTFLSPKPVGDYNQGVSKADHTLSAEVKLESQYYFYMETQVALAIPDEDNCITIYSSTQFVEITQDVVARCLGIPLHNVRVITRRVGGGFGGKAMKAIHIACACAVAAFKLQRPVKMYLDRKTDMIIAGGRHPMKTKYSVGFKSDGKITAVHLDLGLNAGITPDLSAILPNTIIGSFKKYNWGALAFDIKLCKTNVSPKSTMRAPGEVQGSFIAEAIVEHVASVLSVDTNTIRRKNLHDFKSLAAFYGESAGEAPTYTLATMFDKLALSPDYQHRATMVEHFNSSNKWKKRGISCVPITYEVSLRAAPGKVSIMNDGSIAVEIGGVEIGQGLWTKVKQMTAFGLGQLCADGGECLLDKVRIIQVDSLSMIQGGFTGGSTTSENSCEAVRHSCLRLVERLKPVKESLEAKGATMEWGALIAQVKIPLCYDFICCHIYQLT

SEQ ID NO: 162654 - protein, 670 aa, Zea Mays
MGKAPAAVVVAVNGQRYEATGVDPSTTLLEFLRTQTPVRGPKLGCGEGGCGACVVLISKYNPATDEATEFSASSCLTLLRSIDRCSVTTSEGIGNTKDGYHAVQQRLAGFHASQCGFCTPGICMSIFSALAKADKVASRPTPPTGFSKLTTSEAEKAVSGNLCRCTGYRPIVDACKSFAADVDLEDLGLNCFWRKGDEPATVSKLPGYSSAAVCTFPEFLKSEIKSSRENADGAAVAVSSDGWYHPQSIEELHRLFDSYWFDESSVKIVAANTGSGVYKDQDLYDKYIDIKGIPELSVINSSVKGIELGSVVSISTAIEVLSDGNLIFRKIADHLSKVASPFVRNTATIGGNIIMAQRLPFESDIATVLLAAGTTVTIQTASKRLCLTLEEFLQQSPCDSRTLLMSIFIPKWDSDGITFETFRAAPRPFGNAASYVNAALLARTSTDAASGKNIMEDICLVFGAYGADHAIRASKVEDFLKGKSLSSSVILKAVQLLKETVSPPEGTTHPEYRVSLAVSFLFTFLSSLTNSMNETAKVNVINGSLTNRTTNISGGYSLKENLEVDRNYLPIHSRQEMVFGDEYKPVGKPIKKVGAELQASGISPPMYCLAKTIILTASAYNLSSAYSAKYCIVMLLFIFSTSSVPNYRRFSISRYVVFTTYLEIIAYIYL

SEQ ID NO: 162655 - protein, 1170 aa, Zea Mays
MGKAPAAVVVAVNGQRYEATGVDPSTTLLEFLRTQTPVRGPKLGCGEGGCGACVVLISKYNPATDEATEFSASSCLTLLRSIDRCSVTTSEGIGNTKDGYHAVQQRLAGFHASQCGFCTPGICMSIFSALAKADKVASRPTPPTGFSKLTTSEAEKAVSGNLCRCTGYRPIVDACKSFAADVDLEDLGLNCFWRKGDEPATVSKLPGYSSAAVCTFPEFLKSEIKSSRENADGAAVAVSSDGWYHPQSIEELHRLFDSYWFDESSVKIVAANTGSGVYKDQDLYDKYIDIKGIPELSVINSSVKGIELGSVVSISTAIEVLSDGNLIFRKIADHLSKVASPFVRNTATIGGNIIMAQRLPFESDIATVLLAAGTTVTIQTASKRLCLTLEEFLQQSPCDSRTLLMSIFIPKWDSDGITFETFRAAPRPFGNAASYVNAALLARTSTDAASGKNIMEDICLVFGAYGADHAIRASKVEDFLKGKSLSSSVILKAVQLLKETVSPPEGTTHPEYRVSLAVSFLFTFLSSLTNSMNETAKVNVINGSLTNRTTNISGGYSLKENLEVDRNYLPIHSRQEMVFGDEYKPVGKPIKKVGAELQASGEAVYVDDIPVPKGCLYGAFIYSTRPHAHVKGINFKSSLASQKVITVITAKDIPRGGQNIGSSFPMLGEEVLFADQVVEFAGQNIGIVISETQRYAYMAAKQAVVEYSTENLQPPILTIQDAIQQSSYFQIPTFLSPKPVGDYNQGVSKADHTLSAEVKLESQYYFYMETQVALAIPDEDNCITIYSSTQFVEITQDVVARCLGIPLHNVRVITRRVGGGFGGKAMKAIHIACACAVAAFKLQRPVKMYLDRKTDMIIAGGRHPMKTKYSVGFKSDGKITAVHLDLGLNAGITPDLSAILPNTIIGSFKKYNWGALAFDIKLCKTNVSPKSTMRAPGEVQGSFIAEAIVEHVASVLSVDTNTIRRKNLHDFKSLAAFYGESAGEAPTYTLATMFDKLALSPDYQHRATMVEHFNSSNKWKKRGISCVPITYEVSLRAAPGKVSIMNDGSIAVEIGGVEIGQGLWTKVKQMTAFGLGQLCADGGECLLDKVRIIQVDSLSMIQGGFTGGSTTSENSCEAVRHSCLRLVERLKPVKESLEAKGATMEWGALIAQVKIPLCYDFICCHIYQLT

SEQ ID NO: 162656 - protein, 717 aa, Zea Mays
MVFGDEYKPVGKPIKKVGAELQASGEAVYVDDIPVPKGCLYGAFIYSTRPHAHVKGINFKSSLASQKVITVITAKDIPRGGQNIGSSFPMLGEEVLFADQVVEFAGQNIGIVISETQRYAYMAAKQAVVEYSTENLQPPILTIQDAIQQSSYFQIPTFLSPKPVGDYNQGVSKADHTLSAEVKLESQYYFYMETQVALAIPDEDNCITIYSSTQFVEITQDVVARCLGIPLHNVRVITRRVGGGFGGKAMKAIHIACACAVAAFKLQRPVKMYLDRKTDMIIAGGRHPMKTKYSVGFKSDGKITAVHLDLGLNAGITPDLSAILPNTIIGSFKKYNWGALAFDIKLCKTNVSPKSTMRAPGEVQGSFIAEAIVEHVASVLSVDTNTIRRKNLHDFKSLAAFYGESAGEAPTYTLATMFDKLALSPDYQHRATMVEHFNSSNKWKKRGISCVPITYEVSLRAAPGKVSIMNDGSIAVEIGGVEIGQGLWTKVKQMTAFGLGQLCADGGECLLDKVRIIQVDSLSMIQGGFTGGSTTSENSCEAVRHSCLRLVERLKPVKESLEAKGATMEWGALIAQASMASVNLSAHAYWNPTSRSYLNYGAGISEVEVDVLTGATTILRSDLIHDCGQSLNPAVDLGQVEGAFIQGVGFFTNEEYKTNTDGMVIHDGTWTYKIPTVDTIPKQFNVELINSAGDRKRVLSSKGKPTLQWRTQDFMAA

SEQ ID NO: 162657 - protein, 1155 aa, Zea Mays
MGKGAGAAEPSTVVLAVNGKRYEAAGVAPSTSLLEFLRSQTPVRGPKLGCGEGGCGACVVLVSKYDPATDEVTEFSASSCLTLLHSVDRCSVTTSEGIGNTRDGYHPVQQRLSGFHASQCGFCTPGMCMSIFSALVKADNKSDRPDPPAGFSKITTSEAEKAVSGNLCRCTGYRPIVDTCKSFASDVDLEDLGLNCFWKKGEEPAEVSRLPGYNSGAVCTFPEFLKSEIKSTMKQVNDVPIAASGDGWYHPKSIEELHRLFDSSWFDDSSVKIVASNTGSGVYKDQDLYDKYIDIKGIPELSVINKNDKGIELGSVVSISKAIEVLSDGNLVFRKIADHLNKVASPFVRNTATIGGNIMMAQRLPFESDVATVLLAAGSTVTVQVASKRLCFTLEEFLEQPPCDSRTLLLSIFIPEWGSDYVTFETFRAAPRPFGNAVSYVNSAFLARTSGSLLIEDICLAFGAYGVDHAIRAKKVEDFLKGKSLSSFVILEAIKLLKDTVSPSEGTTHHEYRVSLAVSFLFSFLSSLANSSSAPSNIDTPNGSYTHETGSNVDSPERHIKVDSNDLPIRSRQEMVFSDEYKPVGKPIKKVGAEIQASGEAVYVDDIPAPKDCLYGAFIYSTHPHAHVRSINFKSSLASQKVITVITAKDIPSGGENIGSSFLMQGEALFADPIAEFAGQNIGVVIAETQRYANMAAKQAVVEYSTENLQPPILTIEDAIQRNSYIQIPPFLAPKPVGDYNKGMAEADHKILSAEVKLESQYYFYMETQAALAIPDEDNCITIYSSTQMPELTQNLIARCLGIPFHNVRVISRRVGGGFGGKAMKATHTACACALAAFKLRRPVRMYLDRKTDMIMAGGRHPMKAKYSVGFKSDGKITALHLDLGINAGISPDVSPLMPRAIIGALKKYNWGTLEFDTKVCKTNVSSKSAMRAPGDVQGSFIAEAIIEHVASALALDTNTVRRKNLHDFESLEVFYGESAGEASTYSLVSMFDKLALSPEYQHRAAMIEQFNSSNKWKKRGISCVPATYEVNLRPTPGKVSIMNDGSIAVEVGGIEIGQGLWTKVKQMTAFGLGQLCPDGGECLLDKVRVIQADTLSLIQGGMTAGSTTSETSCEAVRQSCVALVERLKPIKESLEAKSNTVEWSALIAQVRIIT

SEQ ID NO: 162658 - protein, 1301 aa, Zea Mays
MGKGAGAAEPSTVVLAVNGKRYEAAGVAPSTSLLEFLRSQTPVRGPKLGCGEGGCGACVVLVSKYDPATDEVTEFSASSCLTLLHSVDRCSVTTSEGIGNTRDGYHPVQQRLSGFHASQCGFCTPGMCMSIFSALVKADNKSDRPDPPAGFSKITTSEAEKAVSGNLCRCTGYRPIVDTCKSFASDVDLEDLGLNCFWKKGEEPAEVSRLPGYNSGAVCTFPEFLKSEIKSTMKQVNDVPIAASGDGWYHPKSIEELHRLFDSSWFDDSSVKIVASNTGSGVYKDQDLYDKYIDIKGIPELSVINKNDKGIELGSVVSISKAIEVLSDGNLVFRKIADHLNKVASPFVRNTATIGGNIMMAQRLPFESDVATVLLAAGSTVTVQVASKRLCFTLEEFLEQPPCDSRTLLLSIFIPEWGSDYVTFETFRAAPRPFGNAVSYVNSAFLARTSGSLLIEDICLAFGAYGVDHAIRAKKVEDFLKGKSLSSFVILEAIKLLKDTVSPSEGTTHHEYRVSLAVSFLFSFLSSLANSSSAPSNIDTPNGSYTHETGSNVDSPERHIKVDSNDLPIRSRQEMVFSDEYKPVGKPIKKVGAEIQASGEAVYVDDIPAPKDCLYGAFIYSTHPHAHVRSINFKSSLASQKVITVITAKDIPSGGENIGSSFLMQGEALFADPIAEFAGQNIGVVIAETQRYANMAAKQAVVEYSTENLQPPILTIEDAIQRNSYIQIPPFLAPKPVGDYNKGMAEADHKILSAEVKLESQYYFYMETQAALAIPDEDNCITIYSSTQMPELTQNLIARCLGIPFHNVRVISRRVGGGFGGKAMKATHTACACALAAFKLRRPVRMYLDRKTDMIMAGGRHPMKAKYSVGFKSDGKITALHLDLGINAGISPDVSPLMPRAIIGALKKYNWGTLEFDTKVCKTNVSSKSAMRAPGDVQGSFIAEAIIEHVASALALDTNTVRRKNLHDFESLEVFYGESAGKVSIMNDGSIAVEVGGIEIGQGLWTKVKQMTAFGLGQLCPDGGECLLDKVRVIQADTLSLIQGGMTAGSTTSETSCEAVRQSCVALVERLKPIKESLEAKSNTVEWSALIAQASMASVNLSAQAYWTPDPSFKSYLNYGAGTSEVEVDILTGATTILRSDLVYDCGQSLNPAVDLGQIEGCFVQGIGFFTNEDYKTNSDGLVIHDGTWTYKIPTVDNIPKEFNVEMFNSAPDKKRVLSSKASGEPPLVLAASVHCAMREAIRAARKEFSVSTSPAKSAVTFQMDVPATMPVVKELCGLDVVERYLENVSAASAGPNTAKA

SEQ ID NO: 162659 - protein, 190 aa, Zea Mays
MDYSRPHSIEVPESDIGYHFGTLLDTLEGVDVIFSVAGEKFHAHKLVLAARSSFFRSEFFDHESDEEKNETGTGDEIKEIVIDDMDPVVFKAVLHFMYRDNLVNDDELMASSSDCSIFDSLAGKLMAAADKYELPRLRLLCESYLCKHVSVNSVATTLALADRYHAIELKSVCLKFAAENLSDALMYLQL

SEQ ID NO: 162660 - protein, 435 aa, Zea Mays
MEDEDAGLGDGGEASPPHHAAASGDRARDLAASPTSSRSVTQTVNGSHRFVIQGYSLAKGMGVGKHIASDTFTVGGYQWAIYFYPDGKNPEDNSGYVSVFIALASDGTDVRALFELTLLDQSGKGKHKVHSHFDRSLESGPYTLKYRGSMWGYKRFFRRNALEQSDFLKDDCLKINCTVGVVVSTMDYSRPHSIEVPESDIGYHFGTLLDTLEGVDVIFSVAGEKFHAHKLVLAARSSFFRSEFFDHESDEEKNETGTGDEIKEIVIDDMDPVVFKAVLHFMYRDNLVNDDELMASSSDCSIFDSLAGKLMAAADKYELPRLRLLCESYLCKHVSVNSVATTLALADRYHAIELKSVCLKFAAENLSAVIRTEGFDYLKDNCPSLQSEILRTVAGCEEQCSSGVKSQSVWAQLSDGGDTSGRRADAMNSQKGDPS

SEQ ID NO: 162661 - protein, 261 aa, Zea Mays
MLPDPLLTCNFCSHLWSRLCQWLTEIGHFLAAFPKNVKLGIPFFIPNFTLGTFGAITQFKSILPDRKTMFDISMAGPVAGAALSFSMFFVGLLLSSNPVGASDLVEVPSQLFQGSLLLGLISRATLGYRAMHAATVSIHPLVIAGWCGLTTSAFNMLPVGCLDGGRALQGAFGKDALFGFGLTTYSLLGLGVLGGPLSLPWGLYVLICQRTPEKPCLNDVSDVGSWRRAALIASVFLVVLTLIPLWDELAEELGVGLVSSF

SEQ ID NO: 162662 - protein, 269 aa, Zea Mays
MKVNMAVEPFFLRGLFFWHILILPNMPTFCMQEIGHFLAAFPKNVKLGIPFFIPNFTLGTFGAITQFKSILPDRKTMFDISMAGPVAGAALSFSMFFVGLLLSSNPVGASDLVEVPSQLFQGSLLLGLISRATLGYRAMHAATVSIHPLVIAGWCGLTTSAFNMLPVGCLDGGRALQGAFGKDALFGFGLTTYSLLGLGVLGGPLSLPWGLYVLICQRTPEKPCLNDVSDVGSWRRAALIASVFLVVLTLIPLWDELAEELGVGLVSSF

SEQ ID NO: 162663 - protein, 313 aa, Zea Mays
MTHVGDHVLVLVCLGRKFSEPGPTTLWQYVISLLLFLLTMFSCIELGIASKISSLPPEIVSYFTDPNATGPPPDMQLLLPFVESALPVAYGVLSIQLFHEIGHFLAAFPKNVKLGIPFFIPNFTLGTFGAITQFKSILPDRKTMFDISMAGPVAGAALSFSMFFVGLLLSSNPVGASDLVEVPSQLFQGSLLLGLISRATLGYRAMHAATVSIHPLVIAGWCGLTTSAFNMLPVGCLDGGRALQLGGPLSLPWGLYVLICQRTPEKPCLNDVSDVGSWRRAALIASVFLVVLTLIPLWDELAEELGVGLVSSF

SEQ ID NO: 162664 - protein, 319 aa, Zea Mays
MTHVGDHVLVLVCLGRKFSEPGPTTLWQYVISLLLFLLTMFSCIELGIASKISSLPPEIVSYFTDPNATGPPPDMQLLLPFVESALPVAYGVLSIQLFHEIGHFLAAFPKNVKLGIPFFIPNFTLGTFGAITQFKSILPDRKTMFDISMAGPVAGAALSFSMFFVGLLLSSNPVGASDLVEVPSQLFQGSLLLGLISRATLGYRAMHAATVSIHPLVIAGWCGLTTSAFNMLPVGCLDGGRALQGAFGKDALFGFGLTTYSLLGLGVRTPEKPCLNDVSDVGSWRRAALIASVFLVVLTLIPLWDELAEELGVGLVSSF

SEQ ID NO: 162665 - protein, 596 aa, Zea Mays
MATPSHLLLVVFTALLALLPGTTQLQPSQVWTLIKIQQLLNAPPMLSHWRRSTDFCGGGGGAMGPAGSAAVLCYGDTVTQLHIAGAGAPPLPRNFSIGAVVTTLSRLPDLKVLTLSGLGLWGPLPGKLGRLASLEIVNMSGNYLFGEVPRGVSRLAGLQTLVLDDNMLGGEVPAWIGALPSLAVLSLRNNTFQGAVPESLGSAPSLRSLVLASNNLSGNLPDMSRQANLQVLDVGGNSLGPAFPKLGRKVVTVVLGRNRFGGGLPAELSSFYLLERLDVSWNRFVGPFAPALLSLPSIRYLNIAGNRFTGTLSDKAPCGDNLRFVDLSLNLLMGSVPTCLRSPGRKPDTVVLVSTNCLDDSDGSQHPSPFCQNQALAVGIVPGKERKSVAGQAGFVAGVVVAILVAISAVGLIAFFAVRKAAMKRWEARAPTVSEEESSSTGYPSKMLADARYISQTLKLGALGIPSYRAFSLVELEAATNNFENSHLLGQDSHGEMYRGRLGNGTPVTIRTLKMKRSQTAQSFNRHIETISRLRHQNLVSALGHCFEYNLDESTVTQLYIVFEYVQNGNLRSRISRRASGPSRFRFAERYCCVAL

SEQ ID NO: 162666 - protein, 358 aa, Zea Mays
MNALAATSRNFKQAAKLLGLDSKLEKSLLIPFREIKVECTIPKDDGTLASYVGFRVQHDNARGPMKGGIRYHHEVDPDEVNALAQLMTWKTAVANIPYGGAKGGIGCSPGDLSISELERLTRVFTQKIHDLIGIHTDVPAPDMGTNSQTMAWILDEYSKFHGYSPAVVTGKPVDLGGSLGRDAATGRGVLFATEALLAEHGKGIAGQRFVIQGFGNVGSWAAQLISEAGGKVIAISDVTGAVKNVDGLDIVQLVKHSAENKGIKGFKGGDAIAPDSLLTEECDVLIPAALGGVINKDNANDIKAKYIIEAANHPTDPEADEILSKKGVLILPDILANSGGVTVSYFETSRGSCGTKRR

SEQ ID NO: 162667 - protein, 146 aa, Zea Mays
MCLWLNLQTLGVSISVICSSNKETFGKIILEAAILTAVVVISLTAYTFWAAKRGHDFNFLGPFLFAAIMVLMVFSLIQIFFPLGKISVMIYGGLASLIFCGYIIYDTDNVIKRYTYDEYIWAAVSLYLDVINLFLSLLQLLRAADS

SEQ ID NO: 162668 - protein, 64 aa, Zea Mays
MWYGRVCLDSPCPSHASIKPTQCKCATSFFFHLFFEPPAACTALPPALTPLLTASARCLGPLGL

SEQ ID NO: 162669 - protein, 134 aa, Zea Mays
MSRDFCAREAIICQRRKQERTQLSFFEAHITSFLFTSSDECKLPMHISPDVNLDRHQEANGGSEQEGVELELQRELGRELQDQCRRLSQQYNRTTLLLSMRCQMFMHIPVKLNRAIRSAYIQGMEIISKGRAIL

SEQ ID NO: 162670 - protein, 299 aa, Zea Mays
MHISPDVNLDRHQEANGGSEQEGVELELQRELGPEKLREKLRQECLWKGTELAHGVADALFAVSPTEDLDGPIVHLPPPAVRLPREKHVSEEAGNHLFVESCIPLHDFTYIIISHDNATVTLLSNSHVSFLQLGAGTSLPGLVAAKILVLPPYQGEGYGLGLLEAINYIAQSKNIYDVTIESPSDSLQYVRSSIDCLCLLMFDPIKPALGAIVSSLKETNLSKRAQSLRMVPPADLMETICQKLKIKKKQFLRCWEILIFLSLDSQDHKSVDNFRACIYDFMKGEILGSASRTNRKRLL

SEQ ID NO: 162671 - protein, 207 aa, Zea Mays
MSRDFCAREAIICQRRKQERTQLSFFEAHITSFLFTSSDECKLPMHISPDVNLDRHQEANGGSEQEGVELELQRELGPEKLREKLRQECLWKGTELAHGVADALFAVSPTEDLDGPIVHLPPPAVRLPREKHVSEEAGNHLFVESCIPLHDFTYIIISHDNATVTLLSNSHVSFLQLGAGTSLPGLVAAKVGADVTLTDIAQTLLFL

SEQ ID NO: 162672 - protein, 378 aa, Zea Mays
MHIFFLNQTIFYRTKEGIWKDIKEGGILDEHIVHEKEIAISDIQQTVESVQLDIKHLLEAAAAKVAEVQLEVNQLYGFAETLNSLNIIQEHDIVFKDMLHSELTGLTNTIGESYRIQDECKLPMHISPDVNLDRHQEANGGSEQEGVELELQRELGPEKLREKLRQECLWKGTELAHGVADALFAVSPTEDLDGPIVHLPPPAVRLPREKHLGAGTSLPGLVAAKILVLPPYQGEGYGLGLLEAINYIAQSKNIYDVTIESPSDSLQYVRSSIDCLCLLMFDPIKPALGAIVSSLKETNLSKRAQSLRMVPPADLMETICQKLKIKKKQFLRCWEILIFLSLDSQDHKSVDNFRACIYDFMKGEILGSASRTNRKRLL

SEQ ID NO: 162673 - protein, 271 aa, Zea Mays
MKPLWLYLYGVSSITMQGTGSLVQNKLVGAPGGGSSPHVVQNADIPVKQTTSSSSREQSDDDDMEGDAETTGNGNPVQHRLQRRKQSNRESARRSRSRKAAHLNELEAQVSQLRVENSSLLRRLADVNQKFNEAAVDNRVLKADVETLRAKVKMAEDSVKRVTGMNTLFPAVSDMSSLSMPFNGSPSDSASDAAVPIQDDLNSYFANPSEIGGSNGYMPDIASSVQEDDDFVNGAQVAGKMGSTDSLQRVASLEHLQKRMCGGPASSGSTS

SEQ ID NO: 162674 - protein, 208 aa, Zea Mays
MEGDAETTGNGNPVQHRLQRRKQSNRESARRSRSRKAAHLNELEAQVSQLRVENSSLLRRLADVNQKFNEAAVDNRVLKADVETLRAKVKMAEDSVKRVTGMNTLFPAVSDMSSLSMPFNGSPSDSASDAAVPIQDDLNSYFANPSEIGGSNGYMPDIASSVQEDDDFVNGAQVAGKMGSTDSLQRVASLEHLQKRMCGGPASSGSTS

SEQ ID NO: 162675 - protein, 264 aa, Zea Mays
MLYRFFDRLNGTGSLVQNKLVGAPGGGSSPHVVQNADIPVKQTTSSSSREQSDDDDMEGDAETTGNGNPVQHRLQRRKQSNRESARRSRSRKAAHLNELEAQVSQLRVENSSLLRRLADVNQKFNEAAVDNRVLKADVETLRAKVKMAEDSVKRVTGMNTLFPAVSDMSSLSMPFNGSPSDSASDAAVPIQDDLNSYFANPSEIGGSNGYMPDIASSVQEDDDFVNGAQVAGKMGSTDSLQRVASLEHLQKRMCGGPASSGSTS

SEQ ID NO: 162676 - protein, 293 aa, Zea Mays
MSGSPICMASGAAPPDHSPAGSSLPSVDVPHAGPLKPIGGTGSLVQNKLVGAPGGGSSPHVVQNADIPVKQTTSSSSREQSDDDDMEGDAETTGNGNPVQHRLQRRKQSNRESARRSRSRKAAHLNELEAQVSQLRVENSSLLRRLADVNQKFNEAAVDNRVLKADVETLRAKVKMAEDSVKRVTGMNTLFPAVSDMSSLSMPFNGSPSDSASDAAVPIQDDLNSYFANPSEIGGSNGYMPDIASSVQEDDDFVNGAQVAGKMGSTDSLQRVASLEHLQKRMCGGPASSGSTS

SEQ ID NO: 162677 - protein, 221 aa, Zea Mays
MERVFSVEEIPNPYWVPPHPQSAAAGAVAAPAGEAAGLMNRCPSEWYFQKFLEEAVLDSPVPVAGASRGSVGAGVEAAESKTPGAAAPAAASSSVVDPVEYNAMLKQKLEKDLAAVALWRASGAAPPDHSPAGSSLPSVDVPHAGPLKPIGGTGSLVQNKLVGAPGGGSSPHVVQNADIPVKQTTSSSSREQSDDDDMEGDAETTGNGNPVQHRLQRRYHS

SEQ ID NO: 162678 - protein, 220 aa, Zea Mays
MERVFSVEEIPNPYWVPPHPQSAAASSSVVDPVEYNAMLKQKLEKDLAAVALWRASGAAPPDHSPAGSSLPSVDVPHAGPLKPIGGTGSLVQNKLVGAPGGGSSPHVVQNADIPVKQTTSSSSREQSDDDDMEGDAETTGNGNPVQHRLQRRKQSNRESARRSRSRKAAHLNELEAQVSQLRVENSSLLRRLADVNQKFNEAAVDNRVLKADVETLRAKD

SEQ ID NO: 162679 - protein, 54 aa, Zea Mays
MPISLLSKPLALPHVSSQTMMTWKEMLRLLEMETLFNTDYREALHRQLEAGTGS

SEQ ID NO: 162680 - protein, 416 aa, Zea Mays
MERVFSVEEIPNPYWVPPHPQSAAAGAVAAPAGEAAGLMNRCPSEWYFQKFLEEAVLDSPVPVAGVSRGSVGAGVEAAERKTPGTAAAAAASSSVVDPVEYNAMLKQKLEKDLAAVALWRASGAAPPDNSPAGSSLPSVDVPHAGPLKPMGVWSGLDIGHVSGTGSLVQNKLAGAPGGGSSPHVVQNADIPVKQTTSSSSREQSDDDDMEGDAETTGNGNPVQQRLQRRKQSNRESARRSRSRKAAHLNELEAQVAQLRVENSSLLRRLADVNQKFNEAAVDNRVLKADVETLRAKVKMAEDSVKRVTGMNTLFPAVSDMSSLSMPFNGSPSDSASDAAVPIQDDLNSYFANPSEIGGSNGYMPDIASSAQEDDDFVNGAQVAGKMGSTDSLQRVASLEHLQKRMCGGPASSGSTS

SEQ ID NO: 162681 - protein, 256 aa, Zea Mays
MGGTGSLVQNKLAGAPGGGSSPHVVQNADIPVKQTTSSSSREQSDDDDMEGDAETTGNGNPVQQRLQRRKQSNRESARRSRSRKAAHLNELEAQVAQLRVENSSLLRRLADVNQKFNEAAVDNRVLKADVETLRAKVKMAEDSVKRVTGMNTLFPAVSDMSSLSMPFNGSPSDSASDAAVPIQDDLNSYFANPSEIGGSNGYMPDIASSAQEDDDFVNGAQVAGKMGSTDSLQRVASLEHLQKRMCGGPASSGSTS

SEQ ID NO: 162682 - protein, 83 aa, Zea Mays
MGEITRASRGFVYLATVNGVTGPRANVNTRVQSLIQEVKQVTDIPVAVGFGISKPEHVKQVGKTFLKKMPQKLIHIFFYSNKF

SEQ ID NO: 162683 - protein, 233 aa, Zea Mays
MEMIDAELRLGPPGSNNSDVVVTVVPPAAARKPAAPAPASAAKRPSSSVVKSDDASGTGDHDDDAAPASKAARDTPRTQLLYRARSDQLMIGLVLVNERRRVRAVGWPPVRAYRKNAFHAAAEAARRTNNKGEELQGGGGRLYVKVSMDGAPYLRKVDLRTYGGYRELRDALDALFGCFSSSSASSSSADGGCQFAVAYEDKDGDLMLAGDVPWEMFICSCKKLRIMRGSEAR

SEQ ID NO: 162684 - protein, 438 aa, Zea Mays
MQADDKLATQISLPPSCIASEIAMDFSCFQPHTGICSYLPFDSYMQHDGQYELHLHPADHHPLEVTGDYTSATFDDLGHEFFAEREIEKPIFNRTSSIGRRVGSQLPLPTIKTEVSHLIDSGLVSCKAYEINDRFLARKKTSLKKANVVKGQWTPEEDRKLVKLVEQFGLRKWSYIAQLLPARVGKQCRERWHNHLRPNIKKDIWSDEEDMVLIEAHKEVGNKWAEIAKRLPGRTENSIKNHWNATKRRQFARRRSRTSSKAPKPGTLLQSYIEGLGIVGPSDKSAAPLSEPTLSPEAPGAKSAKTGGTTLPEEHSPPSNMLDSQGVLLPSEELLAPICDELLDGMCGGLFDCTNEDAFFRVCAVDDDIDVSYIFDHAIKVDPEIDMEMMMMWDDDALACTAGPAAGTAHVETVHVKEEMDLMEMVAATQNCGEAENH

SEQ ID NO: 162685 - protein, 248 aa, Zea Mays
MHASKAGTPFLLSFVGMAEVLGWTYRPPIVAHCDRKRVLSSWAPYCRNVVPLEYQVEFSKVRSLSPRQFVERLSKDLRIKGVVAGENYRFGYKASGDATELVKLCEEFGLSAFIVRSVMDTAKRSLNGFSGAINSSDKGQVSSSRVRHALAMGDMEYVSELLGRKHRLLLMVNQHCLHEKKSIVLPNSCMLNMPPAEGLYENCDLVNGGYLGPCRVIINSDTIIIEMKDDNSLSLNPIQEVQLGIEFG

SEQ ID NO: 162686 - protein, 313 aa, Zea Mays
MKKGHSRNSPKTFSSSGHSGVRLNNEGLVNDRLLIDCGEDQDCVLGGIVALGKFDALHIGHRELAMHASKAGTPFLLSFVGMAEVLGWTYRPPIVAHCDRKRVLSSWAPYCRNVVPLEYQVEFSKVRSLSPRQFVERLSKDLRIKGVVAGENYRFGYKASGDATELVKLCEEFGLSAFIVRSVMDTAKRSLNGFSGAINSSDKGQVSSSRVRHALAMGDMEYVSELLGRKHRLLLMVNQHCLHEKKSIVLPNSCMLNMPPAEGLYENCDLVNGGYLGPCRVIINSDTIIIEMKDDNSLSLNPIQEVQLGIEFG

SEQ ID NO: 162687 - protein, 130 aa, Zea Mays
MDTAKRSLNGFSGAINSSDKGQVSSSRVRHALAMGDMEYVSELLGRKHRLLLMVNQHCLHEKKSIVLPNSCMLNMPPAEGLYENCDLVNGGYLGPCRVIINSDTIIIEMKDDNSLSLNPIQEVQLGIEFG

SEQ ID NO: 162688 - protein, 345 aa, Zea Mays
MERGAATAAAALGCALRSPSPSASPAPRWPPLHRCPRRGPPGPPRSLLPPARRFRPLDMKKGHSRNSPKTFSSSGHSGVRLNNEGLVNDRLLIDCGEDQDCVLGGIVALGKFDALHIGHRELAMHASKAGTPFLLSFVGMAEVLGWTYRPPIVAHCDRKRVLSSWAPYCRNVVPLEYQVEFSKVRSLSPRQFVERLSKDLRIKGVVAGENYRFGYKASGDATELVKLCAINSSDKGQVSSSRVRHALAMGDMEYVSELLGRKHRLLLMVNQHCLHEKKSIVLPNSCMLNMPPAEGLYENCDLVNGGYLGPCRVIINSDTIIIEMKDDNSLSLNPIQEVQLGIEFG

SEQ ID NO: 162689 - protein, 347 aa, Zea Mays
MERGAATAAAALGCALRSPSPSASPAPRWPPLHRCPRRGPPGPPRSLLPPARRFRPLDMKKGHSRNSPKTFSSSGHSGVRLNNEGLVNDRLLIGHRELAMHASKAGTPFLLSFVGMAEVLGWTYRPPIVAHCDRKRVLSSWAPYCRNVVPLEYQVEFSKVRSLSPRQFVERLSKDLRIKGVVAGENYRFGYKASGDATELVKLCEEFGLSAFIVRSVMDTAKRSLNGFSGAINSSDKGQVSSSRVRHALAMGDMEYVSELLGRKHRLLLMVNQHCLHEKKSIVLPNSCMLNMPPAEGLYENCDLVNGGYLGPCRVIINSDTIIIEMKDDNSLSLNPIQEVQLGIEFG

SEQ ID NO: 162690 - protein, 368 aa, Zea Mays
MERGAATAAAALGCALRSPSPSASPAPRWPPLHRCPRRGPPGPPRSLLPPARRFRPLDMKKGHSRNSPKTFSSSGHSGVRLNNEGLVNDRLLIDCGEDQDCVLVALGKFDALHIGHRELAMHASKAGTPFLLSFVGMAEVLGWTYRPPIVAHCDRKRVLSSWAPYCRNVVPLEYQVEFSKVRSLSPRQFVERLSKDLRIKGVVAGENYRFGYKASGDATELVKLCEEFGLSAFIVRSVMDTAKRSLNGFSGAINSSDKGQVSSSRVRHALAMGDMEYVSELLGRKHRLLLMVNQHCLHEKKSIVLPNSCMLNMPPAEGLYENCDLVNGGYLGPCRVIINSDTIIIEMKDDNSLSLNPIQEVQLGIEFG

SEQ ID NO: 162691 - protein, 277 aa, Zea Mays
MEITKMGNRVANYPIHQDAQVLQTQNAISIHAQQLPRQFPPQMLQNLTPQQQQQLQNLTPQQQQLLQQQQWLRRNQLCSPRGPLTMADKNQPMVNVKVENTMDSQIDVPYGSFTRQQQFNIRQQQQLLHQQQQQLQQQQLQQQQQQLQQQQHQQQLNQQQQQLQQQQQQLQQQQQQFTQQQQLQQQQQQLQQINQQQHLQQQQQQQLNQQQLQQQQQQMTMSGNQNAQLAQQFKQVSSMSAYGMRMPPVKVEAFHELVSGDSSLKHDNDPNKLTSPK

SEQ ID NO: 162692 - protein, 392 aa, Zea Mays
MAAAAALLLGEDGRGYELARRLEACGAWREWLGDDSAHAALAQHLTSPATWDAFLYPAASPSPPPRPLLLLQLRVRALLFDKASAALLLPPRGAAPVSLHSINANYLRLHGDDIYFSLEDEQEDNTQHQVHSRTAFSPSRDGSMLSQRHNRYEELPDTWYKPYADKFRIWHSKLHSGDKEIPKRTPEGMSDYLKICSVHKRKRAVFMDDPSISAPILENGPSLHSKNAGEFSNSTDELIPEIRFPSDCVPESAIPKTSGISRANKIEVHGVLDNLPAPSSRNTAMLERFGMVPEYYKTGNKYRGKDGSRVEGKSLSQEQALLMTKQLVARYLANSGFESGTVVSIDVLSEIIIKHICKLGRNLKLLTDSYRKQFSSIELLKMFLQTVGYRTI

SEQ ID NO: 162693 - protein, 451 aa, Zea Mays
MAAASPPQDQQQPAAEGAVAREDPAALTPRRARFPRACHYRPNAPPLTPTPAPSPPPPRPRRNGNAGYETPEYRVVTPLVEEPASPAELPRWRLRGMWELASVLNFLHVFRPLLNIPVEFTAEELEDAIITPNGTLDDVHMPLLKSIPPVTRMAMGRGTWIAVLCKKLKHWWHWVAEGDIPIVASHGAETELYKALEPGIRLVILKAICDIRSEQEDVRNFIDSSLKHGYHLSIFRKERIGGDSHGISYWYEDDPILGHRLYREIRRVEHAKDSTKKSKGKGVSTVPVISYNWEAVASNFDEFKVAAEKLFSSRNRTEVSLGKKLKFTYLPEIEKIHKKKEKLLKKQQREAILLDSCLTVNGLTSGRSRRERKHVTYTFDDYERSINEAIKTIRLAPPHYAKDFMEKLQRSCITKQKQMKERLKLSIAATGREKDPKGTQRTMLRPYQILT

SEQ ID NO: 162694 - protein, 665 aa, Zea Mays
MAAASPPQDQQQPAAEGAVAREDPAALTPRRARFPRACHYRPNAPPLTPTPAPSPPPPRPRRNGNAGYETPEYRVVTPLVEEPASPAELPRWRLRGMWELASVLNFLHVFRPLLNIPVEFTAEELEDAIITPNGTLDDVHMPLLKSIPPVTRMAMGRGTWIAVLCKKLKHWWHWVAEGDIPIVASHGAETELYKALEPGIRLVILKAICDIRSEQEDVRNFIDSSLKHGYHLSIFRKERIGGDSHGISYWYEDDPILGHRLYREIRRVEHAKDSTKKSKGKGVSTVPVISYNWEAVASNFDEFKVAAEKLFSSRNRTEVSLGKKLKFTYLPEIEKIHKKKEKLLKKQQREAILLDSCLTVNGLTSGRSRRERKHVTYTFDDYERSINEAIKTIRKNENAVEVGPSPLCKGFYGETPEKLYYKAKTDEGKAETLHRRQRKRSQRYTKDYVEAISDIDLDFDSDDDIMGEAVYDEEYLRRRKRYKASLSENDDEFQLDQVANDGDDEVGTSLNVNEDTKDLQWYKRFPLLTPQGTKLKSIDEIQTGIRRSKRSTRSRINYRQLDTFGANTKYGKSEKCNASDPDASSDALNDTELSTSQDREEEDGVNKAQQQYTEKPIVPVKESRSVRRKFLVLNELVPIAGFDDASVLVKDKHVNNNGGKCSAAH

SEQ ID NO: 162695 - protein, 200 aa, Zea Mays
MGEAVYDEEYLRRRKRYKASLSENDDEFQLDQVANDGDDEVGTSLNVNEDTKDLQWYKRFPLLTPQGTKLKSIDEIQTGIRRSKRSTRSRINYRQLDTFGANTKYGKSEKCNASDPDASSDALNDTELSTSQDREEEDGVNKAQQQYTEKPIVPVKESRSVRRKFLVLNELVPIAGFDDASVLVKDKHVNNNGGKCSAAH

SEQ ID NO: 162696 - protein, 251 aa, Zea Mays
MEPSPAVAAELWCSPHLAAGGGRPLEATSAVTEKSSGGRGGGGAVRRRPRETPVSEDDSSRIVSTSGGGGGQDLTDLEAKRSKTNKSSNNKGSLRTEVETDSRSAGKAVSKNIPAAEPPKQDYIHVRARRGQATDSHSLAERARREKISERMKVLQDLVPGCNKVIGKASVLDEIINYIQSLQCQVEFLSMKLEAVNAQANQGVEVFPAKDTYNTAPGLTFDTQTSREYAQGTSTSEWLHMQIGSGYERVS

SEQ ID NO: 162697 - protein, 54 aa, Zea Mays
MQCKYATQRIFCLLAAAPNTSLSPASSGFETGLEAEAEAEAGTETAAQSLFRQE

SEQ ID NO: 162698 - protein, 96 aa, Zea Mays
MFSRQLLIFEDLEVPSHKTKNIVQYIRQMDDSKKVLLVDGGDIDKKLKLATQNLHYVNVLPSIGLNVYSILQHDTLVMTRAAINRIVERMHTPINR

SEQ ID NO: 162699 - protein, 233 aa, Zea Mays
MRALARAASLLRRAAGSAPTTASLYHPPRNVGPCLVKNLPGFFFNGYSTLLAPPNEVLIPPELLSSRTVWTPDRELGQYEDLVARVTNFHNEDKGFMVLDGDVFDVPIRKDIVHRVVRWQLAKRQQGTHSTKTISEVSGTGRKPYPQKGTGKARHGTLRGAQFRGGATMHGPKPRSHAIKLQKKVRRLGLKIALSARTAEGKGTCVPPLSARNHCWSKQRLILPLPTRFLISS

SEQ ID NO: 162700 - protein, 322 aa, Zea Mays
MRALARAASLLRRAAGSAPTTASLYHPPRNVGPCLVKNLPGFFFNGYSTLLAPPNEVLIPPELLSSRTVWTPDRELGQYEDLVARVTNFHNEDKGFMVLDGDVFDVPIRKDIVHRVVRWQLAKRQQGTHSTKTISEVSGTGRKPYPQKGTGKARHGTLRGAQFRGGATMHGPKPRSHAIKLQKKVRRLGLKIALSARTAEGKAVLLDGALQSSYIPRIMFSRQVQLLPDFTLLIFEDLEVPSHKTKNIVQYIRQMDDSKKVLLVDGGDIDKKLKLATQNLHYVNVLPSIGLNVYSILQHDTLVMTRAAINRIVERMHTPINR

SEQ ID NO: 162701 - protein, 1448 aa, Zea Mays
MLSVEDDKDAHSLWNTCILLPFRSKFRECTGMCSIVSLFSDLHPSLLLFLHRLKCIKFKNLFDDTLLIMRREILGDGIVRISHGIETMSWLVVSKRLQGTIVRHDVCTTEIAVAFTLQQTEEGDYEPYLKQQPVFAFLPLRNYGLKFILQGDFVLPSSREEVDADSAWNQWLLSEFPSLFVSAQESFCALPCFQRCPGKAVTAFLSFIPLAGEVHGFFSQLPHLILSKLRLTRCMFLDGSTVQWVYPCNTLRGWDEQTKMLFSEGLLHEHLGLGYLSKNIVISDKLSRALGIHDYGPNILLDAISSICRIDGCIESLGLEWLCAWFVNLYLTLLSHSSQNVSSARNLEDILLDKVRKIPCIPLSDGSFTSISDGRIWLPYDVASSIPECSSIPNFPALYGNLRTVSPNLLSACCKNKYLMEEVRINDLADMLQRIGVRKLSGHDIVKNHIMVSLRNGLDANVADIVIREYVSFIMVHLQSSCTSCNFERGEIVSELRKSPIFLTNHGYKSPADEPIHFSKDYGNSVDVTRLLQNVEISWIELDSSYLQHHGSQSSSFAREKWRQFFEEMGVTDFVQVVKVEKTLSQVDSILAGGLSLADVSTKQCTVYDWESPELSRILSIFSSKRCKENCVYLLEVLDRFWDDHYSAKSRIFTDATHCGENRAVESSFMKCIQSFKWIASRMDEDLHYATDLFYDCENVRSLFGSVAPYAVPQVSSSSLKKAIGFKTEVSYCDALMVLKSWITSKVPFRASMSQMCKFYTFLSEGVADAKIDIKREFMSSPSIFTPLQRPRASEVIPGRFLAPEDLYWHDPTGCSEITEDFVATKNRSMFPRKMLSAAYPNLYELFTLTCGVPKAPTTSNYVEMLLRLSTIALPSQAGNHVFCVFVRWAKCMHSESDKMNDILYLKESLQKLETTILPTSADKWVSLHPSFGLVCWVDDDELKQQFVNSNDVYFIQFGDLSSEDKQMLYGRVAALMKSLGIQALSKVVYREAIFYGTSENREKVSLICWLLPYMQRYIYKMHRDTYINFQKNDIMKISNLQVVVVDKLFHKYVLRGLESSSKKRFQCHCLLQGDTLYATQEADSHSVFLELSRIFFDGSHDLHFANFLHMIKTMAESGTHAEQIETFIVNNQNVPELPEHEAIWSFSSLSAAKHGSANQGGADTQGVDFQPVHEFSIPNHQKAQVMVSSWPLNYWRTAPVFRTPLINQHASMQEAKVNDAGPSSNLNMPAMYGHTEDSLLSADLERDWIIEENPRTETTLFGDSSSEILDEPQMVMSAEPFHAPAYLNLEAGNSSPTVHVELTNSDEKLANLAEDKNQRLSDANQLRTGRLGEELVEKYLAKQLGSNNVRWVNNRIETGLPYDIVITHPEGFTEYVEVKTTVSSRKDWFDVSAREWQFALEKGDSFSIARVILGTKKASIEMLKNPHKLCKQKALRLALLISRSAAT

SEQ ID NO: 162702 - protein, 2802 aa, Zea Mays
MSRQDRHQWPRPNHGYDPRAAAAAAQWYGAASMLFPDPGAAALHGINPYGFAPNPFFNNFLPQNSAALAAYQLQQQQAHHFASHAYHQAPTGNTMHRSTKPAAAAKPAPPPGNQQAVLDRAQEAARKAREELVKGGDGVTAWKVAQAVLVALKADSWDSLGVQPQDVPLLRDLFLIEGKVNAFIHCYVAARKIVTVYDLEVEICKNEGVVQFEELGLGPFLQHPLVAHYFLVPADLSVVPKLCSEEIINTLLKFVDKSKKKITIEDFLNHLAEKKSVSGKEKLGVRVQSLGLHISLLRQAKQTEVSAAKLRANMSGSGNSSQEKDLLKNASFHTHKKALDKRFISLTNRIKELPGINKHIHFDSTDDETNSCTGSEDGKSDGNENENECSILDKKDGDKRVNSCPYPSKTEELERLGLKSEINKRQSLENSKPRDSGKKGKVSEKRKYEEIGSPSCSFKQPKKQQKLQKHEASPKCFLSIGKLENFVTTWKETCREHPVQQVLEMLANYYGRTISGKRRIRNFFSQYPGIGLLNVAVKSMGCGLLDSIYDVIQLADENDVASSPPPNTTTEVMEIEPPSVAIDDVIRRISEYIESNSKISGDVALQVRALNDCETWVTTQFSANQFSALGHGTFLEFLDKHCHQFRTALSSFFKEGPSNSSSLEVSVLQQQIEFLLCQAESNWLEDSDFSEDSFVMLLKKQFPTISFNIVQDKSDGGVSGFIEGQKKDIRTYSLKFSISLLEKRWSGTLPSRHGNVDELGNIVAEQSCYHTTVCSREAINCLLRAPMLSDLHLWSHWDSLFAPTLGSFVHWLLNTGPIQELACIATTDGRFIRVDSSATVDQFLEAIIHRSPLQVAVKLLSLLYIYNGSMNTPMSLLKCYAQRAIKLIVDNNNDLMNAKSENKIFMPDEPQNLSSESSTCFADQCQESSQASPGRLIRSDSLPNINNTVHLITKFVLDCLDHLPSEFRSLAADILLAGFRVVTKNWHAVMLHEATENGQLCMLHDIGLSLGVVEWVEDCHRLCLTDEVHVQTEMHSSAKLATPASVGATHEDSNMHISSDVNMMDKRKQLFPVINDRAGIDKEDNKMLNPAGTEADVAELHTTSRSSMMEETSLEEASLVIETIRREEFGLDQALSDTENSLLKKQHARLGRALHCLSQELYSQDSHLLLELNADDNTYPEDVEATLAFILQEDGIAVLNNERGFSAENIRALCDIGNSTKKGSNQGYIGNKGIGFKSVFRVTDAPEIHSNGFHVKFDITDGQIGFVLPTAVPPYSTTSFSRMLSVEDDKDAHSLWNTCILLPFRSKFRECTGMCSIVSLFSDLHPSLLLFLHRLKCIKFKNLFDDTLLIMRREILGDGIVRISHGIETMSWLVVSKRLQGTIVRHDVCTTEIAVAFTLQQTEEGDYEPYLKQQPVFAFLPLRNYGLKFILQGDFVLPSSREEVDADSAWNQWLLSEFPSLFVSAQESFCALPCFQRCPGKAVTAFLSFIPLAGEVHGFFSQLPHLILSKLRLTRCMFLDGSTVQWVYPCNTLRGWDEQTKMLFSEGLLHEHLGLGYLSKNIVISDKLSRALGIHDYGPNILLDAISSICRIDGCIESLGLEWLCAWFVNLYLTLLSHSSQNVSSARNLEDILLDKVRKIPCIPLSDGSFTSISDGRIWLPYDVASSIPECSSIPNFPALYGNLRTVSPNLLSACCKNKYLMEEVRINDLADMLQRIGVRKLSGHDIVKNHIMVSLRNGLDANVADIVIREYVSFIMVHLQSSCTSCNFERGEIVSELRKSPIFLTNHGYKSPADEPIHFSKDYGNSVDVTRLLQNVEISWIELDSSYLQHHGSQSSSFAREKWRQFFEEMGVTDFVQVVKVEKTLSQVDSILAGGLSLADVSTKQCTVYDWESPELSRILSIFSSKRCKENCVYLLEVLDRFWDDHYSAKSRIFTDATHCGENRAVESSFMKCIQSFKWIASRMDEDLHYATDLFYDCENVRSLFGSVAPYAVPQVSSSSLKKAIGFKTEVSYCDALMVLKSWITSKVPFRASMSQMCKFYTFLSEGVADAKIDIKREFMSSPSIFTPLQRPRASEVIPGRFLAPEDLYWHDPTGCSEITEDFVATKNRSMFPRKMLSAAYPNLYELFTLTCGVPKAPTTSNYVEMLLRLSTIALPSQAGNHVFCVFVRWAKCMHSESDKMNDILYLKESLQKLETTILPTSADKWVSLHPSFGLVCWVDDDELKQQFVNSNDVYFIQFGDLSSEDKQMLYGRVAALMKSLGIQALSKVVYREAIFYGTSENREKVSLICWLLPYMQRYIYKMHRDTYINFQKNDIMKISNLQVVVVDKLFHKYVLRGLESSSKKRFQCHCLLQGDTLYATQEADSHSVFLELSRIFFDGSHDLHFANFLHMIKTMAESGTHAEQIETFIVNNQNVPELPEHEAIWSFSSLSAAKHGSANQGGADTQGVDFQPVHEFSIPNHQKAQVMVSSWPLNYWRTAPVFRTPLINQHASMQEAKVNDAGPSSNLNMPAMYGHTEDSLLSADLERDWIIEENPRTETTLFGDSSSEILDEPQMVMSAEPFHAPAYLNLEAGNSSPTVHVELTNSDEKLANLAEDKNRRLSDASQLRTGSNPMVDVELTNFDEKLANLAEGKNQRLSDASQLRTGSNPMVDVELTNFDEKLAILAEDKNQRLSDANQLRTGRLGEELVEKYLAKQLGSNNVRWVNNRIETGLPYDIVITHPEGFTEYVEVKTTVSSRKDWFDVSAREWQFALEKGDSFSIARVILGTKKASIEMLKNPHKLCKQKALRLALLISRSAAT

SEQ ID NO: 162703 - protein, 1806 aa, Zea Mays
MSRQDRHQWPRPNHGYDPRAAAAAAQWYGAASMLFPDPGAAALHGINPYGFAPNPFFNNFLPQNSAALAAYQLQQQQAHHFASHAYHQAPTGNTMHRSTKPAAAAKPAPPPGNQQAVLDRAQEAARKAREELVKGGDGVTAWKVAQAVLVALKADSWDSLGVQPQDVPLLRDLFLIEGKVNAFIHCYVAARKIVTVYDLEVEICKNEGVVQFEELGLGPFLQHPLVAHYFLVPADLSVVPKLCSEEIINTLLKFVDKSKKKITIEDFLNHLAEKKSVSGKEKLGVRVQSLGKAIPFFTNLGRFCRLHISLLRQAKQTEVSAAKLRANMSGSGNSSQEKDLLKNASFHTHKKALDKRFISLTNRIKELPGINKHIHFDSTDDETNSCTGSEDGKSDGNENENECSILDKKDGDKRVNSCPYPSKTEELERLGLKSEINKRQSLENSKPRDSGKKGKVLEMLANYYGRTISGKRRIRNFFSQYPGIGLLNVAVKSMGCGLLDSIYDVIQLADENDVASSPPPNTTTEVMEIEPPSVAIDDVIRRISEYIESNSKISGDVALQVRALNDCETWVTTQFSANQFSALGHGTFLEFLDKHCHQFRTALSSFFKEGPSNSSSLEVSVLQQQIEFLLCQAESNWLEDSDFSEDSFVMLLKKQFPTISFNIVQDKSDGGVSGFIEGQKKDIRTYSLKFSISLLEKRWSGTLPSRHGNVDELGNIVAEQSCYHTTVCSREAINCLLRAPMLSDLHLWSHWDSLFAPTLGSFVHWLLNTGPIQELACIATTDGRFIRVDSSATVDQFLEAIIHRSPLQVAVKLLSLLYIYNGSMNTPMSLLKCYAQRAIKLIVDNNNDLMNAKSENKIFMPDEPQNLSSESSTCFADQCQESSQASPGRLIRSDSLPNINNTVHLITKFVLDCLDHLPSEFRSLAADILLAGFRVVTKNWHAVMLHEATENGQLCMLHDIGLSLGVVEWVEDCHRLCLTDEVHVQTEMHSSAKLATPASVGATHEDSNMHISSDVNMMDKRKQLFPVINDRAGIDKEDNKMLNPAGTEADVAELHTTSRSSMMEETSLEEASLVIETIRREEFGLDQALSDTENSLLKKQHARLGRALHCLSQELYSQDSHLLLELVQNADDNTYPEDVEATLAFILQEDGIAVLNNERGFSAENIRALCDIGNSTKKGSNQGYIGNKGIGFKSVFRVTDAPEIHSNGFHVKFDITDGQIGFVLPTAVPPYSTTSFSRMLSVEDDKDAHSLWNTCILLPFRSKFRECTDLHPSLLLFLHRLKCIKFKNLFDDTLLIMRREILGDGIVRISHGIETMSWLVVSKRLQGTIVRHDVCTTEIAVAFTLQQTEEGDYEPYLKQQPVFAFLPLRNYGLKFILQGDFVLPSSREEVDADSAWNQWLLSEFPSLFVSAQESFCALPCFQRCPGKAVTAFLSFIPLAGEVHGFFSQLPHLILSKLRLTRCMFLDGSTVQWVYPCNTLRGWDEQTKMLFSEGLLHEHLGLGYLSKNIVISDKLSRALGIHDYGPNILLDAISSICRIDGCIESLGLEWLCAWFVNLYLTLLSHSSQNVSSARNLEDILLDKVRKIPCIPLSDGSFTSISDGRIWLPYDVASSIPECSSIPNFPALYGNLRTVSPNLLSACCKNKYLMEEVRINDLADMLQRIGVRKLSGHDIVKNHIMVSLRNGLDANVADIVIREYVSFIMVHLQSSCTSCNFERGEIVSELRKSPIFLTNHGYKSPADEPIHFSKDYGNSVDVTRLLQNVEISWIELDSSYLQHHGSQSSSFAREKWRQFFEEMGVTDFVQSS

SEQ ID NO: 162704 - protein, 2662 aa, Zea Mays
MSRQDRHQWPRPNHGYDPRAAAAAAQWYGAASMLFPDPGAAALHGINPYGFAPNPFFNNFLPQNSAALAAYQLQQQQAHHFASHAYHQAPTGNTMHRSTKPAAAAKPAPPPGNQQAVLDRAQEAARKAREELVKGGDGVTAWKVAQAVLVALKADSWDSLGVQPQDVPLLRDLFLIEGKVNAFIHCYVAARKIVTVYDLEVEICKNEGVVQFEELGLGPFLQHPLVAHYFLVPADLSVVPKLCSEEIINTLLKFVDKSKKKITIEDFLNHLAEKKSVSGKEKLGVRVQSLGLHISLLRQAKQTEVSAAKLRANMSGSGNSSQEKDLLKNASFHTHKKALDKRFISLTNRIKELPGINKHIHFDSTDDETNSCTGSEDGKSDGNENENECSILDKKDGDKRVNSCPYPSKTEELERLGLKSEINKRQSLENSKPRDSGKKGKVLEMLANYYGRTISGKRRIRNFFSQYPGIGLLNVAVKSMGCGLLDSIYDVIQLADENDVASSPPPNTTTEVMEIEPPSVAIDDVIRRISEYIESNSKISGDVALQVRALNDCETWVTTQFSANQFSALGHGTFLEFLDKHCHQFRTALSSFFKEGPSNSSSLEVSVLQQQIEFLLCQAESNWLEDSDFSEDSFVMLLKKQFPTISFNIVQDKSDGGVSGFIEGQKKDIRTYSLKFSISLLEKRWSGTLPSRHGNVDELGNIVAEQSCYHTTVCSREAINCLLRAPMLSDLHLWSHWDSLFAPTLGSFVHWLLNTGPIQELACIATTDGRFIRVDSSATVDQFLEAIIHRSPLQVAVKLLSLLYIYNGSMNTPMSLLKCYAQRAIKLIVDNNNDLMNAKSENKIFMPDEPQNLSSESSTCFADQCQESSQASPGRLIRSDSLPNINNTVHLITKFVLDCLDHLPSEFRSLAADILLAGFRVVTKNWHAVMLHEATENGQLCMLHDIGLSLGVVEWVEDCHRLCLTDEVHVQTEMHSSAKLATPASVGATHEDSNMHISSDVNMMDKRKQLFPVINDRAGIDKEDNKMLNPAGTEADVAELHTTSRSSMMEETSLEEASLVIETIRREEFGLDQALSDTENSLLKKQHARLGRALHCLSQELYSQDSHLLLELVQNADDNTYPEDVEATLAFILQEDGIAVLNNERGFSAENIRALCDIGNSTKKGSNQGYIGNKGIGFKSVFRVTDAPEIHSNGFHVKFDITDGQIGFVLPTAVPPYSTTSFSRMLSVEDDKDAHSLWNTCILLPFRSKFRECTDLHPSLLLFLHRLKCIKFKNLFDDTLLIMRREILGDGIVRISHGIETMSWLVVSKRLQGTIVRHDVCTTEIAVAFTLQQTEEGDYEPYLKQQPVFAFLPLRNYGLKFILQGDFVLPSSREEVDADSAWNQWLLSEFPSLFVSAQESFCALPCFQRCPGKAVTAFLSFIPLAGEVHGFFSQLPHLILSKLRLTRCMFLDGSTVQWVYPCNTLRGWDEQTKMLFSEGLLHEHLGLGYLSKNIVISDKLSRALGIHDYGPNILLDAISSICRIDGCIESLGLEWLCAWFVNLYLTLLSHSSQNVSSARNLEDILLDKVRKIPCIPLSDGSFTSISDGRIWLPYDVASSIPECSSIPNFPALYGNLRTVSPNLLSACCKNKYLMEEVRINDLADMLQRIGVRKLSGHDIVKNHIMVSLRNGLDANVADIVIREYVSFIMVHLQSSCTSCNFERGEIVSELRKSPIFLTNHGYKSPADEPIHFSKDYGNSVDVTRLLQNVEISWIELDSSYLQHHGSQSSSFAREKWRQFFEEMGVTDFVQVVKVEKTLSQVDSILAGGLSLADVSTKQCTVYDWESPELSRILSIFSSKRCKENCVYLLEVLDRFWDDHYSAKSRIFTDATHCGENRAVESSFMKCIQSFKWIASRMDEDLHYATDLFYDCENVRSLFGSVAPYAVPQVSSSSLKKAIGFKTEVSYCDALMVLKSWITSKVPFRASMSQMCKFYTFLSEGVADAKIDIKREFMSSPSIFTPLQRPRASEVIPGRFLAPEDLYWHDPTGCSEITEDFVATKNRSMFPRKMLSAAYPNLYELFTLTCGVPKAPTTSNYVEMLLRLSTIALPSQAGNHVFCVFVRWAKCMHSESDKMNDILYLKESLQKLETTILPTSADKWVSLHPSFGLVCWVDDDELKQQFVNSNDVYFIQFGDLSSEDKQMLYGRVAALMKSLGIQALSKVVYREAIFYGTSENREKVSLICWLLPYMQRYIYKMHRDTYINFQKNDIMKISNLQVVVVDKLFHKYVLRGLESSSKKRFQCHCLLQGDTLYATQEADSHSVFLELSRIFFDGSHDLHFANFLHMIKTMAESGTHAEQIETFIVNNQNVPELPEHEAIWSFSSLSAAKHGSANQGGADTQGVDFQPVHEFSIPNHQKAQVMVSSWPLNYWRTAPVFRTPLINQHASMQEAKVNDAGPSSNLNMPAMYGHTEDSLLSADLERDWIIEENPRTETTLFGDSSSEILDEPQMVMSAEPFHAPAYLNLEAGNSSPTVHVELTNSDEKLANLAEDKNQRLSDANQLRTGRLGEELVEKYLAKQLGSNNVRWVNNRIETGLPYDIVITHPEGFTEYVEVKTTVSSRKDWFDVSAREWQFALEKGDSFSIARVILGTKKASIEMLKNPHKLCKQKALRLALLISRSAAT

SEQ ID NO: 162705 - protein, 2586 aa, Zea Mays
MSRQDRHQWPRPNHGYDPRAAAAAAQWYGAASMLFPDPGAAALHGINPYGFAPNPFFNNFLPQNSAALAAYQLQQQQAHHFASHAYHQAPTGNTMHRSTKPAAAAKPAPPPGNQQAVLDRAQEAARKAREELVKGGDGVTAWKVAQAVLVALKADSWDSLGVQPQDVPLLRDLFLIEGKVNAFIHCYVAARKIVTVYDLEVEICKNEGVVQFEELGLGPFLQHPLVAHYFLVPADLSVVPKLCSEEIINTLLKFVDKSKKKITIEDFLNHLAEKKSVSGKEKLGVRVQSLGKAIPFFTNLGRFCRLHISLLRQAKQTEVSAAKLRANMSGSGNSSQEKDLLKNASFHTHKKALDKRFISLTNRIKELPGINKHIHFDSTDDETNSCTGSEDGKSDGNENENECSILDKKDGDKRVNSCPYPSKTEELERLGLKSEINKRQSLENSKPRDSGKKGKVLEMLANYYGRTISGKRRIRNFFSQYPGIGLLNVAVKSMGCGLLDSIYDVIQLADENDVASSPPPNTTTEVMEIEPPSVAIDDVIRRISEYIESNSKISGDVALQVRALNDCETWVTTQFSANQFSALGHGTFLEFLDKHCHQFRTALSSFFKEGPSNSSSLEVSVLQQQIEFLLCQAESNWLEDSDFSEDSFVMLLKKQFPTISFNIVQDKSDGGVSGFIEGQKKDIRTYSLKFSISLLEKRWSGTLPSRHGNVDELGNIVAEQSCYHTTVCSREAINCLLRAPMLSDLHLWSHWDSLFAPTLGSFVHWLLNTGPIQELACIATTDGRFIRVDSSATVDQFLEAIIHRSPLQVAVKLLSLLYIYNGSMNTPMSLLKCYAQRAIKLIVDNNNDLMNAKSENKIFMPDEPQNLSSESSTCFADQCQESSQASPGRLIRSDSLPNINNTVHLITKFVLDCLDHLPSEFRSLAADILLAGFRVVTKNWHAVMLHEATENGQLCMLHDIGLSLGVVEWVEDCHRLCLTDEVHVQTEMHSSAKLATPASVGATHEDSNMHISSDVNMMDKRKQLFPVINDRAGIDKEDNKMLNPAGTEADVAELHTTSRSSMMEETSLEEASLVIETIRREEFGLDQALSDTENSLLKKQHARLGRALHCLSQELYSQDSHLLLELVQNADDNTYPEDVEATLAFILQEDGIAVLNNERGFSAENIRALCDIGNSTKKGSNQGYIGNKGIGFKSVFRVTDAPEIHSNGFHVKFDITDGQIGFVLPTAVPPYSTTSFSRMLSVEDDKDAHSLWNTCILLPFRSKFRECTGMCSIVSLFSDLHPSLLLFLHRLKCIKFKNLFDDTLLIMRREILGDGIVRISHGIETMSWLVVSKRLQGTIVRHDVCTTEIAVAFTLQQTEEGDYEPYLKQQPVFAFLPLRNYGLKFILQGDFVLPSSREEVDADSAWNQWLLSEFPSLFVSAQESFCALPCFQRCPGKAVTAFLSFIPLAGEVHGFFSQLPHLILSKLRLTRCMFLDGSTVQWVYPCNTLRGWDEQTKMLFSEGLLHEHLGLGYLSKNIVISDKLSRALGIHDYGPNILLDAISSICRIDGCIESLGLEWLCAWFVNLYLTLLSHSSQNVSSARNLEDILLDKVRKIPCIPLSDGSFTSISDGRIWLPYDVASSIPECSSIPNFPALYGNLRTVVKVEKTLSQVDSILAGGLSLADVSTKQCTVYDWESPELSRILSIFSSKRCKENCVYLLEVLDRFWDDHYSAKSRIFTDATHCGENRAVESSFMKCIQSFKWIASRMDEDLHYATDLFYDCENVRSLFGSVAPYAVPQVSSSSLKKAIGFKTEVSYCDALMVLKSWITSKVPFRASMSQMCKFYTFLSEGVADAKIDIKREFMSSPSIFTPLQRPRASEVIPGRFLAPEDLYWHDPTGCSEITEDFVATKNRSMFPRKMLSAAYPNLYELFTLTCGVPKAPTTSNYVEMLLRLSTIALPSQAGNHVFCVFVRWAKCMHSESDKMNDILYLKESLQKLETTILPTSADKWVSLHPSFGLVCWVDDDELKQQFVNSNDVYFIQFGDLSSEDKQMLYGRVAALMKSLGIQALSKVVYREAIFYGTSENREKVSLICWLLPYMQRYIYKMHRDTYINFQKNDIMKISNLQVVVVDKLFHKYVLRGLESSSKKRFQCHCLLQGDTLYATQEADSHSVFLELSRIFFDGSHDLHFANFLHMIKTMAESGTHAEQIETFIVNNQNVPELPEHEAIWSFSSLSAAKHGSANQGGADTQGVDFQPVHEFSIPNHQKAQVMVSSWPLNYWRTAPVFRTPLINQHASMQEAKVNDAGPSSNLNMPAMYGHTEDSLLSADLERDWIIEENPRTETTLFGDSSSEILDEPQMVMSAEPFHAPAYLNLEAGNSSPTVHVELTNSDEKLANLAEDKNRRLSDASQLRTGSNPMVDVELTNFDEKLANLAEGKNQRLSDASQLRTGSNPMVDVELTNFDEKLAILAEDKNQRLSDANQLRTGRLGEELVEKYLAKQLGSNNVRWVNNRIETGLPYDIVITHPEGFTEYVEVKTTVSSRKDWFDVSAREWQFALEKGDSFSIARVILGTKKASIEMLKNPHKLCKQKALRLALLISRSAAT

SEQ ID NO: 162706 - protein, 2754 aa, Zea Mays
MSRQDRHQWPRPNHGYDPRAAAAAAQWYGAASMLFPDPGAAALHGINPYGFAPNPFFNNFLPQNSAALAAYQLQQQQAHHFASHAYHQAPTGNTMHRSTKPAAAAKPAPPPGNQQAVLDRAQEAARKAREELVKGGDGVTAWKVAQAVLVALKADSWDSLGVQPQDVPLLRDLFLIEGKVNAFIHCYVAARKIVTVYDLEVEICKNEGVVQFEELGLGPFLQHPLVAHYFLVPADLSVVPKLCSEEIINTLLKFVDKSKKKITIEDFLNHLAEKKSVSGKEKLGVRVQSLGLHISLLRQAKQTEVSAAKLRANMSGSGNSSQEKDLLKNASFHTHKKALDKRFISLTNRIKELPGINKHIHFDSTDDETNSCTGSEDGKSDGNENENECSILDKKDGDKRVNSCPYPSKTEELERLGLKSEINKRQSLENSKPRDSGKKGKVSEKRKYEEIGSPSCSFKQPKKQQKLQKHEASPKCFLSIGKLENFVTTWKETCREHPVQQVLEMLANYYGRTISGKRRIRNFFSQYPGIGLLNVAVKSMGCGLLDSIYDVIQLADENDVASSPPPNTTTEVMEIEPPSKENTGSTNGAHEKSEDNMTAHGVAIDDVIRRISEYIESNSKISGDVALQVRALNDCETWVTTQFSANQFSALGHGTFLEFLDKHCHQFRTALSSFFKEGPSNSSSLEVSVLQQQIEFLLCQAESNWLEDSDFSEDSFVMLLKKQFPTISFNIVQDKSDGGVSGFIEGQKKDIRTYSLKFSISLLEKRWSGTLPSRHGNVDELGNIVAEQSCYHTTVCSREAINCLLRAPMLSDLHLWSHWDSLFAPTLGSFVHWLLNTGPIQELACIATTDGRFIRVDSSATVDQFLEAIIHRSPLQVAVKLLSLLYIYNGSMNTPMSLLKCYAQRAIKLIVDNNNDLMNAKSENKIFMPDEPQNLSSESSTCFADQCQESSQASPGRLIRSDSLPNINNTVHLITKFVLDCLDHLPSEFRSLAADILLAGFRVVTKNWHAVMLHEATENGQLCMLHDIGLSLGVVEWVEDCHRLCLTDEVHVQTEMHSSAKLATPASVGATHEDSNMHISSDVNMMDKRKQLFPVINDRAGIDKEDNKMLNPAGTEADVAELHTTSRSSMMEETSLEEASLVIETIRREEFGLDQALSDTENSLLKKQHARLGRALHCLSQELYSQDSHLLLELVQNADDNTYPEDVEATLAFILQEDGIAVLNNERGFSAENIRALCDIGNSTKKGSNQGYIGNKGIGFKSVFRVTDAPEIHSNGFHVKFDITDGQIGFVLPTAVPPYSTTSFSRMLSVEDDKDAHSLWNTCILLPFRSKFRECTGMCSIVSLFSDLHPSLLLFLHRLKCIKFKNLFDDTLLIMRREILGDGIVRISHGIETMSWLVVSKRLQGTIVRHDVCTTEIAVAFTLQQTEEGDYEPYLKQQPVFAFLPLRNYGLKFILQGDFVLPSSREEVDADSAWNQWLLSEFPSLFVSAQESFCALPCFQRCPGKAVTAFLSFIPLAGEVHGFFSQLPHLILSKLRLTRCMFLDGSTVQWVYPCNTLRGWDEQTKMLFSEGLLHEHLGLGYLSKNIVISDKLSRALGIHDYGPNILLDAISSICRIDGCIESLGLEWLCAWFVNLYLTLLSHSSQNVSSARNLEDILLDKVRKIPCIPLSDGSFTSISDGRIWLPYDVASSIPECSSIPNFPALYGNLRTVSPNLLSACCKNKYLMEEVRINDLADMLQRIGVRKLSGHDIVKNHIMVSLRNGLDANVADIVIREYVSFIMVHLQSSCTSCNFERGEIVSELRKSPIFLTNHGYKSPADEPIHFSKDYGNSVDVTRLLQNVEISWIELDSSYLQHHGSQSSSFAREKWRQFFEEMGVTDFVQVVKVEKTLSQVDSILAGGLSLADVSTKQCTVYDWESPELSRILSIFSSKRCKENCVYLLEVLDRFWDDHYSAKSRIFTDATHCGENRAVESSFMKCIQSFKWIASRMDEDLHYATDLFYDCENVRSLFGSVAPYAVPQVSSSSLKKAIGFKTEVSYCDALMVLKSWITSKVPFRASMSQMCKFYTFLSEGVADAKIDIKREFMSSPSIFTPLQRPRASEVIPGRFLAPEDLYWHDPTGCSEITEDFVATKNRSMFPRKMLSAAYPNLYELFTLTCGVPKAPTTSNYVEMLLRLSTIALPSQAGNHVFCVFVRWAKCMHSESDKMNDILYLKESLQKLETTILPTSADKWVSLHPSFGLVCWVDDDELKQQFVNSNDVYFIQFGDLSSEDKQMLYGRVAALMKSLGIQALSKVVYREAIFYGTSENREKVSLICWLLPYMQRYIYKMHRDTYINFQKNDIMKISNLQVVVVDKLFHKYVLRGLESSSKKRFQCHCLLQGDTLYATQEADSHSVFLELSRIFFDGSHDLHFANFLHMIKTMAESGTHAEQIETFIVNNQNVPELPEHEAIWSFSSLSAAKHGSANQGGADTQGVDFQPVHEFSIPNHQKAQVMVSSWPLNYWRTAPVFRTPLINQHASMQEAKVNDAGPSSNLNMPAMYGHTEDSLLSADLERDWIIEENPRTETTLFGDSSSEILDEPQMVMSAEPFHAPAYLNLEAGNSSPTVHVELTNSDEKLANLAEDKNQRLSDANQLRTGRLGEELVEKYLAKQLGSNNVRWVNNRIETGLPYDIVITHPEGFTEYVEVKTTVSSRKDWFDVSAREWQFALEKGDSFSIARVILGTKKASIEMLKNPHKLCKQKALRLALLISRSAAT

SEQ ID NO: 162707 - protein, 2694 aa, Zea Mays
MSRQDRHQWPRPNHGYDPRAAAAAAQWYGAASMLFPDPGAAALHGINPYGFAPNPFFNNFLPQNSAALAAYQLQQQQAHHFASHAYHQAPTGNTMHRSTKPAAAAKPAPPPGNQQAVLDRAQEAARKAREELVKGGDGVTAWKVAQAVLVALKADSWDSLGVQPQDVPLLRDLFLIEGKVNAFIHCYVAARKIVTVYDLEVEICKNEGVVQFEELGLGPFLQHPLVAHYFLVPADLSVVPKLCSEEIINTLLKFVDKSKKKITIEDFLNHLAEKKSVSGKEKLGVRVQSLGLHISLLRQAKQTEVSAAKLRANMSGSGNSSQEKDLLKNASFHTHKKALDKRFISLTNRIKELPGINKHIHFDSTDDETNSCTGSEDGKSDGNENENECSILDKKDGDKRVNSCPYPSKTEELERLGLKSEINKRQSLENSKPRDSGKKGKVLEMLANYYGRTISGKRRIRNFFSQYPGIGLLNVAVKSMGCGLLDSIYDVIQLADENDVASSPPPNTTTEVMEIEPPSKENTGSTNGAHEKSEDNMTAHGVAIDDVIRRISEYIESNSKISGDVALQVRALNDCETWVTTQFSANQFSALGHGTFLEFLDKHCHQFRTALSSFFKEGPSNSSSLEVSVLQQQIEFLLCQAESNWLEDSDFSEDSFVMLLKKQFPTISFNIVQDKSDGGVSGFIEGQKKDIRTYSLKFSISLLEKRWSGTLPSRHGNVDELGNIVAEQSCYHTTVCSREAINCLLRAPMLSDLHLWSHWDSLFAPTLGSFVHWLLNTGPIQELACIATTDGRFIRVDSSATVDQFLEAIIHRSPLQVAVKLLSLLYIYNGSMNTPMSLLKCYAQRAIKLIVDNNNDLMNAKSENKIFMPDEPQNLSSESSTCFADQCQESSQASPGRLIRSDSLPNINNTVHLITKFVLDCLDHLPSEFRSLAADILLAGFRVVTKNWHAVMLHEATENGQLCMLHDIGLSLGVVEWVEDCHRLCLTDEVHVQTEMHSSAKLATPASVGATHEDSNMHISSDVNMMDKRKQLFPVINDRAGIDKEDNKMLNPAGTEADVAELHTTSRSSMMEETSLEEASLVIETIRREEFGLDQALSDTENSLLKKQHARLGRALHCLSQELYSQDSHLLLELVQNADDNTYPEDVEATLAFILQEDGIAVLNNERGFSAENIRALCDIGNSTKKGSNQGYIGNKGIGFKSVFRVTDAPEIHSNGFHVKFDITDGQIGFVLPTAVPPYSTTSFSRMLSVEDDKDAHSLWNTCILLPFRSKFRECTGMCSIVSLFSDLHPSLLLFLHRLKCIKFKNLFDDTLLIMRREILGDGIVRISHGIETMSWLVVSKRLQGTIVRHDVCTTEIAVAFTLQQTEEGDYEPYLKQQPVFAFLPLRNYGLKFILQGDFVLPSSREEVDADSAWNQWLLSEFPSLFVSAQESFCALPCFQRCPGKAVTAFLSFIPLAGEVHGFFSQLPHLILSKLRLTRCMFLDGSTVQWVYPCNTLRGWDEQTKMLFSEGLLHEHLGLGYLSKNIVISDKLSRALGIHDYGPNILLDAISSICRIDGCIESLGLEWLCAWFVNLYLTLLSHSSQNVSSARNLEDILLDKVRKIPCIPLSDGSFTSISDGRIWLPYDVASSIPECSSIPNFPALYGNLRTVSPNLLSACCKNKYLMEEVRINDLADMLQRIGVRKLSGHDIVKNHIMVSLRNGLDANVADIVIREYVSFIMVHLQSSCTSCNFERGEIVSELRKSPIFLTNHGYKSPADEPIHFSKDYGNSVDVTRLLQNVEISWIELDSSYLQHHGSQSSSFAREKWRQFFEEMGVTDFVQVVKVEKTLSQVDSILAGGLSLADVSTKQCTVYDWESPELSRILSIFSSKRCKENCVYLLEVLDRFWDDHYSAKSRIFTDATHCGENRAVESSFMKCIQSFKWIASRMDEDLHYATDLFYDCENVRSLFGSVAPYAVPQVSSSSLKKAIGFKTEVSYCDALMVLKSWITSKVPFRASMSQMCKFYTFLSEGVADAKIDIKREFMSSPSIFTPLQRPRASEVIPGRFLAPEDLYWHDPTGCSEITEDFVATKNRSMFPRKMLSAAYPNLYELFTLTCGVPKAPTTSNYVEMLLRLSTIALPSQAGNHVFCVFVRWAKCMHSESDKMNDILYLKESLQKLETTILPTSADKWVSLHPSFGLVCWVDDDELKQQFVNSNDVYFIQFGDLSSEDKQMLYGRVAALMKSLGIQALSKVVYREAIFYGTSENREKVSLICWLLPYMQRYIYKMHRDTYINFQKNDIMKISNLQVVVVDKLFHKYVLRGLESSSKKRFQCHCLLQGDTLYATQEADSHSVFLELSRIFFDGSHDLHFANFLHMIKTMAESGTHAEQIETFIVNNQNVPELPEHEAIWSFSSLSAAKHGSANQGGADTQGVDFQPVHEFSIPNHQKAQVMVSSWPLNYWRTAPVFRTPLINQHASMQEAKVNDAGPSSNLNMPAMYGHTEDSLLSADLERDWIIEENPRTETTLFGDSSSEILDEPQMVMSAEPFHAPAYLNLEAGNSSPTVHVELTNSDEKLANLAEDKNQRLSDANQLRTGRLGEELVEKYLAKQLGSNNVRWVNNRIETGLPYDIVITHPEGFTEYVEVKTTVSSRKDWFDVSAREWQFALEKGDSFSIARVILGTKKASIEMLKNPHKLCKQKALRLALLISRSAAT

SEQ ID NO: 162708 - protein, 1867 aa, Zea Mays
MSRQDRHQWPRPNHGYDPRAAAAAAQWYGAASMLFPDPGAAALHGINPYGFAPNPFFNNFLPQNSAALAAYQLQQQQAHHFASHAYHQAPTGNTMHRSTKPAAAAKPAPPPGNQQAVLDRAQEAARKAREELVKGGDGVTAWKVAQAVLVALKADSWDSLGVQPQDVPLLRDLFLIEGKVNAFIHCYVAARKIVTVYDLEVEICKNEGVVQFEELGLGPFLQHPLVAHYFLVPADLSVVPKLCSEEIINTLLKFVDKSKKKITIEDFLNHLAEKKSVSGKEKLGVRVQSLGKAIPFFTNLGRFCRLHISLLRQAKQTEVSAAKLRANMSGSGNSSQEKDLLKNASFHTHKKALDKRFISLTNRIKELPGINKHIHFDSTDDETNSCTGSEDGKSDGNENENECSILDKKDGDKRVNSCPYPSKTEELERLGLKSEINKRQSLENSKPRDSGKKGKVLEMLANYYGRTISGKRRIRNFFSQYPGIGLLNVAVKSMGCGLLDSIYDVIQLADENDVASSPPPNTTTEVMEIEPPSVAIDDVIRRISEYIESNSKISGDVALQVRALNDCETWVTTQFSANQFSALGHGTFLEFLDKHCHQFRTALSSFFKEGPSNSSSLEVSVLQQQIEFLLCQAESNWLEDSDFSEDSFVMLLKKQFPTISFNIVQDKSDGGVSGFIEGQKKDIRTYSLKFSISLLEKRWSGTLPSRHGNVDELGNIVAEQSCYHTTVCSREAINCLLRAPMLSDLHLWSHWDSLFAPTLGSFVHWLLNTGPIQELACIATTDGRFIRVDSSATVDQFLEAIIHRSPLQVAVKLLSLLYIYNGSMNTPMSLLKCYAQRAIKLIVDNNNDLMNAKSENKIFMPDEPQNLSSESSTCFADQCQESSQASPGRLIRSDSLPNINNTVHLITKFVLDCLDHLPSEFRSLAADILLAGFRVVTKNWHAVMLHEATENGQLCMLHDIGLSLGVVEWVEDCHRLCLTDEVHVQTEMHSSAKLATPASVGATHEDSNMHISSDVNMMDKRKQLFPVINDRAGIDKEDNKMLNPAGTEADVAELHTTSRSSMMEETSLEEASLVIETIRREEFGLDQALSDTENSLLKKQHARLGRALHCLSQELYSQDSHLLLELVQNADDNTYPEDVEATLAFILQEDGIAVLNNERGFSAENIRALCDIGNSTKKGSNQGYIGNKGIGFKSVFRVTDAPEIHSNGFHVKFDITDGQIGFVLPTAVPPYSTTSFSRMLSVEDDKDAHSLWNTCILLPFRSKFRECTDLHPSLLLFLHRLKCIKFKNLFDDTLLIMRREILGDGIVRISHGIETMSWLVVSKRLQGTIVRHDVCTTEIAVAFTLQQTEEGDYEPYLKQQPVFAFLPLRNYGLKFILQGDFVLPSSREEVDADSAWNQWLLSEFPSLFVSAQESFCALPCFQRCPGKAVTAFLSFIPLAGEVHGFFSQLPHLILSKLRLTRCMFLDGSTVQWVYPCNTLRGWDEQTKMLFSEGLLHEHLGLGYLSKNIVISDKLSRALGIHDYGPNILLDAISSICRIDGCIESLGLEWLCAWFVNLYLTLLSHSSQNVSSARNLEDILLDKVRKIPCIPLSDGSFTSISDGRIWLPYDVASSIPECSSIPNFPALYGNLRTVSPNLLSACCKNKYLMEEVRINDLADMLQRIGVRKLSGHDIVKNHIMVSLRNGLDANVADIVIREYVSFIMVHLQSSCTSCNFERGEIVSELRKSPIFLTNHGYKSPADEPIHFSKDYGNSVDVTRLLQNVEISWIELDSSYLQHHGSQSSSFAREKWRQFFEEMGVTDFVQCMTGSHQNYLEFYQYFLQKDARKIVYIFWKFLIDSGMIIIVQNLGSSQMLHIVVKTEQLNHHL

SEQ ID NO: 162709 - protein, 2826 aa, Zea Mays
MSRQDRHQWPRPNHGYDPRAAAAAAQWYGAASMLFPDPGAAALHGINPYGFAPNPFFNNFLPQNSAALAAYQLQQQQAHHFASHAYHQAPTGNTMHRSTKPAAAAKPAPPPGNQQAVLDRAQEAARKAREELVKGGDGVTAWKVAQAVLVALKADSWDSLGVQPQDVPLLRDLFLIEGKVNAFIHCYVAARKIVTVYDLEVEICKNEGVVQFEELGLGPFLQHPLVAHYFLVPADLSVVPKLCSEEIINTLLKFVDKSKKKITIEDFLNHLAEKKSVSGKEKLGVRVQSLGLHISLLRQAKQTEVSAAKLRANMSGSGNSSQEKDLLKNASFHTHKKALDKRFISLTNRIKELPGINKHIHFDSTDDETNSCTGSEDGKSDGNENENECSILDKKDGDKRVNSCPYPSKTEELERLGLKSEINKRQSLENSKPRDSGKKGKVSEKRKYEEIGSPSCSFKQPKKQQKLQKHEASPKCFLSIGKLENFVTTWKETCREHPVQQVLEMLANYYGRTISGKRRIRNFFSQYPGIGLLNVAVKSMGCGLLDSIYDVIQLADENDVASSPPPNTTTEVMEIEPPSKENTGSTNGAHEKSEDNMTAHGVAIDDVIRRISEYIESNSKISGDVALQVRALNDCETWVTTQFSANQFSALGHGTFLEFLDKHCHQFRTALSSFFKEGPSNSSSLEVSVLQQQIEFLLCQAESNWLEDSDFSEDSFVMLLKKQFPTISFNIVQDKSDGGVSGFIEGQKKDIRTYSLKFSISLLEKRWSGTLPSRHGNVDELGNIVAEQSCYHTTVCSREAINCLLRAPMLSDLHLWSHWDSLFAPTLGSFVHWLLNTGPIQELACIATTDGRFIRVDSSATVDQFLEAIIHRSPLQVAVKLLSLLYIYNGSMNTPMSLLKCYAQRAIKLIVDNNNDLMNAKSENKIFMPDEPQNLSSESSTCFADQCQESSQASPGRLIRSDSLPNINNTVHLITKFVLDCLDHLPSEFRSLAADILLAGFRVVTKNWHAVMLHEATENGQLCMLHDIGLSLGVVEWVEDCHRLCLTDEVHVQTEMHSSAKLATPASVGATHEDSNMHISSDVNMMDKRKQLFPVINDRAGIDKEDNKMLNPAGTEADVAELHTTSRSSMMEETSLEEASLVIETIRREEFGLDQALSDTENSLLKKQHARLGRALHCLSQELYSQDSHLLLELVQNADDNTYPEDVEATLAFILQEDGIAVLNNERGFSAENIRALCDIGNSTKKGSNQGYIGNKGIGFKSVFRVTDAPEIHSNGFHVKFDITDGQIGFVLPTAVPPYSTTSFSRMLSVEDDKDAHSLWNTCILLPFRSKFRECTGMCSIVSLFSDLHPSLLLFLHRLKCIKFKNLFDDTLLIMRREILGDGIVRISHGIETMSWLVVSKRLQGTIVRHDVCTTEIAVAFTLQQTEEGDYEPYLKQQPVFAFLPLRNYGLKFILQGDFVLPSSREEVDADSAWNQWLLSEFPSLFVSAQESFCALPCFQRCPGKAVTAFLSFIPLAGEVHGFFSQLPHLILSKLRLTRCMFLDGSTVQWVYPCNTLRGWDEQTKMLFSEGLLHEHLGLGYLSKNIVISDKLSRALGIHDYGPNILLDAISSICRIDGCIESLGLEWLCAWFVNLYLTLLSHSSQNVSSARNLEDILLDKVRKIPCIPLSDGSFTSISDGRIWLPYDVASSIPECSSIPNFPALYGNLRTVSPNLLSACCKNKYLMEEVRINDLADMLQRIGVRKLSGHDIVKNHIMVSLRNGLDANVADIVIREYVSFIMVHLQSSCTSCNFERGEIVSELRKSPIFLTNHGYKSPADEPIHFSKDYGNSVDVTRLLQNVEISWIELDSSYLQHHGSQSSSFAREKWRQFFEEMGVTDFVQVVKVEKTLSQVDSILAGGLSLADVSTKQCTVYDWESPELSRILSIFSSKRCKENCVYLLEVLDRFWDDHYSAKSRIFTDATHCGENRAVESSFMKCIQSFKWIASRMDEDLHYATDLFYDCENVRSLFGSVAPYAVPQVSSSSLKKAIGFKTEVSYCDALMVLKSWITSKVPFRASMSQMCKFYTFLSEGVADAKIDIKREFMSSPSIFTPLQRPRASEVIPGRFLAPEDLYWHDPTGCSEITEDFVATKNRSMFPRKMLSAAYPNLYELFTLTCGVPKAPTTSNYVEMLLRLSTIALPSQAGNHVFCVFVRWAKCMHSESDKMNDILYLKESLQKLETTILPTSADKWVSLHPSFGLVCWVDDDELKQQFVNSNDVYFIQFGDLSSEDKQMLYGRVAALMKSLGIQALSKVVYREAIFYGTSENREKVSLICWLLPYMQRYIYKMHRDTYINFQKNDIMKISNLQVVVVDKLFHKYVLRGLESSSKKRFQCHCLLQGDTLYATQEADSHSVFLELSRIFFDGSHDLHFANFLHMIKTMAESGTHAEQIETFIVNNQNVPELPEHEAIWSFSSLSAAKHGSANQGGADTQGVDFQPVHEFSIPNHQKAQVMVSSWPLNYWRTAPVFRTPLINQHASMQEAKVNDAGPSSNLNMPAMYGHTEDSLLSADLERDWIIEENPRTETTLFGDSSSEILDEPQMVMSAEPFHAPAYLNLEAGNSSPTVHVELTNSDEKLANLAEDKNRRLSDASQLRTGSNPMVDVELTNFDEKLANLAEGKNQRLSDASQLRTGSNPMVDVELTNFDEKLAILAEDKNQRLSDANQLRTGRLGEELVEKYLAKQLGSNNVRWVNNRIETGLPYDIVITHPEGFTEYVEVKTTVSSRKDWFDVSAREWQFALEKGDSFSIARVILGTKKASIEMLKNPHKLCKQKALRLALLISRSAAT

SEQ ID NO: 162710 - protein, 2732 aa, Zea Mays
MSRQDRHQWPRPNHGYDPRAAAAAAQWYGAASMLFPDPGAAALHGINPYGFAPNPFFNNFLPQNSAALAAYQLQQQQAHHFASHAYHQAPTGNTMHRSTKPAAAAKPAPPPGNQQAVLDRAQEAARKAREELVKGGDGVTAWKVAQAVLVALKADSWDSLGVQPQDVPLLRDLFLIEGKVNAFIHCYVAARKIVTVYDLEVEICKNEGVVQFEELGLGPFLQHPLVAHYFLVPADLSVVPKLCSEEIINTLLKFVDKSKKKITIEDFLNHLAEKKSVSGKEKLGVRVQSLGLHISLLRQAKQTEVSAAKLRANMSGSGNSSQEKDLLKNASFHTHKKALDKRFISLTNRIKELPGINKHIHFDSTDDETNSCTGSEDGKSDGNENENECSILDKKDGDKRVNSCPYPSKTEELERLGLKSEINKRQSLENSKPRDSGKKGKVSEKRKYEEIGSPSCSFKQPKKQQKLQKHEASPKCFLSIGKLENFVTTWKETCREHPVQQVLEMLANYYGRTISGKRRIRNFFSQYPGIGLLNVAVKSMGCGLLDSIYDVIQLADENDVASSPPPNTTTEVMEIEPPSVAIDDVIRRISEYIESNSKISGDVALQVRALNDCETWVTTQFSANQFSALGHGTFLEFLDKHCHQFRTALSSFFKEGPSNSSSLEVSVLQQQIEFLLCQAESNWLEDSDFSEDSFVMLLKKQFPTISFNIVQDKSDGGVSGFIEGQKKDIRTYSLKFSISLLEKRWSGTLPSRHGNVDELGNIVAEQSCYHTTVCSREAINCLLRAPMLSDLHLWSHWDSLFAPTLGSFVHWLLNTGPIQELACIATTDGRFIRVDSSATVDQFLEAIIHRSPLQVAVKLLSLLYIYNGSMNTPMSLLKCYAQRAIKLIVDNNNDLMNAKSENKIFMPDEPQNLSSESSTCFADQCQESSQASPGRLIRSDSLPNINNTVHLITKFVLDCLDHLPSEFRSLAADILLAGFRVVTKNWHAVMLHEATENGQLCMLHDIGLSLGVVEWVEDCHRLCLTDEVHVQTEMHSSAKLATPASVGATHEDSNMHISSDVNMMDKRKQLFPVINDRAGIDKEDNKMLNPAGTEADVAELHTTSRSSMMEETSLEEASLVIETIRREEFGLDQALSDTENSLLKKQHARLGRALHCLSQELYSQDSHLLLELVQNADDNTYPEDVEATLAFILQEDGIAVLNNERGFSAENIRALCDIGNSTKKGSNQGYIGNKGIGFKSVFRVTDAPEIHSNGFHVKFDITDGQIGFVLPTAVPPYSTTSFSRMLSVEDDKDAHSLWNTCILLPFRSKFRECTGMCSIVSLFSDLHPSLLLFLHRLKCIKFKNLFDDTLLIMRREILGDGIVRISHGIETMSWLVVSKRLQGTIVRHDVCTTEIAVAFTLQQTEEGDYEPYLKQQPVFAFLPLRNYGLKFILQGDFVLPSSREEVDADSAWNQWLLSEFPSLFVSAQESFCALPCFQRCPGKAVTAFLSFIPLAGEVHGFFSQLPHLILSKLRLTRCMFLDGSTVQWVYPCNTLRGWDEQTKMLFSEGLLHEHLGLGYLSKNIVISDKLSRALGIHDYGPNILLDAISSICRIDGCIESLGLEWLCAWFVNLYLTLLSHSSQNVSSARNLEDILLDKVRKIPCIPLSDGSFTSISDGRIWLPYDVASSIPECSSIPNFPALYGNLRTVSPNLLSACCKNKYLMEEVRINDLADMLQRIGVRKLSGHDIVKNHIMVSLRNGLDANVADIVIREYVSFIMVHLQSSCTSCNFERGEIVSELRKSPIFLTNHGYKSPADEPIHFSKDYGNSVDVTRLLQNVEISWIELDSSYLQHHGSQSSSFAREKWRQFFEEMGVTDFVQVVKVEKTLSQVDSILAGGLSLADVSTKQCTVYDWESPELSRILSIFSSKRCKENCVYLLEVLDRFWDDHYSAKSRIFTDATHCGENRAVESSFMKCIQSFKWIASRMDEDLHYATDLFYDCENVRSLFGSVAPYAVPQVSSSSLKKAIGFKTEVSYCDALMVLKSWITSKVPFRASMSQMCKFYTFLSEGVADAKIDIKREFMSSPSIFTPLQRPRASEVIPGRFLAPEDLYWHDPTGCSEITEDFVATKNRSMFPRKMLSAAYPNLYELFTLTCGVPKAPTTSNYVEMLLRLSTIALPSQAGNHVFCVFVRWAKCMHSESDKMNDILYLKESLQKLETTILPTSADKWVSLHPSFGLVCWVDDDELKQQFVNSNDVYFIQFGDLSSEDKQMLYGRVAALMKSLGIQALSKVVYREAIFYGTSENREKVSLICWLLPYMQRYIYKMHRDTYINFQKNDIMKISNLQVVVVDKLFHKYVLRGLESSSKKRFQCHCLLQGDTLYATQEADSHSVFLELSRIFFDGSHDLHFANFLHMIKTMAESGTHAEQIETFIVNNQNVPELPEHEAIWSFSSLSAAKHGSANQGGADTQGVDFQPVHEFSIPNHQKAQVMVSSWPLNYWRTAPVFRTPLINQHASMQEAKVNDAGPSSNLNMPAMYGHTEDSLLSADLERDWIIEENPRTETTLFGDSSSEILDEPQMVMSAEPFHAPAYLNLEAGNSSPTVHVELTNSDEKLANLAEDKNQRLSDANQLRTGRLGEELVEKYLAKQLGSNNVRWVNNRIETGLPYDIVITHPEGFTEYVEVKTTVSSRKDWFDVSAREWQFALEKGDSFSIARVILGTKKASIEMLKNPHKLCKQKALRLALLISRSAAT

SEQ ID NO: 162711 - protein, 65 aa, Zea Mays
MEDVSMGMWVERFNSTRLVKYVHSVKFCQFGCIDDYYTAHYQSPRQMLCLWDKLQAGKAQCCNMR

SEQ ID NO: 162712 - protein, 231 aa, Zea Mays
MDGLVKCEKWIRDDEGRSEESKTSWWLNRLIGRTKTVSVDWSYPFVEDRLFVLTLTAGFEGYHVNVDGRHVTSFPYRTGFVLEDATGLSLDGDLDVQSVFAGTLPTTHPSFSPQKHLEMLPSWQAPPLPDEPVEIFIGILSAGNHFAERMAVRKTWMSAAQKLPNVVARFFVALHGRNEINAELKKEAEFFGDIVIVPFMDSYDLVVLKTIAICEYGVCLSAFFLATMKSL

SEQ ID NO: 162713 - protein, 495 aa, Zea Mays
MRRPSGAGAPCRSRAIQVLVAVSFAYALAVLLLESPFVSTSLLGAGASAAASRKLHLAGAWEGVRRAVPARPAKHPHRETLSSDAGRGRARRLAGIVSGLELCHLNSTRSGSLRKVAAEAAESGARVFSDLEALATALASSRDSSGEEEKSKCPHSIVLSGDEFRERGRAVELPCGLTLGSYITVVATPHEAHPERDPKITLLREGEEPIMVSQFMMELQGLKTVDGEDPPRILHFNPRLRGDWSGKPVIEQNTCYRMQWGTPLRCEGWRSRADEETVDGLVKCEKWIRDDEGRSEESKTSWWLNRLIGRTKTVSVDWSYPFVEDRLFVLTLTAGFEGYHVNVDGRHVTSFPYRTGFVLEDATGLSLDGDLDVQSVFAGTLPTTHPSFSPQKHLEMLPSWQAPPLPDEPVEIFIGILSAGNHFAERMAVRKTWMSAAQKLPNVVARFFVALHGRNEINAELKKEAEFFGDIVIVPFMDSYDLVVLKTIAICEYGT

SEQ ID NO: 162714 - protein, 55 aa, Zea Mays
MAPSPSGAATLVRQCPCSPARFVPVLRGGEGEKWWGRRKGTGGRWRCRNDEVGSS

SEQ ID NO: 162715 - protein, 88 aa, Zea Mays
MLLSYIKFLSYYIYKNENMLWSDNNDFRFTIFSVLPKESFCFVFFTQIPKLPNSHHTLTNQHTLLNTARTTLKNDDTYLITYSLHSKI

SEQ ID NO: 162716 - protein, 58 aa, Zea Mays
MRRGGGPEASTGNDNTISWARKLPLIKVKRKLPLQSPPKRFKQGSSIFKDSTDQKDQE

SEQ ID NO: 162717 - protein, 453 aa, Zea Mays
MGVFDSAASCEKADEPQRVLHNVPRVHPPQSGGKIKKSTKNLCQYSDESLNGSGSLDCCHQGQSGRRKNQDYTTDPGRNDLPIAAHGPQVVLLGSDRRYNSYWLFLGPCREDDPGHRRVYFESSEDGHWEVIDSPQELLSLLSILDSRGTREAHLLTSMEKRQACLFEAMKKHVEGGKAARLPASSDSYCSQTSSGDGTSPKTSSVDGASSVSDIENTSVPTSLKDSNLDSSSAVVIESGRGGDEKISMWERLQAFDKWIWTSFYSILTAVKSGKKSFKESLLRCGSCHDLYWRDEKHCRICHSTFEVGFDLEEKYAVHVATCREPELSHEVPNHKFLPSQLQALKAAIHAIEASMPEAAFTGSWMKSAHKLWVKRLRRTSSLPELLQVLVDFVGAMDVDWLYKSSSARLRTNLDDIIVDFQTMPQTTSAVALWVVQLDALIAPYLDNAMDSW

SEQ ID NO: 162718 - protein, 307 aa, Zea Mays
MEKRQACLFEAMKKHVEGGKAARLPASSDSYCSQTSSGDGTSPKTSSVDGASSVSDIENTSVPTSLKDSNLDSSSAVVIESGRGGDEKISMWERLQAFDKWIWTSFYSILTAVKSGKKSFKESLLRCGSCHDLYWRDEKHCRICHSTFEVGFDLEEKYAVHVATCREPELSHEVPNHKFLPSQLQALKAAIHAIEASMPEAAFTGSWMKSAHKLWVKRLRRTSSLPELLQVLVDFVGAMDVDWLYKSSSARLRTNLDDIIVDFQTMPQTTSAVALWVVQLDALIAPYLDNAMASMFLFTIAMSNDSW

SEQ ID NO: 162719 - protein, 1030 aa, Zea Mays
MPRDQMVTNGFGAKRDNAGAKKSPQQIQRLEKFYSDVQYPKPEEMGEYATCVGLTYSQVRIWFKERRRKERRMEMGAIGSQMERQFSARSSGPRCSSSSSFCNQAPIYDISRSESDTWGMSTAGEESKILSQVLFPKDYILSKIFRKDGPPLGSEFDPLPQSAHGCIRDTTCHHSSENQRTVKKRKIIESTNQRSDVYENTAPVRKHGIGKGLMTVWHAMYSHNVKCQSGRNFIDETGCLRSLRPFDDFDGLEDRDNGRKTQNQGMTRKKIVKRSKVLVNRKKVPCKRVTGPKVHPPMACHLSVDESESLELQTELVTLVDDEELELSELQTDLLAKFPPQSLKMKKLFSTKPWESSPEMVKKLFQPTYIDWRINPDRLSGFGPKQHLLNQEFFNKEKNQMAKYGLRPRTLKGELFALLSKAGSCGLKVSVLAKSSEIIDLNVSSPLELEQLISLALSSDITLFEKIAPSAYRLRVDPQIKGEEDSMSDSDDSGSVDEDEDASRSDDGSDGSQKLKFLENESRLARRKEKNAHGSPNKCSEIDESYSGEKWLLALMEGEYSDLSIDEKLDCLVALIDVVSGAGSVPRLEEPQRVLHNVPRVHPPQSGGKIKKSTKNLCQYSDESLNGSGSLDCCHQGQSGRRKNQDYTTDPGRNDLPIAAHGPQVVLLGSDRRYNSYWLFLGPCREDDPGHRRVYFESSEDGHWEVIDSPQELLSLLSILDSRGTREAHLLTSMEKRQACLFEAMKKHVEGGKAARLPASSDSYCSQTSSGDGTSPKTSSVDGASSVSDIENTSVPTSLKDSNLDSSSAVVIESGRGGDEKISMWERLQAFDKWIWTSFYSILTAVKSGKKSFKESLLRCGSCHDLYWRDEKHCRICHSTFEVGFDLEEKYAVHVATCREPELSHEVPNHKFLPSQLQALKAAIHAIEASMPEAAFTGSWMKSAHKLWVKRLRRTSSLPELLQVLVDFVGAMDVDWLYKSSSARLRTNLDDIIVDFQTMPQTTSAVALWVVQLDALIAPYLDNAMATGEC

SEQ ID NO: 162720 - protein, 405 aa, Zea Mays
MPRDQMVTNGFGAKRDNAGAKKSPQQIQRLEKFYSDVQYPKPEEMGEYATCVGLTYSQVRIWFKERRRKERRMEMGAIGSQMERQFSARSSGPRCSSSSSFCNQAPIYDISRSESDTWGMSTAGEESKILSQVLFPKDYILSKIFRKDGPPLGSEFDPLPQSAHGCIRDTTCHHSSENQRTVKKRKIIESTNQRSDVYENTAPVRKHGIGKGLMTVWHAMYSHNVKCQSGRNFIDETGCLRSLRPFDDFDGLEDRDNGRKTQNQGMTRKKIVKRSKVLVNRKKVPCKRVTGPKVHPPMACHLSVDESESLELQTELVTLVDDEELELSELQTGPNPLRCSAHLSSSGRHDCPLCKDLLAKFPPQSLKMKKLFSTKPWESSPEMVKKLFQIIRLWAKTAFAESRIL

SEQ ID NO: 162721 - protein, 1123 aa, Zea Mays
MPRDQMVTNGFGAKRDNAGAKKSPQQIQRLEKFYSDVQYPKPEEMGEYATCVGLTYSQVRIWFKERRRKERRMEMGAIGSQMERQFSARSSGPRCSSSSSFCNQAPIYDISRSESDTWGMSTAGEESKILSQVLFPKDYILSKIFRKDGPPLGSEFDPLPQSAHGCIRDTTCHHSSENQRTVKKRKIIESTNQRSDVYENTAPVRKHGIGKGLMTVWHAMYSHNVKCQSGRNFIDETGCLRSLRPFDDFDGLEDRDNGRKTQNQGMTRKKIVKRSKVLVNRKKVPCKRVTGPKVHPPMACHLSVDESESLELQTELVTLVDDEELELSELQTDLLAKFPPQSLKMKKLFSTKPWESSPEMVKKLFQIIRYVYTHFGSIDVHPFIFDEFVQAFHDKDSSLLGEVHVGLLKLLLLKAEIGSDGVFVPRSSKDCRFLSFLNFVREQEFDANVWIRSLNALTWVEILRQVLVASGFGPKQHLLNQEFFNKEKNQMAKYGLRPRTLKGELFALLSKAGSCGLKVSVLAKSSEIIDLNVSSPLELEQLISLALSSDITLFEKIAPSAYRLRVDPQIKGEEDSMSDSDDSGSVDEDEDASRSDDGSDGSQKLKFLENESRLARRKEKNAHGSPNKCSEIDESYSGEKWLLALMEGEYSDLSIDEKLDCLVALIDVVSGAGSVPRLEEPQRVLHNVPRVHPPQSGGKIKKSTKNLCQYSDESLNGSGSLDCCHQGQSGRRKNQDYTTDPGRNDLPIAAHGPQVVLLGSDRRYNSYWLFLGPCREDDPGHRRVYFESSEDGHWEVIDSPQELLSLLSILDSRGTREAHLLTSMEKRQACLFEAMKKHVEGGKAARLPASSDSYCSQTSSGDGTSPKTSSVDGASSVSDIENTSVPTSLKDSNLDSSSAVVIESGRGGDEKISMWERLQAFDKWIWTSFYSILTAVKSGKKSFKESLLRCGSCHDLYWRDEKHCRICHSTFEVGFDLEEKYAVHVATCREPELSHEVPNHKFLPSQLQALKAAIHAIEASMPEAAFTGSWMKSAHKLWVKRLRRTSSLPELLQVLVDFVGAMDVDWLYKSSSARLRTNLDDIIVDFQTMPQTTSAVALWVVQLDALIAPYLDNAMARQLVNAR

SEQ ID NO: 162722 - protein, 1118 aa, Zea Mays
MPRDQMVTNGFGAKRDNAGAKKSPQQIQRLEKFYSDVQYPKPEEMGEYATCVGLTYSQVRIWFKERRRKERRMEMGAIGSQMERQFSARSSGPRCSSSSSFCNQAPIYDISRSESDTWGMSTAGEESKILSQVLFPKDYILSKIFRKDGPPLGSEFDPLPQSAHGCIRDTTCHHSSENQRTVKKRKIIESTNQRSDVYENTAPVRKHGIGKGLMTVWHAMYSHNVKCQSGRNFIDETGCLRSLRPFDDFDGLEDRDNGRKTQNQGMTRKKIVKRSKVLVNRKKVPCKRVTGPKVHPPMACHLSVDESESLELQTELVTLVDDEELELSELQTDLLAKFPPQSLKMKKLFSTKPWESSPEMVKKLFQIIRYVYTHFGSIDVHPFIFDEFVQAFHDKDSSLLGEVHVGLLKLLLLKAEIGSDGVFVPRSSKDCRFLSFLNFVREQEFDANVWIRSLNALTWVEILRQVLVASGFGPKQHLLNQEFFNKEKNQMAKYGLRPRTLKGELFALLSKAGSCGLKVSVLAKSSEIIDLNVSSPLELEQLISLALSSDITLFEKIAPSAYRLRVDPQIKGEEDSMSDSDDSGSVDEDEDASRSDDGSDGSQKLKFLENESRLARRKEKNAHGSPNKCSEIDESYSGEKWLLALMEGEYSDLSIDEKLDCLVALIDVVSGAGSVPRLEEPQRVLHNVPRVHPPQSGGKIKKSTKNLCQYSDESLNGSGSLDCCHQGQSGRRKNQDYTTDPGRNDLPIAAHGPQVVLLGSDRRYNSYWLFLGPCREDDPGHRRVYFESSEDGHWEVIDSPQELLSLLSILDSRGTREAHLLTSMEKRQACLFEAMKKHVEGGKAARLPASSDSYCSQTSSGDGTSPKTSSVDGASSVSDIENTSVPTSLKDSNLDSSSAVVIESGRGGDEKISMWERLQAFDKWIWTSFYSILTAVKSGKKSFKESLLRCGSCHDLYWRDEKHCRICHSTFEVGFDLEEKYAVHVATCREPELSHEVPNHKFLPSQLQALKAAIHAIEASMPEAAFTGSWMKSAHKLWVKRLRRTSSLPELLQVLVDFVGAMDVDWLYKSSSARLRTNLDDIIVDFQTMPQTTSAVALWVVQLDALIAPYLDNAMDSW

SEQ ID NO: 162723 - protein, 1117 aa, Zea Mays
MPRDQMVTNGFGAKRDNAGAKKSPQQIQRLEKFYSDVQYPKPEEMGEYATCVGLTYSQVRIWFKERRRKERRMEMGAIGSQMERQFSARSSGPRCSSSSSFCNQAPIYDISRSESDTWGMSTAGEESKILSQVLFPKDYILSKIFRKDGPPLGSEFDPLPQSAHGCIRDTTCHHSSENQRTVKKRKIIESTNQRSDVYENTAPVRKHGIGKGLMTVWHAMYSHNVKCQSGRNFIDETGCLRSLRPFDDFDGLEDRDNGRKTQNQGMTRKKIVKRSKVLVNRKKVPCKRVTGPKVHPPMACHLSVDESESLELQTELVTLVDDEELELSELQTGPNPLRCSAHLSSSGRHDCPLCKDLLAKFPPQSLKMKKLFSTKPWESSPEMVKKLFQDSSLLGEVHVGLLKLLLLKAEIGSDGVFVPRSSKDCRFLSFLNFVREQEFDANVWIRSLNALTWVEILRQVLVASGFGPKQHLLNQEFFNKEKNQMAKYGLRPRTLKGELFALLSKAGSCGLKVSVLAKSSEIIDLNVSSPLELEQLISLALSSDITLFEKIAPSAYRLRVDPQIKGEEDSMSDSDDSGSVDEDEDASRSDDGSDGSQKLKFLENESRLARRKEKNAHGSPNKCSEIDESYSGEKWLLALMEGEYSDLSIDEKLDCLVALIDVVSGAGSVPRLEEPQRVLHNVPRVHPPQSGGKIKKSTKNLCQYSDESLNGSGSLDCCHQGQSGRRKNQDYTTDPGRNDLPIAAHGPQVVLLGSDRRYNSYWLFLGPCREDDPGHRRVYFESSEDGHWEVIDSPQELLSLLSILDSRGTREAHLLTSMEKRQACLFEAMKKHVEGGKAARLPASSDSYCSQTSSGDGTSPKTSSVDGASSVSDIENTSVPTSLKDSNLDSSSAVVIESGRGGDEKISMWERLQAFDKWIWTSFYSILTAVKSGKKSFKESLLRCGSCHDLYWRDEKHCRICHSTFEVGFDLEEKYAVHVATCREPELSHEVPNHKFLPSQLQALKAAIHAIEASMPEAAFTGSWMKSAHKLWVKRLRRTSSLPELLQVLVDFVGAMDVDWLYKSSSARLRTNLDDIIVDFQTMPQTTSAVALWVVQLDALIAPYLDNAMARQLVNAR

SEQ ID NO: 162724 - protein, 1143 aa, Zea Mays
MPRDQMVTNGFGAKRDNAGAKKSPQQIQRLEKFYSDVQYPKPEEMGEYATCVGLTYSQVRIWFKERRRKERRMEMGAIGSQMERQFSARSSGPRCSSSSSFCNQAPIYDISRSESDTWGMSTAGEESKILSQVLFPKDYILSKIFRKDGPPLGSEFDPLPQSAHGCIRDTTCHHSSENQRTVKKRKIIESTNQRSDVYENTAPVRKHGIGKGLMTVWHAMYSHNVKCQSGRNFIDETGCLRSLRPFDDFDGLEDRDNGRKTQNQGMTRKKIVKRSKVLVNRKKVPCKRVTGPKVHPPMACHLSVDESESLELQTELVTLVDDEELELSELQTGPNPLRCSAHLSSSGRHDCPLCKDLLAKFPPQSLKMKKLFSTKPWESSPEMVKKLFQIIRYVYTHFGSIDVHPFIFDEFVQAFHDKDSSLLGEVHVGLLKLLLLKAEIGSDGVFVPRSSKDCRFLSFLNFVREQEFDANVWIRSLNALTWVEILRQVLVASGFGPKQHLLNQEFFNKEKNQMAKYGLRPRTLKGELFALLSKAGSCGLKVSVLAKSSEIIDLNVSSPLELEQLISLALSSDITLFEKIAPSAYRLRVDPQIKGEEDSMSDSDDSGSVDEDEDASRSDDGSDGSQKLKFLENESRLARRKEKNAHGSPNKCSEIDESYSGEKWLLALMEGEYSDLSIDEKLDCLVALIDVVSGAGSVPRLEEPQRVLHNVPRVHPPQSGGKIKKSTKNLCQYSDESLNGSGSLDCCHQGQSGRRKNQDYTTDPGRNDLPIAAHGPQVVLLGSDRRYNSYWLFLGPCREDDPGHRRVYFESSEDGHWEVIDSPQELLSLLSILDSRGTREAHLLTSMEKRQACLFEAMKKHVEGGKAARLPASSDSYCSQTSSGDGTSPKTSSVDGASSVSDIENTSVPTSLKDSNLDSSSAVVIESGRGGDEKISMWERLQAFDKWIWTSFYSILTAVKSGKKSFKESLLRCGSCHDLYWRDEKHCRICHSTFEVGFDLEEKYAVHVATCREPELSHEVPNHKFLPSQLQALKAAIHAIEASMPEAAFTGSWMKSAHKLWVKRLRRTSSLPELLQVLVDFVGAMDVDWLYKSSSARLRTNLDDIIVDFQTMPQTTSAVALWVVQLDALIAPYLDNAMATGEC

SEQ ID NO: 162725 - protein, 392 aa, Zea Mays
MPRDQMVTNGFGAKRDNAGAKKSPQQIQRLEKFYSDVQYPKPEEMGEYATCVGLTYSQVRIWFKERRRKERRMEMGAIGSQMERQFSARSSGPRCSSSSSFCNQAPIYDISRSESDTWGMSTAGEESKILSQVLFPKDYILSKIFRKDGPPLGSEFDPLPQSAHGCIRDTTCHHSSENQRTVKKRKIIESTNQRSDVYENTAPVRKHGIGKGLMTVWHAMYSHNVKCQSGRNFIDETGCLRSLRPFDDFDGLEDRDNGRKTQNQGMTRKKIVKRSKVLVNRKKVPCKRVTGPKVHPPMACHLSVDESESLELQTELVTLVDDEELELSELQTGPNPLRCSAHLSSSGRHDCPLCKDLLAKFPPQSLKMKKLFSTKPWESSPEMVKKLFQVSF

SEQ ID NO: 162726 - protein, 396 aa, Zea Mays
MPRDQMVTNGFGAKRDNAGAKKSPQQIQRLEKFYSDVQYPKPEEMGEYATCVGLTYSQVRIWFKERRRKERRMEMGAIGSQMERQFSARSSGPRCSSSSSFCNQAPIYDISRSESDTWGMSTAGEESKILSQVLFPKDYILSKIFRKDGPPLGSEFDPLPQSAHGCIRDTTCHHSSENQRTVKKRKIIESTNQRSDVYENTAPVRKHGIGKGLMTVWHAMYSHNVKCQSGRNFIDETGCLRSLRPFDDFDGLEDRDNGRKTQNQGMTRKKIVKRSKVLVNRKKVPCKRVTGPKVHPPMACHLSVDESESLELQTELVTLVDDEELELSELQTGPNPLRCSAHLSSSGRHDCPLCKDLLAKFPPQSLKMKKLFSTKPWESSPEMVKKLFQEMEQLFN

SEQ ID NO: 162727 - protein, 369 aa, Zea Mays
MPRDQMVTNGFGAKRDNAGAKKSPQQIQRLEKFYSDVQYPKPEEMGEYATCVGLTYSQVRIWFKERRRKERRMEMGAIGSQMERQFSARSSGPRCSSSSSFCNQAPIYDISRSESDTWGMSTAGEESKILSQVLFPKDYILSKIFRKDGPPLGSEFDPLPQSAHGCIRDTTCHHSSENQRTVKKRKIIESTNQRSDVYENTAPVRKHGIGKGLMTVWHAMYSHNVKCQSGRNFIDETGCLRSLRPFDDFDGLEDRDNGRKTQNQGMTRKKIVKRSKVLVNRKKVPCKRVTGPKVHPPMACHLSVDESESLELQTELVTLVDDEELELSELQTDLLAKFPPQSLKMKKLFSTKPWESSPEMVKKLFQVSF

SEQ ID NO: 162728 - protein, 312 aa, Zea Mays
MTLLMAFCDYLGNSVKDIVSAARPCSPPVRRVTATEDEKENAMEYGLPSSHALNTVCLTGYLLHYILTFGEHGSVTVAAGLSLAFLLVMLVGIARIYLGMHSLTDVVAGIGFGVVILAFWLAVHDRVDAFVVSGENVATFWAGLSLLLCFAYPKPEFPTPSFEYHTAFNGVAFGIVYGIQQTYFHFHTPDAPVVFSAELPLLTFAGRVLVGIPTILAVKFCSKALSKWLLPVVCSTLGIPTVSSCYVPALRADSGSGSGKNRQGPGHLQRLLFSHFPRKAYDVDTGIRFVQYASLAWSVVDLVPAMFAHLNL

SEQ ID NO: 162729 - protein, 595 aa, Zea Mays
MAASARGSVWEIQPRDVEAAGLAAADAAAFHAALRSAAGSAAASGDAVWAAVAAAGVLRPEHPHALHQLVYYSAYAGWDRAARGPPPYWFPSPTDCKQTNLGRLMEVNGPKLLGSSYRDPISSFNHFYRFSVENQEVYWSMVLKQLAVKFKQEPMSILSTSDRSKKGGTWLQGAVLNIAECCLLPCPSLKRTDDSTAIIWRDEGLDDYPVNRMSLKELRSQVITVAHALDAIFEKGDPIAIDTPMTCNAVIIYLAIILGGFVVVSIADSFAPQEIGSRMGVSKAKAIFTQDFIVRGGKKVPLYSRVIQGTSSKAVVIPAIGDSLGIMLRDGDMSWKDFLSHAAGRSSSYSPVYQSVDALTNILFSSGTTGEPKAIPWTQLSPIRCASDTWAHLDVRPCDIGCWPTNLGWVMGPIIIYSCFLTGATLALYHGSPLGRDFCKFVQDAGVTVLGSVPSLVKSWKAGNCAEGLDWTKIRVLGTTGEASDIDDNLWLTSRASYKPIVECCGGTELASSYIQGSLLRPQAFGAFSGASMSTGFVILDEQGTPLMIYLALEKWVSSLCILVLLIGFSTLIMTRFTSMECPFIKEGNSDDMEI

SEQ ID NO: 162730 - protein, 587 aa, Zea Mays
MAASARGSVWEIQPRDVEAAGLAAADAAAFHAALRSAAGSAAASGDAVWAAVAAAGVLRPEHPHALHQLVYYSAYAGWDRAARGPPPYWFPSPTDCKQTNLGRLMEVNGPKLLGSSYRDPISSFNHFYRFSVENQEVYWSMVLKQLAVKFKQEPMSILSTSDRSKKGGTWLQGAVLNIAECCLLPCPSLKRTDDSTAIIWRDEGLDDYPVNRMSLKELRSQVITVAHALDAIFEKGDPIAIDTPMTCNAVIIYLAIILGGFVVVSIADSFAPQEIGSRMGVSKAKAIFTQDFIVRGGKKVPLYSRVIQGTSSKAVVIPAIGDSLGIMLRDGDMSWKDFLSHAAGRSSSYSPVYQSVDALTNILFSSGTTGEPKAIPWTQLSPIRCASDTWAHLDVRPCDIGCWPTNLGWVMGPIIIYSCFLTGATLALYHGSPLGRDFCKFVQDAGVTVLGSVPSLVKSWKAGNCAEGLDWTKIRVLGTTGEASDIDDNLWLTSRASYKPIVECCGGTELASSYIQGSLLRPQAFGAFSGASMSTGFVILDEQGTPYWVSSLCILVLLIGFSTLIMTRFTSMECPFIKEGNSDDMEI

SEQ ID NO: 162731 - protein, 610 aa, Zea Mays
MAASARGSVWEIQPRDVEAAGLAAADAAAFHAALRSAAGSAAASGDAVWAAVAAAGVLRPEHPHALHQLVYYSAYAGWDRAARGPPPYWFPSPTDCKQTNLGRLMEVNGPKLLGSSYRDPISSFNHFYRFSVENQEVYWSMVLKQLAVKFKQEPMSILSTSDRSKKGGTWLQGAVLNIAECCLLPCPSLKRTDDSTAIIWRDEGLDDYPVNRMSLKELRSQVITVAHALDAIFEKGDPIAIDTPMTCNAVIIYLAIILGGFVVVSIADSFAPQEIGSRMGVSKAKAIFTQDFIVRGGKKVPLYSRVIQGTSSKAVVIPAIGDSLGIMLRDGDMSWKDFLSHAAGRSSSYSPVYQSVDALTNILFSSGTTGEPKAIPWTQLSPIRCASDTWAHLDVRPCDIGCWPTNLGWVMGPIIIYSCFLTGATLALYHGSPLGRDFCKFVQDAGVTVLGSVPSLVKSWKAGNCAEGLDWTKIRVLGTTGEASDIDDNLWLTSRASYKPIVECCGGTELASSYIQGSLLRPQAFGAFSGASMSTGFVILDEQGTPYPDDIPCSGEVGLFPLYFGATDRLLNADHDKVYFDGMPIYKGRTTWRYNPEDSRRVLYCTGKGG

SEQ ID NO: 162732 - protein, 323 aa, Zea Mays
MIGVGGNDWKHYVRRNPHVVKRRIRKGIPDCLRGLVWQLISGSRDLLLMNPGVYETLVIYETSASELEIIRDISRTFPSHIFFQQRHGPGQRSLYNILKAYSVYDRDVGYVQGMGFLAGLLLLYMSEEDAFWLLVALLKGAVHAPMEGLYQAGLPLVQQYLSQFEKLVIELMPKLGQHFVEEMINPSMYASQWFITVFSYSFPFHLTLRVWDVFLYEGIKVVFQVGLALLRLCHDDLVKLPFEKLLYALRNFPEEATDPDVLLPLAFSFKVSSRLEELQKEYQKRQEGTSETSSGERLQPLVSKTMSRVGSRVVSNLTTADRK

SEQ ID NO: 162733 - protein, 448 aa, Zea Mays
MKLVYMVTLLPLLFMSGVLEAAGAGNDSSADGTNGNLHSSGTSRPAAAPRGRSLQASQSSVYSVDRYGARGDGRNDDTRALEMAWKAACASPRPAVVLVPDGRRYLLKLLTLRGPCKSSVTLTVKGTLVASPNRADWSDNDRRHWIVFRSIDKLTVNGGGAIDGNGEKWWPHSCKINKALPCKEAPTALSFHYCVDLKVEDLKIVNSQQIHMSVEDSANALLARLSITAPGTSPNTDGIHITRSKDVRVTDCKIKTGDDCMSIENGTHNLHVSKVNCGPGHGISIGSLGDDNSRAEVSGITIDSVQLHGTTNGARIKTYQGGSGYAKDITFQNMVMYDVKNPIIIDQNYCDKAKPCGEQESAVQVSGVVFKNIRGTTSTKDAIKMNCSENVPCQGITLQNIDPLDVVKGVLVLSVEVADDAEACLLTPAAAPPQPECPDRARRAAASI

SEQ ID NO: 162734 - protein, 738 aa, Zea Mays
MLTWRTNSRGSDIGLAKYDSGEIGHGKYDSGEIPRGYIPSLTHSQISGEIPGASPDHMMSPVGNIGRRGHQFPYVNHSPNPSREFSGSLGNVAWKERVDGWKMKDKGAIPMTNGTSIAPSEGRGVADIDASTDYNMEDALLNDETRQPLSRKVPIPSSRINPYRMVIVLRLAVLCIFLRYRITHPVNNAYPLWLLSVICEIWFALSWILDQFPKWSPINRETYLDRLALRYDREGEPSQLAPVDIFVSTVDPMKEPPLVTANTVLSILAVDYPVDKVSCYVSDDGAAMLTFDALSETSEFARKWVPFCKKYNIEPRAPEWYFAQKIDYLKDKVQTSFVKERRAMKREYEEFKVRINGLVANAQKVPEEGWIMQDGTPWPGNNTRDHPGMIQVFLGHSGGLDVEGNELPRLVYVSREKRPGFQHHKKAGAMNALVRVSAVLTNGQYMLNLDCDHYINNSKALREAMCFLMDPNLGRNVCYVQFPQRFDGIDRNDRYANRNTVFFDINLRGLDGIQGPVYVGTGCVFNRTALYGYEPPVKKKKPGFFSSLCGGRKKTSKSKKSSEKKKSHRHADSSVPVFNLEDIEEGIEGSQFDDEKSLIMSQMSLEKRFGQSSVFVASTLMEYGGVPQSATPESLLKEAIHVISCGYEDKTDWGTEIGWIYGSVTEDILTGFKMHARGWRSIYCMPKRPAFKGSAPINLSDRLNQVLRWALGSIEILFSRHCPICSLSSHWEVHHPKD

SEQ ID NO: 162735 - protein, 186 aa, Zea Mays
MLHEQQAPPPPSINPDDDGGRDVEVTTFRDIHPLTPDAPPPASASWDTASHRSLSSSDDQQYMTMSREFTAMVAAGATMQTGGYDGAADQLTSIGEDELEETNPLAIVPDSHPIATPARSRRRRWRPRSRPGRRPRSPRSTTASRGRMWSSTAGRPSRWRRPPRGSRRSRGSWTSSAPRCWSSPTS

SEQ ID NO: 162736 - protein, 528 aa, Zea Mays
MTVTPRITVWDGRLVAHGRSVLAGVPDNIVLTHASGAGLVDGAFVGATAAEPSSMHVFTFGTLRDLRFVCCFRFKLWWMTQRMGTSGRDVPLETQFMLLECGPGDGHGDGDAAVYVAMLPLLEGQFRAALQGNDRDELEITLESGDKAVQTAQGTCMLYVHAGTNPFDTITQAVKVVERHMQTFHHREKKKLPSFVDWFGWCTWDAFYTDVTAESVKQGLKSLADGGTPPRFLIIDDGWQQIGSENKEESANAVVQEGAQFASRLTGIKENAKFQKKTKTKESGGGGGEQQAQTPGLKLLVEEAKREHGVRYVYVWHAMAGYWGGVKPAAEGMEHYESALAYPVQSPGVMGNQPDIVMDSLSVLGLGLVHPRRALSFYDELHSYLASCGVDGVKVDVQNIIETLGAGHGGRVALTRAYHRALEDSVARNFPDNGCISCMCHNTDMLYSARQTAVVRASDDFYPRDPASHTVHVSSVAYNTLFLGEFMQPDWDMFHSLHPAADYHGAARAIGGCPIYVRPLSQSLISGI

SEQ ID NO: 162737 - protein, 562 aa, Zea Mays
MTVTPRITVWDGRLVAHGRSVLAGVPDNIVLTHASGAGLVDGAFVGATAAEPSSMHVFTFGTLRDLRFVCCFRFKLWWMTQRMGTSGRDVPLETQFMLLECGPGDGHGDGDAAVYVAMLPLLEGQFRAALQGNDRDELEITLESGDKAVQTAQGTCMLVVERHMQTFHHREKKKLPSFVDWFGWCTWDAFYTDVTAESVKQGLKSLADGGTPPRFLIIDDGWQQIGSENKEESANAVVQEGAQFASRLTGIKENAKFQKKTKTKESGGGGGEQQAQTPGLKLLVEEAKREHGVRYVYVWHAMAGYWGGVKPAAEGMEHYESALAYPVQSPGVMGNRRLPDIRQRQARQPQLRAAQEAGAPRRLRAPRAAPGPPHPRLPLRRPGARRHEPAQDLEREQVHGRGGRVQLPGRRVVPRHQEDPGARRGAGDADGVGPRRRRGRDRRPRRGRLGRRGRRVRLQVRGASQAAPGRHTAGDAQGAGVRGVPRLPRQGGRAGRVVRAHRPARHVQLRRGGGAVRGPWRRERGRRRRAQGPRLRPLRRVLLAAAREVHAGRDGGGVQPRR

SEQ ID NO: 162738 - protein, 308 aa, Zea Mays
MWYGSFPTKGKYCHEMALRILLASIESHANRYKRYIVPVLSVFMDFYIRVFVRVFTSASEIKNTPLKLSYIYQCVGCDSFHLQCLARTVPKKNNGVKHAPAFGPVVPQECSDCGKKFNVGGPIWSAPIHDQDWVVSTLTGVKSMKDRYPAYDKITSVLTTVSEELDDIPLFFSLHNIAGTVKCTSPSLVMFRSAVLNAGYRISSTHVNPLGVKSDAPWDVIWDIMRCWVKNHPIKEQARDSPGTVILSKSPKLETFPEQLLPSANLGQRRRNDSFQTQSGTGARRSEQAGRSRANTSLCWALMPSTLP

SEQ ID NO: 162739 - protein, 549 aa, Zea Mays
MAEVDDKLKDYEIRKEGEAEILLHKRNAVFYNPVQVHNRDMSIAVLRTFIAKRKEEHEALVDKRNTSHGKDKLSEISCQNGEDASTGQQDEMELNKAEVQIDDLSKEATKPPWKVTRELKPPLVLEALAATGLRSLRYAREVEGLGKIVALDNDKASVEDCKRNIKFNGASTTSKVETYLVDARIHMLMHPKEFDVVDLDPYGSPSIFLDSAVQAVADGGLLMCTATDMAVLCGANGEVCYSKYGSFPTKGKYCHEMALRILLASIESHANRYKRYIVPVLSVFMDFYIRVFVRVFTSASEIKNTPLKLSYIYQCVGCDSFHLQCLARTVPKKNNGVKHAPAFGPVVPQECSDCGKKFNVGGPIWSAPIHDQDWVVSTLTGVKSMKDRYPAYDKITSVLTTVSEELDDIPLFFSLHNIAGTVKCTSPSLVMFRSAVLNAGYRISSTHVNPLGVKSDAPWDVIWDIMRCWVKNHPIKEQARDSPGTVILSKSPKLETFPEQLLPSANLGQRRRNDSFQTQSGTGARRSEQAGRSRANTSLCWALMPSTLP

SEQ ID NO: 162740 - protein, 802 aa, Zea Mays
MGADAARTPAPHALLLPYPAQGHVIPFMELADRLLDRGFAVTFVNTEFNHRRVVVAAGGGRAPDGRLRLVGVADGMGDGEDRDNFVRLNACMKEAMPLRLDALLDADDERLGRVTCVVVDVGMSWALDAVKRRGLPAAALWPASAAVLAVLFGAKKLIRDGVIDDDGAPVKQENHSFRLAESMPPMDAVFLAWNYMGNRDVERMVFHYLTTTAWAAVAKADVVLCNTFEDLEPDIFGAHSPAAASILPIGPLRTCQRRTSEAPAGHFWRADDEACASFLDAQPRGSVTYVAFGSLTVMSPAQLQELALALLASARPFLWVFRPGLAAELPPAFTDLLPRHARGKVVEWAPQEKVLAHPAVGCFLTHCGWNSTLEGVRHGVPLLCWPYFTDQFTNQAYICDIWKVGLRVVPDGGDGIVAKERIMERLTSLMGDSGVKERVKRLKELAERSMGPEGKSLKNINAFMESMTKRSPVLAPRHLVVGHWITASCNLQPGGRGPLDQRHIRGEESSEDPNDADGEAVTAEQRLLGSPAPGPGCWHLNSSMRLHLVSNGILPPHSIWKDSWIAARSVMKVRTFQIIVLQGIVGSLPWAAVVFFTMWFELIGFDNSSSAALNSFFAIGCASGSFLGGVIADVLSRYYPDSARVMCAQFSAFMGIPFSWILLTVIPQSVDYWSAYAVTLFLMGITISWCATCANNPMFAEVVPPKHRTMIYAFDRAFEGSFGSLAAPAVGLVTEKIYGYNAKAVDLSHGSVDGAYALSRGLLTMMIVPFALCLMFYTPLYTVFKRDRENARLASIKEQELT

SEQ ID NO: 162741 - protein, 433 aa, Zea Mays
MVRVRAGAPVKQENHSFRLAESMPPMDAVFLAWNYMGNRDVERMVFHYLTTTAWAAVAKADVVLCNTFEDLEPDIFGAHSPAAASILPIGPLRTCQRRTSEAPAGHFWRADDEACASFLDAQPRGSVTYVAFGSLTVMSPAQLQELALALLASARPFLWVFRPGLAAELPPAFTDLLPRHARGKVVEWAPQEKVLAHPAVGCFLTHCGWNSTLEGVRHGVPLLCWPYFTDQFTNQAYICDIWKVGLRVVPDGGDGIVAKERIMERLTSLMGDSGVKERVKRLKELAERSMGPEGKSLKNINAFMESMTKRSPVLAPRHLVVGHWITASCNLQPGGRGPLDQRHIRGEESSEDPNDADGEAVTAEQRLLGSPAPGPGCWHLNSSMRSKKIFGLSISLVLINLASILERADENLLPAVYKEVFLLFTMTALQCLR

SEQ ID NO: 162742 - protein, 849 aa, Zea Mays
MGADAARTPAPHALLLPYPAQGHVIPFMELADRLLDRGFAVTFVNTEFNHRRVVVAAGGGRAPDGRLRLVGVADGMGDGEDRDNFVRLNACMKEAMPLRLDALLDADDERLGRVTCVVVDVGMSWALDAVKRRGLPAAALWPASAAVLAVLFGAKKLIRDGVIDDDGAPVKQENHSFRLAESMPPMDAVFLAWNYMGNRDVERMVFHYLTTTAWAAVAKADVVLCNTFEDLEPDIFGAHSPAAASILPIGPLRTCQRRTSEAPAGHFWRADDEACASFLDAQPRGSVTYVAFGSLTVMSPAQLQELALALLASARPFLWVFRPGLAAELPPAFTDLLPRHARGKVVEWAPQEKVLAHPAVGCFLTHCGWNSTLEGVRHGVPLLCWPYFTDQFTNQAYICDIWKVGLRVVPDGGDGIVAKERIMERLTSLMGDSGVKERVKRLKELAERSMGPEGKSLKNINAFMESMTKRSPVLAPRHLVVGHWITASCNLQPGGRGPLDQRHIRGEESSEDPNDADGEAVTAEQRLLGSPAPGPGCWHLNSSMRSKKIFGLSISLVLINLASILERADENLLPAVYKEVSAAFDAGPTDLGLHLVSNGILPPHSIWKDSWIAARSVMKVRTFQIIVLQGIVGSLPWAAVVFFTMWFELIGFDNSSSAALNSFFAIGCASGSFLGGVIADVLSRYYPDSARVMCAQFSAFMGIPFSWILLTVIPQSVDYWSAYAVTLFLMGITISWCATCANNPMFAEVVPPKHRTMIYAFDRAFEGSFGSLAAPAVGLVTEKIYGYNAKAVDLSHGSVDGAYALSRGLLTMMIVPFALCLMFYTPLYTVFKRDRENARLASIKEQELT

SEQ ID NO: 162743 - protein, 650 aa, Zea Mays
MSAPRLRLCRLRLRRCWRRRRRARKPWRSLPATPPHTRRRRQMRMPRLRYRIPLPPPCRRRCSRPSPPTTTATRRTTGSTRCSPGPPASRSGTRWARRPKGTVRATTTTTDWGAAASSRSYGGNRGLRRSVSTWTKRTGRWLRVRGRGRRQRGRGARGRGKRRHRPWSRPGRRSDLRRKGGRSLIRSMPSHRGCCGRRGRRRSNQLCSQFTSPSHLSWRRSAFVRWRSNTSIEDSDDNDAVPEPVVDLAEQLDVPQSKEVALDKDLRIDGAEKELGANGHSLDRCDSVQEDEDGLSCKEKYLYNCGTKASDEEFSDRLQENHENTQPSNNHNDSVDQSQLPPSSSPTESTDEISSEDEENNDKENMDPSAQNNDVHTLEHLQQAIGGNSRPDDAILKDFLDDEAEEEDDSDNDMTRFKDNEEDDGSDENEVFNDLIAAGYEEKEVDHEKRNELHQKWLQQQDAAETNNVDNNTLISPLEDDNSREVFSLIKKLNIAPKPKMRGKQSTSNHEMLMAGRNTIASKSSFLGRTASGSLASSHRSVYRSYVFGRDDSNSSSRSCISTSESNLDLDQTNSSQPKKAKFSSQPKPEGTRATPECNTSSGVSLFDVLRRTSEQSSQESCSTITESQAVHQFSAFKLSRRFSKVGSKN

SEQ ID NO: 162744 - protein, 530 aa, Zea Mays
MDTEPFDEAELLALPPSPVASPPRRLKRLKKSSSQATATTATTTSPHVGSPPPPLSPPPPPLLAEATPGEETLAFPSRDTSPHPPTPPDADAPTPLPHPSPAPVSPPLQPTVTPDNDSDEEDDGLDPLFSGAAGVAQWDPLGAPAEGDGEGDDDDDGLGGGGLIEELRREQRSAKKRLDMDEADGEVASGAGARAEAKGKRSKRKRKEEAPTMESAREKKRSEKERRAQLDSIHAESQRLLRETRKASFKPTVQPVHKPISSVLEKIRLRKMEVLKKYRFFSLRSNTSIEDSDDNDAVPEPVVDLAEQLDVPQSKEVALDKDLRIDGAEKELGANGHSLDRCDSVQEDEDGLSCKEKYLYNCGTKASDEEFSDRLQENHENTQPSNNHNDSVDQSQLPPSSSPTESTDEISSEDEENNDKENMDPSAQNNDVHTLEHLQQAIGGNSRPDDAILKDFLDDEAEEEDDSDNDMTRFKDNEEDDGSDENEVFNDLIAAGYEEKEVDHEKRNELHQKWLQQQDAAETNKLIIIH

SEQ ID NO: 162745 - protein, 698 aa, Zea Mays
MDTEPFDEAELLALPPSPVASPPRRLKRLKKSSSQATATTATTTSPHVGSPPPPLSPPPPPLLAEATPGEETLAFPSRDTSPHPPTPPDADAPTPLPHPSPAPVSPPLQPTVTPDNDSDEEDDGLDPLFSGAAGVAQWDPLGAPAEGDGEGDDDDDGLGGGGLIEELRREQRSAKKRLDMDEADGEVASGAGARAEAKGKRSKRKRKEEAPTMESAREKKRSEKERRAQLDSIHAESQRLLRETRKASFKPTVQPVHKPISSVLEKIRLRKMEVLKKSNTSIEDSDDNDAVPEPVVDLAEQLDVPQSKEVALDKDLRIDGAEKELGANGHSLDRCDSVQEDEDGLSCKEKYLYNCGTKASDEEFSDRLQENHENTQPSNNHNDSVDQSQLPPSSSPTESTDEISSEDEENNDKENMDPSAQNNDVHTLEHLQQAIGGNSRPDDAILKDFLDDEAEEEDDSDNDMTRFKDNEEDDGSDENEVFNDLIAAGYEEKEVDHEKRNELHQKWLQQQDAAETNNVDNNTLISPLEDDNSREVFSLIKKLNIAPKPKMRGKQSTSNHEMLMAGRNTIASKSSFLGRTASGSLASSHRSVYRSYVFGRDDSNSSSRSCISTSESNLDLTNSSQPKKAKFSSQPKPEGTRATPECNTSSGVSLFDVLRRTSEQSSQESCSTITESQAVHQFSAFKLSRRFSKVGSKN

SEQ ID NO: 162746 - protein, 152 aa, Zea Mays
MAEVLDKHLSMVQRDHEQKSQIVERRIRDDAALEEAKRKEQAVKEEKLRQERAQQEAEARQKEAAKLAAEARKTAFEAAKKEAAEKQAAKLRDAAATSQSSPDLQNNIADIKVFGVKYALEAESRRYALVQNQVPENIHHNKVLFTAETSNI

SEQ ID NO: 162747 - protein, 192 aa, Zea Mays
MLLVTNQVPDAMDYLLAEFNRVCIYTVPKHLHALNAEARNRDYYRLIGYQEENGQFESTESYLTYVVAYVKLYAAMIQTEIKGVRHPHGLAEGWKWLAMFLNSLPATTATACALHAFLKMAGFALHKKYGSQFMKILYVISRYFLPALKEQGNKMQAEAVNNLQNYLNDKIYLEEPEGQYLVQQLLSKELFM

SEQ ID NO: 162748 - protein, 400 aa, Zea Mays
MVQRDHEQKSQIVERRIRDDAALEEAKRKEQAVKEEKLRQERAQQEAEARQKEAAKLAAEARKTAFEAAKKEAAEKQAAKLRDAAATSQSSPDLQNNIADIKVFGVKYALEAESRRYALVQNQVPENIHHNKEFSKYDRQIAKSISKLMPTTDSVRARASELIKALDGQDCPRPISCCLFANKIISIVKSRNTKDRTFGNLAFACGYVMLLVTNQVPDAMDYLLAEFNRVCIYTVPKHLHALNAEARNRDYYRLIGYQEENGQFESTESYLTYVVAYVKLYAAMIQTEIKGVRHPHGLAEGWKWLAMFLNSLPATTATACALHAFLKMAGFALHKKYGSQFMKILYVISRYFLPALKEQGNKMQAEAVNNLQNYLNDKIYLEEPEGQYLVQQLLSKELFM

SEQ ID NO: 162749 - protein, 557 aa, Zea Mays
MGFERVELRCPRDLDPRPSWTLGDVLAELDALDATRRAAPPTPLKQPPHWVNGVGTREKAFVMRVDGYDEDDLEDEDDGTSAGKSRALMAKGARFSCNDLQSSDSEDELDGQVTPYNLMEKRDLAKSILLELESEHHLKVQEEVRSKLALLEVCHQNEIHRTISAFARLQKYAESRKEIDRRLDVHFQRRMAEVLDKHLSMVQRDHEQKSQIVERRIRDDAALEEAKRKEQAVKEEKLRQERAQQEAEARQKEAAKLAAEARKTAFEAAKKEAAEKQAAKLRDAAATSQSSPDLQNNIADIKVFGVKYALEAESRRYALVQNQVPENIHHNKEFSKYDRQIAKSISKLMPTTDSVRARASELIKALDGQDCPRPISCCLFANKIISIVKSRNTKDRTFGNLAFACGYVMLLVTNQVPDAMDYLLAEFNRVCIYTVPKHLHALNTEIKGVRHPHGLAEGWKWLAMFLNSLPATTATACALHAFLKMAGFALHKKYGSQFMKILYVISRYFLPALKEQGNKMQAEAVNNLQNYLNDKIYLEEPEGQYLVQQLLSKELFM

SEQ ID NO: 162750 - protein, 452 aa, Zea Mays
MGFERVELRCPRDLDPRPSWTLGDVLAELDALDATRRAAPPTPLKQPPHWVNGVGTREKAFVMRVDGYDEDDLEDEDDGTSAGKSRALMAKGARFSCNDLQSSDSEDELDGQVTPYNLMEKRDLAKSILLELESEHHLKVQEEVRSKLALLEVCHQNEIHRTISAFARLQKYAESRKEIDRRLDVHFQRRMAEVLDKHLSMVQRDHEQKSQIVERRIRDDAALEEAKRKEQAVKEEKLRQERAQQEAEARQKEAAKLAAEARKTAFEAAKKEAAEKQAAKLRDAAATSQSSPDLQNNIADIKVFGVKYALEAESRRYALVQNQVPENIHHNKEFSKYDRQIAKSISKLMPTTDSVRARASELIKALDGQDCPRPISCCLFANKIISIVKSRNTKDRTFGNLAFACGYVMLLVTNQVPDAMDYLLAEFNRVCIYTVPKHLHALNKHEIEIITD

SEQ ID NO: 162751 - protein, 333 aa, Zea Mays
MEKRDLAKSILLELESEHHLKVQEEVRSKLALLEVCHQNEIHRTISAFARLQKYAESRKEIDRRLDVHFQRRMAEVLDKHLSMVQRDHEQKSQIVERRIRDDAALEEAKRKEQAVKEEKLRQERAQQEAEARQKEAAKLAAEARKTAFEAAKKEAAEKQAAKLRDAAATSQSSPDLQNNIADIKVFGVKYALEAESRRYALVQNQVPENIHHNKEFSKYDRQIAKSISKLMPTTDSVRARASELIKALDGQDCPRPISCCLFANKIISIVKSRNTKDRTFGNLAFACGYVMLLVTNQVPDAMDYLLAEFNRVCIYTVPKHLHALNVSLHGMTL

SEQ ID NO: 162752 - protein, 452 aa, Zea Mays
MGFERVELRCPRDLDPRPSWTLGDVLAELDALDATRRAAPPTPLKQPPHWVNGVGTREKAFVMRVDGYDEDDLEDEDDGTSAGKSRALMAKGARFSCNDLQSSDSEDELDGQVTPYNLMEKRDLAKSILLELESEHHLKVQEEVRSKLALLEVCHQNEIHRTISAFARLQKYAESRKEIDRRLDVHFQRRMAEVLDKHLSMVQRDHEQKSQIVERRIRDDAALEEAKRKEQAVKEEKLRQERAQQEAEARQKEAAKLAAEARKTAFEAAKKEAAEKQAAKLRDAAATSQSSPDLQNNIADIKVFGVKYALEAESRRYALVQNQVPENIHHNKEFSKYDRQIAKSISKLMPTTDSVRARASELIKALDGQDCPRPISCCLFANKIISIVKSRNTKDRTFGNLAFACGYVMLLVTNQVPDAMDYLLAEFNRVCIYTVPKHLHALNVSLHGRSTK

SEQ ID NO: 162753 - protein, 454 aa, Zea Mays
MGFERVELRCPRDLDPRPSWTLGDVLAELDALDATRRAAPPTPLKQPPHWVNGVGTREKAFVMRVDGYDEDDLEDEDDGTSAGKSRALMAKGARFSCNDLQSSGFSDSEDELDGQVTPYNLMEKRDLAKSILLELESEHHLKVQEEVRSKLALLEVCHQNEIHRTISAFARLQKYAESRKEIDRRLDVHFQRRMAEVLDKHLSMVQRDHEQKSQIVERRIRDDAALEEAKRKEQAVKEEKLRQERAQQEAEARQKEAAKLAAEARKTAFEAAKKEAAEKQAAKLRDAAATSQSSPDLQNNIADIKVFGVKYALEAESRRYALVQNQVPENIHHNKEFSKYDRQIAKSISKLMPTTDSVRARASELIKALDGQDCPRPISCCLFANKIISIVKSRNTKDRTFGNLAFACGYVMLLVTNQVPDAMDYLLAEFNRVCIYTVPKHLHALNVSLHGMTL

SEQ ID NO: 162754 - protein, 304 aa, Zea Mays
MGFERVELRCPRDLDPRPSWTLGDVLAELDALDATRRAAPPTPLKQPPHWVNGVGTREKAFVMRVDGYDEDDLEDEDDGTSAGKSRALMAKGARFSCNDLQSSDSEDELDGQVTPYNLMEKRDLAKSILLELESEHHLKVQEEVRSKLALLEVCHQNEIHRTISAFARLQKYAESRKEIDRRLDVHFQRRMAEVLDKHLSMVQRDHEQKSQIVERRIRDDAALEEAKRKEQAVKEEKLRQERAQQEAEARQKEAAKLAAEARKTAFEAAKKEAAEKQAAKLRDAAATSQSSPDLQNNIAGIQQI

SEQ ID NO: 162755 - protein, 439 aa, Zea Mays
MEKRDLAKSILLELESEHHLKVQEEVRSKLALLEVCHQNEIHRTISAFARLQKYAESRKEIDRRLDVHFQRRMAEVLDKHLSMVQRDHEQKSQIVERRIRDDAALEEAKRKEQAVKEEKLRQERAQQEAEARQKEAAKLAAEARKTAFEAAKKEAAEKQAAKLRDAAATSQSSPDLQNNIADIKVFGVKYALEAESRRYALVQNQVPENIHHNKEFSKYDRQIAKSISKLMPTTDSVRARASELIKALDGQDCPRPISCCLFANKIISIVKSRNTKDRTFGNLAFACGYVMLLVTNQVPDAMDYLLAEFNRVCIYTVPKHLHALNTEIKGVRHPHGLAEGWKWLAMFLNSLPATTATACALHAFLKMAGFALHKKYGSQFMKILYVISRYFLPALKEQGNKMQAEAVNNLQNYLNDKIYLEEPEGQYLVQQLLSKELFM

SEQ ID NO: 162756 - protein, 389 aa, Zea Mays
MRVDGYDEDDLEDEDDGTSAGKSRALMAKGARFSCNDLQSSDSEDELDGQVTPYNLMEKRDLAKSILLELESEHHLKVQEEVRSKLALLEVCHQNEIHRTISAFARLQKYAESRKEIDRRLDVHFQRRMAEVLDKHLSMVQRDHEQKSQIVERRIRDDAALEEAKRKEQAVKEEKLRQERAQQEAEARQKEAAKLAAEARKTAFEAAKKEAAEKQAAKLRDAAATSQSSPDLQNNIADIKVFGVKYALEAESRRYALVQNQVPENIHHNKEFSKYDRQIAKSISKLMPTTDSVRARASELIKALDGQDCPRPISCCLFANKIISIVKSRNTKDRTFGNLAFACGYVMLLVTNQVPDAMDYLLAEFNRVCIYTVPKHLHALNVSLHGMTL

SEQ ID NO: 162757 - protein, 603 aa, Zea Mays
MGFERVELRCPRDLDPRPSWTLGDVLAELDALDATRRAAPPTPLKQPPHWVNGVGTREKAFVMRVDGYDEDDLEDEDDGTSAGKSRALMAKGARFSCNDLQSSGFSDSEDELDGQVTPYNLMEKRDLAKSILLELESEHHLKVQEEVRSKLALLEVCHQNEIHRTISAFARLQKYAESRKEIDRRLDVHFQRRMAEVLDKHLSMVQRDHEQKSQIVERRIRDDAALEEAKRKEQAVKEEKLRQERAQQEAEARQKEAAKLAAEARKTAFEAAKKEAAEKQAAKLRDAAATSQSSPDLQNNIADIKVFGVKYALEAESRRYALVQNQVPENIHHNKEFSKYDRQIAKSISKLMPTTDSVRARASELIKALDGQDCPRPISCCLFANKIISIVKSRNTKDRTFGNLAFACGYVMLLVTNQVPDAMDYLLAEFNRVCIYTVPKHLHALNAEARNRDYYRLIGYQEENGQFESTESYLTYVVAYVKLYAAMIQTEIKGVRHPHGLAEGWKWLAMFLNSLPATTATACALHAFLKMAGFALHKKYGSQFMKILYVISRYFLPALKEQGNKMQAEAVNNLQNYLNDKIYLEEPEGQYLVQQLLSKELFM

SEQ ID NO: 162758 - protein, 133 aa, Zea Mays
MVQRDHEQKSQIVERRIRDDAALEEAKRKEQAVKEEKLRQERAQQEAEARQKEAAKLAAEARKTAFEAAKKEAAEKQAAKLRDAAATSQSSPDLQNNIAGWSYVKGGPGAVLEPTVCNRKVPGSSPSLCILCG

SEQ ID NO: 162759 - protein, 333 aa, Zea Mays
MGFERVELRCPRDLDPRPSWTLGDVLAELDALDATRRAAPPTPLKQPPHWVNGVGTREKAFVMRVDGYDEDDLEDEDDGTSAGKSRALMAKGARFSCNDLQSSDSEDELDGQVTPYNLMEKRDLAKSILLELESEHHLKVQEEVRSKLALLEVCHQNEIHRTISAFARLQKYAESRKEIDRRLDVHFQRRMAEVLDKHLSMVQRDHEQKSQIVERRIRDDAALEEAKRKEQAVKEEKLRQERAQQEAEARQKEAAKLAAEARKTAFEAAKKEAAEKQAAKLRDAAATSQSSPDLQNNIAGWSYVKGGPGAVLEPTVCNRKVPGSSPSLCILCG

SEQ ID NO: 162760 - protein, 194 aa, Zea Mays
MGFERVELRCPRDLDPRPSWTLGDVLAELDALDATRRAAPPTPLKQPPHWVNGVGTREKAFVMRVDGYDEDDLEDEDDGTSAGKSRALMAKGARFSCNDLQSSDSEDELDGQVTPYNLMEKRDLAKSILLELESEHHLKVQEEVRSKLALLEVCHQNEIHRTISAFARLQKYAESRKEIDRRLDVHFQRRISTR

SEQ ID NO: 162761 - protein, 172 aa, Zea Mays
MCDLVARTGRHQQRCIPFRYRANNDETSGDKTKKLVEVLMINSQSGPGLLFPKGGWENDETVEEAAAREAIEEAGVRGDIVHFLGLYDFKSKTHQDACCPEGMCRAAVFALHVKEELASWPEQSTRQRTWLTVPEAASSCRYQWMQEALLTGFSDWHDKWSRGGGGTNCDPA

SEQ ID NO: 162762 - protein, 475 aa, Zea Mays
MAGATSLAAAANLAGKSSVRVVVIGDPGTGKSSLIVALATEQFPENVPRVMPPTRLPADYFPDRVPITIIDTSSSPEQKPKLIAECQAADAVVLTYACDRPATLERLSSFWLPELRRLQLKAPVIVVGCKLDLRDEQQVSLEQVMAPIMQSFREIETCIECSALRQIQVPEVFYYAQKAVLHPTAPLFDQELQALKPRCVRALKRIFIICDNDKDGALSDVELNEFQVRCFNAPLQPTEISGVKRVVQEKMPEGVNESGLTLTGFLFLHALFIEKGRLETTWTVLRKFGYDNDIKLRDDLIAMPIKRAPDQTLEMTSEVVDFLRGIFNMFDIDNDGALLPTELEDLFSTAPENPWISDPYKDCAEKNVLGGLSLEGFLSKWALMTLLDPTNSYANLAYVGYPGEFSSAFTVTRRRRVDRKKQHTQRNIFQCYVFGARGSGKTSLLQSFIGRQPSDTLPSNSERFATNSVEMADLR

SEQ ID NO: 162763 - protein, 426 aa, Zea Mays
MAGATSLAAAANLAGKSSVRVVVIGDPGTGKSSLIVALATEQFPENVPRVMPPTRLPADYFPDRVPITIIDTSSSPEQKPKLIAECQAADAVVLTYACDRPATLERLSSFWLPELRRLQLKAPVIVVGCKLDLRDEQQVSLEQVMAPIMQSFREIETCIECSALRQIQVPEVFYYAQKAVLHPTAPLFDQELQALKPRCVRALKRIFIICDNDKDGALSDVELNEFQVRCFNAPLQPTEISGVKRVVQEKMPEGVNESGLTLTGFLFLHALFIEKGRLETTWTVLRKFGYDNDIKLRDDLIAMPIKRAPDQTLEMTSEVVDFLRGIFNMFDIDNDGALLPTELEDLFSTAPENPWISDPYKDCAEKNVLGGLSLEGFLSKWALMTLLDPTNSYANLAYVGYPVLCFWCQRLWKDVVATIIHWKATF

SEQ ID NO: 162764 - protein, 518 aa, Zea Mays
MDESGEASVGSFRIGPSTLLGRGVAFRVLLFSSLWRLRARAYAAISRVRSAALPVAASWLHLRNSHGVLLMAVLLALFLRKLSAARSRAALARRRRQHEKAMLHAGTYEVWARAAKVLDKMSEQVHEADFYDEELIRNRLEELRRRREDGSLRDVVFCMRGDLVRNLGNMCNPELHKGRLELARLAEMEVKYRCNQILEIGLPMGGLAKLFAQDWEGDVTMVMPATLAQYLKIIQNPTYAELQMAANQGRRCTWEKLSAIRANCAIELALDESIAVLNHKRRLKRSMERTAAASQGHSNYVRPKTPRRIPSWSRISRENSLESLSEEISAVAASSMQQGAALVVGAPPTTLSQHVRRSSHDGSESESETIDLNSWTRSGGPLMRTASADRFISFIHNIEIDTELSRPCAVEGDAAGILSESTFPNGPRPNNSSSVSMPGRCTENSGTESCNTVNTRASTPTSMAVREGDLLPPESTTDNVLLNIVKRDALQDGVTELAESSCAEGYAANCDTVSGLDC

SEQ ID NO: 162765 - protein, 55 aa, Zea Mays
MKPNKGLIVSASQVSDYKLGEEGDYIWYFYLRFTCYNLQHIRNCLQLILDCKIVL

SEQ ID NO: 162766 - protein, 390 aa, Zea Mays
MVTHIEDLKLRSQSNLNFGSILIMALQDSGGHTNKETHGNRVEGKHGNGHEIFPSSDLVRKSKRIPKKKTLDGDSDDEDGELRYLEKLKGAKVAPDPVNTSHKGYDFGDDALKKKKLSKLSRNKSTPYEVDDDFRMSRSGRDGRKKLNLGDDNEFIEEEESEMDETNGLKEPDSPQGVKIETPGLTTRQRALQGRGGNGESFIEFPDGLPAASSRKQKEKLSDMEIQAKKAEAALRRKMQVEKAEKEQQAEAMRKILGIDSEKKKEEKKLKEREEREKQARLEEYRKNCVQTVMGPTGTVITFPESMGLPSIFNSKPVSYPPPREKCAGPSCTNPYKYRHSKTLVPLCSLACYKAVEDRPPAQGSEGGGGQGSDAGQGTDAAQESAGKQA

SEQ ID NO: 162767 - protein, 353 aa, Zea Mays
MPKMARMLVAVVFLPRWMALFISTSKRIPKKKTLDGDSDDEDGELRYLEKLKGAKVAPDPVNTSHKGYDFGDDALKKKKLSKLSRNKSTPYEVDDDFRMSRSGRDGRKKLNLGDDNEFIEEEESEMDETNGLKEPDSPQGVKIETPGLTTRQRALQGRGGNGESFIEFPDGLPAASSRKQKEKLSDMEIQAKKAEAALRRKMQVEKAEKEQQAEAMRKILGIDSEKKKEEKKLKEREEREKQARLEEYRKNCVQTVMGPTGTVITFPESMGLPSIFNSKPVSYPPPREKCAGPSCTNPYKYRHSKTLVPLCSLACYKAVEDRPPAQGSEGGGGQGSDAGQGTDAAQESAGKQA

SEQ ID NO: 162768 - protein, 82 aa, Zea Mays
MDWQGAPPSPSSHVVKKILRLEVPVDSYPNFNFVGRILGPRGNSLKRVEASTGCRVFIRGKGSIKDSGKVREVSVPFLHSPN

SEQ ID NO: 162769 - protein, 100 aa, Zea Mays
MRVSSIVHNHGFGDFDRHRFRSPSPMSSPNPRANLPGNGFSPWSGLQEVTLKNIFEIKWVTLLYFIHRWMCLFLWEFCPLTLINHISSCNWQCYFRVMMN

SEQ ID NO: 162770 - protein, 173 aa, Zea Mays
MEINGGNGVRSIQEGQQWHLCNHGIEIGRPSPGGDEPGTIPRDVRVENGHGVVGRRDGGPASSYWDLLRAHLSDPLTGVLMDDALILSCGHSYGSSGMQHVYRMKACGKCGMPITEAAIRPNLALRLAVQAFKREEDSAKSLKRRRERLELVYALFQLISHPSNRAAIFVACS

SEQ ID NO: 162771 - protein, 126 aa, Zea Mays
MMCKVKHENLVKFIGACKEPLMVIVSELLPGMSLKSYLHSIRPSQLDTHTAISYALDIAHAMDCLHANGIIHRDLKPDNLLLTANRKKLKLTDFGLAREETVTEMMTAETGTYRWMAPEHSHTSTW

SEQ ID NO: 162772 - protein, 170 aa, Zea Mays
MMTAETGTYRWMAPELYSTVTLRRGEKKHYTNKVDVYSFGIVLWELLTNRMPFEGMSNLQAAYAAAFQQKRPALPEETPQELVFIVQSCWVEDPAMRPSFSQIIRMLETFIMTIHPPPLSEPNEGEESEETRSSLSSRSSSGSSLVSRATSKLSVVRHLFVSKKTGNGKA

SEQ ID NO: 162773 - protein, 263 aa, Zea Mays
MSINAKFRAIQPSSSILSYVEDNLLGRRRLIEIKNAGYNVKISAPLDNVPFSTSTERERIEDIAFRNKLEFFAAAKISSSFPTPTLPEIAFAGVSNVGKSSLLNSLTRQWGVVRTSDKPGLTQTINFFQLASKLCLVDLPGYGFAYAKDEVKESWEELVKEYVSTRVGLERVCLLVHTKRGMKPLDYELVDLMERHKTPYQIVLTKTDLVFPIDVARRAMEIQESLKRNKSVVNPVMMVSSKTGAGIRNLRGVLGKLARFIKP

SEQ ID NO: 162774 - protein, 249 aa, Zea Mays
MQEASLLNTTNQACGLFNEAEVRFLEWTDDLEGFVLKGYGESINYRMGLPLLKDVVQSMEEAIIAREENRADGTFEKARLRFAHAETVVPFSCLLGLFLEGPEIEKIQREEALDLPPLPPQGRNWKGSVVAPFAGNNMLVLYQCPSKISDGSTISGGRNNSYLVQVLHNEVPVSMPGCGNKDFCPFEEFKEKIVKPHLKHDYNMICKVKSPAASEEPASFASRVSSFFLGLLSQKGYRGVGAEGVKTEL

SEQ ID NO: 162775 - protein, 476 aa, Zea Mays
MYDVARESSSVISMPSIPDGCRVIHLNLVARHGTRAPTKKRIKELDRLAVRLEALLKEANQVLDSDSLKKIPSWIKGWESRWKGRTKGGELISEGEEELYNLATRMRERFQDLFDDEYHPDVYSIRATQVPRASASAVAFGLGLLSGKGKLGQGKNRAFSVLSESRASDICLRFFDSCETYKAYRKRKEPDVEKQKEPILEHVTAALVNRYHLKFTTRDVSSLWFLCKQEASLLNTTNQACGLFNEAEVRFLEWTDDLEGFVLKGYGESINYRMGLPLLKDVVQSMEEAIIAREENRADGTFEKARLRFAHAETVVPFSCLLGLFLEGPEIEKIQREEALDLPPLPPQGRNWKGSVVAPFAGNNMLVLYQCPSKISDGSTISGGRNNSYLVQVLHNEVPVSMPGCGNKDFCPFEEFKEKIVKPHLKHDYNMICKVKSPAASEEPASFASRVSSFFLGLLSQKGYRGVGAEGVKTEL

SEQ ID NO: 162776 - protein, 281 aa, Zea Mays
MTSDWNHLMPKYGSFLSQADLDNLDPDHFGNNLQLDGNAEGSTPPSSVKKATQPTKLANFFSEDDMRLCHAWLAVSCDPIVSTGQKRQGFWNRITEAYNSRHGTMPERTTKSLMSRWDSIKTQCSIFSGYMTVVLRQNPSGLSDATRMNRNGWTITWVSKIRDLTQFQINPTLSTLMHSSKEKAKKARSVDTSSTDSKYLTRMGELSLEHLSVYKSVASTKERKLESMNRVNRQKLILEKKLNLEKVKIDRQKLKEDKEEEVMIPNMDLRVNEQRTIFKCW

SEQ ID NO: 162777 - protein, 105 aa, Zea Mays
MEKNMIAVASEIERLRGELANAEKGATAVNPAAAVGNSGYAAPYGNSASTYTGMYGNPDATYTAQAYPDAYSTNQGHMHTVANPHYMSQPVPYGQYESQHTNVQR

SEQ ID NO: 162778 - protein, 1626 aa, Zea Mays
MRTGGGGAVWGGGESSALGGPCSCAWECRGGELGWLQIPTTLGHDEGAEEGAGWDLKFSRLRWLQLALHYSMIGDLEQSLNLLAEVNLAEEGVLQLLLASIHRLSSRTGSDNEATVSSKLMVLAVRFATRMIKCYGLQKQTTDNNSVKLHEMALLLMAIRSIQSRVSAKNQNSVWMGDDKSSLKIGTEVFQHDSSVPVVVLDGVSSGPSGGLDTHDRQELVPVCVPDSNSMLALTPVGSSLSASTFHDIDTNKRTTQVGSQNFQGNIKEMINRWEMNNFDLKIVVREALQSGRLPLAVLQLQLLRQRELVSNDYSEDAFSEVHEIGRSIVYDLLMKGETGLAVATLERLGNDVESDLRQLMQGTVRRSLRLQIADEMKKRGYITPDDWKMLETITLIERLYPSSSFWNTYFYRENVIRDAAKIVTLPGDDKPVLALNIRNHPIIECGDVDGAVLGSWVNINDCTKEFSGSNISDGYWACAAVWSDAWGPRTVDRILLDQPYHVHAHVPWESQFEYFVAHNDVGKVCELLDMIPNSILSEGIIRVNVNSLQAPANTLSDLTVPDYNMYICDSEELEPFCVEIPHVKVFRSLWNHESTLYIRMVMQQELAKRHIFMKEYWQSTTEIIPLLARAGILIKVGLKEECSTIFSASEIPDDAHHQGREGALHKLIIRFCVQYNLPYLLDLYLDTCNLTPDKDCIRLLKENTGDCKWAQWLLFSRIKGYEYEASFSNARWNLSKKMVNNSNPTAVEIDEMLYTVDDMAERIGEMSALATLMYASAPIQKSICTGSVNRSGSSSQCTLENLAPCLQQFPTLWKTLFSACFGQDEYGCLNYSAAYGKRSISEYLRWRYSVFSSAGGDTSLLQMLPCWVPKSVRRLIQLFEQGPFGMQLLSTAPSSEELFTHGVSNYIYNSTGYTEANALSLEASIQKSVEEELYSSLEEKDVRVEHHLHRGRALAAFRHLIAKRASQLKSASARQVISAQSNVQADVQLILAPLSQVERSILISVAPLAITNFEDSTLVASCIFLLELCGLCANMLRLDIAALRRISSYYKSVQENKHVDLSPPRGPELHVQSHGAGIAPALARALAEDYVQSDHLHVLEQTQTSMAPKREQTQYPLISILQHLEKASLPSLEEGKTCGFWLLTGVGDASLYRSQQNEASQHWNLVTEFCQAHYLPLSTKYLALLANDNDWVGFLTEAQIAGFSIEAVIEVAAKEIRDSRLRAHILTVLKNMISLRRKSSGNVPSGSSDPSFSSVDGNNPMELFCILGVCEKQKNPGEALLIKAKQMQWSLLAMIASCFPDVTPLTCLSVWLEITAAREMSSIKVDDVSLKIAKNVGSAVEATNKLPSTSRNVEFRYNRKNPKRRRFLEASHEKLCFSIDSTCGPDSAATSNPISIVDHQGIGKPISGETIMSVDIDERLASLSNMVAVLCEQQLFLPLLRAFEMFLPSCSLLSFIRSLQAFSQMRLPEASARLASFSARIKDEASHTQLNSSKEVSVIAEWVATTAVKAADAVLSNCSSIYEKRCLLQLLSAVDFADGGTSSSYFSRRYWKINLSEPSLCKDTDVYNWNDLMDDASLLTSLEKDGQWEQARTWARHLESSGIAWESTLDHVTESQCLNFSTIRQ

SEQ ID NO: 162779 - protein, 3062 aa, Zea Mays
MSTSRQIDDGPAVLQLCRWTLLQPHLKLSKFREAFISPTRRLFGLLSDHGDLVLATAEINSSQVESHRALSDTCTQAVFKTFSTIPRVKSLAWGYCSDAFDDSSFNEILVVSSDASITVHAFCHSRKSTLTVNSMSDAKELHGEWKEWRPTECSVLEDGESGPENWFCSFLTTVTASVSNGKYQARLPMKSLLPNSAEVVSFSIYDITLSFLKYWYSKCSLKTMAETDSESPRRFLRASCSCQWECLKVLSSSSCYLIGLVLTPNESVRCEAHPSNAECILVTVLELNHWGIQWNFVADLQDVSDGITPSPKWVDFQLSDVFLACLNTAGFVAIWNVKTGGLVTSFSVLQQCRTDLEMPLRSSMSIVTNLDEGNIHVENFVGRMFKRLVLASYSYLLAVVDEVGVVYVFYADDILNFKANVHENFDLPVMNQFADCFSIWEAAGHEIGSLSFCANQSIQQGSLSLTKLVPEFSGKSDDIVRPRERRKYRCDENEVDSWPSGFVTAGQMKVGAGYRRTNSSCFFRRIILPPCRSQQDVISLCPLGLTRIFKGSIADGNEHVKIFHSELLMYSSFLGKGDIDIGFMDEMLPFKKDSTFVGDSVVCSCQGYLYLITQYGLSVVLPPVSISSFSSQCDAIKFWQMGPAAGSTCNALNLLSVDKSDTSWKTWQIEVLDRALLYEGPALADRLCWENGWDLKFSRLRWLQLALHYSMIGDLEQSLNLLAEVNLAEEGVLQLLLASIHRLSSRTGSDNEATVSSKLMVLAVRFATRMIKCYGLQKQTTDNNSVKLHEMALLLMAIRSIQSRVSAKNQNSVWMGDDKSSLKIGPSGGLDTHDRQELVPVCVPDSNSMLALTPVGSSLSASTFHDIDTNKRTTQVGSQNFQGNIKEMINRWEMNNFDLKIVVREALQSGRLPLAVLQLQLLRQRELVSNDYSEDAFSEVHEIGRSIVYDLLMKGETGLAVATLERLGNDVESDLRQLMQGTVRRSLRLQIADEMKKRGYITPDDWKMLETITLIERLYPSSSFWNTYFYRENVIRDAAKIVTLPGDDKPVLALNIRNHPIIECGDVDGAVLGSWVNINDCTKEFSGSNISDGYWACAAVWSDAWGPRTVDRILLDQPYHVHAHVPWESQFEYFVAHNDVGKVCELLDMIPNSILSEGIIRVNVNSLQAPANTLSDLTVPDYNMYICDSEELEPFCVEIPHVKVFRSLWNHESTLYIRMVMQQELAKRHIFMKEYWQSTTEIIPLLARAGILIKVGLKEECSTIFSASEIPDDAHHQGREGALHKLIIRFCVQYNLPYLLDLYLDTCNLTPDKDCIRLLKENTGDCKWAQWLLFSRIKGYEYEASFSNARWNLSKKMVNNSNPTAVEIDEMLYTVDDMAERIGEMSALATLMYASAPIQKSICTGSVNRSGSSSQCTLENLAPCLQQFPTLWKTLFSACFGQDEYGCLNYSAGNAYGKRSISEYLRWRYSVFSSAGGDTSLLQMLPCWVPKSVRRLIQLFEQGPFGMQLLSTAPSSEELFTHGVSNYIYNSTGYTEANALSLEASIQKSVEEELYSSLEEKDVRVEHHLHRGRALAAFRHLIAKRASQLKSASARQVISAQSNVQADVQLILAPLSQVERSILISVAPLAITNFEDSTLVASCIFLLELCGLCANMLRLDIAALRRISSYYKSVQENKHVDLSPPRGPELHVQSHGAGIAPALARALAEDYVQSDHLHVLEQTQTSMAPKREQTQYPLISILQHLEKASLPSLEEGKTCGFWLLTGVGDASLYRSQQNEASQHWNLVTEFCQAHYLPLSTKYLALLANDNDWVGFLTEAQIAGFSIEAVIEVAAKEIRDSRLRAHILTVLKNMISLRRKSSGNVPSGSSDPSFSSVDGNNPMELFCILGVCEKQKNPGEALLIKAKQMQWSLLAMIASCFPDVTPLTCLSVWLEITAAREMSSIKVDDVSLKIAKNVGSAVEATNKLPSTSRNVEFRYNRKNPKRRRFLEASHEKLCFSIDSTCGPDSAATSNPISIVDHQGIGKPISGETIMSVDIDERLASLSNMVAVLCEQQLFLPLLRAFEMFLPSCSLLSFIRSLQAFSQMRLPEASARLASFSARIKDEASHTQLNSSKEVSVIAEWVATTAVKAADAVLSNCSSIYEKRCLLQLLSAVDFADGGTSSSYFSRRYWKINLSEPSLCKDTDVYNWNDLMDDASLLTSLEKDGQWEQARTWARHLESSGIAWESTLDHVTESQAEAMVAEWKEFLWDIPQERAALWGHCQSLFMRYSFPPLKAGLFFLKHAEAVGKEIPAQELHEILLLSLQWLSGTMTKSSPVYPLHLLREIETRVWLLAVESESQSKVDGEFATSAVAHNKAVGNSSSIIEHTADIITKIDSNMSLPHMKITERNSTRDSLSYQHVQLFESNSEASSTTINNTRAKRRMKTNSPLKRGVNDNIESRANELDNNSNTLHSSKIGEQARNLLSEEEFVKMEASLSGWEQNVRPVDMEKAVLSLLEFGQITAAKQLQQKLSPSYIPEELVLVDVALRIAKNSSNGEINLSCFDTQALRILQSLRVANSCDMISPSQVMEILAAKCGEGRGRALIRRIIGVVRTARLLGLPFSEAFEKQPIELLQLLSLKAQDSFDEAKFLVETHIMPASSIARILADSFLKGLLAAHRGGYLDSQKEEGPAPLLWRSSDFLKWAKLCPSESEIGHALMRLVMTGHEVPHACEVELLILSHHFYMSSSCLDGVDVLVTFAANRVDSYVLEEDFSCLARLITGVSNFHSLSFILSILVENGQLELLLQKYSATDTATGTLASVRGFRMAVITSLKQFIPNDDDALSMVYKHFDMKHEAASLLESRAEQYMNSWLSRYDKERRNDELLDAMHHLVETAEVLSTIDAGQRTHRACARASLLSLQIRIPDLLWIGLSETNARRIFVEQSRFQEALIVAEAYNINQPIEWAPVFWNQMLKPDLIEQFVAEFVSVLPLQPPMLLELARFYRAEVAARGEQSHFSVWLSPGGLPAEWVKHLGRSFRSLLRRTRDVLVICNRVLDKVPDNAGPLILRKGHGGAYLPLM

SEQ ID NO: 162780 - protein, 1548 aa, Zea Mays
MRTGGGGAVWGGGESSALGGPCSCAWECRGGELGWLQIPTTLGHDEGAEEGAGWDLKFSRLRWLQLALHYSMIGDLEQSLNLLAEVNLAEEGVLQLLLASIHRLSSRTGSDNEATVSSKPFKALYFWVMELYRLMVLAVRFATRMIKCYGLQKQTTDNNSVKLHEMALLLMAIRSIQSRVSAKNQNSVWMQGDDKSSLKIGPSGGLDTHDRQELVPVCVPDSNSMLALTPVGSSLSASTFHDIDTNKRTTQVGSQNFQGNIKEMINRWEMNNFDLKIVVREALQSGRLPLAVLQLQLLRQRELVSNDYSEDAFSEVHEIGRSIVYDLLMKGETGLAVATLERLGNDVESDLRQLMQGTVRRSLRLQIADEMKKRGYITPDDWKMLETITLIERLYPSSSFWNTYFYRENVIRDAAKIVTLPGDDKPVLALNIRNHPIIECGDVDGAVLGSWVNINDCTKEFSGSNISDGYWACAAVWSDAWGPRTVDRILLDQPYHVHAHVPWESQFEYFVAHNDVGKVCELLDMIPNSILSEGIIRVNVNSLQAPANTLSDLTVPDYNMYICDSEELEPFCVEIPHVKVFRSLWNHESTLYIRMVMQQELAKRHIFMKEYWQSTTEIIPLLARAGILIKVGLKEECSTIFSASEIPDDAHHQGREGALHKLIIRFCVQYNLPYLLDLYLDTCNLTPDKDCIRLLKENTGDCKWAQWLLFSRIKGYEYEASFSNARWNLSKKMVNNSNPTAVEIDEMLYTVDDMAERIGEMSALATLMYASAPIQKSICTGSVNRSGSSSQCTLENLAPCLQQFPTLWKTLFSACFGQDEYGCLNYSAGNAYGKRSISEYLRWRYSVFSSAGGDTSLLQMLPCWVPKSVRRLIQLFEQGPFGMQLLSTAPSSEELFTHGVSNYIYNSTGYTEANALSLEASIQKSVEEELYSSLEEKDVRVEHHLHRGRALAAFRHLIAKRASQLKSASARQVISAQSNVQADVQLILAPLSQVERSILISVAPLAITNFEDSTLVASCIFLLELCGLCANMLRLDIAALRRISSYYKSVQENKHVDLSPPRGPELHVQSHGAGIAPALARALAEDYVQSDHLHVLEQTQTSMAPKREQTQYPLISILQHLEKASLPSLEEGKTCGFWLLTGVGDASLYRSQQNEASQHWNLVTEFCQAHYLPLSTKYLALLANDNDWVGFLTEAQIAGFSIEAVIEVAAKEIRDSRLRAHILTVLKNMISLRRKSSGNVPSGSSDPSFSSVDGNNPMELFCILGVCEKQKNPGEALLIKAKQMQWSLLAMIASCFPDVTPLTCLSVWLEITAAREMSSIKVDDVSLKIAKNVGSAVEATNKLPSTSRNVEFRYNRKNPKRRRFLEASHEKLCFSIDSTCGPDSAATSNPISIVDHQGIGKPISGETIMSVDIDERLASLSNMVAVLCEQQLFLPLLRAFEMFLPSCSLLSFIRSLQAFSQMRLPEASARLASFSARIKDEASHTQLNSSKEVSVIAEWVATTAVKAADAVLSNCSSIYEKRKGRSMGASSNLGKTSGVKWHSLGIYS

SEQ ID NO: 162781 - protein, 2404 aa, Zea Mays
MRTGGGGAVWGGGESSALGGPCSCAWECRGGELGWLQIPTTLGHDEGAEEGAGWDLKFSRLRWLQLALHYSMIGDLEQSLNLLAEVNLAEEGVLQLLLASIHRLSSRTGSDNEATVSSKLMVLAVRFATRMIKCYGLQKQTTDNNSVKLHEMALLLMAIRSIQSRVSAKNQNSVWMQGDDKSSLKIGTEVFQHDSSVPVVVLDGVSSGPSGGLDTHDRQELVPVCVPDSNSMLALTPVGSSLSASTFHDIDTNKRTTQVGSQNFQGNIKEMINRWEMNNFDLKIVVREALQSGRLPLAVLQLQLLRQRELVSNDYSEDAFSEVHEIGRSIVYDLLMKGETGLAVATLERLGNDVESDLRQLMQGTVRRSLRLQIADEMKKRGYITPDDWKMLETITLIERLYPSSSFWNTYFYRENVIRDAAKIVTLPGDDKPVLALNIRNHPIIECGDVDGAVLGSWVNINDCTKEFSGSNISDGYWACAAVWSDAWGPRTVDRILLDQPYHVHAHVPWESQFEYFVAHNDVGKVCELLDMIPNSILSEGIIRVNVNSLQAPANTLSDLTVPDYNMYICDSEELEPFCVEIPHVKVFRSLWNHESTLYIRMVMQQELAKRHIFMKEYWQSTTEIIPLLARAGILIKVGLKEECSTIFSASEIPDDAHHQGREGALHKLIIRFCVQYNLPYLLDLYLDTCNLTPDKDCIRLLKENTGDCKWAQWLLFSRIKGYEYEASFSNARWNLSKKMVNNSNPTAVEIDEMLYTVDDMAERIGEMSALATLMYASAPIQKSICTGSVNRSGSSSQCTLENLAPCLQQFPTLWKTLFSACFGQDEYGCLNYSAGNAYGKRSISEYLRWRYSVFSSAGGDTSLLQMLPCWVPKSVRRLIQLFEQEKDVRVEHHLHRGRALAAFRHLIAKRASQLKSASARQVISAQSNVQADVQLILAPLSQVERSILISVAPLAITNFEDSTLVASCIFLLELCGLCANMLRLDIAALRRISSYYKSVQENKHVDLSPPRGPELHVQSHGAGIAPALARALAEDYVQSDHLHVLEQTQTSMAPKREQTQYPLISILQHLEKASLPSLEEGKTCGFWLLTGVGDASLYRSQQNEASQHWNLVTEFCQAHYLPLSTKYLALLANDNDWVGFLTEAQIAGFSIEAVIEVAAKEIRDSRLRAHILTVLKNMISLRRKSSGNVPSGSSDPSFSSVDGNNPMELFCILGVCEKQKNPGEALLIKAKQMQWSLLAMIASCFPDVTPLTCLSVWLEITAAREMSSIKVDDVSLKIAKNVGSAVEATNKLPSTSRNVEFRYNRKNPKRRRFLEASHEKLCFSIDSTCGPDSAATSNPISIVDHQGIGKPISGETIMSVDIDERLASLSNMVAVLCEQQLFLPLLRAFEMFLPSCSLLSFIRSLQAFSQMRLPEASARLASFSARIKDEASHTQLNSSKEVSVIAEWVATTAVKAADAVLSNCSSIYEKRCLLQLLSAVDFADGGTSSSYFSRRYWKINLSEPSLCKDTDVYNWNDLMDDASLLTSLEKDGQWEQARTWARHLESSGIAWESTLDHVTESQAEAMVAEWKEFLWDIPQERAALWGHCQSLFMRYSFPPLKAGLFFLKHAEAVGKEIPAQELHEILLLSLQWLSGTMTKSSPVYPLHLLREIETRVWLLAVESESQSKVDGEFATSAVAHNKAVGNSSSIIEHTADIITKIDSNMSLPHMKITERNSTRDSLSYQHVQLFESNSEASSTTINNTRAKRRMKTNSPLKRGVNDNIESRANELDNNSNTLHSSKIGEQARNLLSEEEFVKMEASLSGWEQNVRPVDMEKAVLSLLEFGQITAAKQLQQKLSPSYIPEELVLVDVALRIAKNSSNGEINLSCFDTQALRILQSLRVANSCDMISPSQVMEILAAKCGEGRGRALIRRIIGVVRTARLLGLPFSEAFEKQPIELLQLLSLKAQDSFDEAKFLVETHIMPASSIARILADSFLKGLLAAHRGGYLDSQKEEGPAPLLWRSSDFLKWAKLCPSESEIGHALMRLVMTGHEVPHACEVELLILSHHFYMSSSCLDGVDVLVTFAANRVDSYVLEEDFSCLARLITGVSNFHSLSFILSILVENGQLELLLQKYSATDTATGTLASVRGFRMAVITSLKQFIPNDDDALSMVYKHFDMKHEAASLLESRAEQYMNSWLSRYDKERRNDELLDAMHHLVETAEVLSTIDAGQRTHRACARASLLSLQIRIPDLLWIGLSETNARRIFVEQSRFQEALIVAEAYNINQPIEWAPVFWNQMLKPDLIEQFVAEFVSVLPLQPPMLLELARFYRAEVAARGEQSHFSVWLSPGGLPAEWVKHLGRSFRSLLRRTRDMRLRLQLATLATGFIDVLVICNRVLDKVPDNAGPLILRKGHGGAYLPLM

SEQ ID NO: 162782 - protein, 1167 aa, Zea Mays
MIPNSILSEGIIRVNVNSLQAPANTLSDLTVPDYNMYICDSEELEPFCVEIPHVKVFRSLWNHESTLYIRMVMQQELAKRHIFMKEYWQSTTEIIPLLARAGILIKVGLKEECSTIFSASEIPDDAHHQGREGALHKLIIRFCVQYNLPYLLDLYLDTCNLTPDKDCIRLLKENTGDCKWAQWLLFSRIKGYEYEASFSNARWNLSKKMVNNSNPTAVEIDEMLYTVDDMAERIGEMSALATLMYASAPIQKSICTGSVNRSGSSSQCTLENLAPCLQQFPTLWKTLFSACFGQDEYGCLNYSAAYGKRSISEYLRWRYSVFSSAGGDTSLLQMLPCWVPKSVRRLIQLFEQGPFGMQLLSTAPSSEELFTHGVSNYIYNSTGYTEANALSLEASIQKSVEEELYSSLEEKDVRVEHHLHRGRALAAFRHLIAKRASQLKSASARQVISAQSNVQADVQLILAPLSQVERSILISVAPLAITNFEDSTLVASCIFLLELCGLCANMLRLDIAALRRISSYYKSVQENKHVDLSPPRGPELHVQSHGAGIAPALARALAEDYVQSDHLHVLEQTQTSMAPKREQTQYPLISILQHLEKASLPSLEEGKTCGFWLLTGVGDASLYRSQQNEASQHWNLVTEFCQAHYLPLSTKYLALLANDNDWVGFLTEAQIAGFSIEAVIEVAAKEIRDSRLRAHILTVLKNMISLRRKSSGNVPSGSSDPSFSSVDGNNPMELFCILGVCEKQKNPGEALLIKAKQMQWSLLAMIASCFPDVTPLTCLSVWLEITAAREMSSIKVDDVSLKIAKNVGSAVEATNKLPSTSRNVEFRYNRKNPKRRRFLEASHEKLCFSIDSTCGPDSAATSNPISIVDHQGIGKPISGETIMSVDIDERLASLSNMVAVLCEQQLFLPLLRAFEMFLPSCSLLSFIRSLQAFSQMRLPEASARLASFSARIKDEASHTQLNSSKEVSVIAEWVATTAVKAADAVLSNCSSIYEKRCLLQLLSAVDFADGGTSSSYFSRRYWKINLSEPSLCKDTDVYNWNDLMDDASLLTSLEKDGQWEQARTWARHLESSGIAWESTLDHVTESQAEAMVAEWKEFLWDIPQERAALWGHCQSLFMRYSFPPLKAGLFFLKHAEAVGKEIPAQELHEILLLSLQWLSGTMTKSSP

SEQ ID NO: 162783 - protein, 2461 aa, Zea Mays
MRTGGGGAVWGGGESSALGGPCSCAWECRGGELGWLQIPTTLGHDEGAEEGAGWDLKFSRLRWLQLALHYSMIGDLEQSLNLLAEVNLAEEGVLQLLLASIHRLSSRTGSDNEATVSSKLMVLAVRFATRMIKCYGLQKQTTDNNSVKLHEMALLLMAIRSIQSRVSAKNQNSVWMQGDDKSSLKIGTEVFQHDSSVPVVVLDGVSSGPSGGLDTHDRQELVPVCVPDSNSMLALTPVGSSLSASTFHDIDTNKRTTQVGSQNFQGNIKEMINRWEMNNFDLKIVVREALQSGRLPLAVLQLQLLRQRELVSNDYSEDAFSEVHEIGRSIVYDLLMKGETGLAVATLERLGNDVESDLRQLMQGTVRRSLRLQIADEMKKRGYITPDDWKMLETITLIERLYPSSSFWNTYFYRENVIRDAAKIVTLPGDDKPVLALNIRNHPIIECGDVDGAVLGSWVNINDCTKEFSGSNISDGYWACAAVWSDAWGPRTVDRILLDQPYHVHAHVPWESQFEYFVAHNDVGKVCELLDMIPNSILSEGIIRVNVNSLQAPANTLSDLTVPDYNMYICDSEELEPFCVEIPHVKVFRSLWNHESTLYIRMVMQQELAKRHIFMKEYWQSTTEIIPLLARAGILIKVGLKEECSTIFSASEIPDDAHHQGREGALHKLIIRFCVQYNLPYLLDLYLDTCNLTPDKDCIRLLKENTGDCKWAQWLLFSRIKGYEYEASFSNARWNLSKKMVNNSNPTAVEIDEMLYTVDDMAERIGEMSALATLMYASAPIQKSICTGSVNRSGSSSQCTLENLAPCLQQFPTLWKTLFSACFGQDEYGCLNYSAGNAYGKRSISEYLRWRYSVFSSAGGDTSLLQMLPCWVPKSVRRLIQLFEQGPFGMQLLSTAPSSEELFTHGVSNYIYNSTGYTEANALSLEASIQKSVEEELYSSLEEKDVRVEHHLHRGRALAAFRHLIAKRASQLKSASARQVISAQSNVQADVQLILAPLSQVERSILISVAPLAITNFEDSTLVASCIFLLELCGLCANMLRLDIAALRRISSYYKSVQENKHVDLSPPRGPELHVQSHGAGIAPALARALAEDYVQSDHLHVLEQTQTSMAPKREQTQYPLISILQHLEKASLPSLEEGKTCGFWLLTGVGDASLYRSQQNEASQHWNLVTEFCQAHYLPLSTKYLALLANDNDWVGFLTEAQIAGFSIEAVIEVAAKEIRDSRLRAHILTVLKNMISLRRKSSGNVPSGSSDPSFSSVDGNNPMELFCILGVCEKQKNPGEALLIKAKQMQWSLLAMIASCFPDVTPLTCLSVWLEITAAREMSSIKVDDVSLKIAKNVGSAVEATNKLPSTSRNVEFRYNRKNPKRRRFLEASHEKLCFSIDSTCGPDSAATSNPISIVDHQGIGKPISGETIMSVDIDERLASLSNMVAVLCEQQLFLPLLRAFEMFLPSCSLLSFIRSLQAFSQMRLPEASARLASFSARIKDEASHTQLNSSKEVSVIAEWVATTAVKAADAVLSNCSSIYEKRCLLQLLSAVDFADGGTSSSYFSRRYWKINLSEPSLCKDTDVYNWNDLMDDASLLTSLEKDGQWEQARTWARHLESSGIAWESTLDHVTESQAEAMVAEWKEFLWDIPQERAALWGHCQSLFMRYSFPPLKAGLFFLKHAEAVGKEIPAQELHEILLLSLQWLSGTMTKSSPVYPLHLLREIETRVWLLAVESESQSKVDGEFATSAVAHNKAVGNSSSIIEHTADIITKIDSNMSLPHMKITERNSTRDSLSYQHVQLFESNSEASSTTINNTRAKRRMKTNSPLKRGVNDNIESRANELDNNSNTLHSSKIGEQARNLLSEEEFVKMEASLSGWEQNVRPVDMEKAVLSLLEFGQITAAKQLQQKLSPSYIPEELVLVDVALRIAKNSSNGEINLSCFDTQALRILQSLRVANSCDMISPSQVMEILAAKCGEGRGRALIRRIIGVVRTARLLGLPFSEAFEKQPIELLQLLSLKAQDSFDEAKFLVETHIMPASSIARILADSFLKGLLAAHRGGYLDSQKEEGPAPLLWRSSDFLKWAKLCPSESEIGHALMRLVMTGHEVPHACEVELLILSHHFYMSSSCLDGVDVLVTFAANRVDSYVLEEDFSCLARLITGVSNFHSLSFILSILVENGQLELLLQKYSATDTATGTLASVRGFRMAVITSLKQFIPNDDDALSMVYKHFDMKHEAASLLESRAEQYMNSWLSRYDKERRNDELLDAMHHLVETAEVLSTIDAGQRTHRACARASLLSLQIRIPDLLWIGLSETNARRIFVEQSRFQEALIVAEAYNINQPIEWAPVFWNQMLKPDLIEQFVAEFVSVLPLQPPMLLELARFYRAEVAARGEQSHFSVWLSPGGLPAEWVKHLGRSFRSLLRRTRDMRLRLQLATLATGFIDVLVICNRVLDKVPDNAGPLILRKGHGGAYLPLM

SEQ ID NO: 162784 - protein, 2474 aa, Zea Mays
MRTGGGGAVWGGGESSALGGPCSCAWECRGGELGWLQIPTTLGHDEGAEEGAGWDLKFSRLRWLQLALHYSMIGDLEQSLNLLAEVNLAEEGVLQLLLASIHRLSSRTGSDNEATVSSKPFKALYFWVMELYRLMVLAVRFATRMIKCYGLQKQTTDNNSVKLHEMALLLMAIRSIQSRVSAKNQNSVWMGDDKSSLKIGTEVFQHDSSVPVVVLDGVSSGPSGGLDTHDRQELVPVCVPDSNSMLALTPVGSSLSASTFHDIDTNKRTTQVGSQNFQGNIKEMINRWEMNNFDLKIVVREALQSGRLPLAVLQLQLLRQRELVSNDYSEDAFSEVHEIGRSIVYDLLMKGETGLAVATLERLGNDVESDLRQLMQGTVRRSLRLQIADEMKKRGYITPDDWKMLETITLIERLYPSSSFWNTYFYRENVIRDAAKIVTLPGDDKPVLALNIRNHPIIECGDVDGAVLGSWVNINDCTKEFSGSNISDGYWACAAVWSDAWGPRTVDRILLDQPYHVHAHVPWESQFEYFVAHNDVGKVCELLDMIPNSILSEGIIRVNVNSLQAPANTLSDLTVPDYNMYICDSEELEPFCVEIPHVKVFRSLWNHESTLYIRMVMQQELAKRHIFMKEYWQSTTEIIPLLARAGILIKVGLKEECSTIFSASEIPDDAHHQGREGALHKLIIRFCVQYNLPYLLDLYLDTCNLTPDKDCIRLLKENTGDCKWAQWLLFSRIKGYEYEASFSNARWNLSKKMVNNSNPTAVEIDEMLYTVDDMAERIGEMSALATLMYASAPIQKSICTGSVNRSGSSSQCTLENLAPCLQQFPTLWKTLFSACFGQDEYGCLNYSAGNAYGKRSISEYLRWRYSVFSSAGGDTSLLQMLPCWVPKSVRRLIQLFEQGPFGMQLLSTAPSSEELFTHGVSNYIYNSTGYTEANALSLEASIQKSVEEELYSSLEEKDVRVEHHLHRGRALAAFRHLIAKRASQLKSASARQVISAQSNVQADVQLILAPLSQVERSILISVAPLAITNFEDSTLVASCIFLLELCGLCANMLRLDIAALRRISSYYKSVQENKHVDLSPPRGPELHVQSHGAGIAPALARALAEDYVQSDHLHVLEQTQTSMAPKREQTQYPLISILQHLEKASLPSLEEGKTCGFWLLTGVGDASLYRSQQNEASQHWNLVTEFCQAHYLPLSTKYLALLANDNDWVGFLTEAQIAGFSIEAVIEVAAKEIRDSRLRAHILTVLKNMISLRRKSSGNVPSGSSDPSFSSVDGNNPMELFCILGVCEKQKNPGEALLIKAKQMQWSLLAMIASCFPDVTPLTCLSVWLEITAAREMSSIKVDDVSLKIAKNVGSAVEATNKLPSTSRNVEFRYNRKNPKRRRFLEASHEKLCFSIDSTCGPDSAATSNPISIVDHQGIGKPISGETIMSVDIDERLASLSNMVAVLCEQQLFLPLLRAFEMFLPSCSLLSFIRSLQAFSQMRLPEASARLASFSARIKDEASHTQLNSSKEVSVIAEWVATTAVKAADAVLSNCSSIYEKRCLLQLLSAVDFADGGTSSSYFSRRYWKINLSEPSLCKDTDVYNWNDLMDDASLLTSLEKDGQWEQARTWARHLESSGIAWESTLDHVTESQAEAMVAEWKEFLWDIPQERAALWGHCQSLFMRYSFPPLKAGLFFLKHAEAVGKEIPAQELHEILLLSLQWLSGTMTKSSPVYPLHLLREIETRVWLLAVESESQSKVDGEFATSAVAHNKAVGNSSSIIEHTADIITKIDSNMSLPHMKITERNSTRDSLSYQHVQLFESNSEASSTTINNTRAKRRMKTNSPLKRGVNDNIESRANELDNNSNTLHSSKIGEQARNLLSEEEFVKMEASLSGWEQNVRPVDMEKAVLSLLEFGQITAAKQLQQKLSPSYIPEELVLVDVALRIAKNSSNGEINLSCFDTQALRILQSLRVANSCDMISPSQVMEILAAKCGEGRGRALIRRIIGVVRTARLLGLPFSEAFEKQPIELLQLLSLKAQDSFDEAKFLVETHIMPASSIARILADSFLKGLLAAHRGGYLDSQKEEGPAPLLWRSSDFLKWAKLCPSESEIGHALMRLVMTGHEVPHACEVELLILSHHFYMSSSCLDGVDVLVTFAANRVDSYVLEEDFSCLARLITGVSNFHSLSFILSILVENGQLELLLQKYSATDTATGTLASVRGFRMAVITSLKQFIPNDDDALSMVYKHFDMKHEAASLLESRAEQYMNSWLSRYDKERRNDELLDAMHHLVETAEVLSTIDAGQRTHRACARASLLSLQIRIPDLLWIGLSETNARRIFVEQSRFQEALIVAEAYNINQPIEWAPVFWNQMLKPDLIEQFVAEFVSVLPLQPPMLLELARFYRAEVAARGEQSHFSVWLSPGGLPAEWVKHLGRSFRSLLRRTRDMRLRLQLATLATGFIDVLVICNRVLDKVPDNAGPLILRKGHGGAYLPLM

SEQ ID NO: 162785 - protein, 3078 aa, Zea Mays
MSTSRQIDDGPAVLQLCRWTLLQPHLKLSKFREAFISPTRRLFGLLSDHGDLVLATAEINSSQVESHRALSDTCTQAVFKTFSTIPRVKSLAWGYCSDAFDDSSFNEILVVSSDASITVHAFCHSRKSTLTVNSMSDAKELHGEWKEWRPTECSVLEDGESGPENWFCSFLTTVTASVSNGKYQARLPMKSLLPNSAEVVSFSIYDITLSFLKYWYSKCSLKTMAETDSESPRRFLRASCSCQWECLKVLSSSSCYLIGLVLTPNESVRCEAHPSNAECILVTVLELNHWGIQWNFVADLQDVSDGITPSPKWVDFQLSDVFLACLNTAGFVAIWNVKTGGLVTSFSVLQQCRTDLEMPLRSSMSIVTNLDEGNIHVENFVGRMFKRLVLASYSYLLAVVDEVGVVYVFYADDILNFKANVHENFDLPVMNQFADCFSIWEAAGHEIGSLSFCANQSIQQGSLSLTKLVPEFSGKSDDIVRPRERRKYRCDENEVDSWPSGFVTAGQMKVGAGYRRTNSSCFFRRIILPPCRSQQDVISLCPLGLTRIFKGSIADGNEHVKIFHSELLMYSSFLGKGDIDIGFMDEMLPFKKDSTFVGDSVVCSCQGYLYLITQYGLSVVLPPVSISSFSSQCDAIKFWQMGPAAGSTCNALNLLSVDKSDTSWKTWQIEVLDRALLYEGPALADRLCWENGWDLKFSRLRWLQLALHYSMIGDLEQSLNLLAEVNLAEEGVLQLLLASIHRLSSRTGSDNEATVSSKLMVLAVRFATRMIKCYGLQKQTTDNNSVKLHEMALLLMAIRSIQSRVSAKNQNSVWMGDDKSSLKIGPSGGLDTHDRQELVPVCVPDSNSMLALTPVGSSLSASTFHDIDTNKRTTQVGSQNFQGNIKEMINRWEMNNFDLKIVVREALQSGRLPLAVLQLQLLRQRELVSNDYSEDAFSEVHEIGRSIVYDLLMKGETGLAVATLERLGNDVESDLRQLMQGTVRRSLRLQIADEMKKRGYITPDDWKMLETITLIERLYPSSSFWNTYFYRENVIRDAAKIVTLPGDDKPVLALNIRNHPIIECGDVDGAVLGSWVNINDCTKEFSGSNISDGYWACAAVWSDAWGPRTVDRILLDQPYHVHAHVPWESQFEYFVAHNDVGKVCELLDMIPNSILSEGIIRVNVNSLQAPANTLSDLTVPDYNMYICDSEELEPFCVEIPHVKVFRSLWNHESTLYIRMVMQQELAKRHIFMKEYWQSTTEIIPLLARAGILIKVGLKEECSTIFSASEIPDDAHHQGREGALHKLIIRFCVQYNLPYLLDLYLDTCNLTPDKDCIRLLKENTGDCKWAQWLLFSRIKGYEYEASFSNARWNLSKKMVNNSNPTAVEIDEMLYTVDDMAERIGEMSALATLMYASAPIQKSICTGSVNRSGSSSQCTLENLAPCLQQFPTLWKTLFSACFGQDEYGCLNYSAGNAYGKRSISEYLRWRYSVFSSAGGDTSLLQMLPCWVPKSVRRLIQLFEQGPFGMQLLSTAPSSEELFTHGVSNYIYNSTGYTEANALSLEASIQKSVEEELYSSLEEKDVRVEHHLHRGRALAAFRHLIAKRASQLKSASARQVISAQSNVQADVQLILAPLSQVERSILISVAPLAITNFEDSTLVASCIFLLELCGLCANMLRLDIAALRRISSYYKSVQENKHVDLSPPRGPELHVQSHGAGIAPALARALAEDYVQSDHLHVLEQTQTSMAPKREQTQYPLISILQHLEKASLPSLEEGKTCGFWLLTGVGDASLYRSQQNEASQHWNLVTEFCQAHYLPLSTKYLALLANDNDWVGFLTEAQIAGFSIEAVIEVAAKEIRDSRLRAHILTVLKNMISLRRKSSGNVPSGSSDPSFSSVDGNNPMELFCILGVCEKQKNPGEALLIKAKQMQWSLLAMIASCFPDVTPLTCLSVWLEITAAREMSSIKVDDVSLKIAKNVGSAVEATNKLPSTSRNVEFRYNRKNPKRRRFLEASHEKLCFSIDSTCGPDSAATSNPISIVDHQGIGKPISGETIMSVDIDERLASLSNMVAVLCEQQLFLPLLRAFEMFLPSCSLLSFIRSLQAFSQMRLPEASARLASFSARIKDEASHTQLNSSKEVSVIAEWVATTAVKAADAVLSNCSSIYEKRCLLQLLSAVDFADGGTSSSYFSRRYWKINLSEPSLCKDTDVYNWNDLMDDASLLTSLEKDGQWEQARTWARHLESSGIAWESTLDHVTESQAEAMVAEWKEFLWDIPQERAALWGHCQSLFMRYSFPPLKAGLFFLKHAEAVGKEIPAQELHEILLLSLQWLSGTMTKSSPVYPLHLLREIETRVWLLAVESESQSKVDGEFATSAVAHNKAVGNSSSIIEHTADIITKIDSNMSLPHMKITERNSTRDSLSYQHVQLFESNSEASSTTINNTRAKRRMKTNSPLKRGVNDNIESRANELDNNSNTLHSSKIGEQARNLLSEEEFVKMEASLSGWEQNVRPVDMEKAVLSLLEFGQITAAKQLQQKLSPSYIPEELVLVDVALRIAKNSSNGEINLSCFDTQALRILQSLRVANSCDMISPSQVMEILAAKCGEGRGRALIRRIIGVVRTARLLGLPFSEAFEKQPIELLQLLSLKAQDSFDEAKFLVETHIMPASSIARILADSFLKGLLAAHRGGYLDSQKEEGPAPLLWRSSDFLKWAKLCPSESEIGHALMRLVMTGHEVPHACEVELLILSHHFYMSSSCLDGVDVLVTFAANRVDSYVLEEDFSCLARLITGVSNFHSLSFILSILVENGQLELLLQKYSATDTATGTLASVRGFRMAVITSLKQFIPNDDDALSMVYKHFDMKHEAASLLESRAEQYMNSWLSRYDKERRNDELLDAMHHLVETAEVLSTIDAGQRTHRACARASLLSLQIRIPDLLWIGLSETNARRIFVEQSRFQEALIVAEAYNINQPIEWAPVFWNQMLKPDLIEQFVAEFVSVLPLQPPMLLELARFYRAEVAARGEQSHFSVWLSPGGLPAEWVKHLGRSFRSLLRRTRDMRLRLQLATLATGFIDVLVICNRVLDKVPDNAGPLILRKGHGGAYLPLM

SEQ ID NO: 162786 - protein, 3096 aa, Zea Mays
MSTSRQIDDGPAVLQLCRWTLLQPHLKLSKFREAFISPTRRLFGLLSDHGDLVLATAEINSSQVESHRALSDTCTQAVFKTFSTIPRVKSLAWGYCSDAFDDSSFNEILVVSSDASITVHAFCHSRKSTLTVNSMSDAKELHGEWKEWRPTECSVLEDGESGPENWFCSFLTTVTASVSNGKYQARLPMKSLLPNSAEVVSFSIYDITLSFLKYWYSKCSLKTMAETDSESPRRFLRASCSCQWECLKVLSSSSCYLIGLVLTPNESVRCEAHPSNAECILVTVLELNHWGIQWNFVADLQDVSDGITPSPKWVDFQLSDVFLACLNTAGFVAIWNVKTGGLVTSFSVLQQCRTDLEMPLRSSMSIVTNLDEGNIHVENFVGRMFKRLVLASYSYLLAVVDEVGVVYVFYADDILNFKANVHENFDLPVMNQFADCFSIWEAAGHEIGSLSFCANQSIQQGSLSLTKLVPEFSGKSDDIVRPRERRKYRCDENEVDSWPSGFVTAGQMKVGAGYRRTNSSCFFRRIILPPCRSQQDVISLCPLGLTRIFKGSIADGNEHVKIFHSELLMYSSFLGKGDIDIGFMDEMLPFKKDSTFVGDSVVCSCQGYLYLITQYGLSVVLPPVSISSFSSQCDAIKFWQMGPAAGSTCNALNLLSVDKSDTSWKTWQIEVLDRALLYEGPALADRLCWENGWDLKFSRLRWLQLALHYSMIGDLEQSLNLLAEVNLAEEGVLQLLLASIHRLSSRTGSDNEATVSSKLMVLAVRFATRMIKCYGLQKQTTVKLHEMALLLMAIRSIQSRVSAKNQNSVWMQGDDKSSLKIGTEVFQHDSSVPVVVLDGVSSGPSGGLDTHDRQELVPVCVPDSNSMLALTPVGSSLSASTFHDIDTNKRTTQVGSQNFQGNIKEMINRWEMNNFDLKIVVREALQSGRLPLAVLQLQLLRQRELVSNDYSEDAFSEVHEIGRSIVYDLLMKGETGLAVATLERLGNDVESDLRQLMQGTVRRSLRLQIADEMKKRGYITPDDWKMLETITLIERLYPSSSFWNTYFYRENVIRDAAKIVTLPGDDKPVLALNIRNHPIIECGDVDGAVLGSWVNINDCTKEFSGSNISDGYWACAAVWSDAWGPRTVDRILLDQPYHVHAHVPWESQFEYFVAHNDVGKVCELLDMIPNSILSEGIIRVNVNSLQAPANTLSDLTVPDYNMYICDSEELEPFCVEIPHVKVFRSLWNHESTLYIRMVMQQELAKRHIFMKEYWQSTTEIIPLLARAGILIKVGLKEECSTIFSASEIPDDAHHQGREGALHKLIIRFCVQYNLPYLLDLYLDTCNLTPDKDCIRLLKENTGDCKWAQWLLFSRIKGYEYEASFSNARWNLSKKMVNNSNPTAVEIDEMLYTVDDMAERIGEMSALATLMYASAPIQKSICTGSVNRSGSSSQCTLENLAPCLQQFPTLWKTLFSACFGQDEYGCLNYSAGNAYGKRSISEYLRWRYSVFSSAGGDTSLLQMLPCWVPKSVRRLIQLFEQGPFGMQLLSTAPSSEELFTHGVSNYIYNSTGYTEANALSLEASIQKSVEEELYSSLEEKDVRVEHHLHRGRALAAFRHLIAKRASQLKSASARQVISAQSNVQADVQLILAPLSQVERSILISVAPLAITNFEDSTLVASCIFLLELCGLCANMLRLDIAALRRISSYYKSVQENKHVDLSPPRGPELHVQSHGAGIAPALARALAEDYVQSDHLHVLEQTQTSMAPKREQTQYPLISILQHLEKASLPSLEEGKTCGFWLLTGVGDASLYRSQQNEASQHWNLVTEFCQAHYLPLSTKYLALLANDNDWVGFLTEAQIAGFSIEAVIEVAAKEIRDSRLRAHILTVLKNMISLRRKSSGNVPSGSSDPSFSSVDGNNPMELFCILGVCEKQKNPGEALLIKAKQMQWSLLAMIASCFPDVTPLTCLSVWLEITAAREMSSIKVDDVSLKIAKNVGSAVEATNKLPSTSRNVEFRYNRKNPKRRRFLEASHEKLCFSIDSTCGPDSAATSNPISIVDHQGIGKPISGETIMSVDIDERLASLSNMVAVLCEQQLFLPLLRAFEMFLPSCSLLSFIRSLQAFSQMRLPEASARLASFSARIKDEASHTQLNSSKEVSVIAEWVATTAVKAADAVLSNCSSIYEKRCLLQLLSAVDFADGGTSSSYFSRRYWKINLSEPSLCKDTDVYNWNDLMDDASLLTSLEKDGQWEQARTWARHLESSGIAWESTLDHVTESQAEAMVAEWKEFLWDIPQERAALWGHCQSLFMRYSFPPLKAGLFFLKHAEAVGKEIPAQELHEILLLSLQWLSGTMTKSSPVYPLHLLREIETRVWLLAVESESQSKVDGEFATSAVAHNKAVGNSSSIIEHTADIITKIDSNMSLPHMKITERNSTRDSLSYQHVQLFESNSEASSTTINNTRAKRRMKTNSPLKRGVNDNIESRANELDNNSNTLHSSKIGEQARNLLSEEEFVKMEASLSGWEQNVRPVDMEKAVLSLLEFGQITAAKQLQQKLSPSYIPEELVLVDVALRIAKNSSNGEINLSCFDTQALRILQSLRVANSCDMISPSQVMEILAAKCGEGRGRALIRRIIGVVRTARLLGLPFSEAFEKQPIELLQLLSLKAQDSFDEAKFLVETHIMPASSIARILADSFLKGLLAAHRGGYLDSQKEEGPAPLLWRSSDFLKWAKLCPSESEIGHALMRLVMTGHEVPHACEVELLILSHHFYMSSSCLDGVDVLVTFAANRVDSYVLEEDFSCLARLITGVSNFHSLSFILSILVENGQLELLLQKYSATDTATGTLASVRGFRMAVITSLKQFIPNDDDALSMVYKHFDMKHEAASLLESRAEQYMNSWLSRYDKERRNDELLDAMHHLVETAEVLSTIDAGQRTHRACARASLLSLQIRIPDLLWIGLSETNARRIFVEQSRFQEALIVAEAYNINQPIEWAPVFWNQMLKPDLIEQFVAEFVSVLPLQPPMLLELARFYRAEVAARGEQSHFSVWLSPGGLPAEWVKHLGRSFRSLLRRTRDMRLRLQLATLATGFIDVLVICNRVLDKVPDNAGPLILRKGHGGAYLPLM

SEQ ID NO: 162787 - protein, 2287 aa, Zea Mays
MSTSRQIDDGPAVLQLCRWTLLQPHLKLSKFREAFISPTRRLFGLLSDHGDLVLATAEINSSQVESHRALSDTCTQAVFKTFSTIPRVKSLAWGYCSDAFDDSSFNEILVVSSDASITVHAFCHSRKSTLTVNSMSDAKELHGEWKEWRPTECSVLEDGESGPENWFCSFLTTVTASVSNGKYQARLPMKSLLPNSAEVVSFSIYDITLSFLKYWYSKCSLKTMAETDSESPRRFLRASCSCQWECLKVLSSSSCYLIGLVLTPNESVRCEAHPSNAECILVTVLELNHWGIQWNFVADLQDVSDGITPSPKWVDFQLSDVFLACLNTAGFVAIWNVKTGGLVTSFSVLQQCRTDLEMPLRSSMSIVTNLDEGNIHVENFVGRMFKRLVLASYSYLLAVVDEVGVVYVFYADDILNFKANVHENFDLPVMNQFADCFSIWEAAGHEIGSLSFCANQSIQQGSLSLTKLVPEFSGKSDDIVRPRERRKYRCDENEVDSWPSGFVTAGQMKVGAGYRRTNSSCFFRRIILPPCRSQQDVISLCPLGLTRIFKGSIADGNEHVKIFHSELLMYSSFLGKGDIDIGFMDEMLPFKKDSTFVGDSVVCSCQGYLYLITQYGLSVVLPPVSISSFSSQCDAIKFWQMGPAAGSTCNALNLLSVDKSDTSWKTWQIEVLDRALLYEGPALADRLCWENGWDLKFSRLRWLQLALHYSMIGDLEQSLNLLAEVNLAEEGVLQLLLASIHRLSSRTGSDNEATVSSKLMVLAVRFATRMIKCYGLQKQTTDNNSVKLHEMALLLMAIRSIQSRVSAKNQNSVWMGDDKSSLKIGTEVFQHDSSVPVVVLDGVSSGPSGGLDTHDRQELVPVCVPDSNSMLALTPVGSSLSASTFHDIDTNKRTTQVGSQNFQGNIKEMINRWEMNNFDLKIVVREALQSGRLPLAVLQLQLLRQRELVSNDYSEDAFSEVHEIGRSIVYDLLMKGETGLAVATLERLGNDVESDLRQLMQGTVRRSLRLQIADEMKKRGYITPDDWKMLETITLIERLYPSSSFWNTYFYRENVIRDAAKIVTLPGDDKPVLALNIRNHPIIECGDVDGAVLGSWVNINDCTKEFSGSNISDGYWACAAVWSDAWGPRTVDRILLDQPYHVHAHVPWESQFEYFVAHNDVGKVCELLDMIPNSILSEGIIRVNVNSLQAPANTLSDLTVPDYNMYICDSEELEPFCVEIPHVKVFRSLWNHESTLYIRMVMQQELAKRHIFMKEYWQSTTEIIPLLARAGILIKVGLKEECSTIFSASEIPDDAHHQGREGALHKLIIRFCVQYNLPYLLDLYLDTCNLTPDKDCIRLLKENTGDCKWAQWLLFSRIKGYEYEASFSNARWNLSKKMVNNSNPTAVEIDEMLYTVDDMAERIGEMSALATLMYASAPIQKSICTGSVNRSGSSSQCTLENLAPCLQQFPTLWKTLFSACFGQDEYGCLNYSAGNAYGKRSISEYLRWRYSVFSSAGGDTSLLQMLPCWVPKSVRRLIQLFEQGPFGMQLLSTAPSSEELFTHGVSNYIYNSTGYTEANALSLEASIQKSVEEELYSSLEEKDVRVEHHLHRGRALAAFRHLIAKRASQLKSASARQVISAQSNVQADVQLILAPLSQVERSILISVAPLAITNFEDSTLVASCIFLLELCGLCANMLRLDIAALRRISSYYKSVQENKHVDLSPPRGPELHVQSHGAGIAPALARALAEDYVQSDHLHVLEQTQTSMAPKREQTQYPLISILQHLEKASLPSLEEGKTCGFWLLTGVGDASLYRSQQNEASQHWNLVTEFCQAHYLPLSTKYLALLANDNDWVGFLTEAQIAGFSIEAVIEVAAKEIRDSRLRAHILTVLKNMISLRRKSSGNVPSGSSDPSFSSVDGNNPMELFCILGVCEKQKNPGEALLIKAKQMQWSLLAMIASCFPDVTPLTCLSVWLEITAAREMSSIKVDDVSLKIAKNVGSAVEATNKLPSTSRNVEFRYNRKNPKRRRFLEASHEKLCFSIDSTCGPDSAATSNPISIVDHQGIGKPISGETIMSVDIDERLASLSNMVAVLCEQQLFLPLLRAFEMFLPSCSLLSFIRSLQAFSQMRLPEASARLASFSARIKDEASHTQLNSSKEVSVIAEWVATTAVKAADAVLSNCSSIYEKRCLLQLLSAVDFADGGTSSSYFSRRYWKINLSEPSLCKDTDVYNWNDLMDDASLLTSLEKDGQWEQARTWARHLESSGIAWESTLDHVTESQKPWLLNGRSFFGISHKNVQPCGVTVNLSL

SEQ ID NO: 162788 - protein, 3092 aa, Zea Mays
MSTSRQIDDGPAVLQLCRWTLLQPHLKLSKFREAFISPTRRLFGLLSDHGDLVLATAEINSSQVESHRALSDTCTQAVFKTFSTIPRVKSLAWGYCSDAFDDSSFNEILVVSSDASITVHAFCHSRKSTLTVNSMSDAKELHGEWKEWRPTECSVLEDGESGPENWFCSFLTTVTASVSNGKYQARLPMKSLLPNSAEVVSFSIYDITLSFLKYWYSKCSLKTMAETDSESPRRFLRASCSCQWECLKVLSSSSCYLIGLVLTPNESVRCEAHPSNAECILVTVLELNHWGIQWNFVADLQDVSDGITPSPKWVDFQLSDVFLACLNTAGFVAIWNVKTGGLVTSFSVLQQCRTDLEMPLRSSMSIVTNLDEGNIHVENFVGRMFKRLVLASYSYLLAVVDEVGVVYVFYADDILNFKANVHENFDLPVMNQFADCFSIWEAAGHEIGSLSFCANQSIQQGSLSLTKLVPEFSGKSDDIVRPRERRKYRCDENEVDSWPSGFVTAGQMKVGAGYRRTNSSCFFRRIILPPCRSQQDVISLCPLGLTRIFKGSIADGNEHVKIFHSELLMYSSFLGKGDIDIGFMDEMLPFKKDSTFVGDSVVCSCQGYLYLITQYGLSVVLPPVSISSFSSQCDAIKFWQMGPAAGSTCNALNLLSVDKSDTSWKTWQIEVLDRALLYEGPALADRLCWENGWDLKFSRLRWLQLALHYSMIGDLEQSLNLLAEVNLAEEGVLQLLLASIHRLSSRTGSDNEATVSSKLMVLAVRFATRMIKCYGLQKQTTDNNSVKLHEMALLLMAIRSIQSRVSAKNQNSVWMLSSNDHFLNAVPTLQQGDDKSSLKIGPSGGLDTHDRQELVPVCVPDSNSMLALTPVGSSLSASTFHDIDTNKRTTQVGSQNFQGNIKEMINRWEMNNFDLKIVVREALQSGRLPLAVLQLQLLRQRELVSNDYSEDAFSEVHEIGRSIVYDLLMKGETGLAVATLERLGNDVESDLRQLMQGTVRRSLRLQIADEMKKRGYITPDDWKMLETITLIERLYPSSSFWNTYFYRENVIRDAAKIVTLPGDDKPVLALNIRNHPIIECGDVDGAVLGSWVNINDCTKEFSGSNISDGYWACAAVWSDAWGPRTVDRILLDQPYHVHAHVPWESQFEYFVAHNDVGKVCELLDMIPNSILSEGIIRVNVNSLQAPANTLSDLTVPDYNMYICDSEELEPFCVEIPHVKVFRSLWNHESTLYIRMVMQQELAKRHIFMKEYWQSTTEIIPLLARAGILIKVGLKEECSTIFSASEIPDDAHHQGREGALHKLIIRFCVQYNLPYLLDLYLDTCNLTPDKDCIRLLKENTGDCKWAQWLLFSRIKGYEYEASFSNARWNLSKKMVNNSNPTAVEIDEMLYTVDDMAERIGEMSALATLMYASAPIQKSICTGSVNRSGSSSQCTLENLAPCLQQFPTLWKTLFSACFGQDEYGCLNYSAAYGKRSISEYLRWRYSVFSSAGGDTSLLQMLPCWVPKSVRRLIQLFEQGPFGMQLLSTAPSSEELFTHGVSNYIYNSTGYTEANALSLEASIQKSVEEELYSSLEEKDVRVEHHLHRGRALAAFRHLIAKRASQLKSASARQVISAQSNVQADVQLILAPLSQVERSILISVAPLAITNFEDSTLVASCIFLLELCGLCANMLRLDIAALRRISSYYKSVQENKHVDLSPPRGPELHVQSHGAGIAPALARALAEDYVQSDHLHVLEQTQTSMAPKREQTQYPLISILQHLEKASLPSLEEGKTCGFWLLTGVGDASLYRSQQNEASQHWNLVTEFCQAHYLPLSTKYLALLANDNDWVGFLTEAQIAGFSIEAVIEVAAKEIRDSRLRAHILTVLKNMISLRRKSSGNVPSGSSDPSFSSVDGNNPMELFCILGVCEKQKNPGEALLIKAKQMQWSLLAMIASCFPDVTPLTCLSVWLEITAAREMSSIKVDDVSLKIAKNVGSAVEATNKLPSTSRNVEFRYNRKNPKRRRFLEASHEKLCFSIDSTCGPDSAATSNPISIVDHQGIGKPISGETIMSVDIDERLASLSNMVAVLCEQQLFLPLLRAFEMFLPSCSLLSFIRSLQAFSQMRLPEASARLASFSARIKDEASHTQLNSSKEVSVIAEWVATTAVKAADAVLSNCSSIYEKRCLLQLLSAVDFADGGTSSSYFSRRYWKINLSEPSLCKDTDVYNWNDLMDDASLLTSLEKDGQWEQARTWARHLESSGIAWESTLDHVTESQAEAMVAEWKEFLWDIPQERAALWGHCQSLFMRYSFPPLKAGLFFLKHAEAVGKEIPAQELHEILLLSLQWLSGTMTKSSPVYPLHLLREIETRVWLLAVESESQSKVDGEFATSAVAHNKAVGNSSSIIEHTADIITKIDSNMSLPHMKITERNSTRDSLSYQHVQLFESNSEASSTTINNTRAKRRMKTNSPLKRGVNDNIESRANELDNNSNTLHSSKIGEQARNLLSEEEFVKMEASLSGWEQNVRPVDMEKAVLSLLEFGQITAAKQLQQKLSPSYIPEELVLVDVALRIAKNSSNGEINLSCFDTQALRILQSLRVANSCDMISPSQVMEILAAKCGEGRGRALIRRIIGVVRTARLLGLPFSEAFEKQPIELLQLLSLKAQDSFDEAKFLVETHIMPASSIARILADSFLKGLLAAHRGGYLDSQKEEGPAPLLWRSSDFLKWAKLCPSESEIGHALMRLVMTGHEVPHACEVELLILSHHFYMSSSCLDGVDVLVTFAANRVDSYVLEEDFSCLARLITGVSNFHSLSFILSILVENGQLELLLQKYSATDTATGTLASVRGFRMAVITSLKQFIPNDDDALSMVYKHFDMKHEAASLLESRAEQYMNSWLSRYDKERRNDELLDAMHHLVETAEVLSTIDAGQRTHRACARASLLSLQIRIPDLLWIGLSETNARRIFVEQSRFQEALIVAEAYNINQPIEWAPVFWNQMLKPDLIEQFVAEFVSVLPLQPPMLLELARFYRAEVAARGEQSHFSVWLSPGGLPAEWVKHLGRSFRSLLRRTRDMRLRLQLATLATGFIDVLVICNRVLDKVPDNAGPLILRKGHGGAYLPLM

SEQ ID NO: 162789 - protein, 2874 aa, Zea Mays
MSTSRQIDDGPAVLQLCRWTLLQPHLKLSKFREAFISPTRRLFGLLSDHGDLVLATAEINSSQVESHRALSDTCTQAVFKTFSTIPRVKSLAWGYCSDAFDDSSFNEILVVSSDASITVHAFCHSRKSTLTVNSMSDAKELHGEWKEWRPTECSVLEDGESGPENWFCSFLTTVTASVSNGKYQARLPMKSLLPNSAEVVSFSIYDITLSFLKYWYSKCSLKTMAETDSESPRRFLRASCSCQWECLKVLSSSSCYLIGLVLTPNESVRCEAHPSNAECILVTVLELNHWGIQWNFVADLQDVSDGITPSPKWVDFQLSDVFLACLNTAGFVAIWNVKTGGLVTSFSVLQQCRTDLEMPLRSSMSIVTNLDEGNIHVENFVGRMFKRLVLASYSYLLAVVDEVGVVYVFYADDILNFKANVHENFDLPVMNQFADCFSIWEAAGHEIGSLSFCANQSIQQGSLSLTKLVPEFSGKSDDIVRPRERRKYRCDENEVDSWPSGFVTAGQMKVGAGYRRTNSSCFFRRIILPPCRSQQDVISLCPLGLTRIFKGSIADGNEHVKIFHSELLMYSSFLGKGDIDIGFMDEMLPFKKDSTFVGDSVVCSCQGYLYLITQYGLSVVLPPVSISSFSSQCDAIKFWQMGPAAGSTCNALNLLSVDKSDTSWKTWQIEVLDRALLYEGPALADRLCWENGWDLKFSRLRWLQLALHYSMIGDLEQSLNLLAEVNLAEEGVLQLLLASIHRLSSRTGSDNEATVSSKLMVLAVRFATRMIKCYGLQKQTTDNNSVKLHEMALLLMAIRSIQSRVSAKNQNSVWMQGDDKSSLKIGTEVFQHDSSVPVVVLDGVSSGPSGGLDTHDRQELVPVCVPDSNSMLALTPVGSSLSASTFHDIDTNKRTTQVGSQNFQGNIKEMINRWEMNNFDLKIVVREALQSGRLPLAVLQLQLLRQRELVSNDYSEDAFSEVHEIGRSIVYDLLMKGETGLAVATLERLGNDVESDLRQLMQGTVRRSLRLQIADEMKKRGYITPDDWKMLETITLIERLYPSSSFWNTYFYRENVIRDAAKIVTLPGDDKPVLALNIRNHPIIECGDVDGAVLGSWVNINDCTKEFSGSNISDGYWACAAVWSDAWGPRTVDRILLDQPYHVHAHVPWESQFEYFVAHNDVGKVCELLDMIPNSILSEGIIRVNVNSLQAPANTLSDLTVPDYNMYICDSEELEPFCVEIPHVKVFRSLWNHESTLYIRMVMQQELAKRHIFMKEYWQSTTEIIPLLARAGILIKVGLKEECSTIFSASEIPDDAHHQGREGALHKLIIRFCVQYNLPYLLDLYLDTCNLTPDKDCIRLLKENTGDCKWAQWLLFSRIKGYEYEASFSNARWNLSKKMVNNSNPTAVEIDEMLYTVDDMAERIGEMSALATLMYASAPIQKSICTGSVNRSGSSSQCTLENLAPCLQQFPTLWKTLFSACFGQDEYGCLNYSAGNAYGKRSISEYLRWRYSVFSSAGGDTSLLQMLPCWVPKSVRRLIQLFEQGPFGMQLLSTAPSSEELFTHGVSNYIYNSTGYTEANALSLEASIQKSVEEELYSSLEEKDVRVEHHLHRGRALAAFRHLIAKRASQLKSASARQVISAQSNVQADVQLILAPLSQVERSILISVAPLAITNFEDSTLVASCIFLLELCGLCANMLRLDIAALRRISSYYKSVQENKHVDLSPPRGPELHVQSHGAGIAPALARALAEDYVQSDHLHVLEQTQTSMAPKREQTQYPLISILQHLEKASLPSLEEGKTCGFWLLTGVGDASLYRSQQNEASQHWNLVTEFCQAHYLPLSTKYLALLANDNDWVGFLTEAQIAGFSIEAVIEVAAKEIRDSRLRAHILTVLKNMISLRRKSSGNVPSGSSDPSFSSVDGNNPMELFCILGVCEKQKNPGEALLIKAKQMQWSLLAMIASCFPDVTPLTCLSVWLEITAAREMSSIKVDDVSLKIAKNVGSAVEATNKLPSTSRNVEFRYNRKNPKRRRFLEASHEKLCFSIDSTCGPDSAATSNPISIVDHQGIGKPISGETIMSVDIDERLASLSNMVAVLCEQQLFLPLLRAFEMFLPSCSLLSFIRSLQAFSQMRLPEASARLASFSARIKDEASHTQLNSSKEVSVIAEWVATTAVKAADAVLSNCSSIYEKRCLLQLLSAVDFADGGTSSSYFSRRYWKINLSEPSLCKDTDVYNWNDLMDDASLLTSLEKDGQWEQARTWARHLESSGIAWESTLDHVTESQAEAMVAEWKEFLWDIPQERAALWGHCQSLFMRYSFPPLKAGLFFLKHAEAVGKEIPAQELHEILLLSLQWLSGTMTKSSPVYPLHLLREIETRVWLLAVESESQSKVMEILAAKCGEGRGRALIRRIIGVVRTARLLGLPFSEAFEKQPIELLQLLSLKAQDSFDEAKFLVETHIMPASSIARILADSFLKGLLAAHRGGYLDSQKEEGPAPLLWRSSDFLKWAKLCPSESEIGHALMRLVMTGHEVPHACEVELLILSHHFYMSSSCLDGVDVLVTFAANRVDSYVLEEDFSCLARLITGVSNFHSLSFILSILVENGQLELLLQKYSATDTATGTLASVRGFRMAVITSLKQFIPNDDDALSMVYKHFDMKHEAASLLESRAEQYMNSWLSRYDKERRNDELLDAMHHLVETAEVLSTIDAGQRTHRACARASLLSLQIRIPDLLWIGLSETNARRIFVEQSRFQEALIVAEAYNINQPIEWAPVFWNQMLKPDLIEQFVAEFVSVLPLQPPMLLELARFYRAEVAARGEQSHFSVWLSPGGLPAEWVKHLGRSFRSLLRRTRDMRLRLQLATLATGFIDVLVICNRVLDKVPDNAGPLILRKGHGGAYLPLM

SEQ ID NO: 162790 - protein, 3079 aa, Zea Mays
MSTSRQIDDGPAVLQLCRWTLLQPHLKLSKFREAFISPTRRLFGLLSDHGDLVLATAEINSSQVESHRALSDTCTQAVFKTFSTIPRVKSLAWGYCSDAFDDSSFNEILVVSSDASITVHAFCHSRKSTLTVNSMSDAKELHGEWKEWRPTECSVLEDGESGPENWFCSFLTTVTASVSNGKYQARLPMKSLLPNSAEVVSFSIYDITLSFLKYWYSKCSLKTMAETDSESPRRFLRASCSCQWECLKVLSSSSCYLIGLVLTPNESVRCEAHPSNAECILVTVLELNHWGIQWNFVADLQDVSDGITPSPKWVDFQLSDVFLACLNTAGFVAIWNVKTGGLVTSFSVLQQCRTDLEMPLRSSMSIVTNLDEGNIHVENFVGRMFKRLVLASYSYLLAVVDEVGVVYVFYADDILNFKANVHENFDLPVMNQFADCFSIWEAAGHEIGSLSFCANQSIQQGSLSLTKLVPEFSGKSDDIVRPRERRKYRCDENEVDSWPSGFVTAGQMKVGAGYRRTNSSCFFRRIILPPCRSQQDVISLCPLGLTRIFKGSIADGNEHVKIFHSELLMYSSFLGKGDIDIGFMDEMLPFKKDSTFVGDSVVCSCQGYLYLITQYGLSVVLPPVSISSFSSQCDAIKFWQMGPAAGSTCNALNLLSVDKSDTSWKTWQIEVLDRALLYEGPALADRLCWENGWDLKFSRLRWLQLALHYSMIGDLEQSLNLLAEVNLAEEGVLQLLLASIHRLSSRTGSDNEATVSSKLMVLAVRFATRMIKCYGLQKQTTDNNSVKLHEMALLLMAIRSIQSRVSAKNQNSVWMQGDDKSSLKIGPSGGLDTHDRQELVPVCVPDSNSMLALTPVGSSLSASTFHDIDTNKRTTQVGSQNFQGNIKEMINRWEMNNFDLKIVVREALQSGRLPLAVLQLQLLRQRELVSNDYSEDAFSEVHEIGRSIVYDLLMKGETGLAVATLERLGNDVESDLRQLMQGTVRRSLRLQIADEMKKRGYITPDDWKMLETITLIERLYPSSSFWNTYFYRENVIRDAAKIVTLPGDDKPVLALNIRNHPIIECGDVDGAVLGSWVNINDCTKEFSGSNISDGYWACAAVWSDAWGPRTVDRILLDQPYHVHAHVPWESQFEYFVAHNDVGKVCELLDMIPNSILSEGIIRVNVNSLQAPANTLSDLTVPDYNMYICDSEELEPFCVEIPHVKVFRSLWNHESTLYIRMVMQQELAKRHIFMKEYWQSTTEIIPLLARAGILIKVGLKEECSTIFSASEIPDDAHHQGREGALHKLIIRFCVQYNLPYLLDLYLDTCNLTPDKDCIRLLKENTGDCKWAQWLLFSRIKGYEYEASFSNARWNLSKKMVNNSNPTAVEIDEMLYTVDDMAERIGEMSALATLMYASAPIQKSICTGSVNRSGSSSQCTLENLAPCLQQFPTLWKTLFSACFGQDEYGCLNYSAGNAYGKRSISEYLRWRYSVFSSAGGDTSLLQMLPCWVPKSVRRLIQLFEQGPFGMQLLSTAPSSEELFTHGVSNYIYNSTGYTEANALSLEASIQKSVEEELYSSLEEKDVRVEHHLHRGRALAAFRHLIAKRASQLKSASARQVISAQSNVQADVQLILAPLSQVERSILISVAPLAITNFEDSTLVASCIFLLELCGLCANMLRLDIAALRRISSYYKSVQENKHVDLSPPRGPELHVQSHGAGIAPALARALAEDYVQSDHLHVLEQTQTSMAPKREQTQYPLISILQHLEKASLPSLEEGKTCGFWLLTGVGDASLYRSQQNEASQHWNLVTEFCQAHYLPLSTKYLALLANDNDWVGFLTEAQIAGFSIEAVIEVAAKEIRDSRLRAHILTVLKNMISLRRKSSGNVPSGSSDPSFSSVDGNNPMELFCILGVCEKQKNPGEALLIKAKQMQWSLLAMIASCFPDVTPLTCLSVWLEITAAREMSSIKVDDVSLKIAKNVGSAVEATNKLPSTSRNVEFRYNRKNPKRRRFLEASHEKLCFSIDSTCGPDSAATSNPISIVDHQGIGKPISGETIMSVDIDERLASLSNMVAVLCEQQLFLPLLRAFEMFLPSCSLLSFIRSLQAFSQMRLPEASARLASFSARIKDEASHTQLNSSKEVSVIAEWVATTAVKAADAVLSNCSSIYEKRCLLQLLSAVDFADGGTSSSYFSRRYWKINLSEPSLCKDTDVYNWNDLMDDASLLTSLEKDGQWEQARTWARHLESSGIAWESTLDHVTESQAEAMVAEWKEFLWDIPQERAALWGHCQSLFMRYSFPPLKAGLFFLKHAEAVGKEIPAQELHEILLLSLQWLSGTMTKSSPVYPLHLLREIETRVWLLAVESESQSKVDGEFATSAVAHNKAVGNSSSIIEHTADIITKIDSNMSLPHMKITERNSTRDSLSYQHVQLFESNSEASSTTINNTRAKRRMKTNSPLKRGVNDNIESRANELDNNSNTLHSSKIGEQARNLLSEEEFVKMEASLSGWEQNVRPVDMEKAVLSLLEFGQITAAKQLQQKLSPSYIPEELVLVDVALRIAKNSSNGEINLSCFDTQALRILQSLRVANSCDMISPSQVMEILAAKCGEGRGRALIRRIIGVVRTARLLGLPFSEAFEKQPIELLQLLSLKAQDSFDEAKFLVETHIMPASSIARILADSFLKGLLAAHRGGYLDSQKEEGPAPLLWRSSDFLKWAKLCPSESEIGHALMRLVMTGHEVPHACEVELLILSHHFYMSSSCLDGVDVLVTFAANRVDSYVLEEDFSCLARLITGVSNFHSLSFILSILVENGQLELLLQKYSATDTATGTLASVRGFRMAVITSLKQFIPNDDDALSMVYKHFDMKHEAASLLESRAEQYMNSWLSRYDKERRNDELLDAMHHLVETAEVLSTIDAGQRTHRACARASLLSLQIRIPDLLWIGLSETNARRIFVEQSRFQEALIVAEAYNINQPIEWAPVFWNQMLKPDLIEQFVAEFVSVLPLQPPMLLELARFYRAEVAARGEQSHFSVWLSPGGLPAEWVKHLGRSFRSLLRRTRDMRLRLQLATLATGFIDVLVICNRVLDKVPDNAGPLILRKGHGGAYLPLM

SEQ ID NO: 162791 - protein, 1997 aa, Zea Mays
MIALRSFLGATFLMVIGPVLLCGRMLGVRELWTILLDQPYHVHAHVPWESQFEYFVAHNDVGKVCELLDMIPNSILSEGIIRVNVNSLQAPANTLSDLTVPDYNMYICDSEELEPFCVEIPHVKVFRSLWNHESTLYIRMVMQQELAKRHIFMKEYWQSTTEIIPLLARAGILIKVGLKEECSTIFSASEIPDDAHHQGREGALHKLIIRFCVQYNLPYLLDLYLDTCNLTPDKDCIRLLKENTGDCKWAQWLLFSRIKGYEYEASFSNARWNLSKKMVNNSNPTAVEIDEMLYTVDDMAERIGEMSALATLMYASAPIQKSICTGSVNRSGSSSQCTLENLAPCLQQFPTLWKTLFSACFGQDEYGCLNYSAAYGKRSISEYLRWRYSVFSSAGGDTSLLQMLPCWVPKSVRRLIQLFEQGPFGMQLLSTAPSSEELFTHGVSNYIYNSTGYTEANALSLEASIQKSVEEELYSSLEEKDVRVEHHLHRGRALAAFRHLIAKRASQLKSASARQVISAQSNVQADVQLILAPLSQVERSILISVAPLAITNFEDSTLVASCIFLLELCGLCANMLRLDIAALRRISSYYKSVQENKHVDLSPPRGPELHVQSHGAGIAPALARALAEDYVQSDHLHVLEQTQTSMAPKREQTQYPLISILQHLEKASLPSLEEGKTCGFWLLTGVGDASLYRSQQNEASQHWNLVTEFCQAHYLPLSTKYLALLANDNDWVGFLTEAQIAGFSIEAVIEVAAKEIRDSRLRAHILTVLKNMISLRRKSSGNVPSGSSDPSFSSVDGNNPMELFCILGVCEKQKNPGEALLIKAKQMQWSLLAMIASCFPDVTPLTCLSVWLEITAAREMSSIKVDDVSLKIAKNVGSAVEATNKLPSTSRNVEFRYNRKNPKRRRFLEASHEKLCFSIDSTCGPDSAATSNPISIVDHQGIGKPISGETIMSVDIDERLASLSNMVAVLCEQQLFLPLLRAFEMFLPSCSLLSFIRSLQAFSQMRLPEASARLASFSARIKDEASHTQLNSSKEVSVIAEWVATTAVKAADAVLSNCSSIYEKRCLLQLLSAVDFADGGTSSSYFSRRYWKINLSEPSLCKDTDVYNWNDLMDDASLLTSLEKDGQWEQARTWARHLESSGIAWESTLDHVTESQAEAMVAEWKEFLWDIPQERAALWGHCQSLFMRYSFPPLKAGLFFLKHAEAVGKEIPAQELHEILLLSLQWLSGTMTKSSPVYPLHLLREIETRVWLLAVESESQSKVDGEFATSAVAHNKAVGNSSSIIEHTADIITKIDSNMSLPHMKITERNSTRDSLSYQHVQLFESNSEASSTTINNTRAKRRMKTNSPLKRGVNDNIESRANELDNNSNTLHSSKIGEQARNLLSEEEFVKMEASLSGWEQNVRPVDMEKAVLSLLEFGQITAAKQLQQKLSPSYIPEELVLVDVALRIAKNSSNGEINLSCFDTQALRILQSLRVANSCDMISPSQVMEILAAKCGEGRGRALIRRIIGVVRTARLLGLPFSEAFEKQPIELLQLLSLKAQDSFDEAKFLVETHIMPASSIARILADSFLKGLLAAHRGGYLDSQKEEGPAPLLWRSSDFLKWAKLCPSESEIGHALMRLVMTGHEVPHACEVELLILSHHFYMSSSCLDGVDVLVTFAANRVDSYVLEEDFSCLARLITGVSNFHSLSFILSILVENGQLELLLQKYSATDTATGTLASVRGFRMAVITSLKQFIPNDDDALSMVYKHFDMKHEAASLLESRAEQYMNSWLSRYDKERRNDELLDAMHHLVETAEVLSTIDAGQRTHRACARASLLSLQIRIPDLLWIGLSETNARRIFVEQSRFQEALIVAEAYNINQPIEWAPVFWNQMLKPDLIEQFVAEFVSVLPLQPPMLLELARFYRAEVAARGEQSHFSVWLSPGGLPAEWVKHLGRSFRSLLRRTRDMRLRLQLATLATGFIDVLVICNRVLDKVPDNAGPLILRKGHGGAYLPLM

SEQ ID NO: 162792 - protein, 2268 aa, Zea Mays
MSTSRQIDDGPAVLQLCRWTLLQPHLKLSKFREAFISPTRRLFGLLSDHGDLVLATAEINSSQVESHRALSDTCTQAVFKTFSTIPRVKSLAWGYCSDAFDDSSFNEILVVSSDASITVHAFCHSRKSTLTVNSMSDAKELHGEWKEWRPTECSVLEDGESGPENWFCSFLTTVTASVSNGKYQARLPMKSLLPNSAEVVSFSIYDITLSFLKYWYSKCSLKTMAETDSESPRRFLRASCSCQWECLKVLSSSSCYLIGLVLTPNESVRCEAHPSNAECILVTVLELNHWGIQWNFVADLQDVSDGITPSPKWVDFQLSDVFLACLNTAGFVAIWNVKTGGLVTSFSVLQQCRTDLEMPLRSSMSIVTNLDEGNIHVENFVGRMFKRLVLASYSYLLAVVDEVGVVYVFYADDILNFKANVHENFDLPVMNQFADCFSIWEAAGHEIGSLSFCANQSIQQGSLSLTKLVPEFSGKSDDIVRPRERRKYRCDENEVDSWPSGFVTAGQMKVGAGYRRTNSSCFFRRIILPPCRSQQDVISLCPLGLTRIFKGSIADGNEHVKIFHSELLMYSSFLGKGDIDIGFMDEMLPFKKDSTFVGDSVVCSCQGYLYLITQYGLSVVLPPVSISSFSSQCDAIKFWQMGPAAGSTCNALNLLSVDKSDTSWKTWQIEVLDRALLYEGPALADRLCWENGWDLKFSRLRWLQLALHYSMIGDLEQSLNLLAEVNLAEEGVLQLLLASIHRLSSRTGSDNEATVSSKLMVLAVRFATRMIKCYGLQKQTTDNNSVKLHEMALLLMAIRSIQSRVSAKNQNSVWMQGDDKSSLKIGTEVFQHDSSVPVVVLDGVSSGPSGGLDTHDRQELVPVCVPDSNSMLALTPVGSSLSASTFHDIDTNKRTTQVGSQNFQGNIKEMINRWEMNNFDLKIVVREALQSGRLPLAVLQLQLLRQRELVSNDYSEDAFSEVHEIGRSIVYDLLMKGETGLAVATLERLGNDVESDLRQLMQGTVRRSLRLQIADEMKKRGYITPDDWKMLETITLIERLYPSSSFWNTYFYRENVIRDAAKIVTLPGDDKPVLALNIRNHPIIECGDVDGAVLGSWVNINDCTKEFSGSNISDGYWACAAVWSDAWGPRTVDRILLDQPYHVHAHVPWESQFEYFVAHNDVGKVCELLDMIPNSILSEGIIRVNVNSLQAPANTLSDLTVPDYNMYICDSEELEPFCVEIPHVKVFRSLWNHESTLYIRMVMQQELAKRHIFMKEYWQSTTEIIPLLARAGILIKVGLKEECSTIFSASEIPDDAHHQGREGALHKLIIRFCVQYNLPYLLDLYLDTCNLTPDKDCIRLLKENTGDCKWAQWLLFSRIKGYEYEASFSNARWNLSKKMVNNSNPTAVEIDEMLYTVDDMAERIGEMSALATLMYASAPIQKSICTGSVNRSGSSSQCTLENLAPCLQQFPTLWKTLFSACFGQDEYGCLNYSAGNAYGKRSISEYLRWRYSVFSSAGGDTSLLQMLPCWVPKSVRRLIQLFEQGPFGMQLLSTAPSSEELFTHGVSNYIYNSTGYTEANALSLEASIQKSVEEELYSSLEEKDVRVEHHLHRGRALAAFRHLIAKRASQLKSASARQVISAQSNVQADVQLILAPLSQVERSILISVAPLAITNFEDSTLVASCIFLLELCGLCANMLRLDIAALRRISSYYKSVQENKHVDLSPPRGPELHVQSHGAGIAPALARALAEDYVQSDHLHVLEQTQTSMAPKREQTQYPLISILQHLEKASLPSLEEGKTCGFWLLTGVGDASLYRSQQNEASQHWNLVTEFCQAHYLPLSTKYLALLANDNDWVGFLTEAQIAGFSIEAVIEVAAKEIRDSRLRAHILTVLKNMISLRRKSSGNVPSGSSDPSFSSVDGNNPMELFCILGVCEKQKNPGEALLIKAKQMQWSLLAMIASCFPDVTPLTCLSVWLEITAAREMSSIKVDDVSLKIAKNVGSAVEATNKLPSTSRNVEFRYNRKNPKRRRFLEASHEKLCFSIDSTCGPDSAATSNPISIVDHQGIGKPISGETIMSVDIDERLASLSNMVAVLCEQQLFLPLLRAFEMFLPSCSLLSFIRSLQAFSQMRLPEASARLASFSARIKDEASHTQLNSSKEVSVIAEWVATTAVKAADAVLSNCSSIYEKRCLLQLLSAVDFADGGTSSSYFSRRYWKINLSEPSLCKDTDVYNWNDLMDDASLLTSLEKDGQWEQARTWARHLESSGIAWESTLDHVTESQCLNFSTIRQ

SEQ ID NO: 162793 - protein, 3076 aa, Zea Mays
MSTSRQIDDGPAVLQLCRWTLLQPHLKLSKFREAFISPTRRLFGLLSDHGDLVLATAEINSSQVESHRALSDTCTQAVFKTFSTIPRVKSLAWGYCSDAFDDSSFNEILVVSSDASITVHAFCHSRKSTLTVNSMSDAKELHGEWKEWRPTECSVLEDGESGPENWFCSFLTTVTASVSNGKYQARLPMKSLLPNSAEVVSFSIYDITLSFLKYWYSKCSLKTMAETDSESPRRFLRASCSCQWECLKVLSSSSCYLIGLVLTPNESVRCEAHPSNAECILVTVLELNHWGIQWNFVADLQDVSDGITPSPKWVDFQLSDVFLACLNTAGFVAIWNVKTGGLVTSFSVLQQCRTDLEMPLRSSMSIVTNLDEGNIHVENFVGRMFKRLVLASYSYLLAVVDEVGVVYVFYADDILNFKANVHENFDLPVMNQFADCFSIWEAAGHEIGSLSFCANQSIQQGSLSLTKLVPEFSGKSDDIVRPRERRKYRCDENEVDSWPSGFVTAGQMKVGAGYRRTNSSCFFRRIILPPCRSQQDVISLCPLGLTRIFKGSIADGNEHVKIFHSELLMYSSFLGKGDIDIGFMDEMLPFKKDSTFVGDSVVCSCQGYLYLITQYGLSVVLPPVSISSFSSQCDAIKFWQMGPAAGSTCNALNLLSVDKSDTSWKTWQIEVLDRALLYEGPALADRLCWENGWDLKFSRLRWLQLALHYSMIGDLEQSLNLLAEVNLAEEGVLQLLLASIHRLSSRTGSDNEATVSSKLMVLAVRFATRMIKCYGLQKQTTDNNSVKLHEMALLLMAIRSIQSRVSAKNQNSVWMGDDKSSLKIGPSGGLDTHDRQELVPVCVPDSNSMLALTPVGSSLSASTFHDIDTNKRTTQVGSQNFQGNIKEMINRWEMNNFDLKIVVREALQSGRLPLAVLQLQLLRQRELVSNDYSEDAFSEVHEIGRSIVYDLLMKGETGLAVATLERLGNDVESDLRQLMQGTVRRSLRLQIADEMKKRGYITPDDWKMLETITLIERLYPSSSFWNTYFYRENVIRDAAKIVTLPGDDKPVLALNIRNHPIIECGDVDGAVLGSWVNINDCTKEFSGSNISDGYWACAAVWSDAWGPRTVDRILLDQPYHVHAHVPWESQFEYFVAHNDVGKVCELLDMIPNSILSEGIIRVNVNSLQAPANTLSDLTVPDYNMYICDSEELEPFCVEIPHVKVFRSLWNHESTLYIRMVMQQELAKRHIFMKEYWQSTTEIIPLLARAGILIKVGLKEECSTIFSASEIPDDAHHQGREGALHKLIIRFCVQYNLPYLLDLYLDTCNLTPDKDCIRLLKENTGDCKWAQWLLFSRIKGYEYEASFSNARWNLSKKMVNNSNPTAVEIDEMLYTVDDMAERIGEMSALATLMYASAPIQKSICTGSVNRSGSSSQCTLENLAPCLQQFPTLWKTLFSACFGQDEYGCLNYSAAYGKRSISEYLRWRYSVFSSAGGDTSLLQMLPCWVPKSVRRLIQLFEQGPFGMQLLSTAPSSEELFTHGVSNYIYNSTGYTEANALSLEASIQKSVEEELYSSLEEKDVRVEHHLHRGRALAAFRHLIAKRASQLKSASARQVISAQSNVQADVQLILAPLSQVERSILISVAPLAITNFEDSTLVASCIFLLELCGLCANMLRLDIAALRRISSYYKSVQENKHVDLSPPRGPELHVQSHGAGIAPALARALAEDYVQSDHLHVLEQTQTSMAPKREQTQYPLISILQHLEKASLPSLEEGKTCGFWLLTGVGDASLYRSQQNEASQHWNLVTEFCQAHYLPLSTKYLALLANDNDWVGFLTEAQIAGFSIEAVIEVAAKEIRDSRLRAHILTVLKNMISLRRKSSGNVPSGSSDPSFSSVDGNNPMELFCILGVCEKQKNPGEALLIKAKQMQWSLLAMIASCFPDVTPLTCLSVWLEITAAREMSSIKVDDVSLKIAKNVGSAVEATNKLPSTSRNVEFRYNRKNPKRRRFLEASHEKLCFSIDSTCGPDSAATSNPISIVDHQGIGKPISGETIMSVDIDERLASLSNMVAVLCEQQLFLPLLRAFEMFLPSCSLLSFIRSLQAFSQMRLPEASARLASFSARIKDEASHTQLNSSKEVSVIAEWVATTAVKAADAVLSNCSSIYEKRCLLQLLSAVDFADGGTSSSYFSRRYWKINLSEPSLCKDTDVYNWNDLMDDASLLTSLEKDGQWEQARTWARHLESSGIAWESTLDHVTESQAEAMVAEWKEFLWDIPQERAALWGHCQSLFMRYSFPPLKAGLFFLKHAEAVGKEIPAQELHEILLLSLQWLSGTMTKSSPVYPLHLLREIETRVWLLAVESESQSKVDGEFATSAVAHNKAVGNSSSIIEHTADIITKIDSNMSLPHMKITERNSTRDSLSYQHVQLFESNSEASSTTINNTRAKRRMKTNSPLKRGVNDNIESRANELDNNSNTLHSSKIGEQARNLLSEEEFVKMEASLSGWEQNVRPVDMEKAVLSLLEFGQITAAKQLQQKLSPSYIPEELVLVDVALRIAKNSSNGEINLSCFDTQALRILQSLRVANSCDMISPSQVMEILAAKCGEGRGRALIRRIIGVVRTARLLGLPFSEAFEKQPIELLQLLSLKAQDSFDEAKFLVETHIMPASSIARILADSFLKGLLAAHRGGYLDSQKEEGPAPLLWRSSDFLKWAKLCPSESEIGHALMRLVMTGHEVPHACEVELLILSHHFYMSSSCLDGVDVLVTFAANRVDSYVLEEDFSCLARLITGVSNFHSLSFILSILVENGQLELLLQKYSATDTATGTLASVRGFRMAVITSLKQFIPNDDDALSMVYKHFDMKHEAASLLESRAEQYMNSWLSRYDKERRNDELLDAMHHLVETAEVLSTIDAGQRTHRACARASLLSLQIRIPDLLWIGLSETNARRIFVEQSRFQEALIVAEAYNINQPIEWAPVFWNQMLKPDLIEQFVAEFVSVLPLQPPMLLELARFYRAEVAARGEQSHFSVWLSPGGLPAEWVKHLGRSFRSLLRRTRDMRLRLQLATLATGFIDVLVICNRVLDKVPDNAGPLILRKGHGGAYLPLM

SEQ ID NO: 162794 - protein, 2810 aa, Zea Mays
MSTSRQIDDGPAVLQLCRWTLLQPHLKLSKFREAFISPTRRLFGLLSDHGDLVLATAEINSSQVESHRALSDTCTQAVFKTFSTIPRVKSLAWGYCSDAFDDSSFNEILVVSSDASITVHAFCHSRKSTLTVNSMSDAKELHGEWKEWRPTECSVLEDGESGPENWFCSFLTTVTASVSNGKYQARLPMKSLLPNSAEVVSFSIYDITLSFLKYWYSKCSLKTMAETDSESPRRFLRASCSCQWECLKVLSSSSCYLIGLVLTPNESVRCEAHPSNAECILVTVLELNHWGIQWNFVADLQDVSDGITPSPKWVDFQLSDVFLACLNTAGFVAIWNVKTGGLVTSFSVLQQCRTDLEMPLRSSMSIVTNLDEGNIHVENFVGRMFKRLVLASYSYLLAVVDEVGVVYVFYADDILNFKANVHENFDLPVMNQFADCFSIWEAAGHEIGSLSFCANQSIQQGSLSLTKLVPEFSGKSDDIVRPRERRKYRCDENEVDSWPSGFVTAGQMKVGAGYRRTNSSCFFRRIILPPCRSQQDVISLCPLGLTRIFKGSIADGNEHVKIFHSELLMYSSFLGKGDIDIGFMDEMLPFKKDSTFVGDSVVCSCQGYLYLITQYGLSVVLPPVSISSFSSQCDAIKFWQMGPAAGSTCNALNLLSVDKSDTSWKTWQIEVLDRALLYEGPALADRLCWENGWDLKFSRLRWLQLALHYSMIGDLEQSLNLLAEVNLAEEGVLQLLLASIHRLSSRTGSDNEATVSSKPFKALYFWVMELYRLMVLAVRFATRMIKCYGLQKQTTDNNSVKLHEMALLLMAIRSIQSRVSAKNQNSVWMLSSNDHFLNAVPTLQQGDDKSSLKIGPSGGLDTHDRQELVPVCVPDSNSMLALTPVGSSLSASTFHDIDTNKRTTQVGSQNFQGNIKEMINRWEMNNFDLKIVVREALQSGRLPLAVLQLQLLRQRELVSNDYSEDAFSEVHEIGRSIVYDLLMKGETGLAVATLERLGNDVESDLRQLMQGTVRRSLRLQIADEMKKRGYITPDDWKMLETITLIERLYPSSSFWNTYFYRENVIRDAAKIVTLPGDDKPVLALNIRNHPIIECGDVDGAVLGSWVNINDCTKEFSGSNISDGYWACAAVWSDAWGPRTVDRILLDQPYHVHAHVPWESQFEYFVAHNDVGKVCELLDMIPNSILSEGIIRVNVNSLQAPANTLSDLTVPDYNMYICDSEELEPFCVEIPHVKVFRSLWNHESTLYIRMVMQQELAKRHIFMKEYWQSTTEIIPLLARAGILIKVGLKEECSTIFSASEIPDDAHHQGREGALHKLIIRFCVQYNLPYLLDLYLDTCNLTPDKDCIRLLKENTGDCKWAQWLLFSRIKGYEYEASFSNARWNLSKKMVNNSNPTAVEIDEMLYTVDDMAERIGEMSALATLMYASAPIQKSICTGSVNRSGSSSQCTLENLAPCLQQFPTLWKTLFSACFGQDEYGCLNYSAAYGKRSISEYLRWRYSVFSSAGGDTSLLQMLPCWVPKSVRRLIQLFEQGPFGMQLLSTAPSSEELFTHGVSNYIYNSTGYTEANALSLEASIQKSVEEELYSSLEEKDVRVEHHLHRGRALAAFRHLIAKRASQLKSASARQVISAQSNVQADVQLILAPLSQVERSILISVAPLAITNFEDSTLVASCIFLLELCGLCANMLRLDIAALRRISSYYKSVQENKHVDLSPPRGPELHVQSHGAGIAPALARALAEDYVQSDHLHVLEQTQTSMAPKREQTQYPLISILQHLEKASLPSLEEGKTCGFWLLTGVGDASLYRSQQNEASQHWNLVTEFCQAHYLPLSTKYLALLANDNDWVGFLTEAQIAGFSIEAVIEVAAKEIRDSRLRAHILTVLKNMISLRRKSSGNVPSGSSDPSFSSVDGNNPMELFCILGVCEKQKNPGEALLIKAKQMQWSLLAMIASCFPDVTPLTCLSVWLEITAAREMSSIKVDDVSLKIAKNVGSAVEATNKLPSTSRNVEFRYNRKNPKRRRFLEASHEKLCFSIDSTCGPDSAATSNPISIVDHQGIGKPISGETIMSVDIDERLASLSNMVAVLCEQQLFLPLLRAFEMFLPSCSLLSFIRSLQAFSQMRLPEASARLASFSARIKDEASHTQLNSSKEVSVIAEWVATTAVKAADAVLSNCSSIYEKRCLLQLLSAVDFADGGTSSSYFSRRYWKINLSEPSLCKDTDVYNWNDLMDDASLLTSLEKDGQWEQARTWARHLESSGIAWESTLDHVTESQAEAMVAEWKEFLWDIPQERAALWGHCQSLFMRYSFPPLKAGLFFLKHAEAVGKEIPAQELHEILLLSLQWLSGTMTKSSPVYPLHLLREIETRVWLLAVESESQSKVDGEFATSAVAHNKAVGNSSSIIEHTADIITKIDSNMSLPHMKITERNSTRDSLSYQHVQLFESNSEASSTTINNTRAKRRMKTNSPLKRGVNDNIESRANELDNNSNTLHSSKIGEQARNLLSEEEFVKMEASLSGWEQNVRPVDMEKAVLSLLEFGQITAAKQLQQKLSPSYIPEELVLVDVALRIAKNSSNGEINLSCFDTQALRILQSLRVANSCDMISPSQVMEILAAKCGEGRGRALIRRIIGVVRTARLLGLPFSEAFEKQPIELLQLLSLKAQDSFDEAKFLVETHIMPASSIARILADSFLKGLLAAHRGGYLDSQKEEGPAPLLWRSSDFLKWAKLCPSESEIGHALMRLVMTGHEVPHACEVELLILSHHFYMSSSCLDGVDVLVTFAANRVDSYVLEEDFSCLARLITGPQGRLHRFEDLGWLLLHH

SEQ ID NO: 162795 - protein, 2965 aa, Zea Mays
MSDAKELHGEWKEWRPTECSVLEDGESGPENWFCSFLTTVTASVSNGKYQARLPMKSLLPNSAEVVSFSIYDITLSFLKYWYSKCSLKTMAETDSESPRRFLRASCSCQWECLKVLSSSSCYLIGLVLTPNESVRCEAHPSNAECILVTVLELNHWGIQWNFVADLQDVSDGITPSPKWVDFQLSDVFLACLNTAGFVAIWNVKTGGLVTSFSVLQQCRTDLEMPLRSSMSIVTNLDEGNIHVENFVGRMFKRLVLASYSYLLAVVDEVGVVYVFYADDILNFKANVHENFDLPVMNQFADCFSIWEAAGHEIGSLSFCANQSIQQGSLSLTKLVPEFSGKSDDIVRPRERRKYRCDENEVDSWPSGFVTAGQMKVGAGYRRTNSSCFFRRIILPPCRSQQDVISLCPLGLTRIFKGSIADGNEHVKIFHSELLMYSSFLGKGDIDIGFMDEMLPFKKDSTFVGDSVVCSCQGYLYLITQYGLSVVLPPVSISSFSSQCDAIKFWQMGPAAGSTCNALNLLSVDKSDTSWKTWQIEVLDRALLYEGPALADRLCWENGWDLKFSRLRWLQLALHYSMIGDLEQSLNLLAEVNLAEEGVLQLLLASIHRLSSRTGSDNEATVSSKLMVLAVRFATRMIKCYGLQKQTTDNNSVKLHEMALLLMAIRSIQSRVSAKNQNSVWMGDDKSSLKIGTEVFQHDSSVPVVVLDGVSSGPSGGLDTHDRQELVPVCVPDSNSMLALTPVGSSLSASTFHDIDTNKRTTQVGSQNFQGNIKEMINRWEMNNFDLKIVVREALQSGRLPLAVLQLQLLRQRELVSNDYSEDAFSEVHEIGRSIVYDLLMKGETGLAVATLERLGNDVESDLRQLMQGTVRRSLRLQIADEMKKRGYITPDDWKMLETITLIERLYPSSSFWNTYFYRENVIRDAAKIVTLPGDDKPVLALNIRNHPIIECGDVDGAVLGSWVNINDCTKEFSGSNISDGYWACAAVWSDAWGPRTVDRILLDQPYHVHAHVPWESQFEYFVAHNDVGKVCELLDMIPNSILSEGIIRVNVNSLQAPANTLSDLTVPDYNMYICDSEELEPFCVEIPHVKVFRSLWNHESTLYIRMVMQQELAKRHIFMKEYWQSTTEIIPLLARAGILIKVGLKEECSTIFSASEIPDDAHHQGREGALHKLIIRFCVQYNLPYLLDLYLDTCNLTPDKDCIRLLKENTGDCKWAQWLLFSRIKGYEYEASFSNARWNLSKKMVNNSNPTAVEIDEMLYTVDDMAERIGEMSALATLMYASAPIQKSICTGSVNRSGSSSQCTLENLAPCLQQFPTLWKTLFSACFGQDEYGCLNYSAGNAYGKRSISEYLRWRYSVFSSAGGDTSLLQMLPCWVPKSVRRLIQLFEQGPFGMQLLSTAPSSEELFTHGVSNYIYNSTGYTEANALSLEASIQKSVEEELYSSLEEKDVRVEHHLHRGRALAAFRHLIAKRASQLKSASARQVISAQSNVQADVQLILAPLSQVERSILISVAPLAITNFEDSTLVASCIFLLELCGLCANMLRLDIAALRRISSYYKSVQENKHVDLSPPRGPELHVQSHGAGIAPALARALAEDYVQSDHLHVLEQTQTSMAPKREQTQYPLISILQHLEKASLPSLEEGKTCGFWLLTGVGDASLYRSQQNEASQHWNLVTEFCQAHYLPLSTKYLALLANDNDWVGFLTEAQIAGFSIEAVIEVAAKEIRDSRLRAHILTVLKNMISLRRKSSGNVPSGSSDPSFSSVDGNNPMELFCILGVCEKQKNPGEALLIKAKQMQWSLLAMIASCFPDVTPLTCLSVWLEITAAREMSSIKVDDVSLKIAKNVGSAVEATNKLPSTSRNVEFRYNRKNPKRRRFLEASHEKLCFSIDSTCGPDSAATSNPISIVDHQGIGKPISGETIMSVDIDERLASLSNMVAVLCEQQLFLPLLRAFEMFLPSCSLLSFIRSLQAFSQMRLPEASARLASFSARIKDEASHTQLNSSKEVSVIAEWVATTAVKAADAVLSNCSSIYEKRCLLQLLSAVDFADGGTSSSYFSRRYWKINLSEPSLCKDTDVYNWNDLMDDASLLTSLEKDGQWEQARTWARHLESSGIAWESTLDHVTESQAEAMVAEWKEFLWDIPQERAALWGHCQSLFMRYSFPPLKAGLFFLKHAEAVGKEIPAQELHEILLLSLQWLSGTMTKSSPVYPLHLLREIETRVWLLAVESESQSKVDGEFATSAVAHNKAVGNSSSIIEHTADIITKIDSNMSLPHMKITERNSTRDSLSYQHVQLFESNSEASSTTINNTRAKRRMKTNSPLKRGVNDNIESRANELDNNSNTLHSSKIGEQARNLLSEEEFVKMEASLSGWEQNVRPVDMEKAVLSLLEFGQITAAKQLQQKLSPSYIPEELVLVDVALRIAKNSSNGEINLSCFDTQALRILQSLRVANSCDMISPSQVMEILAAKCGEGRGRALIRRIIGVVRTARLLGLPFSEAFEKQPIELLQLLSLKAQDSFDEAKFLVETHIMPASSIARILADSFLKGLLAAHRGGYLDSQKEEGPAPLLWRSSDFLKWAKLCPSESEIGHALMRLVMTGHEVPHACEVELLILSHHFYMSSSCLDGVDVLVTFAANRVDSYVLEEDFSCLARLITGVSNFHSLSFILSILVENGQLELLLQKYSATDTATGTLASVRGFRMAVITSLKQFIPNDDDALSMVYKHFDMKHEAASLLESRAEQYMNSWLSRYDKERRNDELLDAMHHLVETAEVLSTIDAGQRTHRACARASLLSLQIRIPDLLWIGLSETNARRIFVEQSRFQEALIVAEAYNINQPIEWAPVFWNQMLKPDLIEQFVAEFVSVLPLQPPMLLELARFYRAEVAARGEQSHFSVWLSPGGLPAEWVKHLGRSFRSLLRRTRDMRLRLQLATLATGFIDVLVICNRVLDKVPDNAGPLILRKGHGGAYLPLM

SEQ ID NO: 162796 - protein, 2191 aa, Zea Mays
MSTSRQIDDGPAVLQLCRWTLLQPHLKLSKFREAFISPTRRLFGLLSDHGDLVLATAEINSSQVESHRALSDTCTQAVFKTFSTIPRVKSLAWGYCSDAFDDSSFNEILVVSSDASITVHAFCHSRKSTLTVNSMSDAKELHGEWKEWRPTECSVLEDGESGPENWFCSFLTTVTASVSNGKYQARLPMKSLLPNSAEVVSFSIYDITLSFLKYWYSKCSLKTMAETDSESPRRFLRASCSCQWECLKVLSSSSCYLIGLVLTPNESVRCEAHPSNAECILVTVLELNHWGIQWNFVADLQDVSDGITPSPKWVDFQLSDVFLACLNTAGFVAIWNVKTGGLVTSFSVLQQCRTDLEMPLRSSMSIVTNLDEGNIHVENFVGRMFKRLVLASYSYLLAVVDEVGVVYVFYADDILNFKANVHENFDLPVMNQFADCFSIWEAAGHEIGSLSFCANQSIQQGSLSLTKLVPEFSGKSDDIVRPRERRKYRCDENEVDSWPSGFVTAGQMKVGAGYRRTNSSCFFRRIILPPCRSQQDVISLCPLGLTRIFKGSIADGNEHVKIFHSELLMYSSFLGKGDIDIGFMDEMLPFKKDSTFVGDSVVCSCQGYLYLITQYGLSVVLPPVSISSFSSQCDAIKFWQMGPAAGSTCNALNLLSVDKSDTSWKTWQIEVLDRALLYEGPALADRLCWENGWDLKFSRLRWLQLALHYSMIGDLEQSLNLLAEVNLAEEGVLQLLLASIHRLSSRTGSDNEATVSSKLMVLAVRFATRMIKCYGLQKQTTDNNSVKLHEMALLLMAIRSIQSRVSAKNQNSVWMGDDKSSLKIGTEVFQHDSSVPVVVLDGVSSGPSGGLDTHDRQELVPVCVPDSNSMLALTPVGSSLSASTFHDIDTNKRTTQVGSQNFQGNIKEMINRWEMNNFDLKIVVREALQSGRLPLAVLQLQLLRQRELVSNDYSEDAFSEVHEIGRSIVYDLLMKGETGLAVATLERLGNDVESDLRQLMQGTVRRSLRLQIADEMKKRGYITPDDWKMLETITLIERLYPSSSFWNTYFYRENVIRDAAKIVTLPGDDKPVLALNIRNHPIIECGDVDGAVLGSWVNINDCTKEFSGSNISDGYWACAAVWSDAWGPRTVDRILLDQPYHVHAHVPWESQFEYFVAHNDVGKVCELLDMIPNSILSEGIIRVNVNSLQAPANTLSDLTVPDYNMYICDSEELEPFCVEIPHVKVFRSLWNHESTLYIRMVMQQELAKRHIFMKEYWQSTTEIIPLLARAGILIKVGLKEECSTIFSASEIPDDAHHQGREGALHKLIIRFCVQYNLPYLLDLYLDTCNLTPDKDCIRLLKENTGDCKWAQWLLFSRIKGYEYEASFSNARWNLSKKMVNNSNPTAVEIDEMLYTVDDMAERIGEMSALATLMYASAPIQKSICTGSVNRSGSSSQCTLENLAPCLQQFPTLWKTLFSACFGQDEYGCLNYSAAYGKRSISEYLRWRYSVFSSAGGDTSLLQMLPCWVPKSVRRLIQLFEQGPFGMQLLSTAPSSEELFTHGVSNYIYNSTGYTEANALSLEASIQKSVEEELYSSLEEKDVRVEHHLHRGRALAAFRHLIAKRASQLKSASARQVISAQSNVQADVQLILAPLSQVERSILISVAPLAITNFEDSTLVASCIFLLELCGLCANMLRLDIAALRRISSYYKSVQENKHVDLSPPRGPELHVQSHGAGIAPALARALAEDYVQSDHLHVLEQTQTSMAPKREQTQYPLISILQHLEKASLPSLEEGKTCGFWLLTGVGDASLYRSQQNEASQHWNLVTEFCQAHYLPLSTKYLALLANDNDWVGFLTEAQIAGFSIEAVIEVAAKEIRDSRLRAHILTVLKNMISLRRKSSGNVPSGSSDPSFSSVDGNNPMELFCILGVCEKQKNPGEALLIKAKQMQWSLLAMIASCFPDVTPLTCLSVWLEITAAREMSSIKVDDVSLKIAKNVGSAVEATNKLPSTSRNVEFRYNRKNPKRRRFLEASHEKLCFSIDSTCGPDSAATSNPISIVDHQGIGKPISGETIMSVDIDERLASLSNMVAVLCEQQLFLPLLRAFEMFLPSCSLLSFIRSLQAFSQMRLPEASARLASFSARIKDEASHTQLNSSKEVSVIAEWVATTAVKAADAVLSNCSSIYEKRKGRSMGASSNLGKTSGVKWHSLGIYS

SEQ ID NO: 162797 - protein, 2596 aa, Zea Mays
MSTSRQIDDGPAVLQLCRWTLLQPHLKLSKFREAFISPTRRLFGLLSDHGDLVLATAEINSSQVESHRALSDTCTQAVFKTFSTIPRVKSLAWGYCSDAFDDSSFNEILVVSSDASITVHAFCHSRKSTLTVNSMSDAKELHGEWKEWRPTECSVLEDGESGPENWFCSFLTTVTASVSNGKYQARLPMKSLLPNSAEVVSFSIYDITLSFLKYWYSKCSLKTMAETDSESPRRFLRASCSCQWECLKVLSSSSCYLIGLVLTPNESVRCEAHPSNAECILVTVLELNHWGIQWNFVADLQDVSDGITPSPKWVDFQLSDVFLACLNTAGFVAIWNVKTGGLVTSFSVLQQCRTDLEMPLRSSMSIVTNLDEGNIHVENFVGRMFKRLVLASYSYLLAVVDEVGVVYVFYADDILNFKANVHENFDLPVMNQFADCFSIWEAAGHEIGSLSFCANQSIQQGSLSLTKLVPEFSGKSDDIVRPRERRKYRCDENEVDSWPSGFVTAGQMKVGAGYRRTNSSCFFRRIILPPCRSQQDVISLCPLGLTRIFKGSIADGNEHVKIFHSELLMYSSFLGKGDIDIGFMDEMLPFKKDSTFVGDSVVCSCQGYLYLITQYGLSVVLPPVSISSFSSQCDAIKFWQMGPAAGSTCNALNLLSVDKSDTSWKTWQIEVLDRALLYEGPALADRLCWENGWDLKFSRLRWLQLALHYSMIGDLEQSLNLLAEVNLAEEGVLQLLLASIHRLSSRTGSDNEATVSSKLMVLAVRFATRMIKCYGLQKQTTDNNSVKLHEMALLLMAIRSIQSRVSAKNQNSVWMQGDDKSSLKIGTEVFQHDSSVPVVVLDGVSSGPSGGLDTHDRQELVPVCVPDSNSMLALTPVGSSLSASTFHDIDTNKRTTQVGSQNFQGNIKEMINRWEMNNFDLKIVVREALQSGRLPLAVLQLQLLRQRELVSNDYSEDAFSEVHEIGRSIVYDLLMKGETGLAVATLERLGNDVESDLRQLMQGTVRRSLRLQIADEMKKRGYITPDDWKMLETITLIERLYPSSSFWNTYFYRENVIRDAAKIVTLPGDDKPVLALNIRNHPIIECGDVDGAVLGSWVNINDCTKEFSGSNISDGYWACAAVWSDAWGPRTVDRILLDQPYHVHAHVPWESQFEYFVAHNDVGKVCELLDMIPNSILSEGIIRVNVNSLQAPANTLSDLTVPDYNMYICDSEELEPFCVEIPHVKVFRSLWNHESTLYIRMVMQQELAKRHIFMKEYWQSTTEIIPLLARAGILIKVGLKEECSTIFSASEIPDDAHHQGREGALHKLIIRFCVQYNLPYLLDLYLDTCNLTPDKDCIRLLKENTGDCKWAQWLLFSRIKGYEYEASFSNARWNLSKKMVNNSNPTAVEIDEMLYTVDDMAERIGEMSALATLMYASAPIQKSICTGSVNRSGSSSQCTLENLAPCLQQFPTLWKTLFSACFGQDEYGCLNYSAAYGKRSISEYLRWRYSVFSSAGGDTSLLQMLPCWVPKSVRRLIQLFEQGPFGMQLLSTAPSSEELFTHGVSNYIYNSTGYTEANALSLEASIQKSVEEELYSSLEEKDVRVEHHLHRGRALAAFRHLIAKRASQLKSASARQVISAQSNVQADVQLILAPLSQVERSILISVAPLAITNFEDSTLVASCIFLLELCGLCANMLRLDIAALRRISSYYKSVQENKHVDLSPPRGPELHVQSHGAGIAPALARALAEDYVQSDHLHVLEQTQTSMAPKREQTQYPLISILQHLEKASLPSLEEGKTCGFWLLTGVGDASLYRSQQNEASQHWNLVTEFCQAHYLPLSTKYLALLANDNDWVGFLTEAQIAGFSIEAVIEVAAKEIRDSRLRAHILTVLKNMISLRRKSSGNVPSGSSDPSFSSVDGNNPMELFCILGVCEKQKNPGEALLIKAKQMQWSLLAMIASCFPDVTPLTCLSVWLEITAAREMSSIKVDDVSLKIAKNVGSAVEATNKLPSTSRNVEFRYNRKNPKRRRFLEASHEKLCFSIDSTCGPDSAATSNPISIVDHQGIGKPISGETIMSVDIDERLASLSNMVAVLCEQQLFLPLLRAFEMFLPSCSLLSFIRSLQAFSQMRLPEASARLASFSARIKDEASHTQLNSSKEVSVIAEWVATTAVKAADAVLSNCSSIYEKRCLLQLLSAVDFADGGTSSSYFSRRYWKINLSEPSLCKDTDVYNWNDLMDDASLLTSLEKDGQWEQARTWARHLESSGIAWESTLDHVTESQAEAMVAEWKEFLWDIPQERAALWGHCQSLFMRYSFPPLKAGLFFLKHAEAVGKEIPAQELHEILLLSLQWLSGTMTKSSPVYPLHLLREIETRVWLLAVESESQSKVDGEFATSAVAHNKAVGNSSSIIEHTADIITKIDSNMSLPHMKITERNSTRDSLSYQHVQLFESNSEASSTTINNTRAKRRMKTNSPLKRGVNDNIESRANELDNNSNTLHSSKIGEQARNLLSEEEFVKMEASLSGWEQNVRPVDMEKAVLSLLEFGQITAAKQLQQKLSPSYIPEELVLVDVALRIAKNSSNGEINLSCFDTQALRILQSLRVANSCDMISPSQESCASLY

SEQ ID NO: 162798 - protein, 774 aa, Zea Mays
MSTSRQIDDGPAVLQLCRWTLLQPHLKLSKFREAFISPTRRLFGLLSDHGDLVLATAEINSSQVESHRALSDTCTQAVFKTFSTIPRVKSLAWGYCSDAFDDSSFNEILVVSSDASITVHAFCHSRKSTLTVNSMSDAKELHGEWKEWRPTECSVLEDGESGPENWFCSFLTTVTASVSNGKYQARLPMKSLLPNSAEVVSFSIYDITLSFLKYWYSKCSLKTMAETDSESPRRFLRASCSCQWECLKVLSSSSCYLIGLVLTPNESVRCEAHPSNAECILVTVLELNHWGIQWNFVADLQDVSDGITPSPKWVDFQLSDVFLACLNTAGFVAIWNVKTGGLVTSFSVLQQCRTDLEMPLRSSMSIVTNLDEGNIHVENFVGRMFKRLVLASYSYLLAVVDEVGVVYVFYADDILNFKANVHENFDLPVMNQFADCFSIWEAAGHEIGSLSFCANQSIQQGSLSLTKLVPEFSGKSDDIVRPRERRKYRCDENEVDSWPSGFVTAGQMKVGAGYRRTNSSCFFRRIILPPCRSQQDVISLCPLGLTRIFKGSIADGNEHVKIFHSELLMYSSFLGKGDIDIGFMDEMLPFKKDSTFVGDSVVCSCQGYLYLITQYGLSVVLPPVSISSFSSQCDAIKFWQMGPAAGSTCNALNLLSVDKSDTSWKTWQIEVLDRALLYEGPALADRLCWENGWDLKFSRLRWLQLALHYSMIGDLEQSLNLLAEVNLAEEGVLQLLLASIHRLSSRTGSDNEATVSSKSVPIYFSARQASCSTG

SEQ ID NO: 162799 - protein, 446 aa, Zea Mays
MDGYCLFSCSQDNSARCWISHENHLEEIFMHSNFPELRESADLSELSDRCYGLTLAPGEQMIAVVRSLDLNLLNQMYQVRTQKAVVEFIWIGGQFVGIPLDRSIDICSSQSTDLSSSNLMWWGSNILWSLKKYENVEKRLVIWDVVAVLQELKKSAPAFLETLVHSWVSVLLSGDPQCVSIDAPSRSMHDMMPYVSTRKLHLLNIMCRKVMVSIHTHHGPGAENGNEETTDFWSTLLVRSETELRERLVGFTFAAVLKRTAYLFNGTSTENCWFPVGVAQMDSWVTMNYDGQVHDQLQSIRSKIKDLGSRCMHFSISIDQSSAIQFHLTGSSFRIDGYSDVESCPYCSSPVHFESPDVAICGERHTLPRCRASMILCSVVQPLWHCVCCGGTVNKLLPESFFTMQASTMHDEGSLDLSAASVPLCPFCGILLQRSMPAFLLSTSPA

SEQ ID NO: 162800 - protein, 406 aa, Zea Mays
MDGHVKLYRSPIWELCDEWVEVADISQLLFNYYKLINFGEDNGSHLTSLKNTNTGETEVLGSAYELQESLYFRCPGQRKLKRSRVDGFIYDVNEVDLDASKDADFSIEPCSKSKKKYLKKTVKPRHEVVAVNERNNTGNIKGSLSSNGENKSLPLITAKQYACRAAHLSSLVVSWSPVVSSSDKTSCLLRHWCIIAVGSKSGNLSFWKLPKPEYYTIDAGVVTSDPMLIGVLQAHKSCVSVIAWQVLSAGSSKSSLLLATGCSDGSVKIWLGNIEGLNQCASGEVPFALVAVVATDLSSPVSSISLAIPAQSQHEVSLAIGRVSGSLEIWIWNASSNKIEIFSAWHAHDQVVTGLQWAMDGYCLFSCSQDNSARCWISHENHLEEIFMHSNFPELRESADVKLVDT

SEQ ID NO: 162801 - protein, 500 aa, Zea Mays
MAPQYQAATLIASPSYPSAIAWSSDNLVAVASGHIVTILNPSALDGPRGLVGLCRSDPFPIGLVNREDLLEPCLLSTSLARETEPCARSISWSQQGFAPNSGCLLAVCTMDGHVKLYRSPIWELCDEWVEVADISQLLFNYYKLINFGEDNGSHLTSLNTNTGETEVLGSAYELQESLYFRCPGQRKLKRSRVDGFIYDVNEVDLDASKDADFSIEPCSKSKKKYLKKTVKPRHEVVAVNERNNTGNIKGSLSSNGENKSLPLITAKQYACRAAHLSSLVVSWSPVVSSSDKTSCLLRHWCIIAVGSKSGNLSFWKLPKPEYYTIDAGVVTSDPMLIGVLQAHKSCVSVIAWQVLSAGSSKSSLLLATGCSDGSVKIWLGNIEGLNQCASGEVPFALVAVVATDLSSPVSSISLAIPAQSQHEVSLAIGRVSGSLEIWIWNASSNKIEIFSAWHAHDQVVYNGLWMAIVYSAAVRTILHVVGSLTKTTLKKFLCIQIFQS

SEQ ID NO: 162802 - protein, 780 aa, Zea Mays
MDGHVKLYRSPIWELCDEWVEVADISQLLFNYYKLINFGEDNGSHLTSLKNTNTGETEVLGSAYELQESLYFRCPGQRKLKRSRVDGFIYDVNEVDLDASKDADFSIEPCSKSKKKYLKKTVKPRHEVVAVNERNNTGNIKGSLSSNGENKSLPLITAKQYACRAAHLSSLVVSWSPVVSSSDKTSCLLRHWCIIAVGSKSGNLSFWKLPKPEYYTIDAGVVTSDPMLIGVLQAHKSCVSVIAWQVLSAGSSKSSLLLATGCSDGSVKIWLGNIEGLNQCASGEVPFALVAVVATDLSSPVSSISLAIPAQSQHEVSLAIGRVSGSLEIWIWNASSNKIEIFSAWHAHDQVVTGLQWAMDGYCLFSCSQDNSARCWISHENHLEEIFMHSNFPELRESADLSELSDRCYGLTLAPGEQMIAVVRSLDLNLLNQMYQVRTQKAVVEFIWIGGQFVGIPLDRSIDICSSQSTDLSSSNLMWWGSNILWSLKKYENVEKRLVIWDVVAVLQELKKSAPAFLETLVHSWVSVLLSGDPQCVSIDAPSRSMHDMMPYVSTRKLHLLNIMCRKVMVSIHTHHGPGAENGNEETTDFWSTLLVRSETELRERLVGFTFAAVLKRTAYLFNGTSTENCWFPVGVAQMDSWVTMNYDGQVHDQLQSIRSKIKDLGSRIDGYSDVESCPYCSSPVHFESPDVAICGERHTLPRCRASMILCSVVQPLWHCVCCGGTVNKLLPESFFTMQASTMHDEGSLDLSAASVPLCPFCGILLQRSMPAFLLSTSPA

SEQ ID NO: 162803 - protein, 473 aa, Zea Mays
MAPQYQAATLIASPSYPSAIAWSSDNLVAVASGHIVTILNPSALDGPRGLVGLCRSDPFPIGLVNREDLLEPCLLSTSLARETEPCARSISWSQQGFAPNSGCLLAVCTMDGHVKLYRSPIWELCDEWVEKNTNTGETEVLGSAYELQESLYFRCPGQRKLKRSRVDGFIYDVNEVDLDASKDADFSIEPCSKSKKKYLKKTVKPRHEVVAVNERNNTGNIKGSLSSNGENKSLPLITAKQYACRAAHLSSLVVSWSPVVSSSDKTSCLLRHWCIIAVGSKSGNLSFWKLPKPEYYTIDAGVVTSDPMLIGVLQAHKSCVSVIAWQVLSAGSSKSSLLLATGCSDGSVKIWLGNIEGLNQCASGEVPFALVAVVATDLSSPVSSISLAIPAQSQHEVSLAIGRVSGSLEIWIWNASSNKIEIFSAWHAHDQVVYNGLWMAIVYSAAVRTILHVVGSLTKTTLKKFLCIQIFQS

SEQ ID NO: 162804 - protein, 888 aa, Zea Mays
MAPQYQAATLIASPSYPSAIAWSSDNLVAVASGHIVTILNPSALDGPRGLVGLCRSDPFPIGLVNREDLLEPCLLSTSLARETEPCARSISWSQQGFAPNSGCLLAVCTMDGHVKLYRSPIWELCDEWVEVADISQLLFNYYKLINFGEDNGSHLTSLNTNTGETEVLGSAYELQESLYFRCPGQRKLKRSRVDGFIYDVNEVDLDASKDADFSIEPCSKSKKKYLKKTVKPRHEVVAVNERNNTGNIKGSLSSNGENKSLPLITAKQYACRAAHLSSLVVSWSPVVSSSDKTSCLLRHWCIIAVGSKSGNLSFWKLPKPEYYTIDAGVVTSDPMLIGVLQAHKSCVSVIAWQVLSAGSSKSSLLLATGCSDGSVKIWLGNIEGLNQCASGEVPFALVAVVATDLSSPVSSISLAIPAQSQHEVSLAIGRVSGSLEIWIWNASSNKIEIFSAWHAHDQVVTGLQWAMDGYCLFSCSQDNSARCWISHENHLEEIFMHSNFPELRESADLSELSDRCYGLTLAPGEQMIAVVRSLDLNLLNQMYQVRTQKAVVEFIWIGGQFVGIPLDRSIDICSSQSTDLSSSNLMWWGSNILWSLKKYENVEKRLVIWDVVAVLQELKKSAPAFLETLVHSWVSVLLSGDPQCVSIDAPSRSMHDMMPYVSTRKLHLLNIMCRKVMVSIHTHHGPGAENGNEETTDFWSTLLVRSETELRERLVGFTFAAVLKRTAYLFNGTSTENCWFPVGVAQMDSWVTMNYDGQVHDQLQSIRSKIKDLGSRIDGYSDVESCPYCSSPVHFESPDVAICGERHTLPRCRASMILCSVVQPLWHCVCCGGTVNKLLPESFFTMQASTMHDEGSLDLSAASVPLCPFCGILLQRSMPAFLLSTSPA

SEQ ID NO: 162805 - protein, 463 aa, Zea Mays
MAPQYQAATLIASPSYPSAIAWSSDNLVAVASGHIVTILNPSALDGPRGLVGLCRSDPFPIGLVNREDLLEPCLLSTSLARETEPCARSISWSQQGFAPNSGCLLAVCTMDGHVKLYRSPIWELCDEWVEKNTNTGETEVLGSAYELQESLYFRCPGQRKLKRSRVDGFIYDVNEVDLDASKDADFSIEPCSKSKKKYLKKTVKPRHEVVAVNERNNTGNIKGSLSSNGENKSLPLITAKQYACRAAHLSSLVVSWSPVVSSSDKTSCLLRHWCIIAVGSKSGNLSFWKLPKPEYYTIDAGVVTSDPMLIGVLQAHKSCVSVIAWQVLSAGSSKSSLLLATGCSDGSVKIWLGNIEGLNQCASGEVPFALVAVVATDLSSPVSSISLAIPAQSQHEVSLAIGRVSGSLEIWIWNASSNKIEIFSAWHAHDQVVTGLQWAMDGYCLFSCSQINLLTQHGGERIS

SEQ ID NO: 162806 - protein, 193 aa, Zea Mays
MAPQYQAATLIASPSYPSAIAWSSDNLVAVASGHIVTILNPSALDGPRGLVGLCRSDPFPIGLVNREDLLEPCLLSTSLARETEPCARSISWSQQGFAPNSGCLLAVCTMDGHVKLYRSPIWELCDEWVEVADISQLLFNYYKLINFGEDNGSHLTSLKNTNTGETEVLGSAYELQESLYFRCPGQRKLKRSR

SEQ ID NO: 162807 - protein, 326 aa, Zea Mays
MFIVHFLSACLLAVCTMDGHVKLYRSPIWELCDEWVEKNTNTGETEVLGSAYELQESLYFRCPGQRKLKRSRVDGFIYDVNEVDLDASKDADFSIEPCSKSKKKYLKKTVKPRHEVVAVNERNNTGNIKGSLSSNGENKSLPLITAKQYACRAAHLSSLVVSWSPVVSSSDKTSCLLRHWCIIAVGSKSGNLSFWKLPKPEYYTIDAGVVTSDPMLIGVLQAHKSCVSVIAWQVLSAGSSKSSLLLATGCSDGSVKIWLGNIEGLNQCASGEVPFALVAVVATDLSSPVSSISLAIPAQSQHEHQNLFPNIGLIEAIGLLKVGESK

SEQ ID NO: 162808 - protein, 170 aa, Zea Mays
MAPQYQAATLIASPSYPSAIAWSSDNLVAVASGHIVTILNPSALDGPRGLVGLCRSDPFPIGLVNREDLLEPCLLSTSLARETEPCARSISWSQQGFAPNSGCLLAVCTMDGHVKLYRSPIWELCDEWVEVADISQLLFNYYKLINFGEDNGSHLTSLVSWTEKTKAIKS

SEQ ID NO: 162809 - protein, 341 aa, Zea Mays
MGGTGASSRRRWARRSFRTAGGGGGRGTGGVVRRTVAASTTMAPRGTQGFAHVDKQQRHVHGVLSDFRCNSGSTDHLSLYVEEFKHKSSHRSSVRCLPSAQGNVTEISRMQPVARKVQVDMTFNDKGLCRASRTVSGMRIQPKYYISSPNNNLKNSPTVKSYSGMSDFNYQLVRSAKRSALPKMGLTSTNCSLSEKMSFLRRPRHGDNHQNQSRISALNRRNKIVNPRGAAHLLSKDKVHEHLNSSLERHSQALLSNALIREKQLCCSDILNQKEPEQLWSSAYSESEKMLCFSSSDSIDDLQVSSSSDTSDSFNLSSLGVIDGDEWNTTFKRVCTRIYDY

SEQ ID NO: 162810 - protein, 343 aa, Zea Mays
MGGTGASSRRRWARRSFRTAGGGGGRGTGGVVRRTVAASTTMAPRGTQGFAHVDKQQRHVHGVLSDFRCNSGSTDHLSLYVEEFKHKSSHRSSVRCLPSAQGNVTEISRMQPVARKVQVDMTFNDKGLCRASRTVSGMRIQPKYYISSPNNNLKNSPTVKSYSGMSDFNYQLVRSAKRSALPKMGLTSTNCSLSEKMSFLRRPRHGDNHQNQSRISALNRRNKIVNPRGAAHLLSKDKVHEHLNSSLERHSQALLSNALIREKQLCCSDILNQKEPEQLWSSAYSESEKMLCFSSSDSIDDLQVSSSSDTSDSFNLSSLGVIDGDEWNTTFKRTLYLSYTLKK

SEQ ID NO: 162811 - protein, 223 aa, Zea Mays
MPNVQPGRPGRLPVCLRRADLPNSRTRKPTRRPEQRVDSAPAVGTATMAAAWPLSAIAGILPASLSLTLLLATLVSILVLGAAAFFFEHIRKIGCMHSLERSAVSDAFFEDPNSLKKVPCPSVLDPPEKYISLIVPAYNEEYRLPEALTETLNYLKRRSTADKSFSYEVLIVDDGSTDGTSKVAFSFVKKHKIDNVRVLLLGRNHGKGEAVRKHLIGNASFTW

SEQ ID NO: 162812 - protein, 288 aa, Zea Mays
MPNVQPGRPGRLPVCLRRADLPNSRTRKPTRRPEQRVDSAPAVGTATMAAAWPLSAIAGILPASLSLTLLLATLVSILVLGAAAFFFEHIRKIGCMHSLERSAVSDAFFEDPNSLKKVPCPSVLDPPEKYISLIVPAYNEEYRLPEALTETLNYLKRRSTADKSFSYEVLIVDDGSTDGTSKVAFSFVKKHKIDNVRVLLLGRNHGKGEAVRKGMLHSRGELLLMLDADGATKVTDLEKLEAQVHALAKKAKSSPGTSTSSSQNLSDVEVAVFGSRAHLEKQALATFC

SEQ ID NO: 162813 - protein, 195 aa, Zea Mays
MADSATSRPTVLVTGAGGRTGQIVYNKLKERSEQFVARGLVRTEESKQKIGAAGDVYVADIRDADRLAPAVQGVDALIILTSAAPKMKPGFDPSKGGRPEFYYEDGMYPEQVDWVGQKNQIDAAKAAGVKHIVLVGSMGGTNPNHPLNSMGNGNILVWKRKAEQYLADSGIPYTIIRRSTRQGRRSERATCGERR

SEQ ID NO: 162814 - protein, 207 aa, Zea Mays
MADSATSRPTVLVTGAGGRTGQIVYNKLKERSEQFVARGLVRTEESKQKIGAAGDVYVADIRDADRLAPAVQGVDALIILTSAAPKMKPGFDPSKGGRPEFYYEDGMYPEQVDWVGQKNQIDAAKAAGVKHIVLVGSMGGTNPNHPLNSMGNGNILVWKRKAEQYLADSGIPYTIIRSKEAFTWRTPRDNVLILVFGQLKKKKLPVQ

SEQ ID NO: 162815 - protein, 407 aa, Zea Mays
MLRVRNRLLPLLGAASPLPSPIHIHLRVCRLLSTSTSTATVPAPFSLENYLVAACGFAPAQARLVSKKAFNELSRESKRSSEEHSCRRLISASNPDAILALLSGAGLSRADIAAVVFADPLILRASVSKIAPRLVALRDRVGLSTPQIARFLLVGSRALRRCDVVPKVEFFLSFLGSFDRVLAVAKANLGIFNANLEKVIKPNIDLFRQRGVRNVPKICLHRPRTLSFNLERVKEFLLRAEELGVPAASPLFMQAVGVVTSFPPEKVAAKLDFFKRTLGCSESEVSNAVSKMPQILALSEATLLRKIEFLVNEGAIEPQYIMQRPILLAFSLEKRLVPRYRVIKVLQGKGLLNSNMSLSSLASLAEETFKSKFVDCHKDCVPGLADAYAAACASIVPSTVVTDHELM

SEQ ID NO: 162816 - protein, 237 aa, Zea Mays
MLRVRNRLLPLLGAASPLPSPIHIHLRVCRLLSTSTSTATVPAPFSLENYLVAACGFAPAQARLVSKKAFNELSRESKRSSEEHSCRRLISASNPDAILALLSGAGLSRADIAAVVFADPLILRASVSKIAPRLVALRDRVGLSTPQIARFLLVGSRALRRCDVVPKVEFFLSFLGSFDRVLAVAKANLGIFNANLEKEFLLRAEELGVPAASPLFMQAVGVVTSFPPEKCPRCHKY

SEQ ID NO: 162817 - protein, 70 aa, Zea Mays
MAHKCTARTPLYLPTVSSTLLVLEDTIAGHHSKVRGARVPPWEIVHSPVYAADSFAAVVRASPQAIRVRS

SEQ ID NO: 162818 - protein, 578 aa, Zea Mays
MPAAALAVRVAAVLLLLARGGSGSAPGEFVLSGFASGNVTTSGAAVVTSSGLLQLTNATNEVFGHGFYPVPLRFKDASSTPRSFSTTFVFAMVPRHDDAHGHGIAFALAPSPTVPGAVAGKNLGLFNTSDDTGKARSGVVAVELDTAKDEEFSDINDNHVGIDVNSLVSVSSAPAAYVDAGSLVNISLVSGEPLQAWVEYDGASMRLEVTVAPARKPRPAVPLVSSIVNLSSAVADDTYVGFTAANGAASTSHYVLGWSFRLGDGRATDLDASKLPPVPSSKKKTSRLNLVTLSLVVVVALLLASVAVAALVVRHRRFAEEQEDWEIQYGPHRISYKDLHAATRGFRDAIGQGGFGRVYHGVLQRPVNAEVAVKKVSHDSRQGLREFVSEIASMSRLRHRNLVQLLGYCRRRGELVLVYDYMVNGSLDRHLFDAGKPALSWEQRGKIVRDVAAGLLYLHEGWEQVVVHRDIKSANVLLDADMNGKLSDFGLARLYDHGSNPQTTHVIGTLGYLAPEMSKTGKATTSTDVFAFGAFLLEVACGRRPMERDDDLDSPGLVDLVLECWKAQRRCQRHRPKI

SEQ ID NO: 162819 - protein, 665 aa, Zea Mays
MLANRLGPYLQELVASNQSAFVRGRSIHDNFMLVQHSIKSLHKKRVSSLLLKLDISKAFDSVSWAFLLEVLSYLGFGPVWRNMISNILASSSTQVLLNGSPGIPIRHRRGLRQGDPLSPMLFVLVMDILNSLFNLAENRGLLHSLEGANIRNRLSIYADDVVLFVQPFEEDFQCVKTILDCFGSATGLVSNLQKSFVIPIRCNEQAVQMGCNTLQCTASSFPCTYLGLPLSDKKLRKSDLMVWVEKVADRLPNWKARLLSFAGRTTMVRFVLSAIPIYLLIAMKIPKWVINSIDKIRRGFIWKGRKEVNGGNCLVSWDIVTRPLDLGGLGISNLLYQSWALQAKWLWLEKTDPTKPWSGLDLPIQQIVKRFFTASIVSLVGNGHNTLFWTDRWLDGSCIQDFAPAVVANVGKRAISSRSVAHALQNWQWISDIETPLSLLGLQQYLSLWDALRGVVLTQEADRHVWIHSSSGQFSSKSCYRAFFMGSITFEPWKRLWKTWAPPKCKFFLWLAIRNKCWTADRLQKRGLAYPEVCPLCDQDSENIQHLLCTCIFARQFWFYILSSLGLANLSPASNESNFADWWEKVCKQVHKSKRRGFNSIIILGAWCLWLHRNKAVFDDVRPSFQGIKSVFLDEFECWRLAGARHLEALGPGAAIFRSRVLLGA

SEQ ID NO: 162820 - protein, 82 aa, Zea Mays
MPFFNEPWETRLDQAARVHRHSDPRAWGGLTCLDECSQGRVPNFGYYRNNNRYIYIQFSMWIEYLLLGYSTKSHPQPREFQE

SEQ ID NO: 162821 - protein, 333 aa, Zea Mays
MRIFSKALEGSVLRYLNISDNALGEKGRKLRKLYLSLFLQLKLKVLHFHNNMTGDEGAMYIAEMVKRSPNVESFRCSATRIGSNGGVALSEALGTCTRLKKLDLRDNLFGVDAGLALSKTLPKLPDLVELYLSDLNLENKGTIAIAKALEQSAPQLEILLKMLPKYYNHVRAYDNTLITKKFGVHRITLKGGRKVRFVVMGNMFCTELRIPRKYDLKGSTQGRSTKKQNINENATLKDLDLSYVFHVDKPWRDTLFRNDHSGLMIIVSSNVLLSHKRSIPLEKDLKEQQVVHGEVENTLGPGFINLALENPIPKVICVNGNDSGPVSCSSNSR

SEQ ID NO: 162822 - protein, 122 aa, Zea Mays
MNIIAIMPVIEQLGRRECIFCLNITTTGSCLRADLWKLPGKRKAKGGKEDCLVPNRKLLAQTTEPGLFPQSHFCLVSATMQRAKRSKPTKAPGLLLIAYSKYTPIICNVCLPFNLFKLDCII

SEQ ID NO: 162823 - protein, 113 aa, Zea Mays
MQKSTMSSEEYKNIVVQAKEHILAGDIFQVVLSQRFERRTFADPFEIYRALRIVNPSPYMAYLQARGCILVASSPENSYPGTKEDNNQSSACWNHKKRQNKSRRQNFRTIAFE

SEQ ID NO: 162824 - protein, 349 aa, Zea Mays
MPGLAATCRASPSPTPLHSTPLARARRPRAPPSRPAPPRPYLYPFPLVPLNNPPHRALVFVSSRPQAAVHGHRQPSMEVVAKANHVTVMDHEMKSRREHFVPDPMRIPRTIMEQWNPQIADSLPDAFCGGWVGFFSYDTVRYVETKKLPFSKAPHDDRNLPDIHLGLYSDVIVFDHVEKKTHVIHWVRTDCYRSVDEAYEDGRNRLEALLSRLHCLNVPTLSSGSIKLNVENFGPVMQKSTMSSEEYKNIVVQAKEHILAGDIFQVVLSQRFERRTFADPFEIYRALRIVNPSPYMAYLQARGCILVASSPENSYPGTKEDNNQSSACWNHKKRQNKSRRQNFRTIAFE

SEQ ID NO: 162825 - protein, 373 aa, Zea Mays
MELKYKYSVESFAGAYDSDQKVYAVMSFLSLILPDNAIYFNSIREIYDAWVIYNFLSLCLAWVGGPGAVVVSLSGRTLKPSWILMTCCYPAIPLDGRFIRRCKQGCLQFVILKPILVVITFILYAKGKYKDGNFSVNQSYLYITIIYTISYSMALYALALFYAACRDLLRPYNPVPKFIMIKSVVFLTYWQGVLVFLAAKSRFIKNADKAADLQNFVLCVEMLIAAIGHLFAFPYKEYAGPNARPSGGFRESLLHALKFNDFYHDTVHQFAPTYNEYVLYNHNEGDNAETKFPSGSTATSGQGVELAGITVVASNSPVTSSVSCNQADQEETMTTPIKDKVDPGGLYDLTELLDVDLSSYPDKVPAITDVRKQ

SEQ ID NO: 162826 - protein, 280 aa, Zea Mays
MGARFIRRCKQGCLQFVILKPILVVITFILYAKGKYKDGNFSVNQSYLYITIIYTISYSMALYALALFYAACRDLLRPYNPVPKFIMIKSVVFLTYWQGVLVFLAAKSRFIKNADKAADLQNFVLCVEMLIAAIGHLFAFPYKEYAGPNARPSGGFRESLLHALKFNDFYHDTVHQFAPTYNEYVLYNHNEGDNAETKFPSGSTATSGQGVELAGITVVASNSPVTSSVSCNQADQEETMTTPIKDKVDPGGLYDLTELLDVDLSSYPDKVPAITDVRKQ

SEQ ID NO: 162827 - protein, 348 aa, Zea Mays
MSFLSLILPDNAIYFNSIREIYDAWVIYNFLSLCLAWVGGPGAVVVSLSGRTLKPSWILMTCCYPAIPLDGRFIRRCKQGCLQFVILKPILVVITFILYAKGKYKDGNFSVNQSYLYITIIYTISYSMALYALALFYAACRDLLRPYNPVPKFIMIKSVVFLTYWQGVLVFLAAKSRFIKNADKAADLQNFVLCVEMLIAAIGHLFAFPYKEYAGPNARPSGGFRESLLHALKFNDFYHDTVHQFAPTYNEYVLYNHNEGDNAETKFPSGSTATSGQGVELAGITVVASNSPVTSSVSCNQADQEETMTTPIKDKVDPGGLYDLTELLDVDLSSYPDKVPAITDVRKQ

SEQ ID NO: 162828 - protein, 355 aa, Zea Mays
MLMRHCDVAVGPCRVLHPGPAASRSPSSPHPYRVQTHRNTTPRRAVATSSGRPKPKRRHRHPSRRTSAGPCPAGCTPLPCVQVQPSPDERLILPVPGWPDLILRIRARRNATPCHCHLSVPLVLRVPPVVALARPLDTWTQATVEWSSVKKKLDLVARGKVYRRESSSQQWRGHGRRRPPSSWSPSSWPRPPPRPRTSSAAAAAWWAWTARGSWWAAPPEAGPSTSAGSTRTGSCWWRRSRRGGTRWWRRSARRPTTGSTSRGPGPSATAGTRRCRRRRASTTRPCSRVWTSWSPRPGGTASTSSSASPTTSTTSAASGSTCSGPGTPATASPPTTTSSTAPSSRDTTRTTSRRC

SEQ ID NO: 162829 - protein, 494 aa, Zea Mays
MRLAGVPEGEFEPAMARPRPAAATLLLVTFLLAAAAAETTDVISGGGGMVGVDGTRFVVGGAAGGRPVYFSGFNAYWLMLVASEPARRDKVVAAFRQAADHGLNLARTWAFSDGGDTPLQAAPGVYDEAMFQGLDFVVAEARRHGIYLLLCLANNFHDFGGKRQYVQWARDAGHRLATDDDFFNSTVVKGYYKNHVKTVLTRVNTLTGVAYKDDPAILGWELMNEPRCDAEPTGAMVQAWVEEMAPYVKSVDGGHLVTAGLEGFYGAGAHESKDLNPWRIYYGTNFVETHRARGVDFATIHLYPDAWLWGCAADAQRAFLRNWTRAHARDAALYLRKPLLVTEYGKFLWEGVAGANRTQRDAFLRLVLDSIYASAARGGPLVGGAFWQLLDDGMDTLRDGYEIILPDDQLAATIIATHSRQLADLSLVTAEDVREEEAAPLRRRRRKSAHGKIHHVLSVGGGTSSDDSYYTQRLLHIFLLRLISLFESISSLFQ

SEQ ID NO: 162830 - protein, 98 aa, Zea Mays
MNESHYSCSVLYECSCPELEELVKVCRDNGALGARLTGAGWGGCAVALVKEPIVPQFILKLKEMYYKSRIDRGVIKQGDVGLYVFASKPSSGAAILRL

SEQ ID NO: 162831 - protein, 358 aa, Zea Mays
MCGYKGVYEYCRSKGIDLGKPVALDVVVDGTVPQGSGLSSSAAFVCSATIAIMGILDKNFPKKEVAQFTCLSERHIGTQSGGMDQAISIMAKPGFAELIDFNPIHATDVQLPSGGTFVIAHCLAESKKAETAATNYNNRVVECRLAAIVLAIKLGMDRKKAISSVTTLSDVEGLCVSFAGREGSSDPAVAVKKLLHEDPYTAGEIEKITGEGLTSVFQGSQTSLDVIKAAKHYKLFQRATHVYSEARRVYAFRDTVSSKLSEEGKLKKLGDLMNESHYSCSVLYECRDNGALGARLTGAGWGGCAVALVKEPIVPQFILKLKEMYYKSRIDRGVIKQGDVGLYVFASKPSSGAAILRL

SEQ ID NO: 162832 - protein, 370 aa, Zea Mays
MCGYKGVYEYCRSKGIDLGKPVALDVVVDGTVPQGSGLSSSAAFVCSATIAIMGILDKNFPKKEVAQFTCLSERHIGTQSGGMDQAISIMAKPGFAELIDFNPIHATDVQLPSGGTFVIAHCLAESKKAETAATNYNNRVVECRLAAIVLAIKLGMDRKKAISSVTTLSDVEGLCVSFAGREGSSDPAVAVKKLLHEDPYTAGEIEKITGEGLTSVFQGSQTSLDVIKAAKHYKLFQRATHVYSEARRVYAFRDTVSSKLSEEGKLKKLGDLMNESHYSCSVLYECSCPELEELVKVCRDNGALGARLTGAGWGGCAVALVKEPIVPQFILKLKEMYYKSRIDRGVIKQGDVGLYVFASKPSSGAAILRL

SEQ ID NO: 162833 - protein, 252 aa, Zea Mays
MVGISLFGTVTSVCKVSTSGTTFYLELEDTTGVVLMKLIFVGPWSLGRVGVGHMVYISGLTCALSSTNILEVSWREKEPGSLFVNLSLLPALLNSSCLHNLSPLSDLPRSTNRTHISHVRLDGIDCDSLKVSLFHNICGSVVNEHSGVLQCSFCKCACESVCARGFQLHLTIADDSADVLAWCVGQTAVEFLQISPDEYLELPEDERAMYLYTLQNESFVVAIANTRKRVDGCAVGDEAVPAWEITRAQKCE

SEQ ID NO: 162834 - protein, 326 aa, Zea Mays
MLALDRPFIANFIDNNHEDSQELCLEYGSATQVYMVPIAQQEEQVPFTPTQVKSQGPRLSCVLTDNVASQVTLPRDLYGSVDFSKYPFRAYVSDLHDKMVGISLFGTVTSVCKVSTSGTTFYLELEDTTGVVLMKLIFVGPWSLGRVGVGHMVYISGLTCALSSTNILEVSWREKEPGSLFVNLSLLPALLNSSCLHNLSPLSDLPRSTNRTHISHVRLDGIDCDSLKVSLFHNICGSVVNEHSGVLQCSFYVLAWCVGQTAVEFLQISPDEYLELPEDERAMYLYTLQNESFVVAIANTRKRVDGCAVGDEAVPAWEITRAQKCE

SEQ ID NO: 162835 - protein, 624 aa, Zea Mays
MDPDTAVASADGGPFLEFVDYAISMLSSSAGDGDGYESPGDGPAPARPPWGWAVAQLLKSCCAYSSGVTAAILLSDLFQSWTEQRKSLTLKRKVKLPKLINTKNKRRRLPNTVTIDSIHEKNFLSPNSVLEVVVIAVFVLPGTNIYMLTLGDMWSASTIDIYLHRRYYDCIGQNGILKKGREVMLTGCCLRTAMEGSGHARILPTEYMVILLDEEQDEDALLLAAQFCNYSFSSLILEESRNNVPYSFYARIEKIESLEPFRCAERMQIILEDNDNAKMKLVLWGEQTSLANLCSVGSMLALDRPFIANFIDNNHEDSQELCLEYGSATQVYMVPIAQQEEQVPFTPTQVKSQGPRLSCVLTDNVASQVTLPRDLYGSVDFSKYPFRAYVSDLHDKMVGISLFGTVTSVCKVSTSGTTFYLELEDTTGVVLMKLIFVGPWSLGRVGVGHMVYISGLTCALSSTNILEVSWREKEPGSLFVNLSLLPALLNSSCLHNLSPLSDLPRSTNRTHISHVRLDGIDCDSLKVSLFHNICGSVVNEHSGVLQCSFYVLAWCVGQTAVEFLQISPDEYLELPEDERAMYLYTLQNESFVVAIANTRKRVDGCAVGDEAVPAWEITRAQKCE

SEQ ID NO: 162836 - protein, 209 aa, Zea Mays
MPIELFMSIMHLNSITVYECLLICRSLGRVGVGHMVYISGLTCALSSTNILEVSWREKEPGSLFVNLSLLPALLNSSCLHNLSPLSDLPRSTNRTHISHVRLDGIDCDSLKVSLFHNICGSVVNEHSGVLQCSFYVLAWCVGQTAVEFLQISPDEYLELPEDERAMYLYTLQNESFVVAIANTRKRVDGCAVGDEAVPAWEITRAQKCE

SEQ ID NO: 162837 - protein, 298 aa, Zea Mays
MLTLGDMWSASTIDIYLHRRYYDCIGQNGILKKGREVMLTGCCLRTAMEGSGHARILPTEYMVILLDEEQDEDALLLAAQFCNYSFSSLILEESRNNVPYSFYARIEKIESLEPFRCAERMQIILEDNDNAKMKLVLWGEQTSLANLCSVGSMLALDRPFIANFIDNNHEDSQELCLEYGSATQVYMVPIAQQEEQVPFTPTQVKSQGPRLSCVLTDNVASQVTLPRDLYGSVDFSKYPFRAYVSDLHDKMVGISLFGTVTSVCKVSTSGTTFYLELEDTTGVVLMKLIFVGPWYFCT

SEQ ID NO: 162838 - protein, 350 aa, Zea Mays
MLALDRPFIANFIDNNHEDSQELCLEYGSATQVYMVPIAQQEEQVPFTPTQVKSQGPRLSCVLTDNVASQVTLPRDLYGSVDFSKYPFRAYVSDLHDKMVGISLFGTVTSVCKVSTSGTTFYLELEDTTGVVLMKLIFVGPWSLGRVGVGHMVYISGLTCALSSTNILEVSWREKEPGSLFVNLSLLPALLNSSCLHNLSPLSDLPRSTNRTHISHVRLDGIDCDSLKVSLFHNICGSVVNEHSGVLQCSFCKCACESVCARGFQLHLTIADDSADVLAWCVGQTAVEFLQISPDEYLELPEDERAMYLYTLQNESFVVAIANTRKRVDGCAVGDEAVPAWEITRAQKCE

SEQ ID NO: 162839 - protein, 366 aa, Zea Mays
MANLQCLPPSVEPRVSDHVDEIINMIKQILDNRCAYVVGGDVYFSVDNFPEYGELSGRKLDDNRAGERVAVDERKRNPADFALWKAAKDGEPWWDSPWGPGRPGWHIECSAMSAHYLGHSFDIHGGGEDLIFPHHENEIAQSRAACCDSTINYWIHNGFVNVNSQKMSKSLGNFVTIRKVIEMYHPLALRMFLLGTHYRSPINYTIEQLNVASDRLYYTYQTLRDCEEICQHQQSNTGNPLPANTLNYIQKLHDEFETSMSDDLHTSVALAAMSEPLKVMNDLLHTRKALQQLRDKALRRASITEELVVQKIEERTAARKAKQYEKSDEIRKELAAVGIALMDGPDGTTWRPSLPLPEEEAVLAKT

SEQ ID NO: 162840 - protein, 530 aa, Zea Mays
MAAAVVVRRAAGLIPLLSSRFGARMPLHRALSQIPPPRFCRLLSQQTKPFSASASNGAATDRTRELRLYNTKSRKKEQFRPRIPGREVGMYVCGVTPYDDSHIGHARAYVAFDVLYRYLRYLDYEVRYVRNFTDIDDKIIARANQLGEDPFSLSKRFSDDFLSDMANLQCLPPSVEPRVSDHVDEIINMIKQILDNRCAYVVGGDVYFSVDNFPEYGELSGRKLDDNRAGERVAVDERKRNPADFALWKAAKDGEPWWDSPWGPGRPGWHIECSAMSAHYLGHSFDIHGGGEDLIFPHHENEIAQSRAACCDSTINYWIHNGFVNVNSQKMSKSLGNFVTIRKVIEMYHPLALRMFLLGTHYRSPINYTIEQLNVASDRLYYTYQTLRDCEEICQHQQSNTGNPLPANTLNYIQKLHDEFETSMSDDLHTSVALAAMSEPLKVMNDLLHTRKALQQLRDKALRRASITEELVVQKIEERTAARKAKQYEKSDEIRKELAAVGIALMDGPDGTTWRPSLPLPEEEAVLAKT

SEQ ID NO: 162841 - protein, 251 aa, Zea Mays
MAAVRHRQLEANGITMHVAEAGPVNASAPAVLFVHGFPELWYSWRHQMGYLAARGYRCVAPDLRGYGGTTAPPEPNSYTVFHIVGDIVALLDALHLPQVFVVGHDWGAIVSWNLCLLRPDRVRALVNLSVAFMPRRPGVKPLEYFRAAYGDEYYVCRFQEPGLEAEFATFDLKSFFTLALTLRATGSSAMDLRKMQTYSKQMVLPSWLSEEDVSYLASVYSKTGFAGGVNYYRCLDLSKGASSNQVHRWGR

SEQ ID NO: 162842 - protein, 283 aa, Zea Mays
MAAVRHRQLEANGITMHVAEAGPVNASAPAVLFVHGFPELWYSWRHQMGYLAARGYRCVAPDLRGYGGTTAPPEPNSYTVFHIVGDIVALLDALHLPQVFVVGHDWGAIVSWNLCLLRPDRVRALVNLSVAFMPRRPGVKPLEYFRAAYGDEYYVCRFQEPGLEAEFATFDLKSFFTLALTLRATGSSAMDLRKMQTYRAKVQVPTKFIVGDGDLAYHHPGVKRYIHKGGFKRDVPMLEEVVVIKGAGHFIQQERAQEISEHIHDYIKKFEACGLPPLRVSKL

SEQ ID NO: 162843 - protein, 407 aa, Zea Mays
MAGGGLQGAKKRKREHAEGKAKPRKQVKGGGDGAKRKSHSAAGGYTAHGGAGEVVARKKTPVTPKEKRLAAKEMSEARKMKRRQHYSLEKELTKLWEKMRCHDVSKEERSKAVSQAIHKMDGKYLDIATSHVTARVLQTCVKWCSESERDAIFDVLQPHLLTLSCKKYAVFLVKKLIELASKKQFASFISSLHGRVANLLHHTIGAAVVDYAFQRGTQRQKRQLLVELYSPELQLFKDLTVQSSSCLIDTISKLGLQISSVLLHMTIVIDKILEKGTVEYLIVHTAILEYFTIADKTSASDAICQLIPLLTQGALIIDGDEPTNAPELPKKAKAKKKRSKEPLIVRIMQTREGLKLGISCVKYGSAKDRKKIIKSLKGHIMKLALSDFGCLVSNDCIYLQLFWLLNW

SEQ ID NO: 162844 - protein, 245 aa, Zea Mays
MAGGGLQGAKKRKREHAEGKAKPRKQVKGGGDGAKRKSHSAAGGYTAHGGAGEVVARKKTPVTPKEKRLAAKEMSEARKMKRRQHYSLEKELTKLWEKMRCHDVSKEERSKAVSQAIHKMDGKYLDIATSHVTARVLQTCVKWCSESERDAIFDVLQPHLLTLSCKKYAVFLVKKLIELASKKQFASFISSLHGRVANLLHHTIGAAVVDYAFQRGTQRQKRQLLVELYSPELQLFKDLTVQSSS

SEQ ID NO: 162845 - protein, 311 aa, Zea Mays
MAVQRLSGRENVFQDRKKIIKSLKGHIMKLALSDFGCLFLICIISIVDDTKLVNKIVIQELVKHLKQLIFDKNGRRPLLQLLHPFCSRYLSPNDLACLNYNVPSLSSTEVETSESAIGVITENKLDDVTAQDPNGLEGKQIVFESKKDPLQRRHELLIKSELAEALVQSCIENVGELLRTNFGKEVLYEMAVGGKDNVLDGLTDRIHMLHDAIASDAAQPKTEDTEHAFENFFSSRVIRRMVIDCPAFAVTLWRKALQGKCKIWAEGHSSKVVASFLESPSTEVKDLAKPELQPLVDAGILKVPDPKVVQK

SEQ ID NO: 162846 - protein, 519 aa, Zea Mays
MAGGGLQGAKKRKREHAEGKAKPRKQVKGGGDGAKRKSHSAAGGYTAHGGAGEVVARKKTPVTPKEKRLAAKEMSEARKMKRRQHYSLEKELTKLWEKMRCHDVSKEERSKAVSQAIHKMDGKYLDIATSHVTARVLQTCVKWCSESERDAIFDVLQPHLLTLSCKKYAVFLVKKLIELASKKQFASFISSLHGRVANLLHHTIGAAVVDYAFQRGTQRQKRQLLVELYSPELQLFKDLTVQSSSCLIDTISKLGLQISSVLLHMTIVIDKILEKGTVEYLIVHTAILEYFTIADKTSASDAICQLIPLLTQGALIIDGDEPTNAPELPKKAKAKKKRSKEPLIVRIMQTREGLKLGISCVKYGSAKDRKKIIKSLKGHIMKLALSDFGCLFLICIISIVDDTKLVNKIVIQELVKHLKQLIFDKNGRRPLLQLLHPFCSRYLSPNDLACLNYNVPSLSSTEVETSESAIGVITENKLDDVTAQDPNGLEGKQIVFESKKDPLQRRHELLIKSSRSVMH

SEQ ID NO: 162847 - protein, 418 aa, Zea Mays
MAGGGLQGAKKRKREHAEGKAKPRKQVKGGGDGAKRKSHSAAGGYTAHGGAGEVVARKKTPVTPKEKRLAAKEMSEARKMKRRQHYSLEKELTKLWEKMRCHDVSKEERSKAVSQAIHKMDGKYLDIATSHVTARVLQTCVKWCSESERDAIFDVLQPHLLTLSCKKYAVFLVKKLIELASKKQFASFISSLHGRVANLLHHTIGAAVVDYAFQRGTQRQKRQLLVELYSPELQLFKDLTVQSSSCLIDTISKLGLQISSVLLHMTIVIDKILEKGTVEYLIVHTAILEYFTIADKTSASDAICQLIPLLTQGALIIDGDEPTNAPELPKKAKAKKKRSKEPLIVRIMQTREGLKLGISCVKYGSAKVYLHKLLYFNFRSNTFSATIHWCFIQCCFSFVNFVVLVYLCKLNYALHRTE

SEQ ID NO: 162848 - protein, 382 aa, Zea Mays
MAGGGLQGAKKRKREHAEGKAKPRKQVKGGGDGAKRKSHSAAGGYTAHGGAGEVVARKKTPVTPKEKRLAAKEMSEARKMKRRQHYSLEKELTKLWEKMRCHDVSKEERSKAVSQAIHKMDGKYLDIATSHVTARVLQTCVKWCSESERDAIFDVLQPHLLTLSCKKYAVFLVKKLIELASKKQFASFISSLHGRVANLLHHTIGAAVVDYAFQRGTQRQKRQLLVELYSPELQLFKDLTVQSSSCLIDTISKLGLQISSVLLHMTIVIDKILEKGTVEYLIVHTAILEYFTIADKTSASDAICQLIPLLTQGALIIDGDEPTNAPELPKKAKAKKKRSKEPLIVRIMQTREGLKLGISCVKYGSAKTKWARECISGQEEDY

SEQ ID NO: 162849 - protein, 363 aa, Zea Mays
MTIVIDKILEKGALIIDGDEPTNAPELPKKAKAKKKRSKEPLIVRIMQTREGLKLGISCVKYGSAKDRKKIIKSLKGHIMKLALSDFGCLFLICIISIVDDTKLVNKIVIQELVKHLKQLIFDKNGRRPLLQLLHPFCSRYLSPNDLACLNYNVPSLSSTEVETSESAIGVITENKLDDVTAQDPNGLEGKQIVFESKKDPLQRRHELLIKSELAEALVQSCIENVGELLRTNFGKEVLYEMAVGGKDNVLDGLTDRIHMLHDAIASDAAQPKTEDTEHAFENFFSSRVIRRMVIDCPAFAVTLWRKALQGKCKIWAEGHSSKVVASFLESPSTEVKDLAKPELQPLVDAGILKVPDPKVVQK

SEQ ID NO: 162850 - protein, 300 aa, Zea Mays
MAVQRKKIIKSLKGHIMKLALSDFGCLFLICIISIVDDTKLVNKIVIQELVKHLKQLIFDKNGRRPLLQLLHPFCSRYLSPNDLACLNYNVPSLSSTEVETSESAIGVITENKLDDVTAQDPNGLEGKQIVFESKKDPLQRRHELLIKSELAEALVQSCIENVGELLRTNFGKEVLYEMAVGGKDNVLDGLTDRIHMLHDAIASDAAQPKTEDTEHAFENFFSSRVIRRMVIDCPAFAVTLWRKALQGKCKIWAEGHSSKVVASFLESPSTEVKDLAKPELQPLVDAGILKVPDPKVVQK

SEQ ID NO: 162851 - protein, 312 aa, Zea Mays
MAGGGLQGAKKRKREHAEGKAKPRKQVKGGGDGAKRKSHSAAGGYTAHGGAGEVVARKKTPVTPKEKRLAAKEMSEARKMKRRQHYSLEKELTKLWEKMRCHDVSKEERSKAVSQAIHKMDGKYLDIATSHVTARVLQTCVKWCSESERDAIFDVLQPHLLTLSCKKYAVFLVKKLIELASKKQFASFISSLHGRVANLLHHTIGAAVVDYAFQRGTQRQKRQLLVELYSPELQLFKDLTVQSSSCLIDTISKLGLQISSVLLHMTIVIDKILEKGTVEYLIVHTAILEYFTIADKPRMLFVNLSPFLLKGH

SEQ ID NO: 162852 - protein, 77 aa, Zea Mays
MTWGPLYMAACTQIPPPYTHRATTACMSPLHVMQTTPPYVLANCLAPPTCIHEILETSPHNGSHIFYDRFSCGPSYG

SEQ ID NO: 162853 - protein, 127 aa, Zea Mays
MSLHIVYGCKRFLKHKKIISTVFLGIAGTFEMFLRVLKYEFLVFLILIKYQKCSSCKNYKFFWKLDNMYIYFSSSRRSVPDLVLFFMRSSNCFFSRTACCSRHRHNPCLSPSTPSPSTRHLGSASQL

SEQ ID NO: 162854 - protein, 422 aa, Zea Mays
MASSGLAYPDRFYAAAAYAGFGAGGATSSAAISRFQNDVALLLYGLHQQATVGPCNVPKPRAWNPVEQSKWTSWHGLGSMPSAEAMRLFVKILEEEDPGWYSRVPEFNPEPVVDIQMHKPKDEPQSVPASTNGTSISEPKIISENGSSVETQDKDVILEGLSTVISHDEWTPLSVSGLRPKPRYEHGATVLQNKMYIFGGNHNGRYLSDLQALDLKSLIWSKVDTKFQAEPADSTITTQIAPCAGHSLISWGNKFLSIAGHTKDPSEGITVKEFDPHTCTWSIVKTYGKPPVSRGGQTVTLVGTTLVLFGGEDAKRCLLNDLHILDLETMTWDDVDAIGNPPSPRSDHAAACHADRYLLIFGGGSHATCFNDLHVLDLQTMEWSRPKQQGLTPSPRAGHAGATVGENWYIVGGGNNKSGKMS

SEQ ID NO: 162855 - protein, 530 aa, Zea Mays
MASSGLAYPDRFYAAAAYAGFGAGGATSSAAISRFQNDVALLLYGLHQQATVGPCNVPKPRAWNPVEQSKWTSWHGLGSMPSAEAMRLFVKILEEEDPGWYSRVPEFNPEPVVDIQMHKPKDEPQSVPASTNGTSISEPKIISENGSSVETQDKDVILEGLSTVISHDEWTPLSVSGLRPKPRYEHGATVLQNKMYIFGGNHNGRYLSDLQALDLKSLIWSKVDTKFQAEPADSTITTQIAPCAGHSLISWGNKFLSIAGHTKDPSEGITVKEFDPHTCTWSIVKTYGKPPVSRGGQTVTLVGTTLVLFGGEDAKRCLLNDLHILDLETMTWDDVDAIGNPPSPRSDHAAACHADRYLLIFGGGSHATCFNDLHVLDLQTMEWSRPKQQGLTPSPRAGHAGATVGENWYIVGGGNNKSGVSETLVLNMSTLTWSVVSTVEGRVPLASEGMTLVHSNYNGYDYLVSFGGYNGRYSNEVYTLKLSLKSDSQPIVEEETVSDTISRVREPETEISQDGRIREIAMDSADSDLK

SEQ ID NO: 162856 - protein, 580 aa, Zea Mays
MPSAEAMRLFVKILEEEDPGWYSRVPEFNPEPVVDIQMHKPKDEPQSVPASTNGTSISEPKIISENGSSVETQDKDVILEGLSTVISHDEWTPLSVSGLRPKPRYEHGATVLQNKMYIFGGNHNGRYLSDLQALDLKSLIWSKVDTKFQAEPADSTITTQIAPCAGHSLISWGNKFLSIAGHTKDPSEGITVKEFDPHTCTWSIVKTYGKPPVSRGGQTVTLVGTTLVLFGGEDAKRCLLNDLHILDLETMTWDDVDAIGNPPSPRSDHAAACHADRYLLIFGGGSHATCFNDLHVLDLQTMEWSRPKQQGLTPSPRAGHAGATVGENWYIVGGGNNKSGVSETLVLNMSTLTWSVVSTVEGRVPLASEGMTLVHSNYNGYDYLVSFGGYNGRYSNEVYTLKLSLKSDSQPIVEEETVSDTISRVREPETEISQDGRIREIAMDSADSDLNNRNDEASEQLVADLKAQKEELEATINREQLQTVQLKEDIAQAETRNAELTKELQAVRGQLASEQSRCFKLEVDVAELRQKLQSMDALEKEVELLRRQKAASEQAALDAKQRQGSGGMWGWLAGSPPPSQ

SEQ ID NO: 162857 - protein, 74 aa, Zea Mays
MRGEEYTQLSACLSDALLRDSDAAFFQVICRCSVRAMYLVWLQLFLSSVRKTLAMYLSISAYLNVWSFSHMVSS

SEQ ID NO: 162858 - protein, 357 aa, Zea Mays
MADGEDIQPLVCDNGTGMVKAGFAGDDAPRAVFPSIVGRPRHTGVMVGMGQKDAYVGDEAQSKRGILTLKYPIEHGIVNNWDDMEKIWHHTFYNELRVAPEEHPVLLTEAPLNPKANREKMTQIMFETFNAPAMYVAIQAVLSLYASGRTTGIVLDSGDGVTHTVPIYEGYALPHAILRLDLAGRDLTDCLMKILTERGYSFTTTAEREIVRDIKEKLAFVALDYEQELETAKSSSSVEKSYELPDGQVITIGAERFRCPEVLLQPSLIGMEAPGIHETTYNSIMKCDVDIRKDLYGNIVLSGGTTMFPGIADRMSKEITALAPSSMKIKVVAPPERKYSVWIGGSILASLNVDIQG

SEQ ID NO: 162859 - protein, 459 aa, Zea Mays
MGLLASHNIQANFASRSNHVKSNPLKTMVRLGGLRYIEGDVVESIRQSLYVTQQPGSQLTLIRSEKIYRAIDCRDPLRCLSCGVGHKRAGKAEYPRGVGLARWCSTDDKYKHSEKGLMLQLPVHGDRINFDYHVCLCLEGILLHAWNEGIAKRAVAMSCVLDYVESQSLQKEDTRTLNLWAWAWNPSDIPKVTWLTIVGRNITVHNMPSAGQSGLTFRVIVHLDLVEGFPGNEDQGSTRAFDWRLGVVDGESAPRDMHDPPPRCNDHHRDDDDNDRRRRRLQREVSWSMRLFRSISRAPKGCERERSGSRRDHRHNTSRRYMSGDAPGGVRHVQQPRQAAAMPADASHVGIPGRGVENVGSRPHTGLAHQLREGSLMTRGRSRMRYLPRGAETPAVATAAATTAQNIKHRHVFNLSARTQCNLCRKLGLLANDGTPNFDNAFQDFQAWFQKPLSKEVKL

SEQ ID NO: 162860 - protein, 240 aa, Zea Mays
MLGLFGFVDDLLILLIVFLHLAAVYRMLARPSAPPLVTAQTPEVGIFITARNVSGALVAKLPGNKNKCGGRSNVRQRNIQPGKRGCRREWRALSAADQAQASTLDVDEECKRVLTPLGFSSEDAEKMLKKAFGWTHSPYWSEEREKEVPTAEAVAGVLDYIRSLGLSDEDLGRLLKKFPEVLGCDLDGEVRPNVGKLDSDWGINGKTLRSLLLRNPKVLGYNVDCRGDCMAQCTRCWVRF

SEQ ID NO: 162861 - protein, 252 aa, Zea Mays
MRPSIGCSTSLAELAPKPSSGPHKSRECLPLILIIRNRLKYALNYREVISILMQRHVLVDGKVRTDKTYPAGFMDVISIPKTMENYRLLYDTKGRFRLHPIRDEDAKFKLCKVRSVQFGQKGIPYLNTYDGRTIRYPDPLIKANDTIKIDLETNKIMDFIKFDVGNVVMVTGGRNTGRVGVIKNREKHKGGFDTIHVEDSMGHQFATRMGNVFTIGKGNKPWVSLPKGKGIKLSIIEEQRRRDFAAQAAAKA

SEQ ID NO: 162862 - protein, 274 aa, Zea Mays
MDSLRGVKLPGVPKGGSALVKVALLGGAGLYAVLNSFYNVEGGHRAIVFNRLEGIKDKVYPEGTHLMIPWIERPIIYDVRARPNLVESTSGSRDLQMLPKIYRNLGENFNERVLPSIIHETLKAVVAQYNASQLITQREAVSREIRKILTERANNFNIALDDVSITSLSFGKEFTHAIEAKQVAAQEAERAKFIVEKAEQDKRSAVIRAQGEAKSAELIGQAIANNPAFLALRQIEAAREISHTMAASSNKVFLDSRDLLLGLQQLNVGGKQKK

SEQ ID NO: 162863 - protein, 57 aa, Zea Mays
MRCTLFTTCTVLIHYVCTRHQIYSAHSYLLVPVVVPKAQYGKSSDLKLSPKVSFCKG

SEQ ID NO: 162864 - protein, 231 aa, Zea Mays
MKILRRRYYLVEKAKDANIIGILVGTLGVAGYLHIIEQMKDLIKAAGKKSYTLVMGRPNSAKLANFPECEVFIYVSCAQTALLDSKDFLAPVITPFEAVLAFGREWTGEYLLDFKDLITSEKQEAASTTGEARFSFIKGVYVEDNCPQENEEQSETSLALAEVTEKALSIQNQHNDAVLYQGRAMSSIDYLKARSYRGLTGEYEGPVPDSVLVGRMGRAAGYSDEKTESAQ

SEQ ID NO: 162865 - protein, 233 aa, Zea Mays
MKILRRRYYLVEKAKDANIIGILVGTLGVAGYLHIIEQMKDLIKAAGKKSYTLVMGRPNSAKLANFPECEVFIYVSCAQTALLDSKDFLAPVITPFEAVLAFGRGREWTGEYLLDFKDLITSEKQEAASTTGEARFSFIKGVYVEDNCPQENEEQSETSLALAEVTEKALSIQNQHNDAVLYQGRAMSSIDYLKARSYRGLTGEYEGPVPDSVLVGRMGRAAGYSDEKTESAQ

SEQ ID NO: 162866 - protein, 339 aa, Zea Mays
MEADIAFRYEIPRTAQFLRDGAYTRVALQFPDEMLKDAAAVARALRRELASGGADSGVRVFVMADTAYNSCCVDEVGASHIDAQCVVHYGHACMSPTSNLPAFFVFGKAPLDVHACAGTLLECSRKSNKRILVLYGLEYAYALDDLRQTFMESCKSNSGNHEVQYAEVLCSVMSPSSSTTEENKIPQSSGPSCNGDISRNSESATFLNNRNGMECSSSTQKYSLAGMTWNISVEEKMEDYFIFWIGQDSSAFANIVLTFNKCEIVRYDAIENQLTADVSHLMKILRRRYYLVEKAKDANIIGILVGTLGVEILLETFTFCDVVHCTALHSFMMQLVIFI

SEQ ID NO: 162867 - protein, 86 aa, Zea Mays
MSNLYFVRALEQVFTENDGFFAWMFLKRRTLWQTILSFVWPLFALAVCLFPVYPYQCKIVVLYSCAGALLFIVSILLRKISPPLLN

SEQ ID NO: 162868 - protein, 97 aa, Zea Mays
MSNLYFVRALEQVFTENDGFFAWMFLKRRTLWQTILSFVWPLFALAVCLFPVYPYQCKIVVLYSCAGALLFIVSILLRKISPPLLNVFSFTTYIILK

SEQ ID NO: 162869 - protein, 232 aa, Zea Mays
MEQVFTENDGFFAWMFLKRRTLWQTILSFVWPLFALAVCLFPVYPYQCKIVVLYSCAGALLFIVSILLLRAAIFGILWVLLGKRVWFFPNINAEETTFRELVRFWPEKDEGERPKWTSRLFYALVALLVILLLRHHAPDEAARARYQKKVSNIIDDVLEWSPKLAISGMIEKHTGANITEESNYTTRAASSHMPPSTEGKASEDMDVDGDTEASLDETQDNEYADDTRSSGA

SEQ ID NO: 162870 - protein, 308 aa, Zea Mays
MQETRVEYFRGKDFNTFVKNHPEVREILGPDKDLEVEDIVNTLLTKNLVIRCDRVMKTVRPGKKKLSSWPAHLEIHNEQVFTENDGFFAWMFLKRRTLWQTILSFVWPLFALAVCLFPVYPYQCKIVVLYSCAGALLFIVSILLLRAAIFGILWVLLGKRVWFFPNINAEETTFRELVRFWPEKDEGERPKWTSRLFYALVALLVILLLRHHAPDEAARARYQKKVSNIIDDVLEWSPKLAISGMIEKHTGANITEESNYTTRAASSHMPPSTEGKASEDMDVDGDTEASLDETQDNEYADDTRSSGA

SEQ ID NO: 162871 - protein, 141 aa, Zea Mays
MAGKGAKATAAKSADKDKGKKTGGPVSRSSRAAPHEKSAPKKDVYQLFAEKVRDNKQLESRWAIMQETRVEYFRGKDFNTFVKNHPEVREILGPDKDLEVEDIVNTLLTKNLVIRCDRVMKTVRPGKKKLSSWPAHLEIHN

SEQ ID NO: 162872 - protein, 144 aa, Zea Mays
MAGKGAKATAAKSADKDKGKKTGGPVSRSSRAAPHEKSAPKKDVYQLFAEKVRDNKQLESRWAIMQETRVEYFRGKDFNTFVKNHPEVREILGPDKDLEVEDIVNTLLTKNLVIRCDRVMKTVRPGKKKLSSWPAHLEIHNGVC

SEQ ID NO: 162873 - protein, 237 aa, Zea Mays
MAGKGAKATAAKSADKDKGKKTGGPVSRSSRAAPHEKSAPKKDVYQLFAEKVRDNKQLESRWAIMQETRVEYFRGKDFNTFVKNHPEVREILGPDKDLEVEDIVNTLLTKNLVIRCDRVMKTVRPGKKKLSSWPAHLEIHNEQVFTENDGFFAWMFLKRRTLWQTILSFVWPLFALAVCLFPVYPYQCKIVVLYSCAGALLFIVSILLLALQSIQWFKKQSNKDSNFNLKLHSMLGG

SEQ ID NO: 162874 - protein, 228 aa, Zea Mays
MAGKGAKATAAKSADKDKGKKTGGPVSRSSRAAPHEKSAPKKDVYQLFAEKVRDNKQLESRWAIMQETRVEYFRGKDFNTFVKNHPEVREILGPDKDLEVEDIVNTLLTKNLVIRCDRVMKTVRPGKKKLSSWPAHLEIHNEQVFTENDGFFAWMFLKRRTLWQTILSFVWPLFALAVCLFPVYPYQCKIVVLYSCAGALLFIVSILLRKISPPLLNVFSFTTYIILK

SEQ ID NO: 162875 - protein, 287 aa, Zea Mays
MSSSAENDPTVTVTERGGKDKHEDGGDKEQGGGGFIDKVKDFIHDLVVDVLIKNPNPVPIPLVDIDYLIDSDGRKLVSGLIPDAGTIHAHGQETVKIPVSLVFDDIKSTYKDIQPGSIIPYLVRVVLLVDVPIIGRVKIPIQKDGEIPIPYKPDVDVEKIKFHHFSFEETTATLHLKLENKNDFDLGLNLLEYEMWLGDDSIASAELTQTAKIEKQGITRMQVPFSFRPKDFGSAVWDMIRGRGTGYTIKGKIDVDTPFGNMKLPISKEGGTTRLKKEEEEDDDDDN

SEQ ID NO: 162876 - protein, 135 aa, Zea Mays
MYTPQGEECSSKSLYFVVLPQWDSRGGAGGAGSAGRAAQEGGRPGARRHAEALRRGWRTASRAAAWSGLESSALEGGRPGEQLPGAAVAWSSGTQRRAWRRRTGGAGGLEQRQRRPGGWSAPWSAAAVIKTFCSL

SEQ ID NO: 162877 - protein, 361 aa, Zea Mays
MASQDAGVVLLSQELVAALLTCALFCLFPTAGRAQACLPTINFDGLFAPLIHNARQSQEQKVRCLVHYFERVTDSMPTGLVSFERKVLPRRAFSDGVPYPDIHAWVASSAPLCQFTVFSSGFIEDEEQEALQVDFANKYLGGGALSWGCVQEEIRFMINPELIVGMLFLSCMEDNEAIEIFGAERFSQYMGRRTRIVAIDALDCPARLHYESGCLLREVNKAFCGFFDQSKHHLYAKLFQDLHNKDDFSSINSSEYVGVSTGNWGCGAFGGNPEIKSMIQWIAASQALRPFVNYYTFEDVSLQRLEEVIQWIRLHGWTVGELWHMLMEYSSQRLGGETHKGFLAWLLPSDRPKNQVHYMSE

SEQ ID NO: 162878 - protein, 186 aa, Zea Mays
MAAPSHLHLPGCPQTLALPLPWPRGFSAPPGLLSRSRRLRPVAALGPADAGDLLGRVEALLYTVADAAVSAEPVAAAGTKEAAAGDWLSSITNSMETVLKVLKDGLLSLHVPYSYGFAIILLTVLVKAATFPLTKKQVESALAMRSLQPQVKTIQERYAGDQERIQLETARLYKLSGVDPLAGTSD

SEQ ID NO: 162879 - protein, 318 aa, Zea Mays
MAAEPKILELSNGKITARISNWGATITSLLVPDAQGMSPYFGCIVGRVANRIKDGKFTLNGLEYSLPVNNGPNSLHGGLKGFDKVVWDVVEHKDGECPSITFQYHSKDGEEGYPGDVTIRATYSLPEATTLRLDMEATPENKATPISLAQHTYWNLAGHACGDILNHSLQIWGKHITPVDENTIPTGEIMPVDGTPFDFTTERRIGERIDGVPGGYDHNYVLDCGDEKDGLKRAARLKDPSSLRTLDLWTDAPGMQLYTANYVDGIGGKAGAVYAKHAGVCLETQGFPNAINQPEFPSVVVRPGEKYKHTMLFEFSGC

SEQ ID NO: 162880 - protein, 204 aa, Zea Mays
MQMHDILVFMCSEGKWYIEPLPSGSDGKFEFDNMIIGQAIPSNFIPAIEKGFKEACNSGSLIGHPVENLRIVLTDGASHQVDSSELAFKLAAIYAFRQCYTSAKPVILEPVMKVELKFPTEFQGTVTGDMNKRKGIIVGNEQEGDDTIVVCHVPLNNMFGYATAIRSATQGKGEFTMEYLEHNVVSQDVQMQLVTSYQAAKGTE

SEQ ID NO: 162881 - protein, 171 aa, Zea Mays
MIIGQAIPSNFIPAIEKGFKEACNSGSLIGHPVENLRIVLTDGASHQVDSSELAFKLAAIYAFRQCYTSAKPVILEPVMKVELKFPTEFQGTVTGDMNKRKGIIVGNEQEGDDTIVVCHVPLNNMFGYATAIRSATQGKGEFTMEYLEHNVVSQDVQMQLVTSYQAAKGTE

SEQ ID NO: 162882 - protein, 616 aa, Zea Mays
MAMTRRSASHLLSAFRPFSLLLQPHLVDSSPAAASARRAMSSASALRARDEKDVARWRESMGRMRNIGISAHIDSGKTTLTERVLYYTGRIHEIHEVRGRDGVGAKMDSMDLEREKGITIQSAATYCTWKDYQINIIDTPGHVDFTIEVERALRVLDGAILVLCSVGGVQSQSITVDRQMRRYEIPRVAFINKLDRMGADPWKVLNQARSKLRHHNAAVQVPIGLEEEFEGLVDLVEMKAYKFEGSSGQNVTASDVPLNMEDLVTEKRRELIEVVSEVDDQLAEAFLNDEPITANQLKAAIRRATVARKFIPVYMGSAFKNKGVQPLLDGVLDYLPCPLEVYNYALDQNKSEEKVLLAGTPAEPLVALAFKLEEGRFGQLTYLRIYDGVIRKGDFIYNVNTGKKIKVPRLVRMHSNEMEDIQEAYAGQIVAVFGVDCASGDTFTDGTVKYTMTSMNVPEPVMSLAVSPISKDSGGQFSKALNRFQKEDPTFRVGLDAESGQTIISGMGELHLDIYVERIKREYKVDAKVGKPRVNFRETITQRAEFDYLHKKQSGGQGQYGRVCGYIEPLPSGSDGKFEFDNMIIGQAIPSNFIPAIEKGFKEACNSWIPVNLLLS

SEQ ID NO: 162883 - protein, 396 aa, Zea Mays
MRRYEIPRVAFINKLDRMGADPWKVLNQARSKLRHHNAAVQVPIGLEEEFEGLVDLVEMKAYKFEGSSGQNVTASDVPLNMEDLVTEKRRELIEVVSEVDDQLAEAFLNDEPITANQLKAAIRRATVARKFIPVYMGSAFKNKGVQPLLDGVLDYLPCPLEVYNYALDQNKSEEKVLLAGTPAEPLVALAFKLEEGRFGQLTYLRIYDGVIRKGDFIYNVNTGKKIKVPRLVRMHSNEMEDIQEAYAGQIVAVFGVDCASGDTFTDGTVKYTMTSMNVPEPVMSLAVSPISKDSGGQFSKALNRFQKEDPTFRVGLDAESGQTIISGMGELHLDIYVERIKREYKVDAKVGKPRVNFRETITQRAEFDYLHKKQSGGQGTLSLYLQVLMVNSNLIT

SEQ ID NO: 162884 - protein, 726 aa, Zea Mays
MAMTRRSASHLLSAFRPFSLLLQPHLVDSSPAAASARRAMSSASALRARDEKDVARWRESMGRMRNIGISAHIDSGKTTLTERVLYYTGRIHEIHEVRGRDGVGAKMDSMDLEREKGITIQSAATYCTWKDYQINIIDTPGHVDFTIEVERALRVLDGAILVLCSVGGVQSQSITVDRQMRRYEIPRVAFINKLDRMGADPWKVLNQARSKLRHHNAAVQVPIGLEEEFEGLVDLVEMKAYKFEGSSGQNVTASDVPLNMEDLVTEKRRELIEVVSEVDDQLAEAFLNDEPITANQLKAAIRRATVARKFIPVYMGSAFKNKGVQPLLDGVLDYLPCPLEVYNYALDQNKSEEKVLLAGTPAEPLVALAFKLEEGRFGQLTYLRIYDGVIRKGDFIYNVNTGKKIKVPRLVRMHSNEMEDIQEAYAGQIVAVFGVDCASGDTFTDGTVKYTMTSMNVPEPVMSLAVSPISKDSGGQFSKALNRFQKEDPTFRVGLDAESGQTIISGMGELHLDIYVERIKREYKVDAKVGKPRVNFRETITQRAEFDYLHKKQSGGQGQYGRVCGYIEPLPSGSDGKFEFDNMIIGQAIPSNFIPAIEKGFKEACNSGSLIGHPVENLRIVLTDGASHQVDSSELAFKLAAIYAFRQCYTSAKPVILEPVMKVELKFPTEFQGTVTGDMNKRKGIIVGNEQEGDDTIVVCHVPLNNMFGYATAIRSATQAREGKAE

SEQ ID NO: 162885 - protein, 723 aa, Zea Mays
MAMTRRSASHLLSAFRPFSLLLQPHLVDSSPAAASARRAMSSASALRARDEKDVARWRESMGRMRNIGISAHIDSGKTTLTERVLYYTGRIHEIHEVRGRDGVGAKMDSMDLEREKGITIQSAATYCTWKDYQINIIDTPGHVDFTIEVERALRVLDGAILVLCSVGGVQSQSITVDRQMRRYEIPRVAFINKLDRMGADPWKVLNQARSKLRHHNAAVQVPIGLEEEFEGLVDLVEMKAYKFEGSSGQNVTASDVPLNMEDLVTEKRRELIEVVSEVDDQLAEAFLNDEPITANQLKAAIRRATVARKFIPVYMGSAFKNKGVQPLLDGVLDYLPCPLEVYNYALDQNKSEEKVLLAGTPAEPLVALAFKLEEGRFGQLTYLRIYDGVIRKGDFIYNVNTGKKIKVPRLVRMHSNEMEDIQEAYAGQIVAVFGVDCASGDTFTDGTVKYTMTSMNVPEPVMSLAVSPISKDSGGQFSKALNRFQKEDPTFRVGLDAESGQTIISGMGELHLDIYVERIKREYKVDAKVGKPRVNFRETITQRAEFDYLHKKQSGGQGQYGRVCGYIEPLPSGSDGKFEFDNMIIGQAIPSNFIPAIEKGFKEACNSGSLIGHPVENLRIVLTDGASHQVDSSELAFKLAAIYAFRQCYTSAKPVILEPVMKVELKFPTEFQGTVTGDMNKRKGIIVGNEQEGDDTIVVCHVPLNNMFGYATAIRSATQRTLF

SEQ ID NO: 162886 - protein, 66 aa, Zea Mays
MPSNARITTPGEKISPWMNSEHCGRFVAHLTGNVVDRSSSGCTPFIAIAPCSDPFTTSLPAVIAHR

SEQ ID NO: 162887 - protein, 162 aa, Zea Mays
MLAASLRPGPSLAAFPGTAQRSPVPFLPFPARLHHRPVLLSATAEGTGAPAGQGDASAAPLDEVRLPQFAADWESARACKDQGRIFSLPVLRANSGGLIVRFNSLQGFVPNPLLSPAHWCKDPKRPIQDVTKDLVGTSISVKVTDFSLPSQLQLLILLHSCL

SEQ ID NO: 162888 - protein, 295 aa, Zea Mays
MSSSASDAAPFEKPRAVVKKVLAESQPEGQGATVRRSIGRHELRNLDPFLLLDEFTVYKPAGFPDHPHRGFETVTYMLEGAFTHQDFAGHKGTIKTGDVQWMTAGRGIVHSEMPAGDGVHKGLQLWINLSSKDKMIEPRYQELESKDISRGESEDGGVEARVIAGEALGAASPVYTRTPTMYVDFTMRPGSRLHQPVPEGWNAFVYVVDGEGVFGRETATAHYCLVLGPGDGVSVWNRSTRPLRFVLVAGQPLGEPVVQHGPFVMNSRAQIQKAMEDYYYGKNGFERAGQWSSSA

SEQ ID NO: 162889 - protein, 334 aa, Zea Mays
MINNLWEIVPAEPGDRFLSMLPTWHAYERACEYFIFSYGIQQVYTTVKYLKILVYKKIHSAIGISKAGISGGGSLPMHVDKFFEAIGIKVQNGYGLTETSPVVAARRPFCNVLGTVGHPIKHTEIKIFDIETGEVLPDGSKGIVKIKGPQVMKGYYKNPSATNEAFDQEGWFSTGDVGWIVPHHAMGPSRQCGGMIVLEGRAKDTIVLSTGENVEPAEIEEAASRSTLINQIVVIGQDQRRLGAIIVPNNDEVLAEAKRKSILGEDGELAKDKVMNMLYDELRTWTAHCSFRVGPILVVDEPFTIDNGLMTPTMKIRRDKVTDKYRREIEALFK

SEQ ID NO: 162890 - protein, 346 aa, Zea Mays
MINNLWEIVPAEPGDRFLSMLPTWHAYERACEYFIFSYGIQQVYTTVKYLKILVYKKIHSAIGISKAGISGGGSLPMHVDKFFEAIGIKVQNGYGLTETSPVVAARRPFCNVLGTVGHPIKHTEIKIFDIETGEVLPDGSKGIVKIKGPQVMKGYYKNPSATNEAFDQEGWFSTGDVGWIVPHHAMGPSRQCGGMIVLEGRAKDTIVLSTGENVEPAEIEEAASRSTLINQIVVIGQDQRRLGAIIVPNNDEVLAEAKRKSILGEDGELAKDKVMNMLYDELRTWRKCLIILFTRFRTAHCSFRVGPILVVDEPFTIDNGLMTPTMKIRRDKVTDKYRREIEALFK

SEQ ID NO: 162891 - protein, 482 aa, Zea Mays
MFFPGMSCNYFKHPSKECEPNCLGFLFDISLVHILCCSFPQINNLWEIVPAEPGDRFLSMLPTWHAYERACEYFIFSYGIQQVYTTVKYLKEDLQRYQPQYIISVPLVYETLYISIHRQISSSSAARKIIALSLIKISFLYMEAKKIYEGTVLSNNLVKPSVIAYMMKWLWARLVAAFLWPLHNLAKILVYKKIHSAIGISKAGISGGGSLPMHVDKFFEAIGIKVQNGYGLTETSPVVAARRPFCNVLGTVGHPIKHTEIKIFDIETGEVLPDGSKGIVKIKGPQVMKGYYKNPSATNEAFDQEGWFSTGDVGWIVPHHAMGPSRQCGGMIVLEGRAKDTIVLSTGENVEPAEIEEAASRSTLINQIVVIGQDQRRLGAIIVPNNDEVLAEAKRKSILGEDGELAKDKVMNMLYDELRTWRKCLIILFTRFRTAHCSFRVGPILVVDEPFTIDNGLMTPTMKIRRDKVTDKYRREIEALFK

SEQ ID NO: 162892 - protein, 545 aa, Zea Mays
MLLGEQDHLMKNCFKYTLIQKESFMSRINTRFIVLLWGDKSCIDSQAIKDIPLYGYKDIIELGRESRNALFLSDEQGQQDVFESISPEDVATLIYTSGTSGTPKGVMLTHRNLLHQINNLWEIVPAEPGDRFLSMLPTWHAYERACEYFIFSYGIQQVYTTVKYLKEDLQRYQPQYIISVPLVYETLYISIHRQISSSSAARKIIALSLIKISFLYMEAKKIYEGTVLSNNLVKPSVIAYMMKWLWARLVAAFLWPLHNLAKILVYKKIHSAIGISKAGISGGGSLPMHVDKFFEAIGIKVQNGYGLTETSPVVAARRPFCNVLGTVGHPIKHTEIKIFDIETGEVLPDGSKGIVKIKGPQVMKGYYKNPSATNEAFDQEGWFSTGDVGWIVPHHAMGPSRQCGGMIVLEGRAKDTIVLSTGENVEPAEIEEAASRSTLINQIVVIGQDQRRLGAIIVPNNDEVLAEAKRKSILGEDGELAKDKVMNMLYDELRTWTAHCSFRVGPILVVDEPFTIDNGLMTPTMKIRRDKVTDKYRREIEALFK

SEQ ID NO: 162893 - protein, 480 aa, Zea Mays
MESRYGVVEHGMLHYLEEFFSLQIEHQVRKKCSPLLESALLPGGSDSTLHEWKAVPDIWRTAAEKYADLVAVVDPYHEPPTEWTYTQLEQEILDFSQGLRAIGVAPDEKLALFADNSCRWLVADQGIMATGAINVVRGTRSSDEELFQIYTHSESPQFFNRLAESFMSRINTRFIVLLWGDKSCIDSQAIKDIPLYGYKDIIELGRESRNALFLSDEQGQQDVFESISPEDVATLIYTSGTSGTPKGVMLTHRNLLHQINNLWEIVPAEPGDRFLSMLPTWHAYERACEYFIFSYGIQQVYTTVKYLKILVYKKIHSAIGISKAGISGGGSLPMHVDKFFEAIGIKVQNGYGLTETSPVVAARRPFCNVLGTVGHPIKHTEIKIFDIETGEVLPDGSKGIVKIKGPQVMKGYYKNPSATNEAFDQEGWFSTGDVGWIVPHHAMGPSRQCGGMIVLEGRAKDTIVLSTGSTASWCHNCSQQ

SEQ ID NO: 162894 - protein, 521 aa, Zea Mays
MSRINTRFIVLLWGDKSCIDSQAIKDIPLYGYKDIIELGRESRNALFLSDEQGQQDVFESISPEDVATLIYTSGTSGTPKGVMLTHRNLLHQINNLWEIVPAEPGDRFLSMLPTWHAYERACEYFIFSYGIQQVYTTVKYLKEDLQRYQPQYIISVPLVYETLYISIHRQISSSSAARKIIALSLIKISFLYMEAKKIYEGTVLSNNLVKPSVIAYMMKWLWARLVAAFLWPLHNLAKILVYKKIHSAIGISKAGISGGGSLPMHVDKFFEAIGIKVQNGYGLTETSPVVAARRPFCNVLGTVGHPIKHTEIKIFDIETGEVLPDGSKGIVKIKGPQVMKGYYKNPSATNEAFDQEGWFSTGDVGWIVPHHAMGPSRQCGGMIVLEGRAKDTIVLSTGENVEPAEIEEAASRSTLINQIVVIGQDQRRLGAIIVPNNDEVLAEAKRKSILGEDGELAKDKVMNMLYDELRTWTAHCSFRVGPILVVDEPFTIDNGLMTPTMKIRRDKVTDKYRREIEALFK

SEQ ID NO: 162895 - protein, 386 aa, Zea Mays
MFFPGMSCNYFKHPSKECEPNCLGFLFDISLVHILCCSFPQINNLWEIVPAEPGDRFLSMLPTWHAYERACEYFIFSYGIQQVYTTVKYLKILVYKKIHSAIGISKAGISGGGSLPMHVDKFFEAIGIKVQNGYGLTETSPVVAARRPFCNVLGTVGHPIKHTEIKIFDIETGEVLPDGSKGIVKIKGPQVMKGYYKNPSATNEAFDQEGWFSTGDVGWIVPHHAMGPSRQCGGMIVLEGRAKDTIVLSTGENVEPAEIEEAASRSTLINQIVVIGQDQRRLGAIIVPNNDEVLAEAKRKSILGEDGELAKDKVMNMLYDELRTWRKCLIILFTRFRTAHCSFRVGPILVVDEPFTIDNGLMTPTMKIRRDKVTDKYRREIEALFK

SEQ ID NO: 162896 - protein, 684 aa, Zea Mays
MESRYGVVEHGMLHYLEEFFSLQIEHQVRKKCSPLLESALLPGGSDSTLHEWKAVPDIWRTAAEKYADLVAVVDPYHEPPTEWTYTQLEQEILDFSQGLRAIGVAPDEKLALFADNSCRWLVADQGIMATGAINVVRGTRSSDEELFQIYTHSESIALVVDSPQFFNRLAESFMSRINTRFIVLLWGDKSCIDSQAIKDIPLYGYKDIIELGRESRNALFLSDEQGQQDVFESISPEDVATLIYTSGTSGTPKGVMLTHRNLLHQINNLWEIVPAEPGDRFLSMLPTWHAYERAYLQRYQPQYIISVPLVYETLYISIHRQISSSSAARKIIALSLIKISFLYMEAKKIYEGTVLSNNLVKPSVIAYMMKWLWARLVAAFLWPLHNLAKILVYKKIHSAIGISKAGISGGGSLPMHVDKFFEAIGIKVQNGYGLTETSPVVAARRPFCNVLGTVGHPIKHTEIKIFDIETGEVLPDGSKGIVKIKGPQVMKGYYKNPSATNEAFDQEGWFSTGDVGWIVPHHAMGPSRQCGGMIVLEGRAKDTIVLSTGENVEPAEIEEAASRSTLINQIVVIGQDQRRLGAIIVPNNDEVLAEAKRKSILGEDGELAKDKVMNMLYDELRTWRKCLIILFTRFRTAHCSFRVGPILVVDEPFTIDNGLMTPTMKIRRDKVTDKYRREIEALFK

SEQ ID NO: 162897 - protein, 533 aa, Zea Mays
MSRINTRFIVLLWGDKSCIDSQAIKDIPLYGYKDIIELGRESRNALFLSDEQGQQDVFESISPEDVATLIYTSGTSGTPKGVMLTHRNLLHQINNLWEIVPAEPGDRFLSMLPTWHAYERACEYFIFSYGIQQVYTTVKYLKEDLQRYQPQYIISVPLVYETLYISIHRQISSSSAARKIIALSLIKISFLYMEAKKIYEGTVLSNNLVKPSVIAYMMKWLWARLVAAFLWPLHNLAKILVYKKIHSAIGISKAGISGGGSLPMHVDKFFEAIGIKVQNGYGLTETSPVVAARRPFCNVLGTVGHPIKHTEIKIFDIETGEVLPDGSKGIVKIKGPQVMKGYYKNPSATNEAFDQEGWFSTGDVGWIVPHHAMGPSRQCGGMIVLEGRAKDTIVLSTGENVEPAEIEEAASRSTLINQIVVIGQDQRRLGAIIVPNNDEVLAEAKRKSILGEDGELAKDKVMNMLYDELRTWRKCLIILFTRFRTAHCSFRVGPILVVDEPFTIDNGLMTPTMKIRRDKVTDKYRREIEALFK

SEQ ID NO: 162898 - protein, 483 aa, Zea Mays
MATGAINVVRGTRSSDEELFQIYTHSESPQFFNRLAESFMSRINTRFIVLLWGDKSCIDSQAIKDIPLYGYKDIIELGRESRNALFLSDEQGQQDVFESISPEDVATLIYTSGTSGTPKGVMLTHRNLLHQINNLWEIVPAEPGDRFLSMLPTWHAYERACEYFIFSYGIQQVYTTVKYLKEDLQRYQPQYIISVPLVYETLYISIHRQISSSSAARKIIALSLIKISFLYMEAKKIYEGTVLSNNLVKPSVIAYMMKWLWARLVAAFLWPLHNLAKILVYKKIHSAIGISKAGISGGGSLPMHVDKFFEAIGIKVQNGYGLTETSPVVAARRPFCNVLGTVGHPIKHTEIKIFDIETGEVLPDGSKGIVKIKGPQVMKGYYKNPSATNEAFDQEGWFSTGDVGWIVPHHAMGPSRQCGGMIVLEGRAKDTIVLSTGENVEPAEIEEAASRSTLINQIVVIGQDSALLLPCRANSGCRRTIHD

SEQ ID NO: 162899 - protein, 464 aa, Zea Mays
MATGAINVVRGTRSSDEELFQIYTHSESPQFFNRLAESFMSRINTRFIVLLWGDKSCIDSQAIKDIPLYGYKDIIELGRESRNALFLSDEQGQQDVFESISPEDVATLIYTSGTSGTPKGVMLTHRNLLHQINNLWEIVPAEPGDRFLSMLPTWHAYERACEYFIFSYGIQQVYTTVKYLKILVYKKIHSAIGISKAGISGGGSLPMHVDKFFEAIGIKVQNGYGLTETSPVVAARRPFCNVLGTVGHPIKHTEIKIFDIETGEVLPDGSKGIVKIKGPQVMKGYYKNPSATNEAFDQEGWFSTGDVGWIVPHHAMGPSRQCGGMIVLEGRAKDTIVLSTGENVEPAEIEEAASRSTLINQIVVIGQDQRRLGAIIVPNNDEVLAEAKRKSILGEDGELAKDKVMNMLYDELRTWTAHCSFRVGPILVVDEPFTIDNGLMTPTMKIRRDKVTDKYRREIEALFK

SEQ ID NO: 162900 - protein, 305 aa, Zea Mays
MAAAVAAVAAATTAEDEARLLRLEEQAEHGGGGAWDYLCLARRLRARRPAHVLRVGLALLNNASARSEWTLYEQVATAAMDCQRLDVAKDCIGVLSKQFPGSTRVARLEALLFEAKSEWAEAERAYTQILEINPFDQIVHKRKIAIAKAQGNMSLAIGYLNKYLELFMADHDAWRELAETYVSLQMYKQAAFCYEELILSQPTIPLYHIAYAEVLYTMGGLENLQTAKKYYASTIQLTGGKNTRALFGVCLCTSAINQLTKGRNKEEEGSELQRLAAEVLLNNYKQQAPSKAPLISSLLKNMKLS

SEQ ID NO: 162901 - protein, 62 aa, Zea Mays
MALLFPKSRCHQERHGSLFPCELSKENLSSVKDTVEMVVKEWGEKSLTELEAEERLSYSCEK

SEQ ID NO: 162902 - protein, 392 aa, Zea Mays
MATCSPGDYLIVPRNCHLSVISALVLSGVVPKYIIPEYNSGWDIAGGITPLQLDEAVKELEEDGKRVGAVLVTSPTYHGVCSNVQGIVSVCHPRGIPVIVDEAHGAHFRFHDSLPSTAIEQGADLAVQSTHKVLCSLTQSSMLHMSGDLVDVDKVSQCLQLLQSSSPSYLLLSSLDAARDQLSQNTNIFDEPLAIASETKDLLARIPGISVLDLPCFASDFPAIDPLRITLSASDLQLSGYEADDILYEGHQIVSELVGTRAVTFAVNLGTRVQDAEKLVQSAKHLSEKHFFANSLKPVKENRVHGPLENISVHLSPREAFFTEKRRVKIEDSLGEICGELICPYPPGIPVLIPGEVVTHDSLSYLMSVRHQGITISGAADAELNSILVCDL

SEQ ID NO: 162903 - protein, 544 aa, Zea Mays
MRRGSLSLLLLAAVAAVAATAVPAEPASTLSGPSRPVTVAIGDRGHAVDLPDTDPRVQRRVTGWAPEQIAVALSASPTSAWVSWITGDYQMGGAVEPLDPGAVGSVVRYGLQNYTSGIIHHVRLQGLEPGTRYLYRCGDPAIPDAMSDVHAFRTMPAVGPGSYPGRIAVVGDLGLTYNTTSTVDHLVRNRPDLVLLLGDVCYANLYLTNGTGADCYSCAFAKSTPIHETYQPRWDYWGRYMEPVTSSIPMMVVEGNHEIEQQIHNRTFAAYSSRFAFPSEESGSSSPFYYSFDAGGIHFVMLASYADYSRSGAQYKWLEADLEKVDRSVTPWLIAGWHAPWYTTYKAHYREAECMRVEMEELLYAYGVDVVFTGHVSLRSRLLSARVRAVEPGVQLHAGRVRPRAHLGGRRRQPREDGDGARGRGRPLPGPGVDAGPLHGGPPLRRQLHVGPRRGPLLLGPPAGVQRVQGEQLRARRPGGQERHARALAVAPQPGPPCRRRRQRRRRRGLHRQGARQVPRQDGQIVGLLIDPSLLATPTLVAAY

SEQ ID NO: 162904 - protein, 367 aa, Zea Mays
MRRGSLSLLLLAAVAAVAATAVPAEPASTLSGPSRPVTVAIGDRGHAVDLPDTDPRVQRRVTGWAPEQIAVALSASPTSAWVSWITGDYQMGGAVEPLDPGAVGSVVRYGLQNYTSGIIHHVRLQGLEPGTRYLYRCGDPAIPDAMSDVHAFRTMPAVGPGSYPGRIAVVGDLGLTYNTTSTVDHLVRNRPDLVLLLGDVCYANLYLTNGTGADCYSCAFAKSTPIHETYQPRWDYWGRYMEPVTSSIPMMVVEGNHEIEQQIHNRTFAAYSSRFAFPSEESGSSSPFYYSFDAGGIHFVMLASYADYSRSGAQYKWLEADLEKVDRSVTPWLIAGWHAPWYTTYKAHYREAECMRVEMEELLYAYD

SEQ ID NO: 162905 - protein, 141 aa, Zea Mays
MIQRRISVYQRDSYQKNGKGYTLFLAFVIDRLHHYLRKLMTLRKTSSTSREEVEKLQMENRSLREKEEKSSSETKRLQREIARLNEGMKKLKSETEEHERKASVAEAHVDALQKQSEELLLEYDRLLEDNQILQTQLLSRG

SEQ ID NO: 162906 - protein, 525 aa, Zea Mays
MEKRIQGATKLLDGSLERCFVDGLEHRDAKVIYNCLRAYAAIDNTSSAEELFRTTVVSPLIQKIVPQNYARAVAGASSDELEEDYQQIKACVEKDCKFILEISSSENSGLHVFDFLGNSILKEVLSAIQKGKPGAFSPGKPKEFLRNYKVSLGFLDFLEGYCFSKSAVTKLRYEPAYTDFMRQWNVGVYFSLRFQEIAGGLDSTLTNTFSPTGLNEAQQKPLLLKQSIKLLESLDSCWSDEVLVFSHCDKFLRLSLQLISRYTTWLSCGLSARKASDRSPNSPADAEWALSIPIEDFIYIMHDVHAVIGELSESGSFIGHVNQSLGSCPIEVFNLVKGSILQAAEPLKELLPAIMDVMIGIIVKKSNEDLKHLKGITATYRMTSKLPVRHSPYVSGILHPLKVFLEGDRMHYLSEDDKTKLCRGSANKITATYYDLVSEVVTVARKTESSLQRLRQGAQRRVGASTDASDSIISDTDKICMQLFLDIQEYARNLRAIGIDAREIDSYRALWQCVAPKDRHENIQF

SEQ ID NO: 162907 - protein, 234 aa, Zea Mays
MSLFIDLQIMHDVHAVIGELSESGSFIGHVNQSLGSCPIEVFNLVKGSILQAAEPLKELLPAIMDVMIGIIVKKSNEDLKHLKGITATYRMTSKLPVRHSPYVSGILHPLKVFLEGDRMHYLSEDDKTKLCRGSANKITATYYDLVSEVVTVARKTESSLQRLRQGAQRRVGASTDASDSIISDTDKICMQLFLDIQEYARNLRAIGIDAREIDSYRALWQCVAPKDRHENIQF

SEQ ID NO: 162908 - protein, 281 aa, Zea Mays
MADLVMAPPPAMDLFGEPIEAHPPWFKPDAFLRAGFDADAYVAELRSYVPLDSLAAELRAHLAALRAELVGLINRDYADFVGLSAHLKGVDAAAARMRAPLADLRDKVAAFRAGASAALAALREGLQQRAAATAARELLELLLDTSHVVSKVEKLIKELPTAPSDSSNAEIPINDTGTPNGKAGTGVRETQSILLERIASEMNRLKFYISHAECRTSLLLRTWRRGSKVLQNCWMVVWSAALWMVWNTVMLKLYTTVCVLMLQLTIHHQPKSFFVQQWCLH

SEQ ID NO: 162909 - protein, 366 aa, Zea Mays
MADLVMAPPPAMDLFGEPIEAHPPWFKPDAFLRAGFDADAYVAELRSYVPLDSLAAELRAHLAALRAELVGLINRDYADFVGLSAHLKGVDAAAARMRAPLADLRDKVAAFRAGASAALAALREGLQQRAAATAARELLELLLDTSHVVSKVEKLIKELPTAPSDSSNAEIPINDTGTPNGKAGTGVRETQSILLERIASEMNRLKFYISHAENLPFIENMEKRIQGATKLLDGSLERCFVDGLEHRDAKVIYNCLRAYAAIDNTSSAEELFRTTVVSPLIQKIVPQNYARAVAGASSDELEEDYQQIKACVEKDCKFILEISSSVQKTLDCMFLIFWVIQYSKKSFLQSRKASLGPFLLESLKNS

SEQ ID NO: 162910 - protein, 588 aa, Zea Mays
MADLVMAPPPAMDLFGEPIEAHPPWFKPDAFLRAGFDADAYVAELRSYVPLDSLAAELRAHLAALRAELVGLINRDYADFVGLSAHLKGVDAAAARMRAPLADLRDKVAAFRAGASAALAALREGLQQRAAATAARELLELLLDTSHVVSKVEKLIKELPTAPSDSSNAEIPINDTGTPNGKAGTGVRETQSILLERIASEMNRLKFYISHAENLPFIENMEKRIQGATKLLDGSLERCFVDGLEHRDAKVIYNCLRAYAAIDNTSSAEELFRTTVVSPLIQKIVPQNYARAVAGASSDELEEDYQQIKACVEKDCKFILEISSSENSGLHVFDFLGNSILKEVLSAIQKGKPGAFSPGKPKEFLRNYKVSLGFLDFLEGYCFSKSAVTKLRYEPAYTDFMRQWNVGVYFSLRFQEIAGGLDSTLTNTFSPTGLNEAQQKPLLLKQSIKLLESLDSCWSDEVLVFSHCDKFLRLSLQLISRYTTWLSCGLSARKASDRSPNSPADAEWALSIPIEDFIYIMHDVHAVIGELSESGSFIGHVNQSLGSCPIEVFNLVKGSILQAAEPLKELLPAIMDVMIGIIVKKSNE

SEQ ID NO: 162911 - protein, 482 aa, Zea Mays
MADLVMAPPPAMDLFGEPIEAHPPWFKPDAFLRAGFDADAYVAELRSYVPLDSLAAELRAHLAALRAELVGLINRDYADFVGLSAHLKGVDAAAARMRAPLADLRDKVAAFRAGASAALAALREGLQQRAAATAARELLELLLDTSHVVSKVEKLIKELPTAPSDSSNAEIPINDTGTPNGKAGTGVRETQSILLERIASEMNRLKFYISHAENLPFIENMEKRIQGATKLLDGSLERCFVDGLEHRDAKVIYNCLRAYAAIDNTSSAEELFRTTVVSPLIQKIVPQNYARAVAGASSDELEEDYQQIKACVEKDCKFILEISSSENSGLHVFDFLGNSILKEVLSAIQKGKPGAFSPGKPKEFLRNYKVSLGFLDFLEGYCFSKSAVTKLRYEPAYTDFMRQWNVGVYFSLRFQEIAGGLDSTLTNTFSPTGLNEAQQKPLLLKQSIKLLESLDSCWSDEVLVFSHCDKFLRLSLQLISRC

SEQ ID NO: 162912 - protein, 377 aa, Zea Mays
MADLVMAPPPAMDLFGEPIEAHPPWFKPDAFLRAGFDADAYVAELRSYVPLDSLAAELRAHLAALRAELVGLINRDYADFVGLSAHLKGVDAAAARMRAPLADLRDKVAAFRAGASAALAALREGLQQRAAATAARELLELLLDTSHVVSKVEKLIKELPTAPSDSSNAEIPINDTGTPNGKAGTGVRETQSILLERIASEMNRLKFYISHAENLPFIENMEKRIQGATKLLDGSLERCFVDGLEHRDAKVIYNCLRAYAAIDNTSSAEELFRTTVVSPLIQKIVPQNYARAVAGASSDELEEDYQQIKACVEKDCKFILEISSSENSGLHVFDFLGNSILKEVLSAIQKGKPGAFSPGKPKEFLRNYKATASPSLL

SEQ ID NO: 162913 - protein, 86 aa, Zea Mays
MPSSQLSYGNKPCNEGYGPAINPLPSQPWSVDANAKGRCSAYWEVNYVKFKKQVTPENKIVSPNLLPKPFYCNFDLCCCSKHYLIY

SEQ ID NO: 162914 - protein, 239 aa, Zea Mays
MAASALLLSPRLVSFPPHPSLAPLFTKRPPPYPLGGAGARLRAVGDGPGAGLPPEQATVYDGAYGPWTLEDSDVREVLLYRSGLVTAAASFVAASSAAFLPEGNPAASAVTGAADLLYAAGAAGLGLSLVLIHIYVTPIKRFLQALWAAGALGSVGTYLVAARPLDEGLVQYVLDHPAALWFVGPTFAALTGLVFKEGLCYGKLEAGILTFLIPGLLLGHLHKGRSFRTVDASFHNLRR

SEQ ID NO: 162915 - protein, 162 aa, Zea Mays
MTPPHHPVNFAVLLLFLCLPAVPPAAAAADPTPTPWPPQFHATLVMDYHGNMSVADLWYDWPGGRNLHVIRYQLAADAPYYDNEWNNGTSFFYTPALRTCRSAAVGVGILRPDWLRPGAVYLGRRDAGGFDCHVWAKADFITYYEDVNTKRPVKWVFYTAER

SEQ ID NO: 162916 - protein, 358 aa, Zea Mays
MASAAVLRNAGSRRLFSYPTLRAAAIYVPSALPDAPAAAAAPAQPPPTAGTLWARSMATFTRTKPHVNVGTIGHVDHGKTTLTAAITKVLAEAGKAKAVAFDEIDKAPEEKARGITIATAHVEYETAKRHYAHVDCPGHADYVKNMITGAAQMDGGILVVSAPDGPMPQTKEHILLARQVGVPSLVCFLNKVDAVDDPELLELVEMELRELLSFYKFPGDEIPIIRGSALSALQGNNDEIGKNAILKLMDAVDEYIPDPVRQLDKPFLMPIEDVFSIQGRGTVVTGRVEQGTIKTGEDVEILGLAQTGPLKTTVTGVEMFKKILDHGEAGDNVGLLLRGLKRGDVERGQVRFPEFEIV

SEQ ID NO: 162917 - protein, 286 aa, Zea Mays
MPQTKEHILLARQVGVPSLVCFLNKVDAVDDPELLELVEMELRELLSFYKFPGDEIPIIRGSALSALQGNNDEIGKNAILKLMDAVDEYIPDPVRQLDKPFLMPIEDVFSIQGRGTVVTGRVEQGTIKTGEDVEILGLAQTGPLKTTVTGVEMFKKILDHGEAGDNVGLLLRGLKRGDVERGQVVCKPGSLKTCKKFEAEIYVLTKDEGGRHTAFVTNYSPQFYFRTADVTGRVELLGEMKMVLPGDNVTANFELISPVPLEPGQRFAIREGGRTVGAGVVSKVLS

SEQ ID NO: 162918 - protein, 292 aa, Zea Mays
MSASTHQEAILSETKHEQICYRTVDPYWRPGARTDSVRTPPPVGGMVPTHNSFWPQFGSGVTNRASMGNWSQTSRVMVPSMSSPIFVGSNPKRWSHRFVDGFKDEIKSAVIVQHFPHLDTTCSLTLSQEDMVNQFERRDSRRVGPGGGTRLPQKLGTAPSPLLLPVSGGMGNMTEDRRSMARNQARVEENKLTALKAYRRTKGLCFKCWECWSQTYKCSNCVPLHLGEEVWVKELTGEPRECIEEFTDLTDRQGDESLLAIPVVAVSGSKGNKTIWLWVSIHCQHVLVLVDS

SEQ ID NO: 162919 - protein, 55 aa, Zea Mays
MQHTLSGHKVKPFYVCPKSKKKLTLTNNILSEIKIYYIIKLVCLQIQLFLGKCFF

SEQ ID NO: 162920 - protein, 85 aa, Zea Mays
MSRVGAPGAVLPLLTESPSLRDLSNNYLHDSILYQLPSNLTYLNLAKNNFSGNLPYSISNLVSLEYLKLENCLEASVHSQNCKAY

SEQ ID NO: 162921 - protein, 451 aa, Zea Mays
MHLRIGSHQLLLLSTKQLFPFLPPPKCPRARHRHRQWPPSSSSRFSRAAHGPSGRTAAMSPPGAARVTDADLYAPAKELYLGDRCQVADTPAPWQFWMVMLKNGNLDTTAAACPENGRPARPFPQTSRFPCPAGAGCMNQPLLFHNRTALDDAGRRLRGGLFGTYDLDAAAGLGAGDVSFYSVTWEKDVAASGRGGGWAFHHKLCTSTKYPWLMLYLRSDATRGFSGGYHYDTRGMTKTQGGGRNSQFYLMDMGSCWKNDGRACDGDTATDVTRYSEMIINPATPAWCSPSRIDQCPPWHTFRNGSRVHRRDGARFPYGAYHVYCSPGNAARAEQPTTYCDAYSNPQAQEILQLLPHPVWGEFGYPTARGQGWVGDPRAWDLDVGAMSQALYFYQDPGTPPARRRWTSLDVGTEIYVSDRAEEAEWTLSGFDILVPDKCIKSQQRASNSCW

SEQ ID NO: 162922 - protein, 106 aa, Zea Mays
MREGRHLSCWLPREVLVNINHPCMFCRWWLAMLFIFQAQAAAGLVFPVLDGSKGTWYFEGPPSNISCEPVSARVRRCRQEPNQIMKSCADGELERVCFAISIYMSQ

SEQ ID NO: 162923 - protein, 136 aa, Zea Mays
MLQARRFITLIDELYNHHCRLICLAASSIDDLFQGTEEGPLFDLESFQFETESEGTKLRRDVLAEGNAGSGPSTTGLVAILSGQEEMFAFRRAISRLIEMQTPLYLERVLAVHPSFRRPGLARNNRPAVPQPAPAV

SEQ ID NO: 162924 - protein, 391 aa, Zea Mays
MLEIHDHMHDVWKRRDDDKSIHSSAFSWISSLPFDTKIKEWLIGEEKYKQQTQEKHILLAVADKFLVDRQANKTGASILCFDEIQTIDVFAVVALSGILSRLLSTGTVLVATSNKAPEDLNQDGMQRDIFLELLSKLDESCNEILVGTEKDYRRLIPTEGSTEVHYFWPATSDARSMYEAMWHDITDQSGENIVSVTIPVMFGRSIEIPQSCNGVARFDFEYLCGRPVGAADYIAIARNYHTIFISEIPAMSMKIRDKARRFITLIDELYNHHCRLICLAASSIDDLFQGTEEGPLFDLESFQFETESEGTKLRRDVLAEGNAGSGPSTTGLVAILSGQEEMFAFRRAISRLIEMQTPLYLERVLAVHPSFRRPGLARNNRPAVPQPAPAV

SEQ ID NO: 162925 - protein, 252 aa, Zea Mays
MGCKGTSSLSYYQNWMKAAMRFLWVHYFWPATSDARSMYEAMWHDITDQSGENIVSVTIPVMFGRSIEIPQSCNGVARFDFEYLCGRPVGAADYIAIARNYHTIFISEIPAMSMKIRDKARRFITLIDELYNHHCRLICLAASSIDDLFQGTEEGPLFDLESFQFETESEGTKLRRDVLAEGNAGSGPSTTGLVAILSGQEEMFAFRRAISRLIEMQTPLYLERVLAVHPSFRRPGLARNNRPAVPQPAPAV

SEQ ID NO: 162926 - protein, 266 aa, Zea Mays
MLMDMFYGATEGVIKHRRRFHFHEAMLEIHDHMHDVWKRRDDDKSIHSSAFSWISSLPFDTKIKEWLIGEEKYKQQTQEKHILLAVADKFLVDRQANKTGASILCFDEIQTIDVFAVVALSGILSRLLSTGTVLVATSNKAPEDLNQDGMQRDIFLELLSKLDESCNEILVGTEKDYRRLIPTEGSTEVHYFWPATSDARSMYEAMWHDITDQSGENIVSVTIPVMFGRSIEIPQSCNGVARFDFEYLCGRPVISQPHFVSVCSSS

SEQ ID NO: 162927 - protein, 324 aa, Zea Mays
MHYNTSEHARRRRGSIEPGVGKWVSYLNREKKLDTLVGHRPVAPVAPKGLYLYGNVGSGKTMLMDMFYGATEGVIKHRRRFHFHEAMLEIHDHMHDVWKRRDDDKSIHSSAFSWISSLPFDTKIKEWLIGEEKYKQQTQEKHILLAVADKFLVDRQANKTGASILCFDEIQTIDVFAVVALSGILSRLLSTGTVLVATSNKAPEDLNQDGMQRDIFLELLSKLDESCNEILVGTEKDYRRLIPTEGSTEVHYFWPATSDARSMYEAMWHDITDQSGENIVSVTIPVMFGSCMLTGLLRFLKAVMVSQGLTSSIYVVAQSEQQII

SEQ ID NO: 162928 - protein, 248 aa, Zea Mays
MLMDMFYGATEGVIKHRRRFHFHEAMLEIHDHMHDVWKRRDDDKSIHSSAFSWISSLPFDTKIKEWLIGEEKYKQQTQEKHILLAVADKFLVDRQANKTGASILCFDEIQTIDVFAVVALSGILSRLLSTGTVLVATSNKAPEDLNQDGMQRDIFLELLSKLDESCNEILVGTEKDYRRLIPTEGSTEVHYFWPATSDARSMYEAMWHDITDQSGENIVSVTIPVMFGRSIEIPQSCNGVARSEQQII

SEQ ID NO: 162929 - protein, 394 aa, Zea Mays
MILSRLHVRVTRRSPASAALRDAATRALASAGLFRGLHGGASSEHGREPAGPLTLYRKLVSQGKLTHDSYQENVASELDNLLSRLQRYEMEMEDYHDKLYFWENSREKERRRLLVEEAEDKQRGGVWIDERRGFLDKLVARRRRGSIEPGVGKWVSYLNREKKLDTLVGHRPVAPVAPKGLYLYGNVGSGKTMLMDMFYGATEGVIKHRRRFHFHEAMLEIHDHMHDVWKRRDDDKSIHSSAFSWISSLPFDTKIKEWLIGEEKYKQQTQEKHILLAVADKFLVDRQANKTGASILCFDEIQTIDVFAVVALSGILSRLLSTGTVLVATSNKAPEDLNQDGMQRDIFLELLSKLDESCNEILVGTEKDYRRLIPTEGSTEAQQPYGYDPFTSHI

SEQ ID NO: 162930 - protein, 519 aa, Zea Mays
MEMEDYHDKLYFWENSREKERRRLLVEEAEDKQRGGVWIDERRGFLDKLVARRRRGSIEPGVGKWVSYLNREKKLDTLVGHRPVAPVAPKGLYLYGNVGSGKTMLMDMFYGATEGVIKHRRRFHFHEAMLEIHDHMHDVWKRRDDDKSIHSSAFSWISSLPFDTKIKEWLIGEEKYKQQTQEKHILLAVADKFLVDRQANKTGASILCFDEIQTIDVFAVVALSGILSRLLSTGTVLVATSNKAPEDLNQDGMQRDIFLELLSKLDESCNEILVGTEKDYRRLIPTEGSTEVHYFWPATSDARSMYEAMWHDITDQSGENIVSVTIPVMFGRSIEIPQSCNGVARFDFEYLCGRPVGAADYIAIARNYHTIFISEIPAMSMKIRDKARRFITLIDELYNHHCRLICLAASSIDDLFQGTEEGPLFDLESFQFETESEGTKLRRDVLAEGNAGSGPSTTGLVAILSGQEEMFAFRRAISRLIEMQTPLYLERVLAVHPSFRRPGLARNNRPAVPQPAPAV

SEQ ID NO: 162931 - protein, 416 aa, Zea Mays
MLMDMFYGATEGVIKHRRRFHFHEAMLEIHDHMHDVWKRRDDDKSIHSSAFSWISSLPFDTKIKEWLIGEEKYKQQTQEKHILLAVADKFLVDRQANKTGASILCFDEIQTIDVFAVVALSGILSRLLSTGTVLVATSNKAPEDLNQDGMQRDIFLELLSKLDESCNEILVGTEKDYRRLIPTEGSTEVHYFWPATSDARSMYEAMWHDITDQSGENIVSVTIPVMFGRSIEIPQSCNGVARFDFEYLCGRPVGAADYIAIARNYHTIFISEIPAMSMKIRDKARRFITLIDELYNHHCRLICLAASSIDDLFQGTEEGPLFDLESFQFETESEGTKLRRDVLAEGNAGSGPSTTGLVAILSGQEEMFAFRRAISRLIEMQTPLYLERVLAVHPSFRRPGLARNNRPAVPQPAPAV

SEQ ID NO: 162932 - protein, 223 aa, Zea Mays
MLMDMFYGATEGVIKHRRRFHFHEAMLEIHDHMHDVWKRRDDDKSIHSSAFSWISSLPFDTKIKEWLIGEEKYKQQTQEKHILLAVADKFLVDRQANKTGASILCFDEIQTIDVFAVVALSGILSRLLSTGTVLVATSNKAPEDLNQDGMQRDIFLELLSKLDESCNEILVGTEKDYRRLIPTEGSTEEARGSRRLVGAAAVMFSCWKIRTYTCQVKTQVVRR

SEQ ID NO: 162933 - protein, 262 aa, Zea Mays
MAQAVEEWYRQMPIITRSYLTAAVVTTVGCTLEIISPYHLYLNPKLVVQHYEIWRLVTNFLYFRKMDLDFLFHMFFLARYCKLLEENSFRGRTADFFYMLLFGATVLTGIVLIGGMIPYISETFARILFLSNSLTFMMVYVWSKHNPFIHMSFLGLFTFTAAYLPWVLLGFSILVGSSTWVDLLGMIAGHVYYFLEDVYPRMTGRRPLKTPSFIKALFADDNVVVAQPPNAGIGAGARARRKMDRDGQTGQPLLQKLVHVTV

SEQ ID NO: 162934 - protein, 691 aa, Zea Mays
MASSAAAPSGAPPAAKRPASSGREGDQMVVTPLGAGSEVGRSCVHMTFKGRTVLFDCGIHPAYSGMAALPYFDEIDPSAIDVLLITHFHLDHAASLPYFLEKTTFKGRVFMTHATKAIYKLLLSDYVKVSKVSVEDMLYDESDIARSMDKIETLEVNGIRFWCYTAGHVLGAAMFMVDIAGVRILYTGDYSREEDRHLRAAELPQFSPDICIIESTYGVQQHQPRIIREKRFTEVIHNTVSQGGRVLIPAFALGRAQELLLILDEYWSKHPELHKIPIYYASPLAKRCMAVYQTYINSMNERIRNQFAQSNPFHFKHIESLNSIDNFHDVGPSVVMASPGGLQSGLSRQLFDKWCTDKKNACVIPGYVVEGTLAKTIINEPREVTLANGLTAPLHMSVHYISFSAHADFPQTSNFLDELRPPNIILVHGEANEMSRLKQKLITQFDGTNTKIVSPKNCQSVEMYFTCEKMAKTIGRLAEQVPEGGESSSGLLVKKGFTYQIMAPEDLRVFTQLSTANIIQRIAVPYSGSFEVIRYRLKQIYESVESATEESDVPTLIVHERVTVRLDSESYVTLQWSSDPISDMVSDSVVAMVLNIGREGPKVVPVEEAVKTKEETEKAALKVVYALMTSLFGDVKVAEEGKFVISVDGNVAHLDGRSGDVECENATLKERIKTAFRRIQGAVRPIPLSAS

SEQ ID NO: 162935 - protein, 351 aa, Zea Mays
MAAESARPPSPPRDSGCPAGAGDSTSSQLTATYLGVSFALFLATLPSGTAARHVASLQSRGRLLASRLLAAEDQLRQLRARRREDARANARAAEIFAGHRAAWMEAERRLQARAAAAADEAASLRAHLADAEADAAALRARAERLEREAAERDELLTALLAATSRAGYSGGGPLPRVHDGEEQEEEERARHDARGEREPEHEQDPLPAPPLDHAADTTDAEALAAAAALYAQQRQKHDDDFYTAAMAASGMPPWMEMDRSKAWQDLKYDTIESTYNTKHAVPRRESPWKVDVESSGVPAKLRLLEQELLNLEKVVNGDLSKIPLVMRKQVKRYQTLAGKIDDLCKRMVANK

SEQ ID NO: 162936 - protein, 637 aa, Zea Mays
MAAGTLRMIEMMMMTKKKRGNGRKSSSGRGLVGGWTMLSTQRSANGVPAAMQVQPQPFGYPVSTHYQPSLSGVVPAASVFASGTAEFLSIAQQADVANKALQDNIRKLRETHKTTVSALVKTDTHLNEALSEISSLESGLQDAEKRFVYMQELRDYISVMCDFLNDKAFLIEELEENIQQLHEKRALAISERRAADLADESGVIEAAVSAAVSILSKGSSSTCLSAASNAAQAAAAAARGSSNLQPELDEFGRDINMQKRMDLKRREEDRRRRKTQSETKRLASAAKNKDIEKIEGELSTDESDSESTAYVSSRDEFLKAADHVFIDAKEEYSSLRIVKDKFEGWKAQYPSAYRDAHVALSAPSVFSPYVRLELLKWDPLHETTDFFDMDWHKVLFDYGVQDDESPSGSNDSDVVPVLVEKVALPILHHRIERCWDVLSTQGTRKAVEASRMVIGYLPTSSKDLHRLLAAVSSRLTQAVADLSVPAWGSMVTRTVPGASQYAAYRFGVAVRLLKNVCLWKDILADHVVEKLALDELLRGKILPHMKSIILDVHDAITRAERVAAALSEVWPKQNQKLRPFADLVAELGNKLERRHASGISEDETRGLARRLKNILAVLNEYDKARAISKAFHLREAL

SEQ ID NO: 162937 - protein, 903 aa, Zea Mays
MSSHRKNFRRRGDDAEDANGDGGSHPKPSTTTATKTKTLTVPKPKSPPRRQGASRLSFADDEDEDDAEAGPFAQRRLPPTASVRPARTASPAAGALHRLTPARERIKSSPAPAGAAVSAPKPSNFQSHAGEYTPERLRELQKNARPLPGSLLRAQPRAPATEPRSQKLSGTPASSTPATTTAAATETVVVLKGLVKPMSEASIGPRIPKHDKEEDKSEEEGKGDEEDEGPVIPDRATIEAIRAKRQQRQQPRHAAPDYISLDAGGVLSSRNAAGESSDEDDNEITDRIAMYTDKPGDGPRSTKGVFSGISNRGPATSLGAFSDGSRNVEDDRDDDDDEEEERKWEEEQFRKGLGRRMDDAFYSEVSKWGTSCYAGPATAIWIPKFLSIAQQADVANKALQDNIRKLRETHKTTVSALELRDYISVMCDFLNDKAFLIEELEENIQQLHEKRALAISERRAADLADESGVIEAAVSAAVSILSKGSSSTCLSAASNAAQAAAAAARGSSNLQPELDEFGRDINMQKRMDLKRREEDRRRRKTQSETKRLASAAKNKDIEKIEGELSTDESDSESTAYVSSRDEFLKAADHVFIDAKEEYSSLRIVKDKFEGWKAQYPSAYRDAHVALSAPSVFSPYVRLELLKWDPLHETTDFFDMDWHKVLFDYGVQDDESPSGSNDSDVVPVLVEKVALPILHHRIERCWDVLSTQGTRKAVEASRMVIGYLPTSSKDLHRLLAAVSSRLTQAVADLSVPAWGSMVTRTVPGASQYAAYRFGVAVRLLKNVCLWKDILADHVVEKLALDELLRGKILPHMKSIILDVHDAITRAERVAAALSEVWPKQNQKLRPFADLVAELGNKLERRHASGISEDETRGLARRLKNILAVLNEYDKARAISKAFHLREAL

SEQ ID NO: 162938 - protein, 354 aa, Zea Mays
MAAAFDAYTDKNAVFRRLKAKPENKMCFDCNAKNPTWASVTYGIFLCLDCSAAHRSLGVHITFVRSTNLDSWTPDQLKMMAFGGNNRAHAFFKQHGWTDGGKVEAKYTSRAAELYRQMLTKEVAKSATTDNALPSSPVASEASKPPSDDFPEFKLPDVPAPPAEDLNGKHEPKSPKAAPRSPKAATHPTFATSVKKPIGAKKVGGKTGGLGVRKLTTKPNESLYEQKPEEPKPAVPALAASTKKGGQALHSRFEYVENEPSADSRTGGSVSRVSGHVAPPKSSDFFQEYGMGNGFQKKSSNASKTQVEETDEARKKFSNAKAISSSQFFGTQNREEKEAQLSLQKFARGSFWPQ

SEQ ID NO: 162939 - protein, 92 aa, Zea Mays
MFTSQVPAYQLWSVSIVYTTVGDVCLYIVGKDEYDELAFKDVCAKPPTERLFLDKYGRICLCLDEIVWKGLLENTEKDRVRRLIRLKPPVEP

SEQ ID NO: 162940 - protein, 102 aa, Zea Mays
MILAVLFANSDGNILVERFHGVPAEERSSTLPPTSLCLLFIPRSGMSASTLLARMNMMSLLSRMFVQNLLPSASSLTNTGGSACALMRLFGRGCLKTRRKTE

SEQ ID NO: 162941 - protein, 118 aa, Zea Mays
METSLSSDSMGFPRRRENEELHVASHKSVSIVYTTVGDVCLYIVGKDEYDELALAEVIFAITSAVKDVCAKPPTERLFLDKYGRICLCLDEIVWKGLLENTEKDRVRRLIRLKPPVEP

SEQ ID NO: 162942 - protein, 320 aa, Zea Mays
MVLAAHDPPPLVFDAARLSGLSDIPQQFIWPADESPTPDSAEELAVPLIDLSGDAAEVVRQVRRACDLHGFFQVVGHGIDAALTAEAHRCMDAFFTLPLPDKQRAQRRQGDSCGYASSFTGRFASKLPWKETLSFRYTDDDDGDKSKDVVASYFVDKLGEGYRHHGEVYGRYCSEMSRLSLELMEVLGESLGVGRRHFRRFFQGNDSIMPRPGAFVVNIGDTFMALSNGRYRSCLHRAVVNSRVARRSLAFFLCPEMDKVVRPPKELVDDANPRAYPDFTWRTLLDFTMRHYRSDMRTLEAFSNWLSTSSNGGQHLLEKK

SEQ ID NO: 162943 - protein, 174 aa, Zea Mays
MASEVWLSPASRLPSLSNAPPRLRSKPATTTASLLSPCPRPARALPVLRVRRRRRLRATEQQGQVQEQDDEVVDRNILPYCSIDRKQKKTLGEMEQEFLQALQAFYYDQKAIMSNEEFDNLKEELMWEGSSVVMLNEDEQKLLEASLAYTSGNPIMSDAEFDELKLRLKTAVSL

SEQ ID NO: 162944 - protein, 197 aa, Zea Mays
MALSYFTGTWYSGSIVAGIFWLKFYRLKVGCRLGSKRIGHLLPPWGLSTTPKTYNKLATQITLPPSYIAPEDTGKISGTIWTEEVVLHSTTAASRSGEAMQRKMAQPFEAKHQGNQLPVPLVPIIGKGVLEEEVMVSHTWGIAAAGSNTSCFTRTEADPVSFINMVTPPTIEVHRHSCIIHSVPSLPSATHGSGGTD

SEQ ID NO: 162945 - protein, 177 aa, Zea Mays
MSGCWAAQVGCRLGSKRIGHLLPPWGLSTTPKTYNKLATQITLPPSYIAPEDTGKISGTIWTEEVVLHSTTAASRSGEAMQRKMAQPFEAKHQGNQLPVPLVPIIGKGVLEEEVMVSHTWGIAAAGSNTSCFTRTEADPVSFINMVTPPTIEVHRHSCIIHSVPSLPSATHGSGGTD

SEQ ID NO: 162946 - protein, 227 aa, Zea Mays
MALSYFTGTWYSGSIVAGIFWLKFYRLKVGCRLGSKRIGHLLPPWGLSTTPKTYNKLATQITLPPSYIAPEDTGKISGTIWTEEVVLHSTTAASRSGEAMQRKMAQPFEAKHQGNQLPVPLVPIIGKGVLEEEVMVSHTWGIAAAGSNTSCFTRTEADPVSFINMVTPPTIEVHRHSCIIHSVPSLPSATHGSMRRMTFFSLISPVLRLQLRHFEYMRDTMVKVNDR

SEQ ID NO: 162947 - protein, 119 aa, Zea Mays
MTRWWTGTSSPTAASTGSRRRRWERWSRSSCKPSRPSTMTRRPSCPTRSLTTSRRSSCGRGAASSLLNEDEQKLLEASMAYASGNPIMSDAEFDELKLKLKTDEQCHCEGGSQVQSKES

SEQ ID NO: 162948 - protein, 77 aa, Zea Mays
MRWCRGRQAPGTGCSGHRRPGRGAWRPPKPHSQGPSSVAGSSGGPPRRSSTSASWRARAFVETRSYSQARAATRSRA

SEQ ID NO: 162949 - protein, 182 aa, Zea Mays
MEQEFLQALQAFYYDQKAIMSNEEFDNLKEELMWEGSSVVIAKQTNSVIVKEGPRCSLRSHKVYSDLNVDYIKMFLLNVPATTVALGLFFFIDELTGFEINVFQVSVHLIQLPEPFGFIFTWFAALPLILFLAQSLTKAIVQDFLILKIRVYPLDVLISKKHPSNVLFPVAVPSWSMTQNLG

SEQ ID NO: 162950 - protein, 211 aa, Zea Mays
MTSVEIAAGAGIVNGGALLSSSLLHTSKSLVLPTSHFPPIISPSRGSAQLLHISILTTHTHTLSPPTASARSQRAWHGVRGVAIAGVSPPIPLQRTTSLPLQACHYNRLLALSLPPPPPCLCCASAAAADFVPPSSKVQEQDDEVVDRNILPYCSIDRKQKKTLGEMEQEFLQALQAFYYDQKAIMSNEEFDNLKEELMWEGSSVVIAKRR

SEQ ID NO: 162951 - protein, 242 aa, Zea Mays
MAASSIPPCQVQEQDDEVVDRNILPYCSIDRKQKKTLGEMEQEFLQALQAFYYDQKAIMSNEEFDNLKEELMWEGSSVVIAKQTNSVIVKEGPRCSLRSHKVYSDLNVDYIKMFLLNVPATTVALGLFFFIDELTGFEINVFQVSVHLIQLPEPFGFIFTWFAALPLILFLAQSLTKAIVQDFLILKGPCPNCGTENLSFFGTILSVSSGGTTNKVKCANCSAELEYDSKSRVITLPEASNA

SEQ ID NO: 162952 - protein, 142 aa, Zea Mays
MVFSCHCSRGAGAAIPVFGTAREAGAAPSTRFFRTTPPPKIAPVFTSPPRDPHPNIIEMAASSIPPCQVQEQDDEVVDRNILPYCSIDRKQKKTLGEMEQEFLQALQAFYYDQKAIMSNEEFDNLKEELMWEGSSVVIAKRR

SEQ ID NO: 162953 - protein, 124 aa, Zea Mays
MARDNDKTRGEIITLIPLMIRRVPMEVTTRRAGCKLVGSSGREVGIASTPEDTKVIIGGTSTKESKVRSGSTNCLGGKAIEQIGGCVQGLGLEASGNRGLEHQGAHDVVGGPNHALSLAIPGRV

SEQ ID NO: 162954 - protein, 354 aa, Zea Mays
MLTVYRMYSELVSSTIAEGGPFASRTSFVKLLRSVKRETLKLIETFVDKAEDLPHIGKQFVPPMMDPVLGDYARNVPDARESEVLSLFATIINKYKGEMLEDVPRIFEAVFQCTLEMITKNFEDYPEHRLKFFSLLRAIGTHCFQALIQLSSQQLKLVIDSINWAFRHTERNIAETGLSLLLEILKKFQASGFQNQFYKTYFLTIEQEIFAVLTDTFHKPGFKLHVSVLQHLFCAVDGLTEPLWDASSVPYQYTDNAMFVRDYTIKLLGTSFPNMTVTEVTKFVDGLLSSKLDLPSFKNHIRDFLVQSKEFSVQDNKDLYAEEAAAQRERERQRMLAIPGLIAPSELQDEMVDS

SEQ ID NO: 162955 - protein, 827 aa, Zea Mays
MAEKLRDLSQPVDVTLLDATVAAFYGTGSKEERSAADQILRDLQNNPDMWLQVVHILQNSQNLNTKFFALQILESVIKYRWNALPVDQRDGIKNYISDVIVQLSSNEVTFRQERLYVNKLNIILVQVLKHEWPARWSSFIPDLVAAAKSSETLCENCMAILKLLSEEIFDFSRGEMTQQKIKELKSSLNSEFRLIHELCLYVLSATQRPELIRATLATLHAFLSWIPVGFIFESPLLETLLKFFPMAAYRNLTLQCLTEVAALQFGDFYNVQYVKTYTFFIIQLQAILPPEKIPDVYANGSTEEQAFIQNLALFFTSFFKNHMRILETTQENIAALLMGLEYLIGISYVDDTEVFKVSLDYWNVFVLELFEAHNQMEPAVTAQMVPGMVDGGTAVKQRRQLYSGPLSKLRMLMICRMAKPEEVLIVEDENGNIVRETMKDNDVLVQYKIMRETLIYLSHLDHEDTEQQMLKKLSKQLNGEDWSWNNLNTLCWAIGSISGSMVEEQENRFLVMVIRDLLNLCEITKGKDNKAVIASNIMYVVGQYPRFLRAHWKFLKTVVNKLFEFMHEMHPGVQDMACDTFLKIVQKCKRKFVTQQVGENEPFVSELLSNLATTIADLEPHQIHTFYESVGHMIQAESDNTNRDEYLKRLMSLPNQKWAEIIGQASQSIDILKNQDVIRSVLNILQTNTSVASSLGPHFFPQISLIFLDMLTVYRMYSELVSSTIAEGGPFASRTSFVKLLRSVKRETLKLIETFVDKAEDLPHIGKQFVPPMMDPVLGDYARNVPDARESEVLSLFATIINKYSMPVLCSFCTMVTCRFFSKRSCT

SEQ ID NO: 162956 - protein, 1043 aa, Zea Mays
MAEKLRDLSQPVDVTLLDATVAAFYGTGSKEERSAADQILRDLQNNPDMWLQVVHILQNSQNLNTKFFALQILESVIKYRWNALPVDQRDGIKNYISDVIVQLSSNEVTFRQERLYVNKLNIILVQVLKHEWPARWSSFIPDLVAAAKSSETLCENCMAILKLLSEEIFDFSRGEMTQQKIKELKSSLNSEFRLIHELCLYVLSATQRPELIRATLATLHAFLSWIPVGFIFESPLLETLLKFFPMAAYRNLTLQCLTEVAALQFGDFYNVQYVKTYTFFIIQLQAILPPEKIPDVYANGSTEEQAFIQNLALFFTSFFKNHMRILETTQENIAALLMGLEYLIGISYVDDTEVFKVSLDYWNVFVLELFEAHNQMEPAVTAQMVPGMVDGGTAVKQRRQLYSGPLSKLRMLMICRMAKPEEVLIVEDENGNIVRETMKDNDVLVQYKMLKKLSKQLNGEDWSWNNLNTLCWAIGSISGSMVEEQENRFLVMVIRDLLNLCEITKGKDNKAVIASNIMYVVGQYPRFLRAHWKFLKTVVNKLFEFMHEMHPGVQDMACDTFLKIVQKCKRKFVTQQVGENEPFVSELLSNLATTIADLEPHQIHTFYESVGHMIQAESDNTNRDEYLKRLMSLPNQKWAEIIGQASQSIDILKNQDVIRSVLNILQTNTSVASSLGPHFFPQISLIFLDMLTVYRMYSELVSSTIAEGGPFASRTSFVKLLRSVKRETLKLIETFVDKAEDLPHIGKQFVPPMMDPVLGDYARNVPDARESEVLSLFATIINKYKGEMLEDVPRIFEAVFQCTLEMITKNFEDYPEHRLKFFSLLRAIGTHCFQALIQLSSQQLKLVIDSINWAFRHTERNIAETGLSLLLEILKKFQASGFQNQFYKTYFLTIEQEIFAVLTDTFHKPGFKLHVSVLQHLFCAVDGLTEPLWDASSVPYQYTDNAMFVRDYTIKLLGTSFPNMTVTEVTKFVDGLLSSKLDLPSFKNHIRDFLVQSKEFSVQDNKDLYAEEAAAQRERERQRMLAIPGLIAPSELQDEMVDS

SEQ ID NO: 162957 - protein, 558 aa, Zea Mays
MAEKLRDLSQPVDVTLLDATVAAFYGTGSKEERSAADQILRDLQNNPDMWLQVVHILQNSQNLNTKFFALQILESVIKYRWNALPVDQRDGIKNYISDVIVQLSSNEVTFRQERLYVNKLNIILVQVLKHEWPARWSSFIPDLVAAAKSSETLCENCMAILKLLSEEIFDFSRGEMTQQKIKELKSSLNSEFRLIHELCLYVLSATQRPELIRATLATLHAFLSWIPVGFIFESPLLETLLKFFPMAAYRNLTLQCLTEVAALQFGDFYNVQYVKTYTFFIIQLQAILPPEKIPDVYANGSTEEQAFIQNLALFFTSFFKNHMRILETTQENIAALLMGLEYLIGISYVDDTEVFKVSLDYWNVFVLELFEAHNQMEPAVTVSMMGLQAQMVPGMVDGGTAVKQRRQLYSGPLSKLRMLMICRMAKPEEVLIVEDENGNIVRETMKDNDVLVQYKIMRETLIYLSHLDHEDTEQQMLKKLSKQLNGEDWSWNNLNTLCWAIGSISGSMVEEQENRFLVMVIRDLLNLCEITKGKDNKAVIASMLLVSIQDFSGLIGSF

SEQ ID NO: 162958 - protein, 128 aa, Zea Mays
MDGQGWVDLSLIAGFKKVQGLKKDLQYIKETVQSSSVLEMKDNKIRKHGDWEKWVIPRESNPDAPSRLASVSRPNVNNLTSHLGGMGLHESASSTGAEELNHHDVVQNGSPSGKEPAAEDSSGQQELQ

SEQ ID NO: 162959 - protein, 397 aa, Zea Mays
MEVVASSDQYRSSSSSASSPARRYYLPKPGALRRPISFEDSPDWDDIHPDDTIHLATAASASISIASSAYPSPSPSLPQGSSSASAACRDRKVAGVTLVWKDLTVSSLAAATNRFSDRLVKSSNGYALPATLTVIMGPARSGKSTLLRAIAGRLSSTERIYGEVFVNGAKSPLPYGSYGYVDRDDVLIESLTVREMLYFSALLQLPGFLSSKKAIVEDAIAAMSLGDHADKLIGGNCFMTRLPTGERRRVSIARELVMRPHVLFIDEPLYNLDSVSALLLMVTLKKLASTGCTIIFTMYQSSTEVFGLFDRICLLSNGNTLFFGETLACLQHFSNAGFPCPIMQSPSDHFLRAINTDFDRIIAMCKNFQVYVKIHFESTFCFILISFSQFDGSLLWS

SEQ ID NO: 162960 - protein, 420 aa, Zea Mays
MENAGASLIREVASKTNDSAGDGTTTASVLAREIIKLGMLSITSGANPVSVKKGIDKTVQKLVEELEKKSRPVKGSGDIKAVAAISAGNDEFVGTMIAEAIDKVGPDGVLSIESSSSFETTVEVEEGMELDRGYISPQFVTNLEKSIVEFENARILVTDQKISSIKEIIPLLEQTTQLRAPLLIIAEDVSGEALATLVINKLRGILNVAAIKAPGFGERRKALLQDIAIVTGAEYQSKDLGLLVEDTTVEQLGIARKVTISSSSTTIIADAASKDDIQARIAQLKRELSQTDSTYDSEKLAERIAKLSGGVAVVKVGASTEAELEDRKLRIEDAKNATFAAIEEGEVIVDKIRESEWEFGYNAMADKHENLVEAGVIDPAKVTRCALQNAASVAGMVLTTQAIVVEKPKKAPAAAAAAAP

SEQ ID NO: 162961 - protein, 312 aa, Zea Mays
MVSSQLSRHRRLRPQLKLKKGWSAEDVSGEALATLVINKLRGILNVAAIKAPGFGERRKALLQDIAIVTGAEYQSKDLGLLVEDTTVEQLGIARKVTISSSSTTIIADAASKDDIQARIAQLKRELSQTDSTYDSEKLAERIAKLSGGVAVVKVGASTEAELEDRKLRIEDAKNATFAAIEEGIVPGGGAAYVHLSTFVPAIKETLDDPEERLGADIIQKALVAPAALIAHNAGVEGEVIVDKIRESEWEFGYNAMADKHENLVEAGVIDPAKVTRCALQNAASVAGMVLTTQAIVVEKPKKAPAAAAAAAP

SEQ ID NO: 162962 - protein, 365 aa, Zea Mays
MVSSQLSRHRRLRPQLKLKKGWRGYISPQFVTNLEKSIVEFENARILVTDQKISSIKEIIPLLEQTTQLRAPLLIIAEDVSGEALATLVINKLRGILNVAAIKAPGFGERRKALLQDIAIVTGAEYQSKDLGLLVEDTTVEQLGIARKVTISSSSTTIIADAASKDDIQARIAQLKRELSQTDSTYDSEKLAERIAKLSGGVAVVKVGASTEAELEDRKLRIEDAKNATFAAIEEGIVPGGGAAYVHLSTFVPAIKETLDDPEERLGADIIQKALVAPAALIAHNAGVEGEVIVDKIRESEWEFGYNAMADKHENLVEAGVIDPAKVTRCALQNAASVAGMVLTTQAIVVEKPKKAPAAAAAAAP

SEQ ID NO: 162963 - protein, 412 aa, Zea Mays
MEFGRRSIIERHNESVDALINCVVENVGFSEGKPVAAITIYKCLLHWRIFETDKTNVFDRLIQIFGSAMQKQDNNADLAYWLSNSSSLLIILQKSLKPPGSSVTTPMKRPQTQTSFLGRMGFRASSITVDMDLVRQVEAKYPALLFKQQLTAFVEGLYGMIRDNVKKEISSVISLVIQVTPSIESHPQAPRNAKAGLITDQGSYWQTIVKHLNDLLEILQENCVPTVFARKIFTQIFSFINAQLLNSLLVRRECCSFSNGEYVKQGLDELETWCTVAKPEYAGSAWDELKHICQAVGFLVIFKKFRISYDEIISDLCPVLSVQQIYKICTQYWDDKYNTESVSEEVLDEMKKVVNEGSGQGTSSDNTFLLNEEISLPLSLEEIANSMDAKEFQNVSPPQELLDNAAFQFLRS

SEQ ID NO: 162964 - protein, 562 aa, Zea Mays
MEQEEYTKEEIDWSYIQFVDNQEILDLIEKKPGGIIALLDETCMLRNSTHETFAEKLYQKFKDNPHFSKPKFSRSGFTVHHYAGNVTYQTDLFLDKNIDYAVNEHQVLLNASKCSFVSSLFPPCEESTKSTKFTSIGSSFKQQLQSLLETLSATEPHYIRCIKPNNVLKPAIFENSNVLQQLRCGGVLEAIRISCLGYPTRRTFYEFVNRFGILQPKVLGRSHDEVTAAKMLLDKANLAGYQIGKTKVFLRAGQMAELDALRTEVLGLSAKKIQSKLRSFLARKKYIELQQCATQIQAICRGTTARRRYENLRRDVASLKMQTCYRMHYARKNYVEICSASTNIQSGLRGMGARIKLRLKRQTKAAVIIQSRCRCYLVRSRYVRLVKATITAQCGWRRRVARKELRNLKMAAKETGALQAAKSKLEKEVEELTWRLQLEKRIRADLEEAKSQENKKLQLQLQELQLQLKDTKDLLKREHEAAKEASEKAAAVPEILADTAQVNELTAENEKLKSLVASFEEKLQNAEQKFEETEKAREELVKKATDAESKINELKNTMQRFF

SEQ ID NO: 162965 - protein, 1026 aa, Zea Mays
MEQEEYTKEEIDWSYIQFVDNQEILDLIEKKPGGIIALLDETCMLRNSTHETFAEKLYQKFKDNPHFSKPKFSRSGFTVHHYAGNVTYQTDLFLDKNIDYAVNEHQVLLNASKCSFVSSLFPPCEESTKSTKFTSIGSSFKQQLQSLLETLSATEPHYIRCIKPNNVLKPAIFENSNVLQQLRCGGVLEAIRISCLGYPTRRTFYEFVNRFGILQPKVLGRSHDEVTAAKMLLDKANLAGYQIGKTKVFLRAGQMAELDALRTEVLGLSAKKIQSKLRSFLARKKYIELQQCATQIQAICRGTTARRRYENLRRDVASLKMQTCYRMHYARKNYVEICSASTNIQSGLRGMGARIKLRLKRQTKAAVIIQSRCRCYLVRSRYVRLVKATITAQCGWRRRVARKELRNLKMAAKETGALQAAKSKLEKEVEELTWRLQLEKRIRADLEEAKSQENKKLQLQLQELQLQLKDTKDLLKREHEAAKEASEKAAAVPEILADTAQVNELTAENEKLKSLVASFEEKLQNAEQKFEETEKAREELVKKATDAESKINELKNTMQSLQEKLTSTEAENHVLRQQSMKARPDNMPLLNMHRKSNLANGSLHSDEQTPHGTPMEFGRRSIIERHNESVDALINCVVENVGFSEGKPVAAITIYKCLLHWRIFETDKTNVFDRLIQIFGSAMQKQDNNADLAYWLSNSSSLLIILQKSLKPPGSSVTTPMKRPQTQTSFLGRMGFRASSITVDMDLVRQVEAKYPALLFKQQLTAFVEGLYGMIRDNVKKEISSVISLVIQVTPSIESHPQAPRNAKAGLITDQGSYWQTIVKHLNDLLEILQENCVPTVFARKIFTQIFSFINAQLLNSLLVRRECCSFSNGEYVKQGLDELETWCTVAKPEYAGSAWDELKHICQAVGFLVIFKKFRISYDEIISDLCPVLSVQQIYKICTQYWDDKYNTESVSEEVLDEMKKVVNEGSGQGTSSDNTFLLNEEISLPLSLEEIANSMDAKEFQNVSPPQELLDNAAFQFLRS

SEQ ID NO: 162966 - protein, 1054 aa, Zea Mays
MAYHCFEQFCINLTNEKLQQHFNQHVFKMEQEEYTKEEIDWSYIQFVDNQEILDLIEKKPGGIIALLDETCMLRNSTHETFAEKLYQKFKDNPHFSKPKFSRSGFTVHHYAGNVTYQTDLFLDKNIDYAVNEHQVLLNASKCSFVSSLFPPCEESTKSTKFTSIGSSFKQQLQSLLETLSATEPHYIRCIKPNNVLKPAIFENSNVLQQLRCGGVLEAIRISCLGYPTRRTFYEFVNRFGILQPKVLGRSHDEVTAAKMLLDKANLAGYQIGKTKVFLRAGQMAELDALRTEVLGLSAKKIQSKLRSFLARKKYIELQQCATQIQAICRGTTARRRYENLRRDVASLKMQTCYRMHYARKNYVEICSASTNIQSGLRGMGARIKLRLKRQTKAAVIIQSRCRCYLVRSRYVRLVKATITAQCGWRRRVARKELRNLKMAAKETGALQAAKSKLEKEVEELTWRLQLEKRIRADLEEAKSQENKKLQLQLQELQLQLKDTKDLLKREHEAAKEASEKAAAVPEILADTAQVNELTAENEKLKSLVASFEEKLQNAEQKFEETEKAREELVKKATDAESKINELKNTMQSLQEKLTSTEAENHVLRQQSMKARPDNMPLLNMHRKSNLANGSLHSDEQTPHGTPMEFGRRSIIERHNESVDALINCVVENVGFSEGKPVAAITIYKCLLHWRIFETDKTNVFDRLIQIFGSAMQKQDNNADLAYWLSNSSSLLIILQKSLKPPGSSVTTPMKRPQTQTSFLGRMGFRASSITVDMDLVRQVEAKYPALLFKQQLTAFVEGLYGMIRDNVKKEISSVISLVIQVTPSIESHPQAPRNAKAGLITDQGSYWQTIVKHLNDLLEILQENCVPTVFARKIFTQIFSFINAQLLNSLLVRRECCSFSNGEYVKQGLDELETWCTVAKPEYAGSAWDELKHICQAVGFLVIFKKFRISYDEIISDLCPVLSVQQIYKICTQYWDDKYNTESVSEEVLDEMKKVVNEGSGQGTSSDNTFLLNEEISLPLSLEEIANSMDAKEFQNVSPPQELLDNAAFQFLRS

SEQ ID NO: 162967 - protein, 278 aa, Zea Mays
MVMTFHSSAPSPQLEGGSLHLPLLDPNMRATPLTPSEWKERLEARTCLDVSSGETSGRGLLLLDVRNDYEWDVGHFEGAQRPNVDCFRSTSFGLSGETDPLNGVDKERTDILMYCTGGIRCDVYSTILRKKGFRNLYTLEGGVSNYLKVEGPAGWVGNLFVFDGRLSLPPATFNEEEDEEEQQENKRWVGCCYVCGSEVVELRHRNCANIDCNRLYLCCGWCAEELCGCCCSDCKVAPRLRPLLPGHQRYLKWHVYRDGRTDDENKLYGFVDDDSSGL

SEQ ID NO: 162968 - protein, 198 aa, Zea Mays
MASTVHHNSHQALLLRPLPTPSRHPRLSFSPRPAGLRSFFPASGCRLGTHGVALAEPEFVPLQEEEEEEEDARFVVVTFYKFVPLFDPHAEVARHLNFLQGRDIHGRIYLNEKGINAQYSGPHKDAVAYADWVKKHHQFSDMLVQTSPAVTGHAFPRLKLRYKPSLVQIMNGMLGTLKVLSGLMWTASEALPLDFRER

SEQ ID NO: 162969 - protein, 296 aa, Zea Mays
MLVQTSPAVTGHAFPRLKLRYKPSLVQLEGGSLHLPLLDPNMRATPLTPSEWKERLEARTCLDVSSGETSGRGLLLLDVRNDYEWDVGHFEGAQRPNVDCFRSTSFGLSGEVIHCSDPLNGVDKERTDILMYCTGGIRCDVYSTILRKKGFRNLYTLEGGVSNYLKVEGPAGWVGNLFVFDGRLSLPPATFNEEEDEEEQQENKRWVGCCYVCGSEVVELRHRNCANIDCNRLYLCCGWCAEELCGCCCSDCKVAPRLRPLLPGHQRYLKWHVYRDGRTDDENKLYGFVDDDSSGL

SEQ ID NO: 162970 - protein, 180 aa, Zea Mays
MIMNGMLGTLKVLSGLMWTASEALPLDFRERKKGFRNLYTLEGGVSNYLKVEGPAGWVGNLFVFDGRLSLPPATFNEEEDEEEQQENKRWVGCCYVCGSEVVELRHRNCANIDCNRLYLCCGWCAEELCGCCCSDCKVAPRLRPLLPGHQRYLKWHVYRDGRTDDENKLYGFVDDDSSGL

SEQ ID NO: 162971 - protein, 255 aa, Zea Mays
MASTVHHNSHQALLLRPLPTPSRHPRLSFSPRPAGLRSFFPASGCRLGTHGVALAEPEFVPLQEEEEEEEDARFVVVTFYKFVPLFDPHAEVARHLNFLQGRDIHGRIYLNEKGINAQYSGPHKDAVAYADWVKKHHQFSDMLVQTSPAVTGHAFPRLKLRYKPSLVQLEGGSLHLPLLDPNMRATPLTPSEWKERLEARTCLDVSSGETSGRGLLLLDVRNDYEWDVGHFEGAQRPNVDCFRSTSFGLSGEQIL

SEQ ID NO: 162972 - protein, 198 aa, Zea Mays
MGQVPAIVDGRFKLFESHAILRYLASVFPGVADHWYPSDLFTRAKIESILDWHHSNLRRGAATLVMHTALAPFLGLTTSHEAVKQAEKLVMQSLGVIESVWLKGDAKFLLGIPQPSIADLSLVCEIMQLEILGDEVRDRFLGAHERILVWMDKVKKATSPHFEEAHELLFQVKKARMVQGSSSKAFESSTKLKTASKL

SEQ ID NO: 162973 - protein, 133 aa, Zea Mays
MHTALAPFLGLTTSHEAVKQAEKLVMQSLGVIESVWLKGDAKFLLGIPQPSIADLSLVCEIMQLEILGDEVRDRFLGAHERILVWMDKVKKATSPHFEEAHELLFQVKKARMVQGSSSKAFESSTKLKTASKL

SEQ ID NO: 162974 - protein, 245 aa, Zea Mays
MHIGRNPSRKTKKNPHTARKVPRAQLRGLPGKKCLFPRYFPSMHLLKQIMNAREAVARKGFQSILQMSTDGLVVGSLMNWLMDKLDPVDMTILPGLGKELKITKETVRLILGLPSAGGGKPFMDWYGEVDAAGRLRKQLKISKDEFDIATLQEIIVTGRDDDLTIRCFFLILFNRLLFPTSSWSISNNEVLMTEDMDRFPDIDWCQLVFNDLCEAAAKWHKRNTNHVTATIYRCSIVIVVIPVMP

SEQ ID NO: 162975 - protein, 76 aa, Zea Mays
MLDARHVAVEEAKTYAQENGLFFMETSAKTAINVNDIFYEIAKRLLQGQEAPSPQAGIVLNQRPDERMVSTSSCCS

SEQ ID NO: 162976 - protein, 125 aa, Zea Mays
MYYRGAAAAIVVYDITNPASFTRAKKWVQELQAQGNPNTIVALAGNKVDMLDARHVAVEEAKTYAQENGLFFMETSAKTAINVNDIFYEIAKRLLQGQEAPSPQAGIVLNQRPDERMVSTSSCCS

SEQ ID NO: 162977 - protein, 207 aa, Zea Mays
MNHIPPTEHGNGGSKQLEIPQPGSFSCGLISSEARPQFRHQPSNSMAANFGNKIRNAKLVLLGDVGAGKSSLVLRFVKGQFVEFQESTIGAAFFSQTLAVNDETVKFEIWDTAGQERYHSLAPMYYRGAAAAIVVYDITNPEAKTYAQENGLFFMETSAKTAINVNDIFYEIAKRLLQGQEAPSPQAGIVLNQRPDERMVSTSSCCS

SEQ ID NO: 162978 - protein, 631 aa, Zea Mays
MKRADIIYSEDNLLRILDGLEARGNWRQALSIIEWVYNENSYRHRKSRFVYTKLLSILGKSLRATEALHIFTIMRGDAQIYPDMPAYHCIAVTLGRAGLLKELIKIIEYMRQKPSKLVMKMRRKDWDPSLEPDVLVYNSVLNACVLSQQWKGVFWVFQQMRIGGLPPTGATYGLAMEVMLKAKKYDFVQKFYEKMQKNGVPPRAITYKVLVRSFWEQDKINEAVEAVNDMEQRGVVGAASVYYELACCLCNNGRWRDAMLQVEKLKQLPLTKPLEYAFTGMILASFNGGYIYDCISIFELMKDHCMPNIGTVNVMLKVYGHCDMFGKAKDLFETTKACFLNSQTYIHEHSSFKADTYTYNSMLEASASAQQWEYFEYVYREMALSHHCLDQSKYSWLLIKACRAGKPYLLEHALDSILERGEIPDVQLITESICQSIAHRDYGRTLQLLNIMTQASIKIKEVEWDYLLQQNMHQFSIDALEGLIKYLSTNGTTNADPAVDLVRALQSQCRDDTSTQQFELSFHGSGNKYSCSSLAELDQLTCKNLCTDIILDVPGSDREMPQLGVSALMCRDISLNGQRVENKHELSDLGQRGPQVSAIDKVLDSMNSYGDNSYGEMPSASKILELWEHER

SEQ ID NO: 162979 - protein, 441 aa, Zea Mays
MAVSSPPPPRLHLSLHLRKPIQNSPPSGKKARPAPTAETLRRRFLRRGVSPTPKILHTLRKKEALKALRRARKDTAAAATASRNPCDEEETRFRAAAAEYHALAGRPWDAGTRGMAPPRGLDGEEGGLEGLREMLAARRGDGFRWLLDDDIEAEAAERKQQRRPGAGWDVGTEDEERRIQLLVSRTSIQLVLESNDPTLPQPEDRISGVEKGLAGLQPNCGPPWNKKRLNGDYLSFRDWRLTRVMKRADIIYSEDNLLRILDGLEARGNWRQALSIIEWVYNENSYRHRKSRFVYTKLLSILGKSLRATEALHIFTIMRGDAQIYPDMPAYHCIAVTLGRAGLLKELIKIIEYMRQKPSKLVMKMRRKDWDPSLEPDVLVYNSVLNACVLSQQWKGVFWVFQQMRIGGLPPTGATYGLAMEPNLLSSKATNQGELIQGGLS

SEQ ID NO: 162980 - protein, 415 aa, Zea Mays
MKRADIIYSEDNLLRILDGLEARGNWRQALSIIEWVYNENSYRHRKSRFVYTKLLSILGKSLRATEALHIFTIMRGDAQIYPDMPAYHCIAVTLGRAGLLKELIKIIEYMRQKPSKLVMKMRRKDWDPSLEPDVLVYNSVLNACVLSQQWKGVFWVFQQMRIGGLPPTGATYGLAMEVMLKAKKYDFVQKFYEKMQKNGVPPRAITYKVLVRSFWEQDKINEAVEAVNDMEQRGVVGAASVYYELACCLCNNGRWRDAMLQVEKLKQLPLTKPLEYAFTGMILASFNGGYIYDCISIFELMKDHCMPNIGTVNVMLKVYGHCDMFGKAKDLFETTKACFLNSQTYIHEHSSFKADTYTYNSMLEASASAQQWEYFEYVYREMALSHHCLDQSKYSWLLIKACRAGKVRVRALPQK

SEQ ID NO: 162981 - protein, 623 aa, Zea Mays
MHNSIPAMAVSSPPPPRLHLSLHLRKPIQNSPPSGKKARPAPTAETLRRRFLRRGVSPTPKILHTLRKKEALKALRRARKDTAAAATASRNPCDEEETRFRAAAAEYHALAGRPWDAGTRGMAPPRGLDGEEGGLEGLREMLAARRGDGFRWLLDDDIEAEAAERKQQRRPGAGWDVGTEDEERRIQLLVSRLNGDYLSFRDWRLTRVMKRADIIYSEDNLLRILDGLEARGNWRQALSIIEWVYNENSYRHRKSRFVYTKLLSILGKSLRATEALHIFTIMRGDAQIYPDMPAYHCIAVTLGRAGLLKELIKIIEYMRQKPSKLVMKMRRKDWDPSLEPDVLVYNSVLNACVLSQQWKGVFWVFQQMRIGGLPPTGATYGLAMEVMLKAKKYDFVQKFYEKMQKNGVPPRAITYKVLVRSFWEQDKINEAVEAVNDMEQRGVVGAASVYYELACCLCNNGRWRDAMLQVEKLKQLPLTKPLEYAFTGMILASFNGGYIYDCISIFELMKDHCMPNIGTVNVMLKVYGHCDMFGKAKDLFETTKACFLNSQTYIHEHSSFKADTYTYNSMLEASASAQQWEYFEYVYREMALSHHCLDQSKYSWLLIKACRAGKVRVRALPQK

SEQ ID NO: 162982 - protein, 228 aa, Zea Mays
MNPVGPTFKPLISIGLGARFLCWKGTPKYLLSDSCSERERRREREKEIKKYWHTFLGTHHGGDGTVPVVCVSRMGRMACSGINAMGREARGLSVAARVRGSFEKWKSVSVLIFECAGARIKSRWIHQRPLYIWERRLPLVLTLLSHSSLSPRCFFRSRPKTERSKNLAYLAAAAAPLLRHGRESDRPSTAQSVALLHRDCGGVGGTCLRRPAPPLLCRATPRMDCARG

SEQ ID NO: 162983 - protein, 52 aa, Zea Mays
MKLEAEVESSRMSLATLPTDDLLKRVTVTMGKADLGILAQARCAPTRGMCLW

SEQ ID NO: 162984 - protein, 138 aa, Zea Mays
MKGIGCNTVPTSWTVGGGAGGLVVGATRVAVADVPGARLTLDKSLARVSTLSTCPGVPVGREARVAVVVPGARRTADRSLAREPVSSTCPEAPAGWKAPPVARLRLFLLRLLRREERGWRSGCPSSSQESRSGRAPPG

SEQ ID NO: 162985 - protein, 77 aa, Zea Mays
MIFINHNFFKMLKRRGQRDYQQNCLIFIIYLYIQTLKVDTNRIKFIEMRLNGRTFSHANSVKTLFQTKLISKTLGHI

SEQ ID NO: 162986 - protein, 160 aa, Zea Mays
MRFLLPPSPLGGAAALPTRWRPTGEAPPTSSFRISSSILDYAMKKLRRTGYEVLTYGGGVTRSYHRERKNRRAQRSPMRNSLDSDDSTPDCLPEHDPRSQVNLHEHSTDHRTTADVRCVRGGPFSSNGISARQLFEHENTLPSLANEGHEVGGCLIYPRC

SEQ ID NO: 162987 - protein, 331 aa, Zea Mays
MEHGVLGQCQSGLAVHPEFHRSSVSPEEITEQSSQPERLSRSSGRRYVLGLAAGHGHHLLLDRLPANEALAEEEEDPACALASVDVTGVVAVAVPDKVCLPRAPRVVETVVESPRNIADDPLHSLLMLRRRSLQEPTNVADGVCQVRSCVDEVAKAPHKTLVLCSIHLLRRAVATQLQPLLHRSESWVAVGEPSQLNNALGIGGLAKCDPGVSLVHLNPQVEGEMPQVTHLEGGLHLFLERCHLCILGAGDHQVVDVDTHQQGTSSIAPPIDGRLVRAWRETHSFERGIQLGIPRPRCLSQAIESLAQAQHLALLARDRKTWRLVYVDLLL

SEQ ID NO: 162988 - protein, 108 aa, Zea Mays
MSGAGVEAPPFDHVLVGAVAEESACFRLIKVEECRCGRCRWRYLDACMCQEQGLLLRLRLCDVGLTTSWLPTVPGPVAKLAAVAASCRGGLPLLLVTLAGLPLLPSEM

SEQ ID NO: 162989 - protein, 142 aa, Zea Mays
MQLAGEVRLHSRARVHSTDAFLTFHAPTWAPLPGQRRRHGMEIKQAILEHWLPHARALQLAASGFELWWWMGRDTQTRRRRRRHGMETVEYYVLCLHPCLLSLHCTACDPSSVPPHALSCDDTHRHSPQPRTYGRLFPCTAL

SEQ ID NO: 162990 - protein, 108 aa, Zea Mays
MMDGRWRERLMHAYMNEKMWGVAAGLIMATVRPTVGDESLVGFVQVAVQLSILLAPYSSIETTRKPSGGEGGRMEGERAVAGASGEIEWPPVAGDHAIATGPPAPARS

SEQ ID NO: 162991 - protein, 71 aa, Zea Mays
MHEHHDDQATFLIACLIQIPNIIAWSWVVVVHEIRGKERCRLIFLKKLPRKWQVCTCDYAKKITLLFIQFP

SEQ ID NO: 162992 - protein, 50 aa, Zea Mays
MHMFEIFESEILVWLDLNSKDKIKKKRNYKFKIKKKKLKQPSQASPSAIR

SEQ ID NO: 162993 - protein, 63 aa, Zea Mays
MIQKRMPPLYYTIGVLYKITKYLHHTKTTIFQQPEFTQRRHTRPLMNLIATSFMLLILRYLFL

SEQ ID NO: 162994 - protein, 116 aa, Zea Mays
MWRPSAQKRAGRCAWRRRVRMVSLVVLIMRSALSFWEEVYGQDIRNCIPWDRKKAREVIELPTIVTLDGLNGEAELSGHPGEEVAEGGESLRLGTQRKSPHIMRKIIKHHKIVFVA

SEQ ID NO: 162995 - protein, 309 aa, Zea Mays
MVCRLNRSLYGLNQPPRAWHSRLTTFLVTLGFVVAKLDTSLFVHHHGAETAYLLLYVDDIVLTASSPSLLRRLVDALQQEFPVKDLGVLHHFLGVTAEPRPSGLLLHQRQYTLDILERAQMSDCKPCSTPVDTQAKLSEAMGDPVADPTGYRSLAGALQYLTFTRPDISYAVQQVCLHMHDPQEPHLAALKRLLRYLRGTVDYGLLFHRSTSSELVVYTDADWAGCPDTRRSTSGYAVFLGGNLVSWSSKRQPVVSRSSAEAEYRAVANGVAEAAWLRQLLAELHSPLSRSTLVYCDNVSAVYLSTNPV

SEQ ID NO: 162996 - protein, 63 aa, Zea Mays
MSSTGAKGSQQTNTKIKERVQNKGAKLNRRQPWSGAPDCSVCHRTVSGAPGNPTPNLPPSGIL

SEQ ID NO: 162997 - protein, 61 aa, Zea Mays
MTYCRKPPILLFLFPRGPFIQQNREMEMSTGVRAPRQRLESSEVTRRSGGYGMLVGVLGSA

SEQ ID NO: 162998 - protein, 119 aa, Zea Mays
MQTRCSLQASTLKSLHLLQIVTCSSLEFVLLAISNLALKSSLTLFRLEIDSWHVDNSHESISFLLISKAREFCASTNLSCSSYKRSSCFSNNLFLSFKASINSLILSILVLSKPLNKLA

SEQ ID NO: 162999 - protein, 91 aa, Zea Mays
MDEGCNQPLSSGPKDPLEYHSVLLCLLYPACEESPQLGASRSYNLMFTKKHGSKAGMSNAHKTQNQSTTRTQVTTRAHNTTRRVLYSKWSS

SEQ ID NO: 163000 - protein, 103 aa, Zea Mays
MYSPHYLEVSKVESSLHAHCLRLAMWSTLGVDMSSPTPPSLGFVLSVASPRERYLPWCHKGSRDESTMVGWRWLRKREEHLRASEADCAESDEKGRWICTPKI

SEQ ID NO: 163001 - protein, 159 aa, Zea Mays
MFCHSASRQSVTSVTSDGSRALTPPPVLPTPEPSPLHPVLPPPTAPPLSQLSPSRPQSSPPSSLFRAPIGTHPSLRHHVVPNPKTHAALVAPPSFLATTPRWKARLGSRSTSWISSSIHSPAILAPNAAVALPPICATSSDGRWGHAEPRRSPFQDATP

SEQ ID NO: 163002 - protein, 141 aa, Zea Mays
MRTRGKAGIAQPVDRINLHAVPMSPLPRSVRAALSDPNWRSAMQAEYDALLANDTWSLVPRPPGVNVVTGKWIFRHKLLADGSLDRYKARWVLRGFTQRPGVDYDETFSPVVKPATVRVVLSLALSQDWPIHQLDVKNAFL

SEQ ID NO: 163003 - protein, 255 aa, Zea Mays
MTDMGQLHHFLGISVTRSANGLFLSQRQYTQDILERAGMSACKPCSTPVDLHSKLSADGPPVDDATQYRSLAGALQYLIFTRPDIAFAVQQICLYMHDPREPHLAALKRILRYLQGTLSLGLTMRRSSPTELVVYTDADWAGCPDTRRSTSGYAVFLGDNLVSWSSKRQHTVSRSSAEAEYRAVANGVAEATWLRQLLIELQQPPPRATLVYCDNISAVYLSSNPVQHQRTKHVEIDLHFVREKVALGHARVLHV

SEQ ID NO: 163004 - protein, 83 aa, Zea Mays
MPPPSHSGVRGGRACSIGKMMSSAIAKPGTPRPYWRGRGSTAARRAATLCCRKRPPVNLDRCIVVPHLSLTTNLCTTQIPTGR

SEQ ID NO: 163005 - protein, 54 aa, Zea Mays
MYSFIYLFSSILYNLSLLSFLNSRIILGFKSPFGYLTYFFLHYYNIVTKMHTQI

SEQ ID NO: 163006 - protein, 81 aa, Zea Mays
MLPPHPWVRLRLRLRPRPPPLPREHLRCQRTSPTSRASSTYRAPAGVENIRCLGACDCEQWGGCGGRAAARGGRTSSGPAA

SEQ ID NO: 163007 - protein, 141 aa, Zea Mays
MRRGPSTVTDSDRDPQTGDLAGARVLLLSLMTSKSYLARSLIRPTPEASSTAQNAAAGCSLAPCVCVCVAPGAGPANSRWTRRFLSSGAAWKRNARGLSALPRACIASPSSCPACHVPPMCATPAWPPPACLHFHSSRLFR

SEQ ID NO: 163008 - protein, 52 aa, Zea Mays
MVGTRKTQKKKKKKTAQCMLHKTCQHVDKNVIITSVFIGESCIDDGPMTVYA

SEQ ID NO: 163009 - protein, 393 aa, Zea Mays
MFAGAQPGFTSPPGFAFASSSPWTSPVASSWPTPLSAPPSGLVGWDAAALAAFQTPTLTPPMGPEWIADTGATYHTTPDPGILTSVRPPSSLPSSIMVANGSCLPVTSMGAASSPGSFRIPDVLVAPSLVHNLLSIRRFTTDNSYFVEFDSSGLSVKDSETQRPLLRCDSTGPLYTLRLPHATPSSSSTPTTTATFAATMSSTTWHRRLGHPGRDALMQLTRSATIQCTRSNDEHLCHACQLDRHVRLPFCSSSSHATHAFDLVHCDLWTSPITSMSGYKYYLVVLDDFSHYVWTFPLRAKAKTFPALRHFFAWVSTQFGLPIKVVQCDNGREFDNSTSRDFFLSHGMQLRMSCPYTSSQNGKAERMIRTTNDTIRTLLLQAHLPARFWAEAL

SEQ ID NO: 163010 - protein, 176 aa, Zea Mays
MQLTRSATIQCTRSNDEHLCHACQLDRHVRLPFCSSSSHATHAFDLVHCDLWTSPITSMSGYKYYLVVLDDFSHYVWTFPLRAKAKTFPALRHFFAWVSTQFGLPIKVVQCDNGREFDNSTSRDFFLSHGMQLRMSCPYTSSQNGKAERMIRTTNDTIRTLLLQAHLPARFWAEAL

SEQ ID NO: 163011 - protein, 116 aa, Zea Mays
MSWCLGMLRRCLVCSSMRLGVPFITPRQLGAVESNLGRLILPSVDWRTGQSGARFPSINGTVDRWQTESRWRTGHVRCTPDRPVPPSSRWLGHVSRADRAADRWLTGQSGAHRTVR

SEQ ID NO: 163012 - protein, 116 aa, Zea Mays
MVQVHLFPFQSSLKTKTTKLKYMVSLKGSSCSTAPPKYVHHLQKGLVRSRECLYNLSTIISNKMQNEHDQRHKHMYVTIQSKFRESKILSSLRSLQKIFSSRGLVKISASWFSVLT

SEQ ID NO: 163013 - protein, 55 aa, Zea Mays
MVRVAAVGTSSSSISSRSTTCSLGEPLVSSNTTSLETSTKPDDLLKTLYAFVFES

SEQ ID NO: 163014 - protein, 92 aa, Zea Mays
MAAAVMRCGRRLVDPDRVVWLTCHTPHVVVACAALRPLLPAAETQSSLRLLSACIASPSTQTGRRARIVGVYPAIVQKQTKHEAMGRGFRLI

SEQ ID NO: 163015 - protein, 94 aa, Zea Mays
MAGVHPVFHVSMLRKFLRDPDHQIEMEPIAVQQDLTLECRSVRILEFSERVLRKRSIKYVKVLWTNQSEREATWELEELMRQKYPELFVVGKCC

SEQ ID NO: 163016 - protein, 181 aa, Zea Mays
MSLEKGKDSINHVVCTDHFSMSSKNKKRKGKRGCFKCNKAGHLIVSCPYNDKGEGIRRCFRCNDKNHTITSCPLLMNQACEFSKMTLTKENDKQQASCQVERRFYYKCGEQGHLSKVCNKGEVPKQVNLSQSYSLRRPKSYSCARSIMRSPRTSTNAIWVPKAFLDDRYGPIPRWVPNCAN

SEQ ID NO: 163017 - protein, 168 aa, Zea Mays
MKTPFERRPASTDDLFPDHVKHINAGETVGSKEEKEDPTLPKDVHLIPALRENGHPRQRVKVPVVPMHVGGGPELPIHRDMNKFSLFPHGQPNVMDSHVAALNISIREAQNMGKTTVTNFVPVPLDEEIHDRVIIPIDFFIYFLDPEGGIRLSYHLVVPGVFHCHNIF

SEQ ID NO: 163018 - protein, 156 aa, Zea Mays
MTRSERRVSEPQALKGVHSLKREVDGRFIWSAGNIRRMHVQAGDVECIRRRKIDEVVECSILLLARSISRGGSAATRTIVANFLAPPVSRLRGHRGSLSFHPTRAASSLREGTTRRRRGNRRFLLNLIRVAAELYHGWVAATHHVWRGFGELDRLR

SEQ ID NO: 163019 - protein, 135 aa, Zea Mays
MERLTLSLSFGLLQNIMLSLSQHNCPINRRRHLHSDHTLNVILQTTYKVSHKENLIKHRVVHCYPISNPIKLLNILIKGIRLPQFQQLPQRIWIRFSPKFLHHCCRKFLPTSQPMTHLVKLPPLGCSMFQIHRCH

SEQ ID NO: 163020 - protein, 73 aa, Zea Mays
MSVKSKWMVWMQEPAVSHVTSLATISKSKGTDQRVAIRTRCLTRCNKPRHAAYTRVISDGPKYCSTQLKVFAL

SEQ ID NO: 163021 - protein, 75 aa, Zea Mays
MKCKSTRRYDSRLSTLVFVLTYLSKCWNQRKEKKKISWLKQPRLSAVWHTGLSGGAPDSVRCARPASGEQATLEN

SEQ ID NO: 163022 - protein, 71 aa, Zea Mays
MFEYDGRREEHIYRMARVHERKTRDFDQVKCIIMKWNTFWNEMEHLLVKDDEITIFKSISRVESTRYRLGD

SEQ ID NO: 163023 - protein, 81 aa, Zea Mays
MCLAFNKHKVPTKYVGLIEDMYNNVVTSVCTSDGGTYDFLIRIGLHQGSTLSPYPFVLVMDEVTRDIHGDIPWYCMPFATV

SEQ ID NO: 163024 - protein, 76 aa, Zea Mays
MASRPKCGWGEYDDCDAPSLSSLFHNSTVATFTAMDPYDSKVSPTPNLAKAPNKVMRRMGDHGCSAYNRAAWAQSR

SEQ ID NO: 163025 - protein, 211 aa, Zea Mays
MVRSSVRPFVRSFVRSFVQIIFFLPLCCRNSDRSFDHSIVHRSFIVPIHRSSFVHTTIHHHYLPLLFTVTFYRYFLPLLFTVTIYRYFLPLLFTITFYRYFLPLLFTVTFYRYFLPLLFIVTFYRYFLPLLFTVTFYRYYLPLLFTVTIYRYYLPLLFTVTIYRYFLPLLFTVTIYHYYSPLLFIDHPITPNFNYSSIMLSSPPKTSQTHI

SEQ ID NO: 163026 - protein, 103 aa, Zea Mays
MHRFGEYTPYFTQIEYVLGWLVLSPLQKCIASMRLLAYGSAANSIDEYLKLARSTALECLRKFFEGKYCGEVPIVKLMIKREEEITYNGQVPPYYQNPKENMV

SEQ ID NO: 163027 - protein, 74 aa, Zea Mays
MSRGGCPGCVWSRASGARAARWAQGARSVSGWLQAHMAGRWRVGVAVAGSRGRHGLLGCASERGARGRREEAGG

SEQ ID NO: 163028 - protein, 188 aa, Zea Mays
METKLFLSKNFDMKDLGEADVIPNIKLIKGEDGITLSQSHYVEKVLTRFGHMDCKPVTTPYDPSYTLSKYEGEPVNQLLYSQIIGSLMYLSSATRPDISYAVCRLARYSASPGDRHWVTLYRVLRYLKGAMNLGIKYTGFTSVLEGFSDANWISDSDQMKSTSGYVFTLAGGAVSWRSSKQSVSTRST

SEQ ID NO: 163029 - protein, 84 aa, Zea Mays
MRGTHRRARAAARIGFGGGTGVVFIRLHQRAFASSSVPGRPGPAAPCCSDWIACFRSKFRRQGSTEAGALLESESWVGARGRAR

SEQ ID NO: 163030 - protein, 78 aa, Zea Mays
MPKWEKLIGQSKRTAPPLCFLKTYLPNWNYCISKTLLTSMGRTFSGGFYLAKGKAFENEGESFKLENAIEKLYPYTLG

SEQ ID NO: 163031 - protein, 54 aa, Zea Mays
MVERDPAYVASSTGSKFFGTKPRETNCPCLCANLVLRFDSSSPLSLKFSSLQSL

SEQ ID NO: 163032 - protein, 71 aa, Zea Mays
MLARYELILALPHERMSPQSPNLRLGHNLLPQVEPCSSSPLRAHHVCCGTPTWFPQHFAWDEAPASKLHCA

SEQ ID NO: 163033 - protein, 52 aa, Zea Mays
MLNKKEMIHAYLVSIYIGSIPSNHYTYIMQTSSIMHFHICFGSCWHQSPKRG

SEQ ID NO: 163034 - protein, 98 aa, Zea Mays
MADTSLFVFRRGLDMAYLLLYVDDIVLTTSSHDLLRRIISSLQQEFAMKDLGELHHFSGITVERRSQGLFLHQRQYTVDILEHAGMADCKPCMTPIYT

SEQ ID NO: 163035 - protein, 73 aa, Zea Mays
MSGRLRGQRLFARINGRPRDRRQPRQHASGQEGHVHVWCATGQSCAHPKRKVANQTIRWSLQTECLVCHRTVR

SEQ ID NO: 163036 - protein, 53 aa, Zea Mays
MMNVCGPNCFLAGENLSIQGRKWEKTKKKQKEEQDSAISSAKRNRKGKWMARC

SEQ ID NO: 163037 - protein, 120 aa, Zea Mays
MAHTLPVEKQTSKRRPSFRRLFLQGTGGRTLCEFGRGCGAGLCVGHAAAALRESEGDLSLLTSSRPAAGWRRAGGALERALNLGAGRPERERVCVASSLNVKTSNIAMYCSVISSNRRCE

SEQ ID NO: 163038 - protein, 78 aa, Zea Mays
MGSPASQHSPEPGERAAYTCKCNRKEQSPSWIPLVSGNKETSRSNEYTATARTIDRLHWPSVVRGSCKLPKTCARARV

SEQ ID NO: 163039 - protein, 76 aa, Zea Mays
MLSHNLRCSSSSRMACMLSHNLCGVTHEGPGQAAFIVIKIKHRSTGYTVPLPHVLGVAGAQLSSAPGRQPPHSSAH

SEQ ID NO: 163040 - protein, 96 aa, Zea Mays
MADGEDTGHARPQHPMKQSRFDFTKVDAAFLPTITGRSWASPPPHRHLLCPPPPTLVLSFGSDHRRWLLSPIVRPSPLPLPNLPSIRSPVRFALIS

SEQ ID NO: 163041 - protein, 79 aa, Zea Mays
MVIPFCAPEVAHLIHQGLESVVHGLWLLSLVKHESTELPLDRLPLSDLCHLISFVRGFEHVPNLFSTLQPLHLIILLST

SEQ ID NO: 163042 - protein, 143 aa, Zea Mays
MELNIHLCATDGEPLEDPNHYCHIVGSLVYVGVTRPDIFYSVHNLSQFVSASTQLHYSHLLWVLRYLRGTISRRLFFPRSNSLQFQAYYDTTWASDSSYRPSLSAYCVFLGGSWKTNKQAVVSRSSVEAELHDMALVTAEVVA

SEQ ID NO: 163043 - protein, 77 aa, Zea Mays
MDKGWRLECHTAFQTESRGDRGKERGKDCSPEREGIMESTRSPERRRWGEDRQRREGDARDSEHGWWGRKTEPLVQM

SEQ ID NO: 163044 - protein, 61 aa, Zea Mays
MSIFMIPYSIEHIFAKASKKGVFGLRIPFLIIELITYKICGISRFGEPLCGGFIDTNVYSL

SEQ ID NO: 163045 - protein, 110 aa, Zea Mays
MLFNQSSSGSTNLSPYLNVYFSLTSPPSSVSLTVSFGISQLSASGHTLKAICSCIKSLVPIKEQTMPKARWHSSATSSISTFSFWSPKRCQIGHMIISLISSRTFKSFFT

SEQ ID NO: 163046 - protein, 67 aa, Zea Mays
MGTGQGQGNAGEGTSLQRTWDDFFFFFCRFSRHLARAARRAWRRVRCRARARKWPLASRGVVLKILM

SEQ ID NO: 163047 - protein, 56 aa, Zea Mays
MWKPPALGLYFEEKKYKDMICLNRNCKGSNYNTSQNHYLHQLGFDYLMKIMSCGDE

SEQ ID NO: 163048 - protein, 58 aa, Zea Mays
MPLRFVFVSVNLHLPLSVMIEFNNYVLPAKQQIKLDSTTAVHKWCHQIWTSSPGRGLW

SEQ ID NO: 163049 - protein, 60 aa, Zea Mays
MPCPKRREEEKRREERGDEGIPSPIIVVPLQELVGFPFLSLFYPLDECFPLFWMSFRPCN

SEQ ID NO: 163050 - protein, 50 aa, Zea Mays
MSQWLPHRSCFQAGGGQGWTSTGSPQAYSTGTNPYGKREILLLLLVVYVV

SEQ ID NO: 163051 - protein, 306 aa, Zea Mays
MVLVTTYLQPDPCLFRSVPPPSQVPTPDWGLQHVLAPPLGHQARGRRPSIATPPFICAQLVEGEQDTRVEGEHLPGLKPTVRARRVLVLERMSLHVGPHSYLDWLPSSMTVADLSANRGLVSSRSRHLGYPLSPDTSSSKVLPLQTILPMSSDVVAKSKSKRSFDFERWARPGVIATSHMITKLAHARTFFRCIRCRCLGHQERHCHFRSSSRARRVKSSVQCDHPEQSGTWSTEVVAKSSPSTLLSADTVAKSQSHGHLNPPSASQPSVSVVRTTIMFVVGVVPLLPRHLCTFIPWSPLWPSRCG

SEQ ID NO: 163052 - protein, 60 aa, Zea Mays
MGWGLGVRWWPGLPGQANPRIYILYRGARAGVAMGGGTGRDAVRWTRTWTSTVVECWNVG

SEQ ID NO: 163053 - protein, 73 aa, Zea Mays
MGPCSCCRRRSHRRLRSGWRRGRRQHLDLGVTSQQSLRPIDSIDQPLRLSSSQVGLIGEHVVVAHPLEVDLVV

SEQ ID NO: 163054 - protein, 88 aa, Zea Mays
MYKGETSSSRQPTRAKLPKKKTPIASNDHDISFKTLDASYVLTNKSGKVVAKFVGGKHKGSKTCVWVPKVLVSNAKGPKTVWVPKFKN

SEQ ID NO: 163055 - protein, 66 aa, Zea Mays
MELLMTYSSTTLLVAKILRWCFSNVIGLILIKGDSEDVVSPNKRKRKSRKKTSNRRKQFDPDFEYD

SEQ ID NO: 163056 - protein, 64 aa, Zea Mays
MIKESMCDTAIDYAHFFFLDPETEHPRFSILTRIRLDNFRDYSGYDVHGSDRHEFGFDILICSA

SEQ ID NO: 163057 - protein, 104 aa, Zea Mays
MKEGFSWSDEAQAAFQDLKMAVTSAPVLALPEFTKVFIVECDASTHGFGAVLLQEHHPIAYFSKPVAPRHRALAAYERELIGLVHAVRHWRPDLWGRAFLVRTD

SEQ ID NO: 163058 - protein, 95 aa, Zea Mays
MQMPEFTGLQSMAKTRFRVQFCPILFAKKGGLFCQESMLLLLSNNAIGNSEVLARYKCNVQFVGKQERYVTSTLRPICSVGFEFHSNNYNLNKIN

SEQ ID NO: 163059 - protein, 78 aa, Zea Mays
MERRKKDGFCFLGAKQLVERSASCRRRDAYPAGLPSCLRIPIRTHGAGGDGETTRRLIGARTGESATGRSTCMNSRST

SEQ ID NO: 163060 - protein, 58 aa, Zea Mays
MQKKKKKTDLTQLLVATSFGSITMYTHIDEYEWLSVEQTLILAGRGVTIICSITWSEF

SEQ ID NO: 163061 - protein, 62 aa, Zea Mays
MYRCCEGVYRSRHFASKALIYEAKKRRFQRTYSARKEEERRYCPYDTCEHTCNFIQSYIALL

SEQ ID NO: 163062 - protein, 51 aa, Zea Mays
MQVEVPIVFGLSLLIILSPYQPNLGKSYLIIFLRLMPLVSPSFSKAYQLNP

SEQ ID NO: 163063 - protein, 298 aa, Zea Mays
MAVLLPAAGRRAPSSSLCSRPVPRSSPSFSPLFNGRRPCSFFCAVRLLSLFPALGLAILTAVAGRTSLCRCSPWSRAIAQLIRLELCAPSRATSSARACPLLTVLSYLSPFGTSLCPCTRSCVNVASWFAQPCTLCSPMEVRRVLFLLGRAPTEPPMAAPWDLPESASLVARLRAAHALLAPAAGCRALCGLSSSLRTLSLLFPCLPRARILSTRHSVSSSHAESFSSSPRRPVCCLLCSPASFACWSHSNLIWNYCVSALICRGRRQIVSRSTHRSHLSRSSISCSPWYNTAVKSSL

SEQ ID NO: 163064 - protein, 69 aa, Zea Mays
MKRSLMPLQSCDAWGMMPSLLVSSALPQLPLVAGPPPCVNAYHRLGLDWFGALSHSCSFLPAPLALSLF

SEQ ID NO: 163065 - protein, 147 aa, Zea Mays
MLRIPPPRVIGETGFFQMKKSGNDSARRKRLLIGKREPEQAGKETAAEEGEDDGIQEPRLETTHLVERTSGEGNGGQRRRFARASSCGCAARGYYTSSDAGDAGLRGRGRGGTRGCIGLVRFVAAQIVKVYRRGWRICYAGRLTKLD

SEQ ID NO: 163066 - protein, 65 aa, Zea Mays
MVEVLSCIKDWELADQHKQHTVEKETKDLEAIFEAMYLDDEQELSPGSKRKVQEGSKDEQGGRRK

SEQ ID NO: 163067 - protein, 74 aa, Zea Mays
MPCSLPILFPATQKRCGKKSLWFDAAAWLHETVDSPSLYSHVHTSTGARSVVDLICGGEGKGRRRASWLAKVSS

SEQ ID NO: 163068 - protein, 58 aa, Zea Mays
MLANLLVSVQEGTFSRIMNQRIFFFFLLFGAWHAMCRLCCTERKRTEQQFSGTLITHA

SEQ ID NO: 163069 - protein, 51 aa, Zea Mays
MFTKMSNTRSSGYPLLNIAEDGVHGVISLYCLVDSWVWRSLDPHHLPCFDH

SEQ ID NO: 163070 - protein, 99 aa, Zea Mays
MALINSFNFSFCFMFKLAKRVSKLSSLSLEFSSSLEVAYLVEDLVFTFFFLLSFAMRHLWPTLVKRRPLLTVMFAASSSVKLSSESHSRQTWASSPFFL

SEQ ID NO: 163071 - protein, 70 aa, Zea Mays
MNRPSSPSIVSLLVILVTSSPSCAVLSTSQIYLADSNPCTLLYSSRLKEARSIVVAWELKCRIWSASSES

SEQ ID NO: 163072 - protein, 83 aa, Zea Mays
MKWQYLLKRATTERMTVFPCTRGSASTKSIAMSAQTVEGTGSGCSKPAGCRCSDLNRWHVVHARTKSCTRHLMLGKWKSRRRR

SEQ ID NO: 163073 - protein, 65 aa, Zea Mays
MEHAHVMKMGEVRRQMDSAGGGETADARARAVCSGKQIRKKRKIIEALFGRIKFLMNTITEKIML

SEQ ID NO: 163074 - protein, 258 aa, Zea Mays
MDVYFQPLVDDLQDMFVNGARTYDASKGEFFKLRAALLWTITDFPGLGYTSGSVTSGEAACPDCNYHTCSLRLSNGSKNCYMDHRRFLLDDHPFRFDIDRFGKTEFRPAPTPLSGEQILECTKDLNQTFGKDPSRKKPTNKRRRKGEPLVILKRRSIWFKLPYWKDLLLRHNFDIMHIGKNVSESLLNTFLGTDGKSKDNLNSRLDLQALGIRSDLHPIEVEDQLYLPPAPYSMSPAERKLFCQVLKGVKFLDGYAAD

SEQ ID NO: 163075 - protein, 59 aa, Zea Mays
MSPSQSSLLSSSSISSALRGHILTELLSSVFKFSSGDQELAPSTVGGWEAVSSRRKVLV

SEQ ID NO: 163076 - protein, 406 aa, Zea Mays
MTTDRPLELLHMDLFGPIAYISISGSKYYLVIVDDYSRFTWVFFLQEKSHTQETLKGFLRRTQNEFGLRIKKIRSDNGTEFKNSKIEGFLEEEGIKHEFSSPYTPQQNGVVERKNRTLLDMARTMLDEYKTSDRFWAKAVNTACYAINRLYLHRILKKTSYELLTGKKPNISYFRVFGSKCFILAKRGRKSKFAPKTVEGFLLGYDSNTRAYRVFNKSSRQVEVSYDVVFDEINGSQVEQVDLDEIGDEEAPCIALRNMSIGDACPMESEEPPNAQDKPSSSMQASPPTQNEDEAQIDEGEDQRDEPPQNDGNDQGGDANDQDKEDEEPRPPHPRVHQAIQRDHPVDTILGDIHKGVTTRSRVAHFCEHYSFVSSIEPDRVEEALQDSDWVVAMQEELNNFTRNEV

SEQ ID NO: 163077 - protein, 56 aa, Zea Mays
MTWRCTGHCPVAHRTVRCAHRQQPSPTATIWLVVTNTTPTGHFKVWEPKQHSKSSS

SEQ ID NO: 163078 - protein, 322 aa, Zea Mays
MARRRSQKNKKTKENKEVTLEILLSDCSNYNSWSTRVINAFRTIDPQLEQILDKSIIPFNYARENASEEDLRCIRLNYLAYDILSKSLSKEGYHAFIIKYDKPICDVHDIWTRIKSKFDESKHDSSFCASTSFCFCDTNPCKEEEENDRWRPNDESTSPRGLSSHFDSHICCVANENDSGSTNEDEEEERSFMQLYARLSQEDKAIMLKLLERAREQSEARQKLENVLFMKMLHFDELTKEHEELKCSHVDLVQRYETISIEQDNALHCIAQLVNRNALLKDQVEKLKYENLAFQEKYDMLLLGAFGLRRSSKIGFNNISGV

SEQ ID NO: 163079 - protein, 80 aa, Zea Mays
MPVTFGTPENYRTEFLRFEVANFDCGYNAIIGRPGLAKFMAIPHYTYMILKMPGPQGIITVRADFQGAAECFRVAIQAAL

SEQ ID NO: 163080 - protein, 96 aa, Zea Mays
MRQSGSGGRVDCPIGNPVPPMSLASSDPHEHIEVDLLGARIIFCAMDLLRHGGVVMKAGVAVGLGPVIRVVGDVGRHLALMGHSIGREDGASPTTM

SEQ ID NO: 163081 - protein, 161 aa, Zea Mays
MNGLSATFRFPGSGSRGSWPSARGRTLAGQGRAWSRDTARGIFVGAASLGRAGSGAAWRVGGSASWVARLGAGWRGVARLRASRLLRAVSWRGRSTRGAPRGCSAPVERSAAARLGARPAGGGRRAAWRRAGWPERHWVREESRGGERNGRGEGERSRGGG

SEQ ID NO: 163082 - protein, 83 aa, Zea Mays
MLGILYFYDVGLTYFLLCSALPVETSIYSYNPAISSELTDLFLSLVLIPLTDLFSYLYFFDVTCCRCYPPLMHYMTITRRIRC

SEQ ID NO: 163083 - protein, 74 aa, Zea Mays
MHFPARECADGGVGPCGNGPAQGRFGPDDDFSFSLFFSVSNFFSLFLFSVFVFLLSLKFKIQNSNLLCGKASSD

SEQ ID NO: 163084 - protein, 52 aa, Zea Mays
MCVHHAHLYSLTSAAAGYVTYVTENDTHAPNETYTCVSYVVNNKAYVLYILG

SEQ ID NO: 163085 - protein, 64 aa, Zea Mays
MVVGVSSTRYTMKSLPKDFSTLCLLLLLGASLSSSSRTISCGCSKLSIGVLCSGIISEEYLELL

SEQ ID NO: 163086 - protein, 195 aa, Zea Mays
MASFKNQAGTASAPKLILPITGGPCSEPANKKQKKEAQRRVQHVGVQGPFIKSRWSHIPITFSQEDLQLKDYPHNDAMVISCVIKGFLVHNVLVDTGSAADIIFAKAFRQMQEPEDKIHDAIHPLCGFGGRQIVAPGKITMPVTVAEPPKLLGPHAPVLVSKTSDCYACASDNLTGSVRLPQGHRINHEQPEPRD

SEQ ID NO: 163087 - protein, 71 aa, Zea Mays
MSHLLSTLMCIHPFLHTKHQVVPTATNAQENMNAMRWISRTSRTSRSSRLRLAQSPVSCLWKAFILATFCF

SEQ ID NO: 163088 - protein, 241 aa, Zea Mays
MPCLLPCARRGRLQLLLPAARSTSLHRAVKVCVSLLGFRPPSAAPQIPAPFQLCRAPGRLLLLCSAPLRLLARFLPWPARRGCPAPAASSSLSLSSFQAAPSLSRLCAARPGVLCSPWPCELQRRALLAELLQLAGALCRAPSPPSARALLLPLQLQLAARPASCCRELQPRFRLVAQLDSALCSSSPSPLRAGRLVCHGRVQFPARPGWSRRRSRLSPFAFVEVARLCPVRVLLAFASRA

SEQ ID NO: 163089 - protein, 67 aa, Zea Mays
MGRPGVLLTFLCFRRGLRTIRRHGRTRGTIITCYRSNLDGTPVLFLGSLRQLARGRVMMYMYPLWRG

SEQ ID NO: 163090 - protein, 129 aa, Zea Mays
MPFSLFWIISRAISRPPLSQTSVKNFPPTMLASAEGSFASSKGKVASDCAKIFTCSQPFFSKMVAIPLAPEKAHISPRLFKISSKASASWLIHSMGPSGLPLVKFSSLENAPTLAKLVFIFLTHSIDLL

SEQ ID NO: 163091 - protein, 52 aa, Zea Mays
MKNLHKLIKGEHILGLTNVHFEKDRICSACQAGKQVGVHHPCKNIMTTNRLL

SEQ ID NO: 163092 - protein, 63 aa, Zea Mays
MALVILGLLSSISTSISDLNCDPFKMLINSIFWFKYLVETIHLLRCFISLLHYSMQVLDSCWE

SEQ ID NO: 163093 - protein, 55 aa, Zea Mays
MNFYGYLNRYFEIFKKKKKRKRKKTQNLIYLTLAGPFGPAAGRLLSFPKPRPAPS

SEQ ID NO: 163094 - protein, 115 aa, Zea Mays
MYPASCNFVTCFLSSLNSSTNILYGLLEIGAVLGKRSITNSTSLSGGIPGNSSGKTSRNSLTTRMFLPTNLPSTIYMASLVEGVMVIMTSNLSPSGLVSPTVPLAQCITNCLCFT

SEQ ID NO: 163095 - protein, 98 aa, Zea Mays
MDQAVSLAARSRRFESSFYPCKVNLNTRRGEALRPHTHQPSPSIPRQQIRAHRLGVQCLTDPDWPSCSDRTCTHHNRNGRPRLRSREGICPLPGSLRY

SEQ ID NO: 163096 - protein, 89 aa, Zea Mays
MILIKFVVLCFIVFLCASPSCELVVFDPGKWLYRTRSEGLTGYSCLSVLLPLRVRLGHLSWNNSGGSATAGIGANTITEKSISHDSNLF

SEQ ID NO: 163097 - protein, 97 aa, Zea Mays
MRKQMPSQREQYRSIVHLFIGTGRSPCKITSRPFAFDNNSIVIHRGLDSLFLFKSVSFFLSSCRSFPPHIFGSVPSFVLLVFLHAVILTQVRRVHVL

SEQ ID NO: 163098 - protein, 289 aa, Zea Mays
MTSHGSLGDGNALSHTNGLAREGFPRILWEVLQGAGYTTPPQYAVQQFEKHRVPRCRVRMTLEPHPLQPGWRSLDSESFGYQAEDTIEAIALHGLTTFCGFHPLELSTHPIGLFPAEKEDDPMWKDRVVHAKDIWAIYPGQTAHLTVRCMNAMYRLQVMRGEAMSHLMALLEATKITLDNREELVVDLSTEMVVKDLQVEQLSNEIQELEELVGTRENTIEVLEDQLINTQQQLAEANEHLNMHHQEIQDMEANEDVDIEGGEEPASSLDTAGSGRPPSPESSVASFAH

SEQ ID NO: 163099 - protein, 142 aa, Zea Mays
MADIPEGAPVMTGIFTVLNYPAIVLFDSGASHSFISTKFSAKCQLPFHHTNGGITLSTPGGRVATYQINKNVPIKFGSLIIKTNLLILGLDSVDIILGTDWLIKHQAVIDIAARALKCTHRPVVKPHYICPTRDVPVLVPSL

SEQ ID NO: 163100 - protein, 50 aa, Zea Mays
MLKVKENRKGDLIKEPGGTPIFVRVLIQYSSLEKFIILWFGTKYLGYLLF

SEQ ID NO: 163101 - protein, 77 aa, Zea Mays
MPQSDPNSVYTTIETRQTQGKSLTETSSCRVGRPRRCVGSLCPNCSSEQSALAPPMLRFDWAPSGLHTLPRCFKAWH

SEQ ID NO: 163102 - protein, 54 aa, Zea Mays
MMMTSPNLEVKFLLLCGNFSLRNCEVCIISSSYTWFDIKMNPEHGRQHTELLLH

SEQ ID NO: 163103 - protein, 116 aa, Zea Mays
MTTDRPLELLHMDLFGLIAYISIDGSKYCLVFVDDYSRFTWVFFLQDKSQTQETLKGFLRRAQNEFGLRIKKIRSDNGTEFKNSQIEGFLEEKGIKHEFSSPYMPQQNGVVERKNR

SEQ ID NO: 163104 - protein, 207 aa, Zea Mays
MIMIQKFEMSMMGELKYFLGFQVKQLQEGTFISQTKYIQDILTKFEMKDAKPIKTPMGTNGHLDLNTGGKSVDQKVYRSMIGSLLYLCASRPDIMLSVCMCARFQADRKEVHLMAVKRILRYLVHTPKFGLWYPKGSSFDLLGYFDVDWAGCKINRKSTAGTLSVSGKIPDVLGFKETKLSGSFYRRSRVHCHRPLLRAIALDEANP

SEQ ID NO: 163105 - protein, 79 aa, Zea Mays
MSALETFRQQIDGRETAVSRGRRSYSRSSTTLGPWWGQFNEKNCLTPLLPSVRPTTVKAEPCARPGRIVKKKKEKVKTC

SEQ ID NO: 163106 - protein, 80 aa, Zea Mays
MLSRSSLFSSPSSRCRAPKTARSRHRVADARVGHGETLRVLVSEPARPQPRFALCVAVRRVKPHVAGLSCRAIIASVASS

SEQ ID NO: 163107 - protein, 87 aa, Zea Mays
MKHLSKLIVLTRYLNHIELINILKESQSRSEILVDIELSSHNITNTISFPRTTIICCITLPCINNTCKYHFNVCIGMQCVGHLSSYL

SEQ ID NO: 163108 - protein, 81 aa, Zea Mays
MRFGVVRLQPAFCIVSENQCGNSKADFFFFFLSSNCYFHSVMAALGHAGVLFGTGLVLVFFCDFEHIGILHVIYCASEISF

SEQ ID NO: 163109 - protein, 76 aa, Zea Mays
MQRQKSSGASFLFSHKTLGGHPFSLHPPLLATTLPPFSLGWPPPLLQLQPPTISSSSLDLSLPHAARIEKRRSKMD

SEQ ID NO: 163110 - protein, 97 aa, Zea Mays
MALDILGLLSSISTSISVLNCDPFKMLINSIFFGLNISSKQFTCRDVSSHSCITQCRYLIHVGNKGSSSTSTFTLIITLPRHNHDLIRNFLSKDVCF

SEQ ID NO: 163111 - protein, 67 aa, Zea Mays
MSNQKKKSTALVANVIHKIPNPQNNNWMREKKQQKKTTPNFSSLHTGYHILPLLKRIRPRILTLLSE

SEQ ID NO: 163112 - protein, 74 aa, Zea Mays
MMILVLAFRRALEVSTRACFFTSSWDSFVSVNTSRGEVTERRRQDKGNRGAFDRQLKPTPNRAESAGPRQIEHS

SEQ ID NO: 163113 - protein, 62 aa, Zea Mays
MLRPKSLDFGGHNRREGPRRCAVGEVSHLQNTRKTAAPAKPTKKRKKKKKKKKKHQSLAQRT

SEQ ID NO: 163114 - protein, 67 aa, Zea Mays
MRSLFLPVIMCFWRLWIMGIKGLEVGLDVGLGFDLEFSFLQNGRFDSFCSCQFSVVLMASKNYKVYI

SEQ ID NO: 163115 - protein, 60 aa, Zea Mays
MKTNLVVTGGQVQTGEPCSMSQLIQEFLYHRYRKCSLDCQRIQVPKIHTKPPRAIFFLNQ

SEQ ID NO: 163116 - protein, 52 aa, Zea Mays
MGHRCKSLIIVNTLSLLKTSGHKTSFILLNKPIRFGFNLEGPFARDRYNTSR

SEQ ID NO: 163117 - protein, 53 aa, Zea Mays
MSLLEPSPRKARAFDSSRWSSAAAAGAAGDGSMLACARSRASSSASACATLAW

SEQ ID NO: 163118 - protein, 71 aa, Zea Mays
MAHNPFPTSTHRRSTFGNNFFGILHSTPLKKNSSSNSSTPNKTSKVPHIAPPFQNMGPLLVLINTRTSTSD

SEQ ID NO: 163119 - protein, 97 aa, Zea Mays
MHQLFNTQLLSPNASNKVIKILKQQGGGKCTGACLHNTTLVLLDADYLTIILVLALDQAGSSISTTMRSSPRLGSTWLVFRITRLINVPHGMHNAHL

SEQ ID NO: 163120 - protein, 58 aa, Zea Mays
MRSGQRRSPRFAGHQRNNPFRVFWPQLGVPGSACLHKEAWAPGSCPFNIRCSAKTPPP

SEQ ID NO: 163121 - protein, 56 aa, Zea Mays
MQQHGFENHVYEVYFRKSYLSKEKDSQGYAGFWESREGLTRFKDSILQKCLLTVDP

SEQ ID NO: 163122 - protein, 85 aa, Zea Mays
MPSRRARPSPGSAPLSLMRSALSSSMHWRRLSRSSICYSPWSSRWLPIGASPARQPSCPFCPLSRALLCPPRCVVVELLACCCGI

SEQ ID NO: 163123 - protein, 54 aa, Zea Mays
MAAAHHFFLLHRSFPPSRSKDREEEEQDGLKRKRGSRRCSTPPIYCRFSWGNSR

SEQ ID NO: 163124 - protein, 142 aa, Zea Mays
MASNRGISSSYTWGKIVQTNPFKQGSWFKFLEQADIGGWGAPPPRISTPSRGTWGNVCRRSPYPDHTKQLALTDEFARVCCRNLHHQRRRLSRCRILPWLHKENEHATVGINAGNHSDARARVGTLLHANLQGIRLQMRGGE

SEQ ID NO: 163125 - protein, 68 aa, Zea Mays
MPLFDWRKLISLIPACLFLIITSLFYRPNLGKACLIIFMSLMPLISSFLSKAYQLNLMIIFTPHLVRY

SEQ ID NO: 163126 - protein, 73 aa, Zea Mays
MCFFYLELLLTRRNGDRRGVRPSRGGAGAQSRRVRRGRRGSTSSGRGRRRSSGGSTRRRARKREESVRKRGSS

SEQ ID NO: 163127 - protein, 57 aa, Zea Mays
MLHQMHYQHLTTILIITGVWNRAGSTVGNNGGGRAKPCASPRLCMYWNISAILASIY

SEQ ID NO: 163128 - protein, 182 aa, Zea Mays
MAALRRRHPIACLATTVVVAQRWRPLSHSAGATFLPWCPPMPHSSSLYLYARVLGRDGACLRARSRRRSSARSTRGGALAHLAAASTVRVHDRGGARLRGCAVVPRPHALLWCLASRSFKPAIKSALEMLFLAYVFISEGREGLKNYRNFLLQVNLINSPLLCELLDHKSNHADNMLRTLCY

SEQ ID NO: 163129 - protein, 154 aa, Zea Mays
MCPFQIVYGYIPRAPIDLISLNAANAPHVDAAAHVEQMITIHEQTKQNIAATNAKNQVAGSKGRKHVTFEPGDMVWLHLRKDRFPTLRRSKLMPRAAGPFKVLTKINDNAYILDLPAEFGVSTSFNVADLKPYMAEDEELSSRTTSLQEGEDDE

SEQ ID NO: 163130 - protein, 132 aa, Zea Mays
MLDGMPNREVIASCVGESSFSSFSVCVALPEPRCHLPTACPCPLDVLVALVNPASILVVDIVLAGGQSSRRPLPHWIRVLARARANVLDHTSPARSILNLVVVPCVIKKTQESGEDKVSGVIFTKCSTQGLN

SEQ ID NO: 163131 - protein, 68 aa, Zea Mays
MSAPVFRGGLSWPRDVDGPAGWFLAQSRFFSFFLFFFFSVLFFLFIFESPISNSNVCGKFVLKFECMI

SEQ ID NO: 163132 - protein, 56 aa, Zea Mays
MFTFIFCLFIEYHHLRMFMFHGFHMLSLRFDHVTQVVIMWNGWKYMTSTFLFGKNL

SEQ ID NO: 163133 - protein, 70 aa, Zea Mays
MSGEKMSQEEMVVAETKLTEEAKLFEKKQSVDPYVAGFIESMAKTNTEKITKEILEGLSEDTGDSDSYDA

SEQ ID NO: 163134 - protein, 58 aa, Zea Mays
MDNNFAAEPRIGCHGNLRENQAPTCSVSRLNTISHGTVSTPDQTASAAVLTADDRSSP

SEQ ID NO: 163135 - protein, 98 aa, Zea Mays
MKLKYLFESCCMKCCRHVMHIASSILHLKLYRDLMVRPYRYTFSIIRCPRRGTMQLHILRGMKAEVILAFADICTHEVYMKCDITMLLLWFLPARCGN

SEQ ID NO: 163136 - protein, 83 aa, Zea Mays
MVPKSLAGAADEQWIRRLHSWTKPCKFIADRTEYSRSGLGCVRRRSRRQDDADGAAANTLCCALTAKNSGAATNGADAGVAAA

SEQ ID NO: 163137 - protein, 64 aa, Zea Mays
MVRPYRYIFSIVRCPRRGTMRLHILRGMKAEVILAFADICTHQVYMKCDITMLLLWFLPTRCGD

SEQ ID NO: 163138 - protein, 64 aa, Zea Mays
MVRPYRYIFSIVRGPRRGTMRLHILRGMKAEVILAFADICTHEVYMKCDITMLLLWFLPARCGD

SEQ ID NO: 163139 - protein, 58 aa, Zea Mays
MAQSRSHSQESFGVIAEKETDLKGKRLFKPRWITIELLANVKGMGVILHGLHPVPINR

SEQ ID NO: 163140 - protein, 127 aa, Zea Mays
MAAPSLSPLSSPLRVRPLVSSLRRARSFLCVPAATSLWCFLPARAKFPCSLALGPCSTVPCCFSARVKFPCRVRLGRKPVCPRRACCSPKRPMLQRPYFSMSFHVVIVSVVSSSVINKQPWSCSSSC

SEQ ID NO: 163141 - protein, 224 aa, Zea Mays
MQPTCLLYPLPRAQFPYPQSPAAVHSLLPAALPASLFPAASILYSPLQAVLPRCGISLCPAELAPAPSCCSSRPPAPLLAWSSSFLVPVPCVFPVTSMAAPSLSPLSSPLRVRPLVSSLRRARSFLCVPAATSLWCFLPARAKFPCSLALGPCSTVPCCFSARVKFPCRVCLGRKPVCPRRACCSPKRPMLQRPYFSMSFHVVIVSVVSSSVINKQPWSCSSSC

SEQ ID NO: 163142 - protein, 74 aa, Zea Mays
MVKAGPNCPTHSFFPAVNSELTSFSSYCLFPNSKAISSRHHVVVNSFPTSVAYMWGHVVSCTSSGSNRSHLPEF

SEQ ID NO: 163143 - protein, 55 aa, Zea Mays
MVSTSSFKNFRFFGHPSEKLCPFYGRYLKLCSKNDRDETTVSFLLRYLFFLFFLT

SEQ ID NO: 163144 - protein, 82 aa, Zea Mays
MTCTSHPPSCILKLCRDLMVRPYRYIFSIVRCPRRGTMRLHILRGMKAEVILAFADICTHEEYMKCDITMLLLWYLPARCGN

SEQ ID NO: 163145 - protein, 350 aa, Zea Mays
MAKEKKVSNRNTSTYASSSDDESSDDEIDYACLFKGLDRTKIDKINELIDALNQKNRLLLKQEDLLYEEHDKFVSAQNSLALEVKRNEMLSCELSTCHESISSLKNIIDDLSAKLEIANKSTSCVEHVVICNKCKDFNVDACHEHLVSISKLNDEVASLNAQLKTSKNEFDKLKFARDAYTIGRHPSIKDGLGFKREAKNLTSHKAPISAKEKGKAPMTNSAKKNHAFMYHNRRNSRNVHYDRSYNAFDSHTMIASSSSIMHGRNLARKNVIHHMPRRNVVHVPRNVCNEHSTIYHACNASFAICRKDKKVIARKLGAKCKGDKTCIWVPKAIVTNLVGPNKSWVPKTLA

SEQ ID NO: 163146 - protein, 91 aa, Zea Mays
MRQTLRDFGYNLSKVPLLCDNESAIRMADNPVEHSRTKHIDIRHHFLRDHQQKGDIKVFYVSTENQLADIFTKPLDEKTFCRLRSELNVLD

SEQ ID NO: 163147 - protein, 95 aa, Zea Mays
MRKRWGGLGLRGGVAITWGRRRGIGAAARVEERGEGRPKGWGSEREGAARVKGEKLMGSPPPDRDPWPKLALTSAPDPSAQIQQVFYCFIGECFL

SEQ ID NO: 163148 - protein, 101 aa, Zea Mays
MARAATTGAGVTLAKAQHPCGCCSRIAQCRPRPQIVVIRRRCTCRSRRHTILVVVVGQPTSFSNKFSTSIISHQKIGHPSTRWVYQVVSISGYSVRDLNLR

SEQ ID NO: 163149 - protein, 130 aa, Zea Mays
MTMLMAPATKTLRNKEVDWGPSNDISNIFNKASTSSNLKIYLGEEHTIESRTTLLQEGEDDEDITAINTPHQRPPSPFNHGPVKRVRAHKFNYQVNSFLVVEANHSLNEVLIPCDYFIMLRCLGGEPSRI

SEQ ID NO: 163150 - protein, 99 aa, Zea Mays
MTQTGDEVGSVEMCVREGELAVPRIDDVIRDGWARRRATDSPSAQHDVEGLVTHLLLEEALLQSSTQELRGSVRMRAGRGLASLAVGRRGRYGRAVAGR

SEQ ID NO: 163151 - protein, 52 aa, Zea Mays
MLILFWPEPRQVCPGRHCEPPLRGLTKPCPSRANSCEHRALDRSPILTIALG

SEQ ID NO: 163152 - protein, 60 aa, Zea Mays
MGRLHPATGPTPHLLLLHNPPSPFLFLCSFSLSPRQVGPFASAPSIPCILTRVPPGTLRC

SEQ ID NO: 163153 - protein, 56 aa, Zea Mays
MSCEAMETVESAGLEAMTECYRWAHRSASHGHSRTGIWRTVERPMSSGGQWATGTS

SEQ ID NO: 163154 - protein, 50 aa, Zea Mays
MCLQPHHLTLAPPSPPLQGAIPCRLDLRRVVQVPNWFWWREKGRKERGRI

SEQ ID NO: 163155 - protein, 59 aa, Zea Mays
MLVEAEQSSHVAAVTIPLELNVRHGQLDVREQQQLIKGFGLRVELQWLRGNRVDVVGAQ

SEQ ID NO: 163156 - protein, 75 aa, Zea Mays
MILKSPWVPPFLLPFFLLPPSKRQWKTRTHTTGYQAGRMHHGEEEGGRLGLRGGAAITWGRRRGRERGGGGHKGE

SEQ ID NO: 163157 - protein, 75 aa, Zea Mays
MNAYECNAYVLCLHTSKGMKPHRTPPRATYDAKLYRYGRTIGHDKISDASESCNVYGMLHLSIYITSFTYNTNLK

SEQ ID NO: 163158 - protein, 280 aa, Zea Mays
MDTKLNFSSTYHPQTDEKTERTNQVLEDMLRACALKHGRSWDKSLPYAEFLYNNSYQASLKMALFEALYGRKCRTPLYWNQIGESQVFGPDILQETEKQVQIVRENLKIAQSRQKSYADNRRRELIFEVGDFIYLKVSPMRGMKRVKVEGKLSPRYIGPFKILERKGEVAYRLELPDSLSDVHDVFHVSQLKKCLRVPQEQLPMEEINVNEDLTYSEYPIRILETSRRITGVKLSTCVKFSGVIIRKMRPLGKEKMNSKQNSPRYSQKFLNLEDEILLRG

SEQ ID NO: 163159 - protein, 426 aa, Zea Mays
MGTQGLDVILGMNWLYKNQATVSCDKRTTKLVSPSEKEVVTKLYLPELEGACHYLSVDDKEDNPVEDIRIVSEFLDVFPEELPGIPPKRKVEFVIDLIPGTSPISKRAYRVSGPELVELKKQIDELLEKGYIRPSTSPWAVLVLFVEKKDGTKTMCIDYRSLNEVTVKNKYPLPRIEDLFDQLREASVFLKIDLRSGYHQLRIRPSDIPKSTFITKYGLYEFTIMSFGLTNAPAYFMYLMNSVFLDYLDQFVVVFIDDILVYSQNEQEHEEHLRKVLQRLRDCQLYAKLSMCEFWISEVLFLGHIINRDGLVVDPKKVAVILDWKAPKDVRGIKSFIGMAGYYRHFIEGFSKIARPMTALSAKKVEFKWTLACQESFEMLKKKLTTTPVLILPDVHKPFSMYCDASYIGLGCVLMQEGKVVAHLSH

SEQ ID NO: 163160 - protein, 262 aa, Zea Mays
MRRELRPSEENSRVRQRRRPSAAVGVAVAARRDRDHRFGKGRATARRATPGTTLVKELACSGNQERRDTQGVCCSKSEHGEMDRTERRGELEGRVATREEAAHGDGSSGATSKGTPSRTRTRREIPAGRHGCRRLRMGKLDGWASKGELRAAMEPSWLSREGGEGAAEQERRTEGLRPGTRREVDAEGKSLGKQVGRCSSRSAVQASTPGRETQRKSSAGSLAGGNSSRAPVNRESRGRGRSWGARRPRLVSGWRRREACVR

SEQ ID NO: 163161 - protein, 262 aa, Zea Mays
MRRELRPSEENSRVRQRRRPSAAIGVAVAARRDRDHRFGKGRATARRATPGTTLVKELACSGNQERRDTQGVCCSKSEHGEMDRTERRGELEGRVATREEAAHGDGSSGATSKGTPSRTRTRREIPAGRHGCRRLRMGKLDGWASKGELRAAMEPSWLSREGGEGAAEQERRTEGLRPGTRREVDAEGKSLGKQVGRCSSRSVVQASTPGRETQRKSSAGSLAGGNSSRAPVNRESRGRGRSWGARRPRLVSGWRRREACVR

SEQ ID NO: 163162 - protein, 53 aa, Zea Mays
MICFTEVRLLQTYSPLRWSQRPGLFQPFPSLKRSLRPSELLFSIKRDTKSLQG

SEQ ID NO: 163163 - protein, 65 aa, Zea Mays
MHILVQLQRRYFKAVQTTPHYAHKTNQTTGELNILISSLSSQTTLVNSASITKNSMLALSKDLLF

SEQ ID NO: 163164 - protein, 70 aa, Zea Mays
MHPNPTTSTERQWRQGEGRDDFLSFQGVNSNLTTVLGACNAPARWVRQSRIPDYIARSSICSTGANPRFS

SEQ ID NO: 163165 - protein, 125 aa, Zea Mays
MGRESRKGSWPMEHFWAERAGRGVGRRSTFGPREQEGEWADGALLGRNAGLIFSFLFFFFLFSISKFDLFFSFLFLFIFYFKFQLFKPNSNFCFEFQIFNFKYNPNVNINHTIFNIIIYSPSQYI

SEQ ID NO: 163166 - protein, 91 aa, Zea Mays
MHQYAWTPSCGLTTPSVINALAPSSALRCQGCRPGLLLPLQPRLRWSSTPAAAGSPHPVDVSNLRLDVVVPCTQYGSSPSVPTTTSARYDL

SEQ ID NO: 163167 - protein, 56 aa, Zea Mays
MVGELDMTIGYSRFSSSGGSGRCALAIKLGIQVWGRQAECIGDLLRHRGVSVAPPG

SEQ ID NO: 163168 - protein, 50 aa, Zea Mays
MWALSGNVGAGDVQLETWRPVLLRAGMNEREGREDQQFLRPICHTHKEKK

SEQ ID NO: 163169 - protein, 95 aa, Zea Mays
MFLLPPKLFRIFLSIRQFSTDNPYFKELTPLACSRGILPLGVSLSDVIALSPYTLCFRLPLLHPIGISLVVCGKDNNSTCWFFDCKEHQHQHLSL

SEQ ID NO: 163170 - protein, 242 aa, Zea Mays
MTPLGLSFSPIASGYGCLARTPLQNGKAKHMIHTTNNIMCSICFSCQFLLATGPSLHTATYLLNRFPTKAISAPTPHFALFSTTPFCNHLRIFGCACYPNLSTTTPHKPAPRCSCCVFLGYSLDHKGYQCLDLTTHCLLISHHVFDEMNIPFSSSPSSSTTELNFLLETPWLPLDNHLCFPPAGSSPLLPHAALVPHVDLASLDTPRAALLHTTEPCAAPTSPARPGTALASRRHRPRPDPP

SEQ ID NO: 163171 - protein, 277 aa, Zea Mays
MPFSPRPVSRSSSSLLHGSKHGRRCSFFPLALLARPPAAMADLHFHGAGAANSHGTLPCSPAPSLPSSLPWARAPPSAMDAARDPPGAPVFPAVQLPFRLPWSPSSLSTAPRNSNSSSFPPSAPFCSMATRSLSMADAQVASSSARPLYLEQQEAAPLSPFPRSPTKSTRCRCSTKCAAPFLHGRELSLAATASQGQRVAASPWPWSATRSRALHVRCFAQQLRRLRAARCFVLRSEQPSTPAVCSLFCAAPISSSFTPVRPRQFLFNFTSTLFSGD

SEQ ID NO: 163172 - protein, 175 aa, Zea Mays
MELRILSSTYGASIWWGCGEKEIGALLLAAQGTRGEQSCWPPVRQPWRGFLQPWSRRGRWEGMSCCWNSWAPWTGSWATMEVEKVAARLGKQGRQGDLAQRPLPRVELAPMGGKMAGRALENREGCHGCWRHLLHGSGGRPWLLAAERAEREEKKSSGVHACCREAGRKKTCSPA

SEQ ID NO: 163173 - protein, 63 aa, Zea Mays
MPSQREQYGGSVHLFIGTGRSPYKITFMPFTFDNNSIVIYRGLNSLFIFKSVSFPATTPKLSC

SEQ ID NO: 163174 - protein, 68 aa, Zea Mays
MTVSTASIPVLHSAEVAHLYPQVMLPIYDGVVRAPYTSTKEARQGNTMRPLQSSTSFRKPATVYRKLQ

SEQ ID NO: 163175 - protein, 63 aa, Zea Mays
MIRFAGDEIVLEPKNDEIDVFRSFFRARLCFPMYEMIAEILERFEIYLHELTPNVIVRISVYI

SEQ ID NO: 163176 - protein, 266 aa, Zea Mays
MNRVFDAIGFVYPDYRYPLRGRGKKRKVVALAASAEPVPKAAVKKMKVLTHRPRYIEPAVVPEFGGEASSAAKTRETIPPAQRTEEPTIMSKAPSVELVETKVDKDKAERSKTKEVTKMSEILSPSTEATAPKTQKSSATTPKRRRMSNVLDVVLETAKTLNPAPTRKIAEASKAQPEAETKQAEVEATIIQTETEAGPSEPAEIEPAEIEEKATEEKATEQISSEKVATPAPEALKESIDYIIRHASGKGLSQEEKREAQHYAQN

SEQ ID NO: 163177 - protein, 135 aa, Zea Mays
MRGRYFRDMSIVKVGGDSTAPTPEENKFVIYRSFLKAGLRFPLSKFVVEVLKIFQIFLHQITPEAIIRMGIFVWAVRSQGLEPSAKCFCSMHELLYETKAIGKEHYHNNFGCYGFIARSNASHPVPTFRKIWPMT

SEQ ID NO: 163178 - protein, 100 aa, Zea Mays
MRDERVNTRRLPVPFVLPWMERCPGRRLAASSCSSGLIKSSSPRGPTRCRRRRRWRGPVCLSMKRGGMCERALGSDGFRLTQITRVRSPPTCHDEKTLEE

SEQ ID NO: 163179 - protein, 63 aa, Zea Mays
MYRNLRTRSEAIHNMKSVVGTKVESVSKLHEGKLQLSSRKRNRPKEEKTDQSMIVCVMFIVIC

SEQ ID NO: 163180 - protein, 112 aa, Zea Mays
MQWVSPLPSYLLQYKTTPSANTTSMNAYECNAYVLCLHTSKGMKPHRTPPRATYDAKLYRYGRTIGHDKTSDASESCNVYGMLHLSIYFTSFTYNTTSNNTSFTFRYNINLK

SEQ ID NO: 163181 - protein, 115 aa, Zea Mays
MVGGCHRRRGGGQPREKGGRVAAKRGGWREKGWPPRVLWEKRTDAPDDFCLCIQRPTTLSHIPRCEDQHLVNIFFGILHSTPLKKNSSSNSATPIKTPKVPHIAPPFKTWVHYWS

SEQ ID NO: 163182 - protein, 69 aa, Zea Mays
MLVLVFLTLVCFTLEFTPTQLVDSHSLTSKSTKASLCTCLCKKMFIVCSRKPCLASHSFFLGNLVQNPH

SEQ ID NO: 163183 - protein, 56 aa, Zea Mays
MLSMLMWWISRSSRTSTSSRVRLATSPSQLPVVGCLRWLRFDSVYFDLYYVNGSSL

SEQ ID NO: 163184 - protein, 54 aa, Zea Mays
MSALFLSSVPFGIYVLRFVWHPTKPFAESPHRYSLPEITTTNEYLTSVPKRASS

SEQ ID NO: 163185 - protein, 67 aa, Zea Mays
MHQGKNGLAFVDWRVGPGWQRRRGARSRGREREGGVGRKRPRRGGVFSFYNFYFLFLFLLSLFLLNK

SEQ ID NO: 163186 - protein, 64 aa, Zea Mays
MSFSCQPLGKKILEHQHLRLVPLLVHERQMYLHLHASHLFHHLVVPLMKKACQCFAPLLHLLLV

SEQ ID NO: 163187 - protein, 60 aa, Zea Mays
MGFLLLEKNFFFLESNLMPSLLSFFNILVVFLTIKAMLVSRSSSLEDSSSICTLAFPFLS

SEQ ID NO: 163188 - protein, 71 aa, Zea Mays
MLGVMLILPMPCLFVFLRLARGYEPPEEQVGTWNLNSQASCALDHFFLPNHVLINHNDLHRLILMGPNRLP

SEQ ID NO: 163189 - protein, 50 aa, Zea Mays
MQESVIQPIVVVRGNEMALVILGLLSSISTSISDLNCDPFKMLINSIFLV

SEQ ID NO: 163190 - protein, 53 aa, Zea Mays
MPQRTPPTVRGAPQSPRASRTRANSSPALQVCSLFLSSTGNIAFLSLSRGDRW

SEQ ID NO: 163191 - protein, 64 aa, Zea Mays
MQEEMGKNTSLILSSSSIQRAPPLLDPCCVGGRSWGRKQWRMAAIGGGGGQPRGRKGVAAKRGL

SEQ ID NO: 163192 - protein, 92 aa, Zea Mays
MAQGHISLSISPFLVFYANTIKPTKESATSIQMRTQNCFDSNLAYMDHSLPPLGLFLQINLNFLSLSQTHLLRHRDISREIDQRFKNSHFFP

SEQ ID NO: 163193 - protein, 69 aa, Zea Mays
MLTKINQSRTSSYSLAYVTQYLVDGMISLNRRSNLGWRCRLRFFLYHMNILCSPLITRLFLMNLFIVLS

SEQ ID NO: 163194 - protein, 79 aa, Zea Mays
MNNISSRHMMNNIFPSHISIMHNRRTRSNHGMRIKSIITSINILRMSPIMIHESMVLLSTTSHRGIPFLLGGDGSLMAC

SEQ ID NO: 163195 - protein, 97 aa, Zea Mays
MSFAVLLKRGLTLRRRLRMSCESSTGWPTSRRSAAFRFMISAYSSMEESPWVMEWKSWRWRIARGALLARNRPSMATQRLRAVWLSPSTARLRMESS

SEQ ID NO: 163196 - protein, 82 aa, Zea Mays
MLHLNSPSCSGHQVSFPVGEFICNSFYKGLESLCKDRGSPNPNGHSNTYVSMVQNPRMIKELSPFSAMPCTCSLALLHHSIV

SEQ ID NO: 163197 - protein, 65 aa, Zea Mays
MRGRQGLPACTRKWRRPEKSKGRREGEKEWRLPGGGCQGEWRALGLGGGRLGLGECGWALMGRFG

SEQ ID NO: 163198 - protein, 178 aa, Zea Mays
MAKGERKVQPKNDIIDDCESDSDDEYASPTYDELADLLKEYIQIIRKSKAKCDKLKDENEFFTAKYDIVVKASEEMKEEKKTMSSTKYELETSLEDAKDKCEKLSEANRELKDRLVKVKEDYRKIKIDYDNLLIANELLSCNTHEAINPVVKIDVATSCDDLSQVDPSCLHDELIEKV

SEQ ID NO: 163199 - protein, 105 aa, Zea Mays
MRGHRERIESSTRAGVERAHTLFVDAYRDLGEQTAPFDKSGEEVGTRFLGWLQDELESLPSIVTGLMSYASLITCEGAANDLSREVCRHFEVFDQANEDFDRGVF

SEQ ID NO: 163200 - protein, 63 aa, Zea Mays
MDRDPLRGLYKVSTSFRKLATVYGKSTYKNLSSDLHRSKINPRTSLHATPLLPLPLSGKIVFH

SEQ ID NO: 163201 - protein, 94 aa, Zea Mays
MHRLPLGRAGIRLVRSKCRGTLYSKADVGLSPMAYVTRRRTRGSTRPRLVRGVVTRTVLPHDSSRPPLVGGPDGVRGRSRLVRSWSTRGSTGPS

SEQ ID NO: 163202 - protein, 57 aa, Zea Mays
MARTTYLYLVFQTLYINSAIYIMQNSGLHNHIYDLLAIALGHLQQTSIMCECNRANS

SEQ ID NO: 163203 - protein, 67 aa, Zea Mays
MSAVHAVLVCGGCFLGNARVMMSIVHAAVWMLSHPFPRAEPGASHMCARIYFHTYVDVTSVIYQKNN

SEQ ID NO: 163204 - protein, 62 aa, Zea Mays
MNQHLMKLKPSHRCNQHYDFTTSNLDAAIHQHQCLKTTLFYEGVICTKHNLYQLQQFILIQW

SEQ ID NO: 163205 - protein, 63 aa, Zea Mays
MGVEHLLDPLFLFNPSCSSSSRSVLRGGDLEGGGSSGGWLQGEGGGAAKGGEKGGLAAKKREK

SEQ ID NO: 163206 - protein, 87 aa, Zea Mays
MKHLSKLIVLTRYLNHIELINILKESQSRSEILVDIELSSHNITNTISFPRTTTIGCITFPCINNTCKYHFNVCIGMQCVGPLSSYL

SEQ ID NO: 163207 - protein, 56 aa, Zea Mays
MECVHSDAKERADFILKLHASTKENIEKMTEKYKLAGSHGRKVVKLEPGNLVWLHL

SEQ ID NO: 163208 - protein, 120 aa, Zea Mays
MEAQTYSSSFQFRIPGTTCNKMGAQVAYGVGFGSSLYGWKDNFEELPMTLVSGPNSSRIHGNCLNKLTFRICSGAATPSFGLLACVSSLSPLGAHLGFCITLESLLIAATFLLEAGFCLS

SEQ ID NO: 163209 - protein, 81 aa, Zea Mays
MHASLALSHLAFFASLAAFAATSASSDAASGTSDIITQNSFRSVSHIRVLICQRLKLAPSNVSGLMKSELEAIVRIGFLDC

SEQ ID NO: 163210 - protein, 144 aa, Zea Mays
MNRELSIERSWPTARPRRWRDSTTNDASFGRPSDRAELAAARRKQNARRGSREIRAPWGAWISYSESSRGPRRGSSGKIRGACAGTSRRSTVLGFGKVEQRERGSCRPAAREQRAGKSGAVEERGALRWEQEPRRAGRRRLGEL

SEQ ID NO: 163211 - protein, 51 aa, Zea Mays
MTRLRREEKEGEELERRLSVLCRRVLVSRRLRPISAATDDSISSVVYSILI

SEQ ID NO: 163212 - protein, 53 aa, Zea Mays
MQISMQILTLQEEYVQVCYKQKGVTQKENNFRFSPLFYCCTESLPEQQIYTFF

SEQ ID NO: 163213 - protein, 196 aa, Zea Mays
MVATCDIEEEPSQVHLTEKVTPVLVPDGVWVLDTGASNHMTGNRSVLSQLNEGVKGSVRFGDGSKVRIQGMGSVVIQDRQKGHKVLTDVYFIPELKSNIVILGQLEEKGFKYVGENGRLCVYDQEKTLLISAPRVGNRLYLAKFGLDSPVCLQAQVDDVSWRWHARFGHLHFKALSDLKSKNMVTGLPTVTRVEKV

SEQ ID NO: 163214 - protein, 445 aa, Zea Mays
MSELLDTTDEVQDYEYSGMCLLAADEPASVEAALEEGCWRDAMIAELKSIEQNKTWAYADLPKDHKAIGLKWVFKVKKDPSGKIVKHKARLVVKGYAQVQGVDYDEVFAPVARMETVRLLLALAAQGEWQVHHMDVKSAFLNGNLEEEVYVHPPPGFSDPKHSGKVLRLKKALYGLKQPPRAWNARLDQELKFLGFNRSVEEHAVYRRGTGNSLILVGVYVDDLIICGPDSKNIVEFKQQMKKSFDMSDLGLLTYYLGLEVKQKPGEITVCQSAYAEKIVEISGMKGCNPADTPMEQHIKLLPGKPELVANATKYRSLVGSLRYLVNSRPDLAYFVGIISRFMETPNSEHWGAMKRIIRYVAGTTKLGCKYVKGALSDLVGFTDSDHAGDLEKRKSTSGVLFFYGGNAVSWSSQKQKVVSLSSCESEYIAAATGAYQGVWLSRLV

SEQ ID NO: 163215 - protein, 115 aa, Zea Mays
MTIGGLGVVEGGMWCREGVCFSGEPIHKICHSVKGINPLDRRETCLKQEGTQNVIDGAKGTFCFAILLRSIWTQYVECNTMGEKICVGLTIIKFMTIIALDALYRGAQLCANIKK

SEQ ID NO: 163216 - protein, 82 aa, Zea Mays
MTCSSHHPSCILKLCRDLMVRPYRYIFSIVRCPRRGTMRLHILRGMKAEVILAFADICTHEVYMKCDITMLLLWFLPARCDD

SEQ ID NO: 163217 - protein, 130 aa, Zea Mays
MTADGCAGLAIIVDPLGRPHPSTRPQKSSVHHLEPRALSPRTAGRRESAHCCSARVVSAFGQLHKAGELNHGSWDLVVAALGSGRHWCQLNCSLETPHHRGSTHLYGQGTTPCDSRYGLLPRARVHLYCV

SEQ ID NO: 163218 - protein, 56 aa, Zea Mays
MSIFLMIEAGILSVHIKKVGNAEKTEFTNYSRPALDKNLEEQVNLLSILCISGRKC

SEQ ID NO: 163219 - protein, 331 aa, Zea Mays
MDLLSVGQITDHNCFVGFDDSSCFVQDRKTGDVIGTGRRRKSSPRLYILDTLRLPSSPTTTPHVLAASGPTTSFAQWHHRLGHLCGSRLSTLIKSGCLGSTHVESSFHCKGCHLGKQIQLPYFTSTSHSAKPFDLIHSDVWGPALFVSKGGHKYYVIFIDDHSRYTWIYFMKRRSELPSIYKSFIRMVHTQFSATIKIFRSDSGGEFLSDNFHQILTIEGTLAQLSCPGAHTQNGVAERKPCHIIESARTLLISSFVPSHFWSEAVSTAVYLINRQPSSKLSGKSPGEFLFGTSPRYDHLRVFGCICYVLLPPRERTVGGLRLPKVLKNMI

SEQ ID NO: 163220 - protein, 315 aa, Zea Mays
MKKDQHRRRKFSKKEKISAPKRKSPEEEGTPTPPSTSDVEEILKVMTEPMPAKLSPLGLQLTKLFEKVDEPDQSKINKPKRQRIIAVTEVIDKTPPRASIQKTAAAEGTAIVEGVASEVAATEAATAEDTNLEPMIENINKILEDMAAEEAGAITEKTMATVPEKGKEIAEDPSDDEAYSFQNLVGQKLTKDEIEELKDYAKSCGYKSGALLFGGVDDEELGCIRDQTGAKVIGTLSKSIGFPKLETDISRYRRQHIVGSLFYSNFKVNNLFLWFLLPLIMKILLNISCFCSEHATEQSSEDATRLGGQKARSYN

SEQ ID NO: 163221 - protein, 76 aa, Zea Mays
MKRREGVFSPKAQKWYVFKVSCIIKNSIMKRDLYITFKCTKCCIDYTLNVFFQIAPNLPSILLRRLHSEVGQQPCP

SEQ ID NO: 163222 - protein, 89 aa, Zea Mays
MMVTGMSLHNRGATTIRTDYTQLGISNHTTYVALNPCICQPFPRSPPLHEQVRATREHITYQACSVPGGYMLLSPSLHSQCAIVSSRME

SEQ ID NO: 163223 - protein, 518 aa, Zea Mays
MARVRSTARVEREGDETEASETVPISEAMQRSGLVTSEKIPIDDAEQAIAEAEGEDAEETDPEDDYHLATPSKPSHLDFGKSTVSKADLSKMVKSGYFTENQKKLLRFGGEETTPKPEKDEIVIFKSFLKAGLRFPLHGIIAEILKNFGIYFHQLTPNAIVRLSVYIWALRSQAVEPFADSFCRVHELHYQTKARKDGLHGNFGCYNFAYRKTTKYPVISYRSKWAAGWKSEWFYVKVDDDKEKLVQSPLELTFGETRPQCHMLPEGPTQKAMYEFKIIAENISTRDLVQEFLAFKVFPSVKEWEMPKLKGEKKRGELVRLPYYFKFKKYFKTPCQEWLDTIEVMCNEILGNYSKKEDQLMTAAFGTRPKRRLNRVLDALGFEYPDYENLNKGAGGQKRKRVTEALDEGEKEPIKKKIPKKRKASSPKQQISEAEETPASPSAAVVEEILKVMTESLPAKLSPLGSQLTKFFQKDKEPEKSRKTIKAKKQRIITVTEVIDKTPPRPLAQKTRAAAEGA

SEQ ID NO: 163224 - protein, 81 aa, Zea Mays
MRDALMWTKFSFLSRRRKNTFPSFRTQRSIGNNIFLFSEALLHRKQHFPFFFVHEALFSLSFFSSCRSNHLCDEDVYPTYA

SEQ ID NO: 163225 - protein, 164 aa, Zea Mays
MARVRSTARVTRDEEEAEAAETALISEVMKRSGLVAPEDVSDEGVPVVEAEQVGAEEGESEDDYSDVPSKPSHLEFKRSTVTEDDVPKLMKLGYFSEAKKGLIRFGREEITPKPEKDEVVVFKSFFKAGLRFPLNEMIVDLLGKFGIYLHQLTPNAIVRLSVYI

SEQ ID NO: 163226 - protein, 101 aa, Zea Mays
MSREISCARRLEKEEHRRVPRSSARGEDPSVREQRDGRVLAGEKRWEQAKLLAGDPERGEQGARSRRDSRGRCHGGELEAWRSGELKPRAGAGHNGGNPGR

SEQ ID NO: 163227 - protein, 51 aa, Zea Mays
MGRFLPFWPIYPCSPPRCPPWRTAPLSSSPPCGPSWSALSPPSPCNEPPKS

SEQ ID NO: 163228 - protein, 82 aa, Zea Mays
MHQPLPLTASYGRARVPGNLTRLSSSSTRTHHPKDLPHNRYITVITFDTHTLEIERKTFTKYTLHSRTQVLHGRMRCIYYKS

SEQ ID NO: 163229 - protein, 111 aa, Zea Mays
MQHHIPRARRAHVAPCPAVPVPPVISIFIQPSPPFPHVQTPRRSTPKSKLPDPHLLLAMAAPCTATAHFSSEPSTPSILIRIRGRYALRCQGNPMPYRFRSPLSRQPLLRI

SEQ ID NO: 163230 - protein, 60 aa, Zea Mays
MFGITSASPKSFISKLFDRKDLTSLITSMFVPNINIPSTYKHNITPSPHHSDNIHTCLPH

SEQ ID NO: 163231 - protein, 89 aa, Zea Mays
MHNLPMPFQPQPSACYFMHDMILLLRDKLLWPPNLRTLPQLILILFDIFITNDLRKGVSFQKKMFFKNEYDQGLSPLSPLSGIIRDSLV

SEQ ID NO: 163232 - protein, 86 aa, Zea Mays
MLRVRLGILSRSAGDKLKLDLLITFPCSQPDFRKATAVPREATRAQKSPCPAMTSSRSSISPSICSKAPGRSSDEGSNFSLLAPTE

SEQ ID NO: 163233 - protein, 68 aa, Zea Mays
MYKYVLYRYKKMFRNPFVILVIHKFYYFNLVISPLYCNIIQTSIYDSTILVCCNSIQILDEMLVHNDK

SEQ ID NO: 163234 - protein, 58 aa, Zea Mays
MRLSQNTLNTNQPAKVSKVDDGGPWVRYLSQEYVPMLTWAANTTAPPLAHISGKVARH

SEQ ID NO: 163235 - protein, 62 aa, Zea Mays
MIKAHSVFYLGMFFSGAIDEEGRLLESGAAFTSATMSSGTTTPGLLIRIRPARTALSMALSR

SEQ ID NO: 163236 - protein, 58 aa, Zea Mays
MLCVFFLVLDLKDPAPREEKNFAIKCSSSKCEAMKHLFRSSLSQSKAWNLHMGVWRML

SEQ ID NO: 163237 - protein, 185 aa, Zea Mays
MDVKSAFLNGTIKEEVYVEQPPSFEDERYPDHVCKLSKALYGLKQAPRAWYECLRDFLIVNSFKVGKADPTLFTKTCDGDLFVCQIYVDDIIFGSTNQKSCEEFSRVMTQKFEMSMMGELNYFLGFQVKQLKDGTFISQTKYTQDLLKRFGMKDAKPAKTPDGEPTDTPTSTKEVSPLIKKHTSQ

SEQ ID NO: 163238 - protein, 68 aa, Zea Mays
MLCWHKSPKRGRLKGKCAIGPFLSILVIECQHKCLNVNLCSWMDKVQIKSKGMFLSLSTLVLCTNILV

SEQ ID NO: 163239 - protein, 74 aa, Zea Mays
MINPVTSSLEPTGPMTSIPSCGDEETLPSARARVGSGELSSSPGQAQATRPGHSVPLLPRGCTVCMYASDPTLS

SEQ ID NO: 163240 - protein, 102 aa, Zea Mays
MNPVEKFRNRFLEYRKILKPFSSLHTTGRWGRLTRPCILPHALIACARGSQSVAHLLDLSPFPNQNSEHGGQKLTDHALGACDSAGLPWFALNSGTDRSGSS

SEQ ID NO: 163241 - protein, 117 aa, Zea Mays
MQASPPTQIEDEAQVDEGQNQEDEPPQDNGNDQGGDANDQEKEDEEEPRPPHPRVHQAIQRDHPVDTILGDIHKGVTTRSRVAHFCEHYSFVSSIEPQRIEEALQDSDWVVAMQEEL

SEQ ID NO: 163242 - protein, 71 aa, Zea Mays
MADNPVEHSRTKHIAIRYHFLRDHQQKGDIEISYINTKDQLADIFTKPLDEQSFTRLRHELNVLDSRNFFC

SEQ ID NO: 163243 - protein, 124 aa, Zea Mays
MGDADMTSALRNLERKGLKNIMTMEYPCNDEVVAQFYATLWVKKIDEEADGYDYPVMYFFIQGVWHKVSYRRFAHILGFSGEDIQGSNLKVHDIRLSMREETKFIHISLEQEFWITANMHRYYR

SEQ ID NO: 163244 - protein, 64 aa, Zea Mays
MNPYLESNVLLRMMQEMEEEEEELEMATYLQHRRRRARNERRHGGSIPERVRIHRDHMSGDARI

SEQ ID NO: 163245 - protein, 246 aa, Zea Mays
MPRLAELKEARTRDRVDTRGEFTATDTPDNHRHGRDNLKYYDSQESAWRRRQARTRGARRGNLTRRCEQRIFVRAIEECDTRSRGEQQAPSCATKRNLSWSSRQQRAGASRSPGAMGRRKSSRTHYSLESILETATGTDGWSSRTRMPQQAERHRGHHGERAGAARARENRSAERTDRELCAVSCRWLETRAGSRWGEQGAARELRRTRRDSAGRALGWGRVTQSRTPASAGEGRSSGTREQGAGR

SEQ ID NO: 163246 - protein, 50 aa, Zea Mays
MKVHLGTDKASLPSVKTIVLSREATFAECLIMHSVKRLSKGPNGAPVAEG

SEQ ID NO: 163247 - protein, 116 aa, Zea Mays
MRHLCDDRDDRDEDRWLRVLGGSSSLEESSHVLTLVSALSLLLSFLGLAIFGQLSLKWPFSPHAKHPLFLCFFLSMLKRRSSTCRGTPIRLILRIILITFPTRWIVSLSSEDDVHG

SEQ ID NO: 163248 - protein, 56 aa, Zea Mays
MNGGQEMLDGAIRQNEKESHIASEEARRAKEAAERERRCHTRILGVQNTDVKSNVC

SEQ ID NO: 163249 - protein, 56 aa, Zea Mays
MHKINHPPPRKHLHQLKMRMRLKLMKEKIKKMSHLKMTTMIKGEMQMIKTRRMKNQ

SEQ ID NO: 163250 - protein, 82 aa, Zea Mays
MYHTPPQGANHPRQSEPHTPSPLTARQRSKLHLNSSNYLAKSVPYHPHGYTVFPGGHPTNQSLRRGTRETARAPLHVIMPSS

SEQ ID NO: 163251 - protein, 50 aa, Zea Mays
MLIGKSSVSPSLVRTLVTTLVYISLIRLMYFVDTLCFSKAHHITLLGTLS

SEQ ID NO: 163252 - protein, 88 aa, Zea Mays
MLSQGIIRECTSAFSSPVLLVKKSDNTWRFCIDYRELNTKTVKDKFPIPVVDELLDELRGARFFTKLDLRSGYHQVRMHPEDIDKTTF

SEQ ID NO: 163253 - protein, 67 aa, Zea Mays
MRAIGYGCAYSSAQQLVSLLLHPTNLAQSSLGHIKCYRGWALSPTSCSFLPGPEYMMCSTFLYSRNS

SEQ ID NO: 163254 - protein, 403 aa, Zea Mays
MQVDTEPFPMNMIDFEGKKVLVRPNTADKGKGKETIIGNAKKADGDCKISCRKVVAEKTPDGGETLKVTITASSTGGQAQIGKQLREPVLRITDSPPSRRRRSDTSPDGPEDSSGRSGHAQDSQRPRTFKPRRPEIGTWKTNTFKAAGRLIKPGPTFDQLLSKYVKKKAGPSDRPPKRPRSPIHEQRQVRPIGPPHQSEEIKGPIVQLRPNMPTWTPPPPYPSMPYPYTYLPPSYVPNQMWDMPPYPFGMPQYPAWGAPQTSVFDRLAPPVQDRLSAAESGHQAQAQQDCQTTRPPRPTNPAGGHMPVATQITTKKDIIKIGTAYVVIQGDNKGPMIFGESANTTKKDTVTIKTADPKYSMSRWCPAGLTRSQKRKLQRLRVKESQEKEAEKIFNDTHPLYPC

SEQ ID NO: 163255 - protein, 168 aa, Zea Mays
MCATQRGGSELELLLAVHVRGRGKWRVGGRSRKRGSAFKGHHRGSRLLLIKRGGVDHWCRAAAPAGWLWPLAKLPRGWLLYALTGACMQRGAEEVCVREQVSVGFFSFFCFVFLFIYLFLQHYPRGKIINNSLDQKLSQLLIFVDFHVKQLVTTRFGSMLPRIYHVLF

SEQ ID NO: 163256 - protein, 73 aa, Zea Mays
MKRPDTDPICSGTTLTTWRQNADLVTTTTAPAGAIVHRQLLIIFDLEVPPLTHSNLDTLKINLLENWTLLVLI

SEQ ID NO: 163257 - protein, 62 aa, Zea Mays
MGSLFLPIIMCFWRLWIMWIEGLEVGLEVGLGFDLEFNFCRMTDSTFSVHASFFVVLVASKK

SEQ ID NO: 163258 - protein, 68 aa, Zea Mays
MGRSSLKCLPTQRCGVPMDKGSNQFLSSDPKVELKHHGLPFHLYPCLQGISINWSLLQPYTKSELQLK

SEQ ID NO: 163259 - protein, 63 aa, Zea Mays
MALFMIIKDFFFFCCCAHLLNTWRGWLGSGKNAVRLKRAACSALFSAHGHAARRPTVQLPVAV

SEQ ID NO: 163260 - protein, 207 aa, Zea Mays
MSNLRIENAMLHAKIDELNACKPSTSSIDHCTRCRDINVDVIHDHLALIKQQNDHITQLTSKINEHEIENENFKFARSMLYNGRRPGIKDGIGFQQGSNVKLKAPKRLSNFVKGKAPMAQDNEGYILYPAGYPEHKIRRIHARKPHNVSHHAFMYKDEASSSRHSTHVKIPKKKSPVASNDHNISFKTFDASYVLTVRKMTPGHLAQ

SEQ ID NO: 163261 - protein, 77 aa, Zea Mays
MKSPEKDNKLSLQNLQELSCLSSSPLNFNRYLLRRHLVSFTCLLQYLIRLYFISYTSMLLKMHKWLTHILLHMHKGS

SEQ ID NO: 163262 - protein, 94 aa, Zea Mays
MHLCKDCPFSSEVWNKVLSRANLPFLTGLPRGTSLYDWWTDLRSLCSRQVRRDFDGLLIHFWWNLWLERNSRIFQGQHRGVDQVVLVIMGNASS

SEQ ID NO: 163263 - protein, 54 aa, Zea Mays
MSIVVTAWTGYAAGTTLCLKGQLKQHALLMLVDSGSLQSVLTSVQSLEPALSVR

SEQ ID NO: 163264 - protein, 65 aa, Zea Mays
MSNTVAVNMWLTREFKSTKYGIDSRELPAEGSVDTDFTTSPFYRALGMARPDRTCWKSTREAIGA

SEQ ID NO: 163265 - protein, 120 aa, Zea Mays
MKYCFESIKCPSTNDCIIWVLHVNNVKDNLFSPCVIDKAESHWHCDFAECYNLSSSEATKRVCSIMNLVFWLLHLSEGLSKYDICCTACINQNIMDQKSLEHHCELKVILGEGDWDMGPF

SEQ ID NO: 163266 - protein, 53 aa, Zea Mays
MPTRDCKMNSKYNTSVEHPFEKVKTQRYITYDTSPLPLCHIRTLFMVVCSNLD

SEQ ID NO: 163267 - protein, 231 aa, Zea Mays
MSEAAKKAAAEMKLSLDEEKNLGFLIAMSKTNTEKITKEILEGLSEDTGDSESYDVDSGGEDSEDRPWRPSHSVYGRSTIKENHLVNMRGRYFRDLSVVRADEGEKTCPHPEENEVVVFRSFLKAGLRLPLSSFIVEVLKIFEVYLHQLTPEAIIRLNIFVWAVRSQGLEPDAKSFCNMHELSYETIPWGKEQYHNNFGCYNFVSRSGSSCPVPTFRKRWPSGWMTEWFYV

SEQ ID NO: 163268 - protein, 164 aa, Zea Mays
MSAAFGGRKKKRLNRVFDAIGFVYPDYCYPTRRQKRKNTTSAKEEAAAAPSEPEPKRKKLKVLTHRPRYIEPASVPEFTGKTSSATEAEKPTEPALLPEIAETAEVPPKIESEQSNILLSETKEKAETPSTEKIEEVKEATEGSKTSGVLSPASNIETVKNQKM

SEQ ID NO: 163269 - protein, 134 aa, Zea Mays
MSRSFGFPTLEDGLSVLSKNDLADSLAYNSLKVRRTEFLYFLSSSKFFVCLKLLTQTCSCLQVLILSNALRAQKDAEDEGCTIALSNLRSEVIELRNEGLEKDKILYSLIDKIKEDEATFKSQAEAQKHEIEDL

SEQ ID NO: 163270 - protein, 220 aa, Zea Mays
MVPEDLLSEPVDDDAIETCAAVPDAGLRSSRASSTLERDLEGRDADLDCPDSMEVAEGPSTLEVVTAESLDPKNGADTCPASKDVAGDDLARVKSVSHCPAPEGVAGDDPAQVGSADYDPAPEGARAGSPSCTSMDVHAGSPPHLGFMVVAQTLDQGVALEGSVLTDLAFGSVEGTELIPTGPLQPASGGGLAPGYQLISPDLGIPSFFSNLQVLCYTLA

SEQ ID NO: 163271 - protein, 170 aa, Zea Mays
MLLLLAWFLKELIFCLQEEKRILAASRDNLDRLYRDSSNSLTILERSHRFTMEELDNQRCRLQESADEATCLKQLISAKDATIKELRASKKSIAQELEAARLAAKVAEETAATLKAQRDKAMDKAIRAGRILMRRPGVVVPEDIKADVNAAPDSSSRPTSSVAPEKDIAK

SEQ ID NO: 163272 - protein, 64 aa, Zea Mays
MLFCSQKSKNFELVKLYPKSVMILFGIPNLNIMSCMNSTTLAEVKEAMGLNSIHLVNLSIATNT

SEQ ID NO: 163273 - protein, 88 aa, Zea Mays
MNAYECNAYVLCLHTSKGMKPHRTPPRATYDAKLYRYGRTIGHDPTSYASESCNVYGVLHLSIYFTSFTYNTTSNNTSFTFIYNTNLK

SEQ ID NO: 163274 - protein, 62 aa, Zea Mays
MNQHVMKLKPSHRCNQHYDFTTSNLDAAIHQHQCLKTTLFYEGVICTKHNLYQLQQFILIQW

SEQ ID NO: 163275 - protein, 96 aa, Zea Mays
MVHVPEKSQNTLVPYSAYNSPVHTKSDDSFVTILTNSELHCATPHTPSYKYTQLPSHSPHTLNTLSQGKRPPTQLLRSTGYTHSVASPPVHPPGKH

SEQ ID NO: 163276 - protein, 82 aa, Zea Mays
MIICVSLVVLVMPISPPPLLTSLPLATRCVFLSYSSGHKGYHYINLSSNCIISQHVIFDEATFPFAASHGLTNTDFLFEMGS

SEQ ID NO: 163277 - protein, 50 aa, Zea Mays
MCLIFSLFIYNLSWTFAIYLLSRSVHYVFSGIFVFSWEIAFTPILSCCTV

SEQ ID NO: 163278 - protein, 64 aa, Zea Mays
MITDVENQRSTSLIGITLLAMLSYLQVMLNQFDLFFCFLYQIWPKETPFTWFGPIQRSSTPSTI

SEQ ID NO: 163279 - protein, 57 aa, Zea Mays
MLFDVATTKAARAGPAGRTDGRACDVVMAVVQREKKEDGERRGVALHRRASRSHDEQ

SEQ ID NO: 163280 - protein, 127 aa, Zea Mays
MDPKGKGMVVNDKEKESVFNEPRDDKPTDSGSSHKKDGKKKRRIKKIVYYDSDEPSSSQRDDDDEKKKTVNSNFPFDYSHIPSNSNAHLLSNPLGKPSHFDGEDYSFWSHKMRSHLFSLHPSIWEIV

SEQ ID NO: 163281 - protein, 75 aa, Zea Mays
MAQSLFTHHRDTSTRGPLAGLTLTHSSHHRLCHMGPPGQALLPADFVATKKKKKAPPGIRDSCQPNNPDSRVLNL

SEQ ID NO: 163282 - protein, 64 aa, Zea Mays
MLVDESKRYSQGSKKMRQTTIIGQSFDLLNTLELNEFLPIIYIRSFESGRETTTRIELISTSIL

SEQ ID NO: 163283 - protein, 98 aa, Zea Mays
MVTTSLLQNCCNPSSAGEGTNVPTITEDLFKSFGFSAYPINNTLGVTSNENLFERISTHLGKAGFQFSYAIQGFLKATILGFAKCWGPSSSEGPKKHD

SEQ ID NO: 163284 - protein, 121 aa, Zea Mays
MLPKKASSALGAALQPLDVNQDALREARTHKRKATSLTPQEEELDREIRDLKAIHQQVQRKKEKMLHLADLQKKIDEAAEEMCHLTQDDQDQRPQHRELHQDNSFNEDEWYDDFHHCNFTF

SEQ ID NO: 163285 - protein, 114 aa, Zea Mays
MKAKFKMSDLGLPSFCLGIEVHQAKIKITLSKSAYAKSIMEKARLNGCNPFVIPMEPRIKLSKESVAPPVDGTRYRSLVGSLRYLVKYQARSCLLSGVCKQIHGGTYRGAPCDL

SEQ ID NO: 163286 - protein, 219 aa, Zea Mays
MEEEKVWMASYHLEGVAQSWYLQLQTDEGTPRWHRFKDILQLRFGPPLRSAPLFELAECRRTGTVEEYQNRFQELLPRAGPLEERQRVQLFTGGLLPPLSHAVRIHNPHSLAAAMSLTRQVELMELDRAPAPAHIRPAARGVLPPPPPKPVPMAFPAPHVPLALPAPPAGAASGRGEGRRLSTEEMAERRRLGLCFNCNDKYSRGHNRFCKRIFFVEGV

SEQ ID NO: 163287 - protein, 326 aa, Zea Mays
MIEQGIVRHSDSSFLSSVLLVKKPDGSWRFCVDYRALNAVTIKDAFPIPVVDELLNELHGAQFFSKLDLRSGYHQVRMRPENVHKTAFRTHDDMYEFLVMAFGLCNAPATFQALMNDVLRPFLCWFVLVFFDDILIYSKNWEEHLHHLRMVLEELQRHQLFVERSKCAFGAPSIAYLGHVISAAGVAMDPAKVQAIFDWPVPRSAQAVRGFLGLAGYYRKFVPNYGTVAAPLTTLLKKDGFAWDDKAAAAFGALKATVTSAPVLTLPDFTKTFVVECDASSHGFGAVLTQEGHPVAFFSRPIAPRHQALAAYERELIGLVQAVRHW

SEQ ID NO: 163288 - protein, 231 aa, Zea Mays
MEAREAFLADVRFRLEQAQTVQKLQYDKHHREVTYEVGDWAFLRLRQRVAASLPRTITGKLKPRYVGPYRVTELINDVAVRLELPPGARLHDVFHVDVLRKYVGSPPTTPPPLPPLLNGAVVPEPARIAGARLSRGVRQVLVHWSGEPASSATWEEFDDFRARFPAFQLKDELVFDEGRDVMYGRSYARQRRARDRRRAQERADRQERDLGGRVDLGDQQEPMESSGQEGK

SEQ ID NO: 163289 - protein, 52 aa, Zea Mays
MVQVHLFPFNSPSRLDQANSSIWLVSKGQVVTHLPLNMCITLQRTCEVQGVF

SEQ ID NO: 163290 - protein, 54 aa, Zea Mays
MDGTVQRVVHVSCLLDHHSPAYELPKNFFGRHFGVPGILTNIIHQMRIKNGKGP

SEQ ID NO: 163291 - protein, 74 aa, Zea Mays
MHNRLSQARIVCCLEQDQDIFFTQCKNMHNRKQECMFCQLQQDLYGKFKISSHTMQEHMGKTHFWSQWIRYVLT

SEQ ID NO: 163292 - protein, 76 aa, Zea Mays
MSLRIPRPEQRNPTCGSDRCSLANPSPSNNPSCPVDEGATLTYCLAREVRLRRRLPTRLRRLSVRGRGLLVWNRQW

SEQ ID NO: 163293 - protein, 57 aa, Zea Mays
MAYYYVVVGWRMTSISESDHLYQPTAGFTFDGFLFLRLIHLLSSAKQSLNHTTPSPL

SEQ ID NO: 163294 - protein, 68 aa, Zea Mays
MIVNRLEWELLGTKSNSFVKANKRWCSWGEQGASDTAGPMNSATILGPAWRVLGKIYGAVRALFFYWI

SEQ ID NO: 163295 - protein, 52 aa, Zea Mays
MFHLTLALLNAGACCSSRGVGSSSTSTFILIIMLPRRSHDLIRNFLSKDVCF

SEQ ID NO: 163296 - protein, 57 aa, Zea Mays
MLHIYTPQADRHGCTYIISHSGQSTDYPRVLSVDNHSSSIQTTREKSTLCSHKSKCK

SEQ ID NO: 163297 - protein, 68 aa, Zea Mays
MKQQVAGSPSSTTAAGRRRTLPRLRYNHPQTMPSPLPRSSRSLSPSLGCPARHRLHMDGERLRGLVVE

SEQ ID NO: 163298 - protein, 50 aa, Zea Mays
MNVGDPWDDEFELMNSIALLSYPVHVHSHLRPLMARVGACGPDNLGGLSH

SEQ ID NO: 163299 - protein, 57 aa, Zea Mays
MMSSCIAPLISVETSSVTEPLSPVSSSLTTVAALPSSESFAWFPSSMKLSSNPLITK

SEQ ID NO: 163300 - protein, 63 aa, Zea Mays
MLTENKLQTSSTVRRLATGWTSSDRATGNVSLSISFSLFYIKKCPEPLVCGLQFFSHGLTAYM

SEQ ID NO: 163301 - protein, 81 aa, Zea Mays
MKIHINNIINISPRINMLFINNFGLIIMIFRVISKCILNSEKEKKKKKRKKRNKTLTKLAHLAQQGAAPRPCPSPSCSRRR

SEQ ID NO: 163302 - protein, 100 aa, Zea Mays
MNFYFNSSIGTSLILSLIVFSISSLCESCLNSIHGLCFSSLSPLSLSPLYLTLMFILYQPLKYPLFHLNLRVVTYLLFPWSYPLLYHMRVFNSILCCVFV

SEQ ID NO: 163303 - protein, 216 aa, Zea Mays
MSMMGELSYFLGFQVRQLKDGTFISQTKYTQDLIKRFGMKDAKPAKTPMGTDGHTDLNKGGKSVDQKAYRSMIGSLLYLCASRPDIMLSVCMCARFQSNPKECHLVAVKRILRYLVATPCFGIWYPKGSTFDLIGYSDSDYAGCKVDRKSTSGTCQFLGRSLVSWSSKKQTSVALSTAEAEYVAAGQCCAQPLWMRQTLRDFGYNLSKVPLLCDNE

SEQ ID NO: 163304 - protein, 66 aa, Zea Mays
MDQLPLENFEKVELEFLFVKILLFASYCQKLASCGKKCCLWEKGGVFVILNQFLLERLSSCLNKCV

SEQ ID NO: 163305 - protein, 82 aa, Zea Mays
MYSIQYRHHSYVCGCVQARQRRFDRTYARHTWIRCADPLLSAPPARPHGYLLQSTTPSTHVQGCTWVLLPTVQRRARAINVI

SEQ ID NO: 163306 - protein, 57 aa, Zea Mays
MPRRVLSRLQRIQHAARWEGSFEAARRGASAGRAEPMARGPWGANALTWVGAGGEQR

SEQ ID NO: 163307 - protein, 70 aa, Zea Mays
MKPHRTPPRATYDAKLYRYGRTIGHDPTSDASESCNVYGMPYLSIYFTSLTYNTTSNNTLFTFRYNTNLK

SEQ ID NO: 163308 - protein, 103 aa, Zea Mays
MAIPHYTYMILKLPGPQGIITVRADFQGAAECFRVAIQAALTTKPSTVPSTPANSKPEEDLAVPANEAQAVTSMRPTEETKRINLGFADERKTAIISSSLNDK

SEQ ID NO: 163309 - protein, 80 aa, Zea Mays
MDNHCIDISLYRIYLYITVTDRNIFHLQFQQGRRAGHRALYPSSRTRIQLMRRLVVRFERHQTFSYAPLGDPILGSQNND

SEQ ID NO: 163310 - protein, 71 aa, Zea Mays
MSIRDVCPKEPEEPIQAQDQPSFSMQAYPPTQDEDQAQDNEEEDQEDEPPQEEDNDQGGDDNDQDKEDDQE

SEQ ID NO: 163311 - protein, 92 aa, Zea Mays
MTGDKQRQELKQNLQHLHQKGGQKGCYTIFDQEEKEWKGDSNQGQQASQQRKGSQTHLGAKGNNFNHEKHQEGLDPEREVSRPKVKREIWRL

SEQ ID NO: 163312 - protein, 77 aa, Zea Mays
MRFPEKDNNLPLQNLQELSCLSSSPLNFNRYILRLHLISFTCLLQYLIRLYFISYTSMLLKMHKWLTHILLPMHNGS

SEQ ID NO: 163313 - protein, 80 aa, Zea Mays
MGALTEDYIASSSAHREVRSAVALPSPATNCHGSVVPHTPLLPRARTIHLTERLQSHWGFWMVAEANDVDDGYPSPFLPL

SEQ ID NO: 163314 - protein, 74 aa, Zea Mays
MSPPTCTLVVAHSWQKKKKTHRILPAACPLSRPGWLALGRQSIFDRSLPPSCVGMSQRRHQCRGPDQASRVHCR

SEQ ID NO: 163315 - protein, 78 aa, Zea Mays
MNYHIYLIVFFPTVGVCLLHHLALAFYQTPRLHTAASKPVLAFDVYCSSSPVRVPCRRSLGVESSSPHSLRRPTAELS

SEQ ID NO: 163316 - protein, 69 aa, Zea Mays
MTEARFCSRIADASFLSEIVVSPKISIGINFTNTNKFANQWLLPLSSFKRSSSVITWRHAVTLAVLRLH

SEQ ID NO: 163317 - protein, 73 aa, Zea Mays
MNVKKIKKRKEREKKKEINLYWATKPNSSPPFSFARLNRTCVTSARWCRPVGLLCQCHRKRCCAGTCLVQWRV

SEQ ID NO: 163318 - protein, 64 aa, Zea Mays
MGAARKQAWGKITTEVHRTLAFLVMCYPSFFYDFLFFSNIFFIFFYFAAAHNKITHQVSDFFVQ

SEQ ID NO: 163319 - protein, 51 aa, Zea Mays
MLLTLRLWVQAPWWTFNIFLSLSLFFLSIFFVYVADLSVQIYFSSSFFLFL

SEQ ID NO: 163320 - protein, 94 aa, Zea Mays
MLAQLMTKLKRAEPSHHESSELTATSILFEPYAALLCAGAFYRMLLLPMIGLRRLVYENFTRTLQVPSTDRSLRQIRPSICLYPNNGTEYKYPW

SEQ ID NO: 163321 - protein, 57 aa, Zea Mays
MEGPLYPDDKLRHKLMELSHITSHGSPIFRYCKCNVTPGFKEQIQVHLIHAPRRQHI

SEQ ID NO: 163322 - protein, 62 aa, Zea Mays
MPQARKNIAKLTAVTGPPCFADVQDSEEHRQIVAHSYRYICVYMYPHIDHGLRSPSYFMPSG

SEQ ID NO: 163323 - protein, 115 aa, Zea Mays
MTPVFLPRYPEPCKVPTNPRWCPYAKGSPREGQAPRSSNSVESRGPSPHASGAPLPAPLRRSPPSPLSSFRPKRRGPRSLRYTVAAVTQTRLSRSRKTLAPLGTITMAHARAKGL

SEQ ID NO: 163324 - protein, 78 aa, Zea Mays
MMCMADYLHHHHFLLLPLLRLRNLEWEPSFCPSFHHMQKAYGLEDVGSSPRLIFRDISKAAIFPITMVGVMLLKSSML

SEQ ID NO: 163325 - protein, 412 aa, Zea Mays
MSKSIRMHKQTTVLLASLCRDEYNKVSSLDNTKQIWDTLKISHEGNDATMITKMELVEGELGRFAMIRGEEPTQTYNRLNTLVNKIKSYGSTRWTDHDVVRLMLRSFTVIDPHLVNLIRENPRYTKMTPEEILGKIVSGRMMVKEARYVDDALNGPLPVHEPQTIALKATSSREALPSKVAQVEAAGLNKDEMALIIKRFKTALKGRKEYPNKNKTRGKRSCFKCSKTDHFIANCPDNDSDQGQEKSGKKEKKKSYRKAKGEAHLGKEWDSDCSSSDSNDEGLAASAFNKSSLFPNERHTCLMAKEKKVSVRETPKYTTSSDDDSSDDEVDYTDLFKGLDRAKVDKINELIDALNEKDRLLEKQEDILYEEHDKLVSAQKSLVLETKRNELLSSELSMCHESISSLKILNDD

SEQ ID NO: 163326 - protein, 125 aa, Zea Mays
MSVDQKAYLSMIGSLLYLCASRPDIMLSVCMCARYQSDPWECHLVAVKRILRYLVATPCIGIWYPNGSTFDLIGYLDSDYAGCKVDRKSTSGTCQFLGRSLVSWSSKKQTFVALSTTETEYVAAG

SEQ ID NO: 163327 - protein, 75 aa, Zea Mays
MGITSKMDIAKVILGCVAWRQLIKPRTEARRASRYQVHGRRSRRLRNPKPRVKKKACKVKGDRVENNYGTSRITT

SEQ ID NO: 163328 - protein, 73 aa, Zea Mays
MSSLMRLRHCAYGLPSRPMCAPTPRPGQKWPAPSKSLGAYDWLYGPTFYHFSFYLSAISDLMFICITITISFE

SEQ ID NO: 163329 - protein, 88 aa, Zea Mays
MQYNGSSSLISCEKQTIRIEFYPCKVNLNTRHVRALRPHTCQPSPSIPRSRPGLTALAYNAPLTPAAAVQWPHLYPPYLEWETQSQVA

SEQ ID NO: 163330 - protein, 50 aa, Zea Mays
MDRNYERTMNDRMIERTNDRNFGSITAGKRLFGRTNGRTIERSDERTNEP

SEQ ID NO: 163331 - protein, 101 aa, Zea Mays
MPTTFVEFSSKPIRTRSLISRESTNSVANLLLRERCLQGTQINCNSVASSEVKRKRSLDIRTQKNGEKIVQNLLHLFMAGDSPPIILQMGNKISLFAEASL

SEQ ID NO: 163332 - protein, 63 aa, Zea Mays
MFSLVRNYPFICVHFNSIILFLFLSSLARLLHTILTHRFLIKLENRILLLDVSNKNCRRYDAR

SEQ ID NO: 163333 - protein, 84 aa, Zea Mays
MLGRVYIGKRFIQVLNMCLFAYFYIASKYAFFKMDLDNWQNEKCTWVIYAYSEMHKLNIKMPIQKTNAMLVVGKGIECAYAVAI

SEQ ID NO: 163334 - protein, 62 aa, Zea Mays
MQVHDKHQSNDRRMTWVKVITDKHTTNDVYRKKTCEASKKGKQSMVKWVRYYPPTAMKKRWL

SEQ ID NO: 163335 - protein, 55 aa, Zea Mays
MCVCMFFFFFAISCTLGIWEIGKVAQLWRTSFSPNYVIVHTLTHTYMHIYGTRRL

SEQ ID NO: 163336 - protein, 79 aa, Zea Mays
MRRGCGVVRRGASHIVECGRGTLVRCMVICPGRAGAELGQAWERSHFRPLFPSLARGRGCTCSAEREMCPWAISKYFGD

SEQ ID NO: 163337 - protein, 51 aa, Zea Mays
MVRPAMVRARVDNEGGARHGRRCHGEESDARREKMCDGRRREVEKLERIGL

SEQ ID NO: 163338 - protein, 77 aa, Zea Mays
MHIPRGRSLSLHACCIQLSLHIELSINMTIKFLFLAIFILHLVVYCLLLKIVILHLGTNHLILQETQLVYHRQRQDI

SEQ ID NO: 163339 - protein, 107 aa, Zea Mays
MSKEEGTSKDLTSSTTSGSLKKQRSSDSFTSMMAEKLDKFTEAIRDEAPKGPTSKEIFSTLEEIDGLDEDTFLDLFDILTGDARKYESLLALPVILRKRWLLKQLKK

SEQ ID NO: 163340 - protein, 80 aa, Zea Mays
MWLRWSPSSTPRPPVSRTSGPWCLSSPTPPHLPTLAGGIWSPSPCSATHSTTMFSLTAPRLASPGSGWTVSSSPGSSRLS

SEQ ID NO: 163341 - protein, 102 aa, Zea Mays
MALISSFNFSFCSMLRLAKRMRKLSSSFLSSSSSLDVSYLVEDLDFTFFLPSLAMRHLWPTLGKRRPLVTAMLAASSSSEESLELSSESHSRQTWASPPFFL

SEQ ID NO: 163342 - protein, 73 aa, Zea Mays
MLSVVFAIELLAETSWASFPPVHGGGHTTMRLVWSCKKSPHSVQVTTARVRAKGFVGCLTSLNQLGLNLEQVQ

SEQ ID NO: 163343 - protein, 52 aa, Zea Mays
MSSILVTLVMMLPSCAIFNVSQISFAFSKPFALLYSSLHREASKIVVAWEFL

SEQ ID NO: 163344 - protein, 98 aa, Zea Mays
MDPSKILFWNMRGLNSSIRQDAVRMLVDSAKIDVVCCQETKMQSISRRDILSMLGVEFTEFVFLPSIGNSGGILVAWKRNIGHTGLQRIDNHCVSVQF

SEQ ID NO: 163345 - protein, 166 aa, Zea Mays
MLELWRGKSAQDFEGSVFSNHGHLTRRAQFSFCKSEMPSPPSSFGRVTLPQATKQWPPSTSLRPFQRKPRLILSMALIAHLGKSNAMAWYITVAVSTCCTWMALPARVIRSAFQLGKRSASLSISGCSCSLLSFLRERGSPRYLRGSVSTLQGKIWVTISMSTGEQ

SEQ ID NO: 163346 - protein, 213 aa, Zea Mays
MHEELNNFTRNEVWHLVPRPNQYVVGTKWVFRNKQDEHGVVTRNKARLVAKGYSQVEGLDFDETYAPVARLESIRILLAYASYHGFKLYQMDVKSAFLNGPIKEEVYVEQPPGFEDSEYPNHVYKLSKALYGLKQAPRAWYECLRDFLIINGFKVGKADPTLFTKTIAKDLFICQIYVDDIIFGSTNKSTCEEFSRIMIQKFEMSIIGGLLRR

SEQ ID NO: 163347 - protein, 60 aa, Zea Mays
MRCSGSYSWPLLERSRVQIPLMCVFLILARRGSYGGMRMRMDFAGRRNEKDRTKNGNDRT

SEQ ID NO: 163348 - protein, 1081 aa, Zea Mays
MPTPVPAARQCLSPPAVTALDAAVASARRRAHAQTTSLHLIASLLAPTAAPLLRDALARARSAAYSPRLQLKALDLCFAVSLDRLPSTPTSASTPTSHEPPVANSLMAAIKRSQANQRRNPDTFHFYHHQAAPTSPNAIKVDLSHLVLAILDDPLVSRVFADAGFRSNEIKVAILRPAPPVPLLGRLPTRARPPPLFLCSFAAADDADVPSPAPALAGAAPGEDNCRRITDILARGRNPMLVGVGAASAAADFAKASPYRIVPIGPASANNQAAPTTPTSGLIFSIGDLKDLVPDEADLQDAARRVVAEVTRLLETHRPAARQTQTVWVMGWSATYETYLAFLSKFPLVDKDWELQLLPITAVRDAGPAAGLVPPPPAPATTALRCQHCNDRYEQEVASIIRGSGVTADAHQEGLPSLLQNGGMMGSNNEFDAVKVRDDQMVLSTKILNLEKKWNEYCVRLHQGCNRINRDPCQLFPHHIGVRVDRERCANPNQSAQTIALQRDIIKPCALSSPYTNITAKSISAPDQINADLVLNLQVRQSRSNEPLQSGVVPFQHINSSNYNKPEESSAAPVTTDLVLATPRGSSFKDSSSALCKRVEDIEETIQLMPNKVDDLNLKPPHLSIQPYTCSKSSSSNWEQTSPSALHSTSLGGTSAFGQWQRPSPLATQSFDLSNYKLLMEHLFKVVGRQEEALSAICASIVRCRSMERRRGANKKNDIWFSFYGPDSIAKRRVGVALAELMHGSSGNLIYLDLSLNDWGNPSFRGKRATDCIFEELRKKRRSVIFLDNIDKADCLVQESLIHAMETGRYKDLHGGRVTDLNDSIVVLSTRMIQGCQDASLGVEEGNAFSEEKAVAARGHQLKIIVEPGTTNIGGGNVVVSSRHSLGSSEASSYSSKRKLHISDGQEKTEESASTSKRLHRTSSIPFDLNLPGDDEEAHDDGDDDKSSGSHENYLEGSVGNLLRWVDGSINFKPFDFGKLCEDILQEFSNTTSKILGTRGCRLEIDAGAMEQVVAAAWASDSHENEKRPVRTWVEQVFGRSLEQVKMRCENLSSCTLRLVSCEVKEDGFGALLPSRIILDW

SEQ ID NO: 163349 - protein, 481 aa, Zea Mays
MATTMAANDPTSIRVVSRRLVKASDASIQPHVMSLSNLDLYVCDSQLGTLCVYPNAGGGFSARIPSLFESLLPSLLNYLYPFAGRLVTNPSSGLPELHCHNQGAELVVGEVGVALGSLNYGATKDSVKKMVLPFPRDVLLSVQLLSFACGGFSVMWWINHLVGDGHVGATIVRTWSQLARTGDIGGAPPLNYDRSVFRPRSPPSYSDSVAATFTTFDEQRLPNALTAEASFVDRVYYVEASDIAALRDTAAAATTAQRPTRVEALSAYLWKALADVVAACPRSNKERCRMGWWVSARRRVTAPKLVALMPGYLGNVTTYALGDAPAEEIVRKPLAEVAAMVRDAITSVDYDEYLQEMVDWVEVHKTEGLMEAAVIGVGAPTLNQSVMTTFPLDTDFGFGQATLATTVSDYGRLCSAFLSVGARPGGDGSWLVTAYIWPQLAAALESDGIFKLLTAEYLGLAIFCTCTPADETLVFGILYIC

SEQ ID NO: 163350 - protein, 407 aa, Zea Mays
MLSRCGLLSCAYGYFCDLGVRNVVTWNEMIAGYGLHGCSGDAMRLFRSLVCFGARPDEFTYPAVLSAFQQDHDARNHEQVHASVLKQGFASCQFVSTSLIKAKAALGSSVLGPLKIIQDAGEMDLVSWGVAISAFVKHGLGQEALSLFNSCRVDCPEKPDEFILGTILNACANAALIRQCRCIHSLVVRTGHSKHLCVSSALVDAYAKCGDITAAKGAFATVSTKDAIVYNTMLTAYANHGLIREVLSLYQEMTQLQLAAPTPATFVAAISACSHLGLVEQGKLLFSSMLSAHGMNPTRANYACLIDLLARRGLLEEATGVIQAMPFQPWPAVWRSLMNGCRIHGNKELGLLASEQILRMAPNSDGAYVSLSHVYAEDGDWRSAEDARRKMAENQVHKAQGYSSLQI

SEQ ID NO: 163351 - protein, 280 aa, Zea Mays
MSSGASPLSADVMEFLRICFGGEVLEGYGMTETSCIISAMDIGDRSIGHVGSPTASCEVKLVDVPEMNYTSDDQPYPRGEICVRGPIIFQGYYKDEVQTKEVIDEDGWLHTGDIGLWLPGGRLKIIDRKKNIFKLAQGEYIAPEKIENVYAKCKFIAQCFIYGDSFNSSLVGIVAVEPEVMKAWAASEGIQCEDLRQLCADPRARAAVLADMDSVGKEAQLRGFEFAKAVRLVAEPFTVDNGLLTPTFKVKRQQAKTYFAKEISDMYAELREAEAPRSKL

SEQ ID NO: 163352 - protein, 352 aa, Zea Mays
MDDLAALRPTIFASVPRITNAVKESGGLKEKLFHTAYNAKRQAILKGKNPSPVWDKLVFNKIKARLGGRVRLMSSGASPLSADVMEFLRICFGGEVLEGYGMTETSCIISAMDIGDRSIGHVGSPTASCEVKLVDVPEMNYTSDDQPYPRGEICVRGPIIFQGYYKDEVQTKEVIDEDGWLHTGDIGLWLPGGRLKIIDRKKNIFKLAQGEYIAPEKIENVYAKCKFIAQCFIYGDSFNSSLVGIVAVEPEVMKAWAASEGIQCEDLRQLCADPRARAAVLADMDSVGKEAQLRGFEFAKAVRLVAEPFTVDNGLLTPTFKVKRQQAKTYFAKEISDMYAELREAEAPRSKL

SEQ ID NO: 163353 - protein, 369 aa, Zea Mays
MDDLAALRPTIFASVPRLYNRIYTAITNAVKESGGLKEKLFHTAYNAKRQAILKGKNPSPVWDKLVFNKIKARLGGRVRLMSSGASPLSADVMEFLRICFGGEVLEGYGMTETSCIISAMDIGDRSIGHVGSPTASCEVKLVDVPEMNYTSDDQPYPRGEICVRGPIIFQGYYKDEVQTKEVIDEDGWLHTGDIGLWLPGGRLKIIDRKKNIFKLAQGEYIAPEKIENVYAKCKFIAQCFIYGDSFNSSLVGIVAVEPEVMKAWAASEGIQCEDLRQLCADPRARAAVLADMDSVGKEAQLFGLSLSHSQWTMVSSPQHSRSKGSKQRHTLQRKFQICTRSCGRQRHPGRSCNDQFKEKRHIQAYRSYV

SEQ ID NO: 163354 - protein, 69 aa, Zea Mays
MSSLGDGEARHLHMFSSTALSSADDDVLDEFIFLSSSLMITLSCSIFSNRAFQAISSSTSFLRLCRTVI

SEQ ID NO: 163355 - protein, 56 aa, Zea Mays
MGMEWMDVNATNDSAPPARLRQHNGELKGGAKASSAGRPWNLACLVEGFANRSEAT

SEQ ID NO: 163356 - protein, 110 aa, Zea Mays
MSLTAAFRATKIPRALPPKCGEPAASSSASASGDPPPGAAKSTKAPPPWCVYLIASSRIRRTYVGVTTDFPRRLRQHNGELKGGAKASSAGRPWNLACLVEGFANRSEAT

SEQ ID NO: 163357 - protein, 184 aa, Zea Mays
MSCRQPSPSPAPLEPASSALISFPDAALSPSVLCWSASSSCPTFLAPWPPRLGSPAPLRRSAHLPVAALPWRVPASCFSSLCHLPWRPSSNTELPTRPRPLWLSSSSFLFYRSSSPIRCPHLKPVQPLYSPLSPIPLLLAHGELTPCASRVRHSLSSTSLHGCLVVDLCSSYLSDLVEKKHNSI

SEQ ID NO: 163358 - protein, 166 aa, Zea Mays
MFLRRLRTSAAVRRGATDGAVLAAVRAELALELSSSAPPPFRSELAPDFDTVSDAPRAQDVLLRRRDGSEEVLVSALLAPLRFVGRDPLPRAALVKVFVSKPGAAPVLHFDCRASWVGEEERGGGAADYAINAVRYHSSPGAGGADEYEGPAFRSWYAGSPRNHKR

SEQ ID NO: 163359 - protein, 137 aa, Zea Mays
MTAINIQNPRLLIKEMEVGGEVLDTPRGAYGTSPWPICCDRMKDGGVLVGGLKEYLKTIRRCRKGWVLFYWLWNKLQCCLSCKTLFVEELTGIPVTMEVASDLLDRQGPIYREDAAVFVSQSGETADTLLALLLIML

SEQ ID NO: 163360 - protein, 92 aa, Zea Mays
MTAINIQNPRLLIKEMEVGGEVLDTPRGAYGTSPWPICCDRMKDGGVLVGGLKEYLKTIRRCRKGYSCDYGGCKRLAGQTRSHLQRRRRSFC

SEQ ID NO: 163361 - protein, 284 aa, Zea Mays
MIAVACKGGICLWSASYPGNVPFMKSGVTSSSFSAFPRGSGGQWILVDVLRGSSAELVSALCWKPDGRYLASASCNSSSFTIWDVSQGLGTPIRRGLSNISLVRWSPSGDYLLVAKFDGTFHFWETNTWTSEPWSSSNGYVSGANWDPEGRVALLSFSNSTTLGSIHFSSKPPSLDAHLLPVELPEISSLIVSRGIEKLAWDASGERLALSFRDGNEMYRGLIAIYDVRRSPLVSLSLVGFIRGPGEGAKPLAFAFHSKFKQGPLLSCWSSGWCCTYPLILRPR

SEQ ID NO: 163362 - protein, 80 aa, Zea Mays
MRAAHVGEGARVSSSAEPGSPVVRGASPRRAGQVRGFGRAGFRPELRIGRTFCHGASSRREPHRLCPDSCEVTNLEEQVG

SEQ ID NO: 163363 - protein, 81 aa, Zea Mays
MRAAHVGEGARVSSSAEPGSPVVRGASPRRAGQVRGFGRAGFRPELRIGRTFCHGASSRREPHRLCPDSCLGAVAGAVRIR

SEQ ID NO: 163364 - protein, 283 aa, Zea Mays
MRQRLQERTDRLGDLKTRAKKLSEDVVVRREQLCVKIRTLSGASKALEAARSNLKEANELLSGENGCGRLKDLEQQLRMRQQYMVAQVAQIYPVRPLDEQSSDHKPGFTSNITKTSNVESVLPNSPQNRPLVILGLQLSKLSVKKTGYFSDKTEVQKSSTVLGYAAHAVSLIASYLNVPLRYPLRFGGSRSYVLDPAPSVEPSSITSVGTSVPPSTSMRTTEFPLFLDSQETTRSSYAIFLLNKDIEQLLNYIGAESLGPRHVLANLKQLTTIIQSQGYISDG

SEQ ID NO: 163365 - protein, 177 aa, Zea Mays
MEDSAPSSAAPDPPLSPPPSTPPHPHPHPPEEEGGCWVLVPASEVEGAHAPKVIHWDDLQQELARLWSLSAALQPAEDRKAHLTARLESALQVRQAFLEQDNELAEMRQRLQERTDRLGDLKTRAKKLSEDVVVRREQLCVKIRTLSGASKALEAARSNLKGKMVVGALKIWNSSYG

SEQ ID NO: 163366 - protein, 337 aa, Zea Mays
MEDSAPSSAAPDPPLSPPPSTPPHPHPHPPEEEGGCWVLVPASEVEGAHAPKVIHWDDLQQELARLWSLSAALQPAEDRKAHLTARLESALQVRQAFLEQDNELAEMRQRLQERTDRLGDLKTRAKKLSEDVVVRREQLCVKIRTLSGASKALEAARSNLKVLTLWSSKDTVSQRPNQSATQIHGVLCEEANELLSGENGCGRLKDLEQQLRMRQQYMVAQVAQIYPVRPLDEQSSDHKPGFTSNITKTSNVESVLPNSPQNRPLVILGLQLSKLSVKKTGYFSDKTEVQKSSTVLGYAAHSPSLHPISMFLFGILCALEVHGHMFSTLRLQLSHHL

SEQ ID NO: 163367 - protein, 55 aa, Zea Mays
MTTAALSPLRKQGDVSKDPTAPIAVLPQGSSAPPTATTSHEQGTKTSPTATTACT

SEQ ID NO: 163368 - protein, 384 aa, Zea Mays
MPEKIVTAYQSVFDQHFDEDTALNKCKSTVSVLENLKKDIDLASTEGDPPASTMISDLQEQETILKHCIAQLGSVDAARISLINQLKEALTEQESKSEVLRSQLQVARAEAEHAIQLRQRFGGAVVANGTGSSSSPLLMSPQLQSLNPAPSLAPPIGAAGDEPKRTAAAMADKLASLSAPVQVLSSIFSSFVATHGASLSSMNSGSPPRDQLSGAPPGFQVEKRPRLERTVLASDMGAPPFSMQAPRLQQPVGSMPTQAATQMNQAPGLFAPPPPPPLPPLLPPLLQQFGQSAGGMMGMGPFGMMAGSMPPPPPMSSIMPAGFPAPSGPPPPPLPPAQTQPQQQQQSPPQPPAPQQSAGFFQTSAGMGYFPAVQVQQSPSAQRQ

SEQ ID NO: 163369 - protein, 207 aa, Zea Mays
MKNAEIALDALSICLNINGWEMMISIGFLAATGVRVANELGAGSARRAKFAIYNVVVTSFAIGLVLFVLFLFFRGSLAYIFTESQAVAAAVADLSPLLAFSILLNSVQPVLSGVAVGAGWQGVVAYVNVTSYYLIGIPLGAVLGYVVGLHVKGIWIGMLLGTLVQTIVLLFITVKTDWDKQVVAAQERLKKWYMEENRRMQASRGNP

SEQ ID NO: 163370 - protein, 474 aa, Zea Mays
MEKSATTGGGSSGGGGEAAEEAKVPLLQPRAAAAAAAAEEDHGGGGGYDGKAARVGGEQEAVGGGRAVHLHALRVVRRHRHQPGLHRPHRRHRARRLRARLHRPHEVQQRHPAGHGERAGDAVRAVVRGEAVPHAGHLPAAVVDHPVGVRRGAAPRVPVHGAAAGGAGAGPGHLGGGGDRGALLAFVFFGGCPLTWTGFSSAAFADLGAIVRLSLSSGVMLCLELWYNTILVLLTGYMKNAEIALDALSICLNINGWEMMISIGFLAATGYVRNHISFLSFFNNHACNLTKHNEPPIFFRVRVANELGAGSARRAKFAIYNVVVTSFAIGLVLFVLFLFFRGSLAYIFTESQAVAAAVADLSPLLAFSILLNSVQPVLSGVAVGAGWQGVVAYVNVTSYYLIGIPLGAVLGYVVGLHVKGIWIGMLLGTLVQTIVLLFITVKTDWDKQVVAAQERLKKWYMEENRRMQASRGNP

SEQ ID NO: 163371 - protein, 184 aa, Zea Mays
MEKSATTGGGSSGGGGEAAEEAKVPLLQPRAAAAAAAAEEDHGGGGGYDGKAARVGGEQEAVGGGRAVHLHALRVVRRHRHQPGLHRPHRRHRARRLRARLHRPHEVQQRHPGHLDRNAARNAGPDYRASLHNSKDRLGQTGGGRSREAEEMVHGREQKDAGLEGESLSRSFNQLQAWPLWVAD

SEQ ID NO: 163372 - protein, 401 aa, Zea Mays
MASALETLCGQSYGAKQYHMLGIYLQRSWIILSACAVVQLPVYLFTEPLLVALGQDPDISAVAGTVALWYIPVLFSFVWAFPLQMYLQAQIKNMIITYLAMLNLGLHLALSWLAAVHLRLGLAGVMGSMVVAMWIPVFGQLAFVFFGGCPLTWTGFSSAAFADLGAIVRLSLSSGVMLCLELWYNTILVLLTGYMKNAEIALDALSICLNINGWEMMISIGFLAATGVRVANELGAGSARRAKFAIYNVVVTSFAIGLVLFVLFLFFRGSLAYIFTESQAVAAAVADLSPLLAFSILLNSVQPVLSGVAVGAGWQGVVAYVNVTSYYLIGIPLGAVLGYVVGLHVKGIWIGMLLGTLVQTIVLLFITVKTDWDKQVVAAQERLKKWYMEENRRMQASRGNP

SEQ ID NO: 163373 - protein, 50 aa, Zea Mays
MLLGTLVQTIVLLFITVKTDWDKQVVAAQERLKKWYMEENRRMQASRGNP

SEQ ID NO: 163374 - protein, 250 aa, Zea Mays
MLWIMDAVSYWQTRNLLPEDFQKLVSNFRRIRFESTVGAGLPVIASVTRIIASGDPITRIVGSLSGTLGYVMSELEDGKKFSEVVKTAKSLGYTEPDPRDDLGGMDVARKALILARLLGQQISMESINVESLYPSELGPDAVSTKDFLESGLVQLDKSMEERIRAASSRGNVLRYVCEIESAGCQVGLKELPKDSALGRLRGSDNVVEIYSRCYQSSPLVIQGAGAGNDTTAAGVLADIIDLQDLFQTMA

SEQ ID NO: 163375 - protein, 245 aa, Zea Mays
MLCRIGKQETSYREDFQKLVSNFRRIRFESTVGAGLPVIASVTRIIASGDPITRIVGSLSGTLGYVMSELEDGKKFSEVVKTAKSLGYTEPDPRDDLGGMDVARKALILARLLGQQISMESINVESLYPSELGPDAVSTKDFLESGLVQLDKSMEERIRAASSRGNVLRYVCEIESAGCQVGLKELPKDSALGRLRGSDNVVEIYSRCYQSSPLVIQGAGAGNDTTAAGVLADIIDLQDLFQTMA

SEQ ID NO: 163376 - protein, 160 aa, Zea Mays
MLKEEKDVYFSFGSVQDHGASKASQGMHSSKFCLNIAGDTPSSNRLFDAIVTHCVPVIISDDIELPYEDVLDYSKFSIFVRSSDAVKKGYLMRLLSGVSKQQWTKMWDRLKEVDKHFEYQYPSQKDDAVQMIWQALSRKVPSIKLKVHRSNRFSRSNRGK

SEQ ID NO: 163377 - protein, 75 aa, Zea Mays
MCDARVLVKPYKEKGKVPDRFRKLQHPHLGDFAGCTSPTGLLDSRDPFDLQQPQIAFLLLNLPLMQINKLVCLFG

SEQ ID NO: 163378 - protein, 101 aa, Zea Mays
MCDARVLVKPYKEKGKVPDRFSTRTSATSPAARRPPDCWIPGTPSICSSHRSVSSNRSTLCVALHCTACMYAFIPFFSFLAAFLLLNLPLMQINKLVCLFG

SEQ ID NO: 163379 - protein, 207 aa, Zea Mays
MGLHLLDLKIRGHHLGSSPATTVVGQGEGGKGSGNGNAVQLEDVIVQGPLLDPKQDTPTKMNSNSLAMSAPAAAVSAAADAGGEHEEQQEAGHGEEGDGSPKQAVNLGEDEKTESGPVTAPPIVARGFQESGGVAVEHILPDSPFASTTNKEASAPTAQNGGISNGSPHHVASSPLFPPAPAIELPPYNSCFFQAPRFSPGHEAIGL

SEQ ID NO: 163380 - protein, 454 aa, Zea Mays
MKDAIVKKLKDQLFMARAHYPSIAKLKQHEAFTRELKQNIQEHERMLSDTITDADLPPFFAKKLEKMEHTIVRAKSSEVGCSNVERKLRQLLDITEDEAYFHTRQSAFLYHLGVQTMPKTHHCLNMRLTVEYFKSGSNHVDQLNDQKLESPALHHYVMFSRNVLAASTTINSTVMNSQDSDHIVFHVFTDAQNFYAMKYWFDKNSYLESTVRVTNIEDNQKLSKDVDSLEMQQLWPTEEYRVTIRNHSEPFQRQMKTKYISIFGLSHFLLPDLLPGLNRVVVLDDDLIVQKDLSPLWNLDMGGKVIGAVQFCGVRLGQLKPYIADHNVDDDSCVWLSGLNVIELDKWRDTGITSLHDQSVQKLRKDSLKSQRLQALPAGLLAFQDLIYPLEDSWVESGLGHDYGISHVDIEKAATLHYNGVMKPWLDLGILDYKNYWRKYMTSGEKFMTECNIH

SEQ ID NO: 163381 - protein, 339 aa, Zea Mays
MLRHLQRSLRAIHYSPIIGRDAACNPIPLHRFWDSHIEHATRDFSTSTRLTGHPIYQQNELEPTTPVKDTDIIIDRIRKSTRKLEEGPVGKNLSSAEKRKFLVNTLLSLEDSREAVYGTLDAWVAFEQDFPLASLKQALSVLEKEEQWHRIVQVIKWMLSKGQGNTMRTYELLACALEKDNRAEEAHRIWQNKVGHDLHSVPWRFCRLMLAIYYRNNRLDRLVKLFKELEACGRKPPSKDIVRKVEDAYETLGLLEDKKVLLDKYKDLYNKPSRDDRKKGSKSKKIESDKPSALLFCSQMVTVRKARWKHLRTLKTAVSLWMQNQMPLLRLITEPPTSP

SEQ ID NO: 163382 - protein, 472 aa, Zea Mays
MKGHQHQQQSSSPLLPMPPPSKRRCSALAAAVPALVVCSTLLPLVYLLALHRPAGYGSDDRAAVVISTELAGLGARGSRHLENGGAMKHKLLKDVSKKVSGSDGVSAERSTRSRFSQDHAAKSKAKLKGAFSLLGLNNDTFKGPRTSKRFQLKDLSWRSKDTTVNGKENHDQETVHEENTKSCEHEYGSYCLWSTEHREVMKDAIVKKLKDQLFMARAHYPSIAKLKQHEAFTRELKQNIQEHERMLSDTITDADLPPFFAKKLEKMEHTIVRAKSSEVGCSNVERKLRQLLDITEDEAYFHTRQSAFLYHLGVQTMPKTHHCLNMRLTVEYFKSGSNHVDQLNDQKLESPALHHYVMFSRNVLAASTTINSTVMNSQDSDHIVFHVFTDAQNFYAMKYWFDKNSYLESTVRVTNIEDNQKLSKDVDSLEMQQLWPTEEYRVTIRNHSEPFQRQMKTKRTCHLYGTSIWVVK

SEQ ID NO: 163383 - protein, 655 aa, Zea Mays
MKGHQHQQQSSSPLLPMPPPSKRRCSALAAAVPALVVCSTLLPLVYLLALHRPAGYGSDDRAAVVISTLAGLGARGSRHLENGGAMKHKLLKDVSKKVSGSDGVSAERSTRSRFSQDHAAKSKAKLKGAFSLLGLNNDTFKGKGPRTSKRFQLKDLSWRSKDTTVNGKENHDQETVHEENTKSCEHEYGSYCLWSTEHREVMKDAIVKKLKDQLFMARAHYPSIAKLKQHEAFTRELKQNIQEHERMLSDTITDADLPPFFAKKLEKMEHTIVRAKSSEVGCSNVERKLRQLLDITEDEAYFHTRQSAFLYHLGVQTMPKTHHCLNMRLTVEYFKSGSNHVDQLNDQKLESPALHHYVMFSRNVLAASTTINSTVMNSQDSDHIVFHVFTDAQNFYAMKYWFDKNSYLESTVRVTNIEDNQKLSKDVDSLEMQQLWPTEEYRVTIRNHSEPFQRQMKTKYISIFGLSHFLLPDLLPGLNRVVVLDDDLIVQKDLSPLWNLDMGGKVIGAVQFCGVRLGQLKPYIADHNVDDDSCVWLSGLNVIELDKWRDTGITSLHDQSVQKLRKDSLKSQRLQALPAGLLAFQDLIYPLEDSWVESGLGHDYGISHVDIEKAATLHYNGVMKPWLDLGILDYKNYWRKYMTSGEKFMTECNIH

SEQ ID NO: 163384 - protein, 753 aa, Zea Mays
MLSLPLRRRRRLLRFCARRNPTFLRLSIAASAAALSTAPTVASAVVTPISDRLRVLRSLHAVAPDHLLSHPLPSSAHICLAAHLAARARLFAHSRRLLSRLLGAGHRPHLAASLVDILHRAALALGPHRSALPSVFDTLLSLLADHGLLDDAVRALARVRQLRVPPNTRTCNHILLRLARNRQGGLVRRLFEHLPAPNVFTFNIVIDFLCKQGELVEARALFVRMKAMGCSPDVVTYNSLIDGYGKCGELEEVELLVSEMRKSGCAADVVTYNALINCFSKFGWIEKAYSYFGEMKRLGVMANVVTLSTFVDAFCKEGLVREAMKLFAQMRVRGMMPNEFTYTSLVDGTCKAGRLDDAIVLLDEMVHQGLVPNVVTYTVMVDGLCKEGKVAVADDVLSLMERAGVKANELLYTTLIHGHFMNKNSERALDLLNEMKNKGMELDVSLYGTLIWGLCKVQKLDEAKSLLHKMDDCGLRPNTVIYTTIMDAFFKAGKESEAVALLHKIPDSGLQPNVVTYCALIDGLCKAGSIYEAISHFDKMRELGLDPNVQVYTTLIDGFCKIGSLSKAVHLMNEMVDKGMSLDKVVYTSLIDGHMKQGDLQGAFALKAKMIETGAGRPWSMWQAHLENGGAMKHKLLKDVSKMLFVPNGISTERSTRSNCNKDHAIKSKATLKGALSLIALNIVSYNRKMENRFQTLRELGSKGKRSNPLVLEEFMWENEWVEENEDDGDNNIWYAVDEALGATQALRGRNVP

SEQ ID NO: 163385 - protein, 439 aa, Zea Mays
MELALGAMASLAPKLGDLLMKEYVVHKGLKLDIESLSRELVMMNTALVHASRVPPDQLTEVEKLWARHIRELSYDMEDAIDDFILRVVGGGNSATEDTKVFKEILGKVSAVMSMKKFKDRRQISDKVKDIKKLSNELAELYAKYTVRGAGADLAASTGIDPRVINLYKKESDLVGIQESRDKVIKMLSIGTKDDDVQASDQNLKIVSIVGVGGLGKTTLAKTVHDMLEKQFGCSAFISVGRTPNLNKSFKKMLVELDRNYKQVDMARWDLDQFVNELHEFLQNKRYLIVVDDIWDDDSWEAIRYALKDNNCGSRIVMTTRNSGVVTKEEEVYRLKPLSDENSKKLFYKRIESQEGESLDGELSSKIIHKCGGLPLAIIAIASLLAERPCEEWSRVYDSIGLGNNGDNTTKILSYSYYDLPSYLKPCLLQLSIFSRRLSH

SEQ ID NO: 163386 - protein, 402 aa, Zea Mays
MWISEGLVHLEKEGSLFEVGERYFKELVNRSMIQPIQGKNSWFEEEFRIHDVVFDLIRKLSKDEDFVTLLDSNRQHSCPDSLRREKKTGVPRSDWKQRRLVILNQRVHSRGVEVSMDMPEVLRTLNIVHCNVTIMAPLHNFRVCRVLCLVGSYVPISLKHLGKLLHLKFLQISDTTVDELPKEIGHLRSLQALILGYTGLDELPSTVSSLTQLMCLTASGFKRLPADRMGNLTSLEELRLESIVGQCAAQSLVAELGKLTRLRVVSITFSEELEESLQEALVKSLFNLRGLQELSLSSKMWQQGSTMWGDWEPPRQLRGLIVQGIVFSRQPRWINRSCLPHLCFLCLMVHAVEAQDLDNLGRLPELRYLKLEGVIWPPRVLELGTQWCAVGAVPNEGCDRRS

SEQ ID NO: 163387 - protein, 843 aa, Zea Mays
MELALGAMASLAPKLGDLLMEEYVVHKGLKPDIESLSDELVMMNAALLDASRIPPDQLTAVEKLWARKVRDLSYDMEDAIDDFILRVAGGDNSATDSKLLKKILVKVKDVMSIKKLKDRRQISDKVKDIKKLSSELAELRAKYTVRGAGADLAASIGIDPRVINLYKKESDLVGIQESRDKVIRMLSLGTKYDDAHASHQDLKIVSIVGVGGLGKTTLAKTVHDMLKKQFSPSAFISVGRTPNLNRTFEKILVELDAKYKQVDMTRWDLEQFGKELHEFLQNKRYLIVVDDIWDVGSWEAIRYGLKNNNCGSRIIMTTRNFELVTKVEEVYRLKPLSNENSKKLFYKRIQSQEGESLDDELSTEIIDKCGGIPLAIIAIASLLVERPCEEWSKVYHSISLGNGDNTTKILSYSYYDLPSYLKPCLLQLSIFPEDYQFDTNAAIWMWIGEGLVHLEKEEGSLFVVGERYFKELVNRSMIQPIEDKYDRLVEVFRIHDIVFDLIRKLLKDEDFITLLDSGGQHSPQASLRREKKTCVPRSDCKLRRLAVRNHHVQRFPEDIMDIPEALRSLNIIYCNIAIMTPLHSFRVCRVLCIEYSYVPISLKHLGKLLHLKYLELYGTPVDELPKEIGHLRSLQTLLLVNTGLDELPPAVCSLTRLMCLMAEGFKRLPADKMGNLTSLEELRLESIVGQSATQALVAELGKLTRLRVVNITFSEELEESLQEALVQSLFNLWGLQELALSSKWSQQGSAMWGDWEPPRQLRRLIIKGIIFSRQPRWINRSCMAHLCFLSLAVHAVEAQDLDNLARLPELRYLKLDGVSWPPRILELGTQWCAVGAVPNNGCD

SEQ ID NO: 163388 - protein, 136 aa, Zea Mays
MSRCSALRSSSDNAEVHMSASRPGSAAAASSSSSSLSLSCNKHNPQAAAPGYRVEGSFSRRSCKIRRGSDGREAARITRKSAGVASRPVATLGDDDVFSLVVRPGVDVATVMAIVVVMDRICRRPYTPMVCPSQCE

SEQ ID NO: 163389 - protein, 159 aa, Zea Mays
MISKRRRSTRHQEVEEVDDEFDHILDLMMGEYQKRKNEEQRKRRRGSVFGHEIDDHHRRLTDDSETPVLELAETRHGRATKHLRLHQEPYSKTYTYSSPTAVTRGNETGHPSSLSSKRVREGRRIREQWRSLAAMFRTTYQGNRGRRRDATCRTMDRGL

SEQ ID NO: 163390 - protein, 493 aa, Zea Mays
MGMGSDAAALFPFSTSTTATSPRLCGATAVSHRRIFSDVAEDVTVSVDGQSFLLHKFPLVSRCGRIRKMLADSSSSNSKDADGHQKLELANVPGGAYAFELAAKFCYGTNFEITAANVAQLRCVAEYLEMTEDQHADNLVARAEAYLAEVALRSLDGALEVLRRCDDGGPVAEQVGLVARCVDAVAASAGKEQLVSGLAAHLETCDCAAAARCREDWWVEDLSLLRIDHYRRVIAAMRRSGVRPETIGASVAHYAQTWLKGVDVEQRRRQRACWDGSGPFVGDGQRMVVETLVDVLATENVAAVTLSFLFGMLRVAVEVDASLDCRIELERRVGMRLEMAALDDLLVPAAQTSDSMFDVDTVHRILLSFLQRIDEDSSGDLSSPPCGYDSDGLKSPSHGSVLKVGRLMDGYLAEVAPDPYLKLQKFMALIELLPDYARIVDDGLYRAIDIYLKVKPLDYKCHTFFFFFFCSCFSEYRAEIRVPYSKYLSYIQS

SEQ ID NO: 163391 - protein, 590 aa, Zea Mays
MLADSSSSNSKDADGHQKLELANVPGGAYAFELAAKFCYGTNFEITAANVAQLRCVAEYLEMTEDQHADNLVARAEAYLAEVALRSLDGALEVLRRCDDGGPVAEQVGLVARCVDAVAASAGKEQLVSGLAAHLETCDCAAAARCREDWWVEDLSLLRIDHYRRVIAAMRRSGVRPETIGASVAHYAQTWLKGVDVEQRRRQRACWDGSGPFVGDGQRMVVETLVDVLATENVAAVTLSFLFGMLRVAVEVDASLDCRIELERRVGMRLEMAALDDLLVPAAQTSDSMFDVDTVHRILLSFLQRIDEDSSGDLSSPPCGYDSDGLKSPSHGSVLKVGRLMDGYLAEVAPDPYLKLQKFMALIELLPDYARIVDDGLYRAIDIYLKAHPSLTESECKRLCKLIDCQKLSQDASSHAAQNDRLPIQMVVRVLYFEQLRLKSSFSGGGSGCVGLGGADGSFSQRFVCSSSGVPSSCVSPQRDNYASLRRENRELKLEISRMRVRLTELEREQGLMKQQGRMRGGDGGGGGGRGGGGEHGRAFLASLSRGIGRITMFGGGPAAADRRRKKSGGRSSQCSDGKARRRQKASFAYD

SEQ ID NO: 163392 - protein, 443 aa, Zea Mays
MGMGSDAAALFPFSTSTTATSPRLCGATAVSHRRIFSDVAEDVTVSVDGQSFLLHKFPLVSRCGRIRKMLADSSSSNSKDADGHQKLELANVPGGAYAFELAAKFCYGTNFEITAANVAQLRCVAEYLEMTEDQHADNLVARAEAYLAEVALRSLDGALEVLRRCDDGGPVAEQVGLVARCVDAVAASAGKEQLVSGLAAHLETCDCAAAARCREDWWVEDLSLLRIDHYRRVIAAMRRSGVRPETIGASVAHYAQTWLKGVDVEQRRRQRACWDGSGPFVGDGQRMVVETLVDVLATENVAAVTLSFLFGMLRVAVEVDASLDCRIELERRVGMRLEMAALDDLLVPAAQTSDSMFDVDTVHRILLSFLQRIDEDSSGDLSSPPCGYDSDGSWTAISRRWRRIRISSCRSSWPLLSCSRIMRALLMMASIAPSTYTSRRIHL

SEQ ID NO: 163393 - protein, 334 aa, Zea Mays
MHLSLGCRDPAHCTVAATVSSSTMSAASTVDPHPPHQQQQCSDKVSSMEMEIPADLIIRIGESVFPLHKAAVTPAGERRSRRASMSGTTAATELGAARPGALEKVAMMVDEVAAEIATEEALPISKFVGVAGAVPKDARPSHDCLYRAVDIYLKTHPELDEIQREKVCSVMDPLKLSYQARTHASQNKRLPLQAALSALYYDELKLRSAATADVVLDTQSSAAGRACAQARAADAALARENEALRSELARMRAYLSGMERSKGGRSTPPSSPSRRAKKASFLGSVSRTMSRLNPFRSGGWMAKVTTSNAAGGGRQSKTMMQHVVTPKRRRASIS

SEQ ID NO: 163394 - protein, 310 aa, Zea Mays
MSAASTVDPHPPHQQQQCDKVSSMEMEIPADLIIRIGESVFPLHKAAVTPAGERRSRRASMSGTTAATELGAARPGALEKVAMMVDEVAAEIATEEALPISKFVGVAGAVPKDARPSHDCLYRAVDIYLKTHPELDEIQREKVCSVMDPLKLSYQARTHASQNKRLPLQAALSALYYDELKLRSAATADVVLDTQSSAAGRACAQARAADAALARENEALRSELARMRAYLSGMERSKGGRSTPPSSPSRRAKKASFLGSVSRTMSRLNPFRSGGWMAKVTTSNAAGGGRQSKTMMQHVVTPKRRRASIS

SEQ ID NO: 163395 - protein, 620 aa, Zea Mays
MSAASTVDPHPPHQQQQCDKVSSMEMEIPADLIIRIGESVFPLHKTDVNNGLCSYENTQAVMVPKCGYIRRAVEAVATRPSSKGGADADADPPATVELDLSALPGGADAFDKAARYCYGANFEITPQNAAALRCAAAFLDMRHASADLAGRVDEFLARAALRALPGAVAVLRSCEAPGLRAAAEELGVARRAADAVARGVCAEALSLSYSSASRGPGWWKLELAALSPRSFGKVVTALRCRRAEPAVVAAAAAAYAELTTEIRRGPPRAARVRGRRAGKHHAPGVPAPFLCRLLHAAVAAGASAKTCRDLELRVAAVLDQATAQDLLAVALDATGERVRNTDIVRRVVVAFVERQAAVTPAGERRSRRASMSGTTAATELGAARPGALEKVAMMVDEVAAEIATEEALPISKFVGVAGAVPKDARPSHDCLYRAVDIYLKTHPELDEIQREKVCSVMDPLKLSYQARTHASQNKRLPLQAALSALYYDELKLRSAATADVVLDTQSSAAGRACAQARAADAALARENEALRSELARMRAYLSGMERSKGGRSTPPSSPSRRAKKASFLGSVSRTMSRLNPFRSGGWMAKVTTSNAAGGGRQSKTMMQHVVTPKRRRASIS

SEQ ID NO: 163396 - protein, 143 aa, Zea Mays
MPAHPSSPSWLAVAAGVPAPGLPHGDGRPEHLRRPRHAPPPHPPSTHHLSCKPRRPPPQSHDVVLQVSPEPSPQALPRPARPQQRQDLGHVSNLATYCSTTRDLDGLHRCHRGAHRAGGRGASPDRPGGPHRGPTREPHEREV

SEQ ID NO: 163397 - protein, 75 aa, Zea Mays
METRALLFCLGIREKTEREKDLNMLDSDCRRTPTCDGHHGQMRARIGMFKHNMESLSSLLSYGSGIIVISVLRPP

SEQ ID NO: 163398 - protein, 101 aa, Zea Mays
MDNYTTLYLRLVARIEELILDTKVKQRTKHAIDHIDRGSSGSNAPQDWMLYRILFYFVSSLPSPDLALYYVLDFCSLFQVFNVASKVLLERLIIRIITLLT

SEQ ID NO: 163399 - protein, 52 aa, Zea Mays
MSICELAVLLFDNKKCTNIDSQSRDGTHTTHLKNSWTPTRVYLMDEPTTSKP

SEQ ID NO: 163400 - protein, 106 aa, Zea Mays
MFNVVKQHQGLINRVEMIVIPIRCFVNKMGRSCFQNSVRQGKATQVPRGGKAPRGSNLFGAGSGTVSLPRKLMGRRRRRNYPHRADWGPIRNPNVYVYYVICESVR

SEQ ID NO: 163401 - protein, 89 aa, Zea Mays
MILHLKETNREEARTKAVRKAGRLRMTRTNIDRRASHTSGKTILAWEVTLSVSVDTFGVEATAPTFHCERNCFRKINCTGSTVFPPKTA

SEQ ID NO: 163402 - protein, 150 aa, Zea Mays
MNILESSTRSGCQVVLNEIEHQGALMRDLYDLILPTLDPCSRQEKLVQQIFQDISSSSGKVLSFLELGDNSKKQANLIKHRRKRGKNSGVESHMLGEEAKEIGNKRRKNAQHTGSIVTQAPHFDGYKWRKYGQKWISKAKHSRYVIKHMC

SEQ ID NO: 163403 - protein, 282 aa, Zea Mays
MNILESSTRSGCQVVLNEIEHQGALMRDLYDLILPTLDPCSRQEKLVQQIFQDISSSSGKVLSFLELGDNSKKQANLIKHRRKRGKNSGVESHMLGEEAKEIGNKRRKNAQHTGSIVTQAPHFDGYKWRKYGQKWISKAKHSRCANSKDQGCLATKTVQQKESDGSGTVSLFDVEYYGHHICKKDVVNHPCVVDTAHYYSVPIANQNQSSSSPTFVHNDVYGIQDESFENLFMVPSIPEYLTDFTDIEMAGALEVTSEMISENIWAYEMISENICRQPLIAP

SEQ ID NO: 163404 - protein, 285 aa, Zea Mays
MIATHKDYEGFTDEELDKFESAFGWGSTFLSDPQVLCMDSSDPQNPPRIGRQNYEPLTAQEFFSLRHNWQQLLDGKKTYLRPPKNNRVAKHSYANCTFVTPEPLEKALQCQEPLSDFGRKYAENSIVQQKFKILSEHYAHVRQMRMDGSSFYRAFLFSYLENLGKMQASHAEVTRLMECVARSREKFCRLHWNDAYFSNPEAFFSSVVSEFEQLVNSVANGLNADELYKRSLHEITSSRILCLFRLLTEVHIRTHHADYPEFSQETEALMVSVSGCCTVLFRNYA

SEQ ID NO: 163405 - protein, 432 aa, Zea Mays
MASTNAIDFQLTQARALLSEFDNRLREIDSKWETRVGVLETKVADSARNLETISKEIRDGVVAQLAAAEAGVDFRIRLLETGTIIRVAALESTAHAFELWRPHVDLSIDSLFSSIDAVCTEVEKLGIHRFPGPRPSDGAAAPGTATQPEPSSHRPRSSPPPEVHDGDDDDEEIDDDDDDDDDDDDDDDDDDDDDDDEDYEGFTDEELDKFESAFGWGSTFLSDPQVLCMDSSDPQNPPRIGRQNYEPLTAQEFFSLRHNWQQLLDGKKTYLRPPKNNRVAKHSYANCTFVTPEPLEKALQCQEPLSDFGRKYAENSIVQQKFKILSEHYAHVRQMRMDGSSFYRAFLFSYLENLGKMQASHAEVTRLMECVARSREKFCRLHWNDAYFSNPEAFFSSVVSEFEQLVNSVANGLNADELYKRSLHEITSSRNC

SEQ ID NO: 163406 - protein, 356 aa, Zea Mays
MSDPQVLSMHDPQNLPRYIGRQKCDPISTQEFFALRHDWLQLLDGKKTYLRGTADSNYADSNFVTPKPLTVAVLCQESLSYLVLRGARKPITQQKFKILNEHYVCFRPMRTDGSQFYRAFLFSYLENLGKMQGSQAEVTRLMECVARSKVNFCRLEWNKAYFSNPKAFFSSVVSEFEHLVNSVANGLNADELYKISVQENSSSRILCLLRLLTEVHIRTHEVDYNRELSQNRKEKIKALLHCKKSVRPFDADADLLEMKALSQALGIPLHLAAVDDNPLPDRTVQVKWIDFIPRPGPLGSIREYYLGPLGSIRQYYLPSATDKHPVLPAENFLLSGRMPLVTILRTVRATAILYRK

SEQ ID NO: 163407 - protein, 129 aa, Zea Mays
MLLMATYAAIQRASYLHYGSIDQLILVQSTVGLMGTPTETPHLEGMLAALAMLTPPPSRPVMLLRQLQVACRSAVDDARLLSERTPLQHAAEGEKELLAGVSEVKKRLFVCMLASCDGWEQGGAMGGVV

SEQ ID NO: 163408 - protein, 401 aa, Zea Mays
MADNMATLAKQANKGLLYLAELSQQAAVIGEMGEEYNQRYLHKGEYRETPETGIQWVTNCMGRPRYFYKMFRMSTNVFMALHDLLVSSYGLTSTNNVSSMESLAMFLWIVGGPQSFSQAENRFTRSLWTVHTKFHEVLKCLRKLSKDNIKPRDPTFKTEHDRIKEERFWPYFQGAIGAIDGSHVPITVPADEVVNYTCRHGYTSQNVLAICDFDMRFIFVVAGWPGSAHDTRILNHALANFPSFPVPPKGKYYLVDSGYPNRQGYLAPFKGSTYHILEFRLRNGRPPQGKYEMFNFLHSSLRNVIERAFGVLKQKWRILKGIPSFSTRTQKHIIIACMALHNFIRDSNSEDRLFDRCDADEEYLVQQSFTSQAQGDDNPEGENENTMNTIRNKIADALSSA

SEQ ID NO: 163409 - protein, 497 aa, Zea Mays
MDPATVIKKLNKAGKPAQLWGAKPGVVSQLQKLQLGGGGGGGGGKDKQPKGGDGGGKGQQPKGGDGGGKGQQTKGGGGGGGGGGKGGKDANMVLPQPTPQQMQQLMQMKGMKLPPELLMGMGGSKMPPFPSPAPAPGPPPPAAKDPKPAKFSYPEDDEFGDEGSEFDDEFDDFDDEDDFEDDGFDDDDLYGDPKMMAKPVAMPPAAGKKGGNGGKKGGGGGNEIPVQVKGNAHNGGGKKDSGAKQNQGGGKNGGGGGGSQAPQNGKGGGNGNQQGKKGGGGGGGGPPAGSGAPMMGSMAMPAPRPPLPQQQQPGPGMMMRPPNMMGGAGFPGGGMGPGMGQMGGAPMGHPHHPHPHPHQHMGAGGNGMQMQPGGGGGGAVHGMPAGAMPGHAAGFYQGGGGAAGGGMPSGPEMLQAAGNPMAMAAQQQQYMAMMQQQQMMNGHGAGGAGGYPAMGYGYGRPAMQYPPPPPYYYHPMPQRHPHDNMFSDENPNSCTVM

SEQ ID NO: 163410 - protein, 59 aa, Zea Mays
MLEHGVVPCSVRLHDHWRRKQNKINKKDPERYSCGDERARSRAARRLWQEIHATTWHAR

SEQ ID NO: 163411 - protein, 94 aa, Zea Mays
MGERGLHLHQSQREAGEEGGTSKACGAGLPCPRSVVRSCRSPAQSNGMNDDSLTRPRSSRVSAHGTAPFFFPPHLPPLLSRACTDTHKLVGERN

SEQ ID NO: 163412 - protein, 155 aa, Zea Mays
MPAREAVTIPVQGQPFQFPTSSFHFRLQQKDREQVAAVPINGHGGAGAGAPRPRAAGVPRRDVYVRAAAAEGHAVVAARGRRRRRRADAAAEGRSCACARPVLRSTYQIRRQIIQILEIYISATSSAMHGPIMHLVESIVERPGFTELGNEAVLN

SEQ ID NO: 163413 - protein, 99 aa, Zea Mays
MPAREAVTIPVQGQPFQFPTSSFHFRLQQKDREQVAAVPINGHGGAGAGAPRPRAAGVPRRDVYVRAAAAEGHAVVAARGRRRRRRADAAAAGTFFSFF

SEQ ID NO: 163414 - protein, 397 aa, Zea Mays
MVHISLVGPDKVRVSWITAADAPATVDYGTDPGQYPFSATGNTTAYSYVLYQSGSIHDAVIGPLQPSTNYYYRCSGSSSRELSFRTPPAALPFRFVVVGDLGQTGWTESTLKHVAAADYDALLLPGDLSYADLVQPRWDSYGRLVEPLASARPWMVTQGNHEVERLPLLEPRPFKAYNARWRMPYDYAAADSVAAAPPSDDNLFYSFDVAGGAVHVLMLGSYADYAAGSAQLRWLRADLAALRRRGTPPAFVLALVHVPWYSSNEAHQGEGDAMRDAMEALLYHGARVDAVFAGHVHAYERFHRVYAGKEDPCGPVYVTIGDGGNREGLANKFIDPQPSISAFREASFGHGRLEVVNATHALWTWHRNDDNQPVVADQVWINSLAANPTCNRSIKMM

SEQ ID NO: 163415 - protein, 80 aa, Zea Mays
MIEHEAESKHTTYDNTCRKLLLWAFLCGIWAVNATRFPTKTDWLRGFMHTLLLLLLLLVLLLLLLLLLLLLILLLLPTKQ

SEQ ID NO: 163416 - protein, 861 aa, Zea Mays
MDHVPALVLAGCCFLALLPGWACGLGSMSSIAVSYGEDGPVFCGLNSDGSHLVACFGADASVLYGAPPNIPFLGLTAGDGFVCGLLLDTRQPYCWGSNSYVKSGVPQPMVEGARYSELSAGDNHLCALRAAQDGGRGSSAATSLIDCWGYNMTATHAVDEAVSTVSAGSVFNCGLFARNRTVFCWGRSLEMQQVVPSSAIGDGDVNIVPMDAMSTVVGGRFHACGIRSLDHQVACWGFTLHNSTSPPKGLKMYALVAGDYFTCGVPAETSLMPRCWGNSGPLALPMAVPPGICVPTACSHGYYEYVNHGEVGSIKVCKPANSRLCLPCSTGCPEGLYESSPCNATADRVCQFDCLKCVTDECLSFCLSQKRTKSRKLMAFQMRIFVAEIVFAVVLVLSVSVTTCLYVRHKLRHCQCSNRELRLAKSTAYSFRKDNMKIQPDMEDLKIRRAQEFSYEELEQATGGFSEDSQVGKGSFSCVFKGILRDGTVVAVKRAIKASDVKKSSKEFHNELDLLSRLNHAHLLNLLGYCEDGSERLLVYEFMAHGSLYQHLHGKDPNLKKRLNWARRVTIAVQAARGIEYLHGYACPPVIHRDIKSSNILIDEDHNARVADFGLSILGPADSGTPLSELPAGTLGYLDPEYYRLHYLTTKSDVYSFGVVLLEILSGRKAIDMQFEEGNIVEWAVPLIKAGDIFAILDPVLSPPSDLEALKKIASVACKCVRMRGKDRPSMDKVTTALEHALALLMGSPCIEQPILPTEVVLGSSRMHKVSQMSSNHSCSENELADGEDQGIGYRAPSWITFPSVTSSQRRKSSASEADIVGRRATDGRNVGSSIGDGLRSLEEEIAPASPQENLYLQHNF

SEQ ID NO: 163417 - protein, 287 aa, Zea Mays
MKNKCIRSRFVDFLLSIHIFHLIGIFLMSMYDKKPKVVICAVGAPDNWEAVLGGIKSMRLSGEAPVDTKGCEKAGSLLPPKERRFAVLISTMMSSQTKDEVTHAAVERLSENGLLDPDAIVRTDETTLANLIKPVGFYQRKAQFIKEASKICLERFGGDIPDSLNELLALRGVGPKMAHLVMSIAWKNTQGICVDTHVHRISNRLGWVFREGTRQKTTTPEQTRISLEKWLPKDEWEPINPLLVGFGQTICTPLRPKCDKCGINNICPSAFKESSSPIPKQKKTRSP

SEQ ID NO: 163418 - protein, 283 aa, Zea Mays
MQVPDIEDFIYEKAKTLTSSSKATTSLVKVEKKVGVSSVIKDNWEAVLGGIKSMRLSGEAPVDTKGCEKAGSLLPPKERRFAVLISTMMSSQTKDEVTHAAVERLSENGLLDPDAIVRTDETTLANLIKPVGFYQRKAQFIKEASKICLERFGGDIPDSLNELLALRGVGPKMAHLVMSIAWKNTQGICVDTHVHRISNRLGWVFREGTRQKTTTPEQTRISLEKWLPKDEWEPINPLLVGFGQTICTPLRPKCDKCGINNICPSAFKESSSPIPKQKKTRSP

SEQ ID NO: 163419 - protein, 217 aa, Zea Mays
MQVPDIEDFIYEKAKTLTSSSKATTSLVKVEKKVGVSSVIKVGAPDNWEAVLGGIKSMRLSGEAPVDTKGCEKAGSLLPPKERRFAVLISTMMSSQTKDEVTHAAVERLSENGLLDPDAIVRTDETTLANLIKPVGFYQRKAQFIKEASKICLERFGGDIPDSLNELLALRGVGPKMAHLVMSIAWKNTQGICVDTHVHRISNRLGWVFREGTRQVA

SEQ ID NO: 163420 - protein, 617 aa, Zea Mays
MERARRHASRALLRRLLAAAAASPAASPATSSRGISTLSPPPPAAGKQQRRCCPPPRGAHQHAQARAVSVSALQPSDTFPRRHNSATPAEQEAMASACGFGGVDALVDATVPPAIRAPPMRFPGRFDAGFTESQMLDHMRRLASMNRDFKSFIGMGYYGTHVPAVVLRNLMENPAWYTQYTPYQAEIAQGRLESLLNYQTMVADLTGLPMSNASLLDEATAAAEAMAMCSAILRGKKRTFLIASNCHPQTIDVCRTRSDGFGIRVVVADAKDLDYGGGDVCGVLVQYPGTEGEVLDYAEFVRDAHAHGVKVVMATDLLALTALRPPGEIGADIAVGSAQRFGVPMGYGGPHAAFLATSQEYKRLMPGRIIGVSVDSTGRPALRMAMQTREQHIRRDKATSNICTAQALLANMAAMYAVYHGPAGLKAIADRVHGLAGTFAHGLKKLGTVTVQDLPFFDTVRVTCSDARAIAKEAVKNEMNLRVVDANTITVAFDETSTLEDVDKLFKVFNNGKSASFTAESIAPEVSSSIPSSLARESPYLTHPVFNMYHTEHELLRYLHKLQSKDLSLCHSMIPLGSCTMKLNATVEMIPVTFPNFANLHPFAPTDQAAGKCLTTW

SEQ ID NO: 163421 - protein, 416 aa, Zea Mays
MDLLSAAYGGTSDDEDAADPPFSTSVATGSAFFAPPPLKRPWWESHRYLPPTHCLPQQPLLKTAAPLASPSSGRYVSKRERALLPSSQAHVESGSPLPPLTGVEFDCTGFDSRLAPPLEMAALVPEWATKEPCLMGIDEAGRGPVLGPMVYGCVYCACSYNNTLATLKFADSKTLKEEQREELFESLKANSSIGWEVDVICPKDLSAKMLKRSKVNLNEISHNSAMGLVRKVLDMGVLLAEVYVDTVGDPEKYRTKLTEKFPGVKFVVAKKADSLYPVVSGASIAAKVTRDRALRNWVFDETALSLHMRTGSGYPGDPDTKQWLEDHKHPVFGFPTLVRFSWGTCKPFFKDAVDVTWESDEVDEEGTDNGGAKRQVKLSSLGFTGFKRKTEDIESSGKGRCKFFQARKLELVRKFQ

SEQ ID NO: 163422 - protein, 268 aa, Zea Mays
MVYGCVYCACSYNNTLATLKFADSKTLKEEQREELFESLKANSSIGWEVDVICPKDLSAKMLKRSKVNLNEISHNSAMGLVRKVLDMGVLLAEVYVDTVGDPEKYRTKLTEKFPGVKFVVAKKADSLYPVVSGASIAAKVTRDRALRNWVFDETALSLHMRTGSGYPGDPDTKQWLEDHKHPVFGFPTLVRFSWGTCKPFFKDAVDVTWESDEVDEEGTDNGGAKRQVKLSSLGFTGFKRKTEDIESSGKGRCKFFQARKLELVRKFQ

SEQ ID NO: 163423 - protein, 204 aa, Zea Mays
MAALVPEWATKEPCLMGIDEAGRGPVLGPMVYGCVYCACSYNNTLATLKFADSKTLKEEQREELFESLKANSSIGWEVDVICPKDLSAKMLKRSKVNLNEISHNSAMGLVRKVLDMGVLLAEVYVDTVGDPEKYRTKLTEKFPGVKFVVAKKADSLYPVVSGASIAAKVTRDRALRNWVFDETALSLHMRTGSGYPGGHQWCRP

SEQ ID NO: 163424 - protein, 201 aa, Zea Mays
MLLVCSRIRISSNLMSGGSGDDGQQRQCRRGVAVAADVELGAALALADMAAGSGASAVVAAQNHAAEEMTDDEETAASTRLSLRLGRVGVGVVQSPSCSSSSGAAAAHPRHIMLTEAEKEAKRLRRVLANRESARQTILRRQAVRDELARKVADLSSQNATMKKEKDVVMKEYLSLKETNEQLKAAEQAHHHHHLRLSSLF

SEQ ID NO: 163425 - protein, 61 aa, Zea Mays
MNTKYEYLVPQKTAMNKVPSASTWSCFFTFNWNLTSYSKCNVKACGWWFIPKSKCYVKACG

SEQ ID NO: 163426 - protein, 260 aa, Zea Mays
MSQVVSLVVTQFRCNISKALALTNRKWTATIKEQEKDRLTPIVEALSNAYFGPDYSQPKDAVDISLKDIDQLAKSSFPLCMRHMLDKLRENHHLKHGGRMQFGLFLKGAGLKLEDALAFWRAEFSQKIGSERFDKEYAYAIRHNYGKEGKRTDYTPYSCQKIISATPGVGDHHGCPFRHFGEENLRAALNKMGVGGHALEEVMDKVKNRHYQVACTLTFEATHGVSCDSGINHPNQYFSESQKVLRAKNQTMESQSQSAT

SEQ ID NO: 163427 - protein, 392 aa, Zea Mays
MEIVRSQRQVAAAASGGGGGGAGALPTYKAAPQLEVRLEEFELFAIDRLRVLKGISDGLSRGKRPEEMEKLVSELWKTHMRHQDPAENLNKDIISHFVLRLVYCRTEELRKWFLSMETTLFRYRFRLESPETQRMLMTEFQLPYKALPYSEFEAVKDKLSQVARSIGQSASVEHVFFKVPFEEVPDLVAGRRVFLSKGYAYVAMSQVVSLVVTQFRCNISKALALTNRKWTATIKEQEKDRLTPIVEALSNAYFGPDYSQPKDAVDISLKDIDQLAKSSFPLCMRHMLDKLRENHHLKHGGRMQFGLFLKGAGLKLEDALAFWRAEFSQKIGSERFDKEYAYAIRHNYGKEGKRTDYTPYSCQKIISATPGVGDHHGCPFRHFGYNLTLNIL

SEQ ID NO: 163428 - protein, 856 aa, Zea Mays
MAVGDALRRLCEEVGWSYAVFWKAIGAADPVHLVWEDGCCGHVSCSAGSEAPEAGCELGTSVCTLVRKVMTSQIHVVGEGTIGRAAFTGNHQWIVHDPANDHNLRPEVSAEMNHQFAAGIQTIAIIPVLPRGVLQLGATSVVMENTNLVLQYKNLCSQLNNRSSMASSSSVKNDLNQKIQSRPLNGLTSIHPADTRSKFFSGPPLTYQQCYGPDGRTVSSSTLANMGSNASMLMVAQRNGQVGKEHIVYAPDMRFRPQNPYCDRRVGSNTQNSVVSSGFISSISASMERHPLMTNNRQLEQGNTGEPSDSRSVLLKSLAYHNPLVHENTNMTLLHGRGQVPGFVNGHGGFDFLPEGTRVVKSNLYGSTTNQILDQICSSTSGMKGHGPTISYKIPQPTQFVGKTESSKRETCQASVALLSDSDIQVSSVLKTAISQENQTSRSDLIGSKKANEVHDPTDAIVQAVKNMDRRRLPDISNERSPPFLMDPAAESDLFDMFGSEFHHLCHNVDNDLTWKAAKPENSNRDVPEFSDHLGSSPAFNSVDDEFPYSGIFSLTDTDQLLDAVVSNANPGGKQISGDSASCKTSVTDIPSTSYCRLKEPKQSESSAPPLLIKNELAVSNFVKHPSFPEKAADGCLSQNNAIQKSQIRLWIESGQNLKCESASASNSKGVDTSSKASRKRSRPGENPKPRPKDRQLIQDRIKELRELVPNGAKILGGENGPLKDYFEGGATWAFDVGSQSMTCPIIVEDLDRPRQMLVEMLCEDRGIFLEIADFIKGLGLTILRGVMEARKNKIWARFTVEANRDVTRMEIFLSLMRLLEPSYDGGGAGENPNNNIKMPLGIVQYPVIPVSGHLR

SEQ ID NO: 163429 - protein, 707 aa, Zea Mays
MGIFLCILPNMGALYFEQTNKLVHLVWEDGCCGHVSCSAGSEAPEAGCELGTSVCTLVRKVMTSQIHVVGEGTIGRAAFTGNHQWIVHDPANDHNLRPEVSAEMNHQFAAGIQTIAIIPVLPRGVLQLGATSVVMENTNLVLQYKNLCSQLNNRSSMASSSSVKNDLNQKIQSRPLNGLTSIHPADTRSKFFSGPPLTYQQCYGPDGRTVSSSTLANMGSNASMLMVAQRNGQVGKEHIVYAPDMRFRPQNPYCDRRVGSNTQNSVVSSGFISSISASMERHPLMTNNRQLEQGNTGEPSDSRSVLLKSLAYHNPLVHENTNMTLLHGRGQVPGFVNGHGGFDFLPEGTRVVKSNLYGSTTNQILDQICSSTSGMKGHGPTISYKIPQPTQFVGKTESSKRETCQASVALLSDSDIQVSSVLKTAISQENQTSRSDLIGSKKANEVHDPTDAIVQAVKNMDRRRLPDISNERSPPFLMDPAAESDLFDMFGSEFHHLCHNVDNDLTWKAAKPENSNRDVPEFSDHLGSSPAFNSVDDEFPYSGIFSLTDTDQLLDAVVSNANPGGKQISGDSASCKTSVTDIPSTSYCRLKEPKQSESSAPPLLIKNELAVSNFVKHPSFPEKAADGCLSQNNAIQKSQIRLWIESGQNLKCESASASNSKGVDTSSKASRKRSRPGENPKPRPKDRQLIQDRIKELRELVPNGAKH

SEQ ID NO: 163430 - protein, 111 aa, Zea Mays
MSLRHLHATIRAHRLTLFHPFQYHSNIIFLDPMHKASIDVIKRLIQLKGRVPFVPIEQLVKILSPSISDLFLHQEVQRFILNALNLVEVPRLPLTNHSHPILSFDAQVCFG

SEQ ID NO: 163431 - protein, 101 aa, Zea Mays
MATTCNYRREQRSTGSARRRRPHEEADTSPDNTAKSGAWQISRLISSVALTVVTSSLEETASTYVSMSPSSAPNLFRHPLSNKRHRHSIAPSLIHRHTAPT

SEQ ID NO: 163432 - protein, 474 aa, Zea Mays
MASSFKPHAAPKRRALATFNIGALPLDLLVYEILLRLPAKLLCRLRTVCRLWRSILSDPHFAAAHAMRHPGPLIIAAIDERPDVHVNIMDLSGQILKQVRGVPGQRVVSTALDLVFVKKTDSSSSSYRFCNPFSGDVHYLPDQLLNPATGAVYQIPNSFAEEHIDFTSSFISQSRYLFGQVSSTGEYKVFRKLYHLSVQFGGRQLLEICTVNGSNHTGWRAVTPLEKNIQFGVFTSVVINGIIYSQCFDPHHSITYDCRATEEDLIITFDIETEKWGPFMRGPPISFSDAAAQVFNDLRLPPIKQLTLANLNGSLAVVHGPAPSMDIWILMDSGKGLWVKQYIIQFKEYASFQYVHPLVVLRDGRVVLYKEDMQLLQIYDPRTNTLTDSVEVLQDRIYCFLCSSQGCLVSVVAISLAIFFLFVLALTFTALDAGAAPLVCSVDVQVDLSLLWICKNAFILVKLRELYRLVPTIY

SEQ ID NO: 163433 - protein, 99 aa, Zea Mays
MTNLSPRHYEKPKDSQVLQDRIYCFLCSSQGCLVSVVAISLAIFFLFVLALTFTALDAGAAPLVCSVDVQVDLSLLWICKNAFILVKLRELYRLVPTIY

SEQ ID NO: 163434 - protein, 572 aa, Zea Mays
MYLTSCSRLAQPSKSSVALPESGESMYAAARVEVEADRKKEKVDETERMAREKKNTHEKEQIRKVVMGKRKRNEDELGMEEKQMIAEKEKEEKVKKGNGGGILTTKLFSELYISELTAKAIREMNYSHLTEIQARSIPHLMLGNDVLGSAKTGSGKTLAFLIPAIELLHKASFMPRNGTGVIVVCPTRELAMQLLKGINLLVATPGRLLDHLRNTRSFNYKRLQCLIIDEADRILEQNFEEDMKQIFKRLPQDRQTVLFSATQNQKVVEFANFTFGQNEERQKKLVYVGVDDSKLKPTVEGLQQGYCVIPSEKRFLVLYAFLRRMQLRKEDLKVMVFFSSCSSVKFHAEFLNFLGIGCYDIHGQQKQQKRTSTFFQFLKEKNGILLCTNVAARGLDIPDVDYIVQFDPPDDPKDYIHRVGRTARGDKGKGSALLFLLPEELKLLIYLQAAKISLTEYVFSEKHVPKSQSQLEDVVGGNYFLNQSAKEAYRSYLLSYNSHSMKDIFDVHQLDLKKVAASFCFKNPPKVNLDLDSSSSKHRKMRKADGANRHGIGPSTPYGRSGRYGSRQLARF

SEQ ID NO: 163435 - protein, 273 aa, Zea Mays
MGGMVASGSCGDLYHGTYLGEDVAVKVIRAEHLNKNVWNEFTQEVYILREVQHKNVVRFIGACTKPPQFCIITEYMSGGSLYDFVHKQHNVLNLRTLLKFAVDVCRGMCYLHERGIIHRDLKTANLLMDKDHVVKVADFGVARFQDQGGVMTAETGTYRWMAPEVINHQPYDNKADVFSFAIVIWELITSKIPYESMTPLQAAVGVRQGLRPGLPKKTHPKVLDLMQRCWEADPSARPAFPDILAELEDLLAQVQGTPGKTAHAPSNNSNTKD

SEQ ID NO: 163436 - protein, 407 aa, Zea Mays
MDSAYDSDASEEGDDDGDDLSVRQGTPYTHIHEIVFSTIDKPKLLSQLSALLSDIGLNIREAHVFSTHDGYSLDVFVVDGWPVQDADGLHKALEASILRNEGSWSGSSHSSAAERTLPFQVKGGEWEIDKRLLKMGGMVASGSCGDLYHGTYLGEDVAVKVIRAEHLNKNVWNEFTQEVYILREVQHKNVVRFIGACTKPPQFCIITEYMSGGSLYDFVHKQHNVLNLRTLLKFAVDVCRGMCYLHERGIIHRDLKTANLLMDKDHVVKVADFGVARFQDQGGVMTAETGTYRWMAPEVINHQPYDNKADVFSFAIVIWELITSKIPYESMTPLQAAVGVRQGLRPGLPKKTHPKVLDLMQRCWEADPSARPAFPDILAELEDLLAQVQGTPGKTAHAPSNNSNTKD

SEQ ID NO: 163437 - protein, 476 aa, Zea Mays
MVAAEGGPGGAVEEGVGESSSPPREDAVPAPAGSGGSGGSGGAREICAQVLDRLVADGYAEASDPEFRDRLAAHFGRLPHSYQLDINVDKASDVLVHQNVLAEAKDPDRRPAFYVRFLRIEDMDSAYDSDASEEGDDDGDDLSVRQGTPYTHIHEIVFSTIDKPKLLSQLSALLSDIGLNIREAHVFSTHDGYSLDVFVVDGWPVQDADGLHKALEASILRNEGSWSGSSHSSAAERTLPFQVKGGEWEIDKRLLKMGGMVASGSCGDLYHGTYLGEDVAVKVIRAEHLNKNVWNEFTQEVYILREVQHKNVVRFIGACTKPPQFCIITEYMSGGSLYDFVHKQHNVLNLRTLLKFAVDVCRGMCYLHERGIIHRDLKTANLLMDKDHVVKVADFGVARFQDQGGVMTAETGTYRWMAPEVINHQPYDNKADVFSFAIVIWELITSKIPYESMTPLQAAVGVRQDFQRRRIQRYWT

SEQ ID NO: 163438 - protein, 329 aa, Zea Mays
MVHTSFDADGLHKALEASILRNEGSWSGSSHSSAAERTLPFQVKGGEWEIDKRLLKMGGMVASGSCGDLYHGTYLGEDVAVKVIRAEHLNKNVWNEFTQEVYILREVQHKNVVRFIGACTKPPQFCIITEYMSGGSLYDFVHKQHNVLNLRTLLKFAVDVCRGMCYLHERGIIHRDLKTANLLMDKDHVVKVADFGVARFQDQGGVMTAETGTYRWMAPEVINHQPYDNKADVFSFAIVIWELITSKIPYESMTPLQAAVGVRQGLRPGLPKKTHPKVLDLMQRCWEADPSARPAFPDILAELEDLLAQVQGTPGKTAHAPSNNSNTKD

SEQ ID NO: 163439 - protein, 631 aa, Zea Mays
MLRNYLAGDVRVTYFWVQLRNYQTLVILLGLLSLHAPSNSATATDTVYPGNGLAGSSSKLVSNNSKFALGFFRMDNKSFNYATNPYTYLGIWFNKVPKLTPLWSANGESPVMDPASPELAIAGDGNLVILDQATRSVIWSTHAKTTTNDTVAVLQNNGNLVLRSSSNSSTVFWQSFDYPTDTFFAGAKIGWDKVTGLNRRLVSRKNLIDQAPGLYTGEIQKNGVGHLVWNSTVEIESTGLWNGQYFSSAPEMIGNTDNITTFEYVNNDKEVYFTWNLHDETAIVLSQLGVDGQGMVSLWIDKDWVVMYKQPVLQCDAYATCGQFTVCDEGENEGPICNCMKGFSVSSPRDWELGDRRDGCKRNTPLHCGRSRNTDKFYDVQKVMLPQDEMKIQAATSDEDDCSRVCLGNCSCTGYSYREGGCSVWHGKLTNVKKQQPDGNGETLYLRLAAKEVPGVPRKNSRIFRFGAAIIGASAAAVAALMILGLMMIWRRKGKLFTRTVGDAQVGIGITTFRYVDLQHATKNFSEKLGGGSFGSVFKGYLSDSLALAVKRLDGANQGEKQFRAEVSSVGIIQHINLVKLIGFCCQGDQRLLVYEYMPNSDWSCQRPGLPAHWLSGLHYTLRHQAREHTP

SEQ ID NO: 163440 - protein, 248 aa, Zea Mays
MRCLVGGGVQDSPRAAAKRVSPASWRLDAATAEADAGRAEAKGVRFCVRPPDVMETVHEVAIYIHRFHNLDLFQQGWYQMKISAMWEEGGNKTPASPARVVQYEASDVGADDALGIWKIDDVDNSFHTQPFRIKYARQDIYLSVMVSFNIFNIEEEGPAASAVMLKFELMYAPTLENGSELQASSVTSSAAVHEFRIPHRALLGLHSYCPVHFDAFHSVLVDLTLHIVYLKAGATKPSLKVHRYRTKV

SEQ ID NO: 163441 - protein, 366 aa, Zea Mays
MNDESSHRHSLLRVSGSRKFHDDPAQNSASRAELHRKSIAQMKINTQSVQDMHIYADPSHVPVVLIEQHVMVVPQHSSSKDLASNASEQKDTIVLPKLQGEPLVPKSSVGKKSGRILRAVIFVHGFQGHHLDLRLVRNQWLLLDPGADCLMSEANEDKTSGDFKEMGSRLAGEVIAFLKKKMDKLSRYGGCKELKLSFVGHSIGNIIIRSALAEPALQPYLKNLYTYMSISGPHLGYCDDQDPHNTYFYKLCKLKTLENFKNIILLSSPQDGYVPYHSARMELCPAASSDTSKKGQVFTEMLNNCLDQIRAPSSDTRTFMRCDVNFDQSNHGRSLNTMIGRAAHIEFLETDIYAKFIMWSFPDLFR

SEQ ID NO: 163442 - protein, 317 aa, Zea Mays
MSWLFHSIVPARIWLRMLLNKRILLCYLNYKESLWYPKVVLVKKVGASCELSFLCMVFRNQWLLLDPGADCLMSEANEDKTSGDFKEMGSRLAGEVIAFLKKKMDKLSRYGGCKELKLSFVGHSIGNIIIRSALAEPALQPYLKNLYTYMSISGPHLGYWYSSNSLFNSGLWLLKKLKNAQCIHQLTFSDDQDPHNTYFYKLCKLKTLENFKNIILLSSPQDGYVPYHSARMELCPAASSDTSKKGQVFTEMLNNCLDQIRAPSSDTRTFMRCDVNFDQSNHGRSLNTMIGRAAHIEFLETDIYAKFIMWSFPDLFR

SEQ ID NO: 163443 - protein, 519 aa, Zea Mays
MRCLVGGGVQDSPRAAAKRVSPASWRLDAATAEADAGRAEAKGVRFCVRPPDVMETVHEVAIYIHRFHNLDLFQQGWYQMKISAMWEEGGNKTPASPARVVQYEASDVGADDALGIWKIDDVDNSFHTQPFRIKYARQDIYLSVMVSFNIFNIEEEGPAASAVMLKFELMYAPTLENGSELQASSVTSSAAVHEFRIPHRALLGLHSYCPVHFDAFHSVLVDLTLHIVYLKAGATKPSLKVPDQGLGPTSYHIVKALLTSRKLLLEELKKISGAIGKTVEELDVADLNLGRYESFNPSKSGLPNSSKVFPATGKGVGQLTGVLHDFLEKNNDMVNGTDDSMLVNKTKILEYLHDAWAIDRKAEWSIWTVHSKIEIPHRYLRSMNDESSHRHSLLRVSGSRKFHDDPAQNSASRAELHRKSIAQMKINTQSVQDMHIYADPSHVPVVLIEQHVMVVPQHSSSKDLASNASEQKDTIVLPKLQGEPLVPKSSVGKKSGRILRAVIFVHGFQKPMASIGPWS

SEQ ID NO: 163444 - protein, 544 aa, Zea Mays
MLKFELMYAPTLENGSELQASSVTSSAAVHEFRIPHRALLGLHSYCPVHFDAFHSVLVDLTLHIVYLKAGATKPSLKVPDQGLGPTSYHIVKALLTSRKLLLEELKKISGAIGKTVEELDVADLNLGRYESFNPSKSGLPNSSKVFPATGKGVGQLTGVLHDFLEKNNDMVNGTDDSMLVNKTKILEYLHDAWAIDRKAEWSIWTVHSKIEIPHRYLRSMNDESSHRHSLLRVSGSRKFHDDPAQNSASRAELHRKSIAQMKNNMSWLFHSIVPARIWLRMLLNKRILLCYLNYKESLWYPKVVLGHHLDLRLVRNQWLLLDPGADCLMSEANEDKTSGDFKEMGSRLAGEVIAFLKKKMDKLSRYGGCKELKLSFVGHSIGNIIIRSALAEPALQPYLKNLYTYMSISGPHLGYCDDQDPHNTYFYKLCKLKTLENFKNIILLSSPQDGYVPYHSARMELCPAASSDTSKKGQVFTEMLNNCLDQIRAPSSDTRTFMRCDVNFDQSNHGRSLNTMIGRAAHIEFLETDIYAKFIMWSFPDLFR

SEQ ID NO: 163445 - protein, 262 aa, Zea Mays
MNDESSHRHSLLRVSGSRKFHDDPAQNSASRAELHRKSIAQMKINTQSVQDMHIYADPSHVPVVLIEQHVMVVPQHSSSKDLASNASEQKDTIVLPKLQGEPLVPKSSVGKKSGRILRAVIFVHGFQGHHLDLRLVRNQWLLLDPGADCLMSEANEDKTSGDFKEMGSRLAGEVIAFLKKKMDKLSRYGGCKELKLSFVGHSIGNIIIRSALAAILEEPLHLHVNIRASLGLLVQFKFFVQFWTLAAEKAQECSMHPSTHFQ

SEQ ID NO: 163446 - protein, 354 aa, Zea Mays
MNDESSHRHSLLRVSGSRKFHDDPAQNSASRAELHRKSIAQMKNNMSWLFHSIVPARIWLRMLLNKRILLCYLNYKESLWYPKVVLGHHLDLRLVRNQWLLLDPGADCLMSEANEDKTSGDFKEMGSRLAGEVIAFLKKKMDKLSRYGGCKELKLSFVGHSIGNIIIRSALAEPALQPYLKNLYTYMSISGPHLGYWYSSNSLFNSGLWLLKKLKNAQCIHQLTFSDDQDPHNTYFYKLCKLKTLENFKNIILLSSPQDGYVPYHSARMELCPAASSDTSKKGQVFTEMLNNCLDQIRAPSSDTRTFMRCDVNFDQSNHGRSLNTMIGRAAHIEFLETDIYAKFIMWSFPDLFR

SEQ ID NO: 163447 - protein, 278 aa, Zea Mays
MNDESSHRHSLLRVSGSRKFHDDPAQNSASRAELHRKSIAQMKINTQSVQDMHIYADPSHVPVVLIEQHVMVVPQHSSSKDLASNASEQKDTIVLPKLQGEPLVPKSSVGKKSGRILRAVIFVHGFQGHHLDLRLVRNQWLLLDPGADCLMSEANEDKTSGDFKEMGSRLAGEVIAFLKKKMDKLSRYGGCKELKLSFVGHSIGNIIIRSALAEPALQPYLKNLYTYMSISGPHLGYCDDQDPHNTYFYKLCKLKTLENFKNIILLSSPQVIPFSHLK

SEQ ID NO: 163448 - protein, 118 aa, Zea Mays
MHATTNFGNIFFSIMYELLQKQVHHIPQIHVCFPARTKTLGQMVILLHLINGYQQLECHDVPEAVYSYLNFPLHCHQILTQASFLLDQLSVSSLKTFPLKFRTAQLFQCDPCSSFQHH

SEQ ID NO: 163449 - protein, 52 aa, Zea Mays
MVILLHLINGYQQLECHDVPEAVYSYLNFPLHCHQILTQVPLHVYSARCKSH

SEQ ID NO: 163450 - protein, 81 aa, Zea Mays
MMIDLIPHFLFQINGYQQLECHDVPEAVYSYLNFPLHCHQILTQASFLLDQLSVSSLKTFPLKFRTAQLFQCDPCSSFQHH

SEQ ID NO: 163451 - protein, 293 aa, Zea Mays
MPLLFPATPPLPLCRAARVSRRATASVASAARSSSSSSASFDAAAFEAERLRLDAAARAGMESTAAAAEAGPRAWKWAIRKRVWDALEAEGIARDPRPVHHRIPNFDGAPAAADALGRLDIFQKSHCVKVNPDTPQKQVRFLTLSGDKKLLTPQPRLRTGFFSVMDSQMIPVGCIPEACTSVGAAKYGRPIGLDESLKVDLIVIGSVAVDPSSGARLGKGEGFAELEYGMLRYMGAIDDSTMIVTTVHDKQLVDDIPVEKLLVHDVPVDIICTPTQGFTGKSYLQKNWAKSEF

SEQ ID NO: 163452 - protein, 91 aa, Zea Mays
MDSQMIPVGCIPEACTSVGAAKYGRPIGLDESLKVDLIVIGSVAVDPSSGARLGKGEGFAELEYGMLRYMGAIDDSTMIVTTENQGLMDVR

SEQ ID NO: 163453 - protein, 205 aa, Zea Mays
MARAAASRLAAVANSSSTRELFARHLAAAAASAWTAPPRLPEPGRERRSPGWWCPSRSFHATRRVYTRDYYDVLGVSKDASAPDIKKAYYALAKKFHPDTNKDADAEKTFQEVNRAYEVLKDNDKREIYDQLGPEAYERQASGGDPGGPGFPRGNPFGDIFGDIFDNAYRGGQDVKVSVELSFMEAVQGCRKTITWKWRPPWNCA

SEQ ID NO: 163454 - protein, 135 aa, Zea Mays
MKVFGKGGADVDRNKPGDLYVTIKVREDPTFRREGIHVHVDSVLSIAQAVLGGTVTVPTLTGNVTVKVRQGTQPGEKVVLRGKGIKARNSPVFGNQYVHFNIRVPTDVTQRQRELIDEFDKEECADRERPAVASG

SEQ ID NO: 163455 - protein, 451 aa, Zea Mays
MPLPSDVAVIMYTSGSTGLPKGVMMTHRNVLATLSAVMTIVPALGSKDIYLAYLPLAHILELAAEALMAAVGASIGYGSPLTLIDTSNKIKKGTLGDASALKPTLMTAVPAILDRIRDGVRKKVDTKGGIAKQLFDIAYNRRLAAINGSWLGAWGLEKLLWDTLVFGKVRAILGGKIRFVLSGGAPLSGDTQRFINICLGAPIGQGYGLTETCAGGTFSEYDDTSVGRVGAPLPCSYIKLIDWPEGGYLTADLPMPRGEIVIGGPNITKGYFKNEAKTNEVYKDDEKGMRWFYSGDIGRFHPDGCLEIIDRKKDIVKLQHGEYVSLGKVEAALIVSPYVENIMIHADPFHNYCVALVVAAHIELESWASQQGIKYNDFSDLCQKQEAVKEVLGSLAKAAKQARLEKFEIPVKIKLIPEPWTPESGLVTAALKLKREVIRKTYENDLAELYA

SEQ ID NO: 163456 - protein, 639 aa, Zea Mays
MREQERRSPPMETTRTASNEPQLPESGPTTGRSAAAMATGDMAGGGAGEGERGPDSVLPSSPWVALLSVVGSHIARPEFQRKPRSHAPRAAPARPWGSKFPALPPVAPAKMKPTRKVRHKRRQRVHRAPPLPAAAMKRLAKKRARVCTLCGTTQTPSWRTSPADRLVMLCNACGIRARTSGAAPPEQVHVHVHLPTPATTVVVSDPEQPAPLEILQGSEYEHLPTAATVVVSAQEQPPPQEEIQQRSESPPDSPYLNSMLDFDVYLLKRTHPRREKSPPPPPPPTAGITAAALAPPPKGKKDKQKKKWCLHCGTTWSLQWRTGPMGVSTLCNACGVRYRQGRLVPEYRPRASPTFDQSEHSYKHRKVLQLREMQDRPAPPAAFRPSGNRKKRRKGKEQQQHQPAQARSRSEEQDQQPAQPAAVAVLQVRKKSDKGKAQRLPDPQPALRLKLRKELRGKQQHLLPPLPPPPPPPALPPHAGYDYDMSSYSYLPLPPALQHAAGDDDDMEMEQQHLVLLPPAAFLLRAGDEMAQYLPPPPPPPELPHAAADDDMEMEWRLLSLPPALPHATDELMVGEPMPIPPLDPFLFDGPAAPRIIDDDDDDEPATVIVIDDDEPAPVIVVDDDDDDVPVTVIVVDDD

SEQ ID NO: 163457 - protein, 496 aa, Zea Mays
MREQERRSPPMETTRTASNEPQLPESGPTTGRSAAAMATGDMAGGGAGEGERGPDSVLPSSPWVALLSVVGSHIARPEFQRKPRSHAPRAAPARPWGSKFPALPPVAPAKMKPTRKVRHKRRQRVHRAPPLPAAAMKRLAKKRARVCTLCGTTQTPSWRTSPADRLVMLCNACGIRARTSGAAPPEQVHVHVHLPTPATTVVVSDPEQPAPLEILQGSEYEHLPTAATVVVSAQEQPPPQEEIQQRSESPPDSPYLNSMLDFDVYLLKRTHPRREKSPPPPPPPTAGITAAALAPPPKGKKDKQKKKWCLHCGTTWSLQWRTGPMGVSTLCNACGVRYRQGRLVPEYRPRASPTFDQSEHSYKHRKVLQLREMQDRPAPPAAFRPSGNRKKRRKGKEQQQHQPAQARSRSEEQDQQPAQPAAVAVLQVRKKSDKGKAQRLPDPQPALRLKLRKELRGKQQHLLPPLPPPPPPPALPPHAVIVLVPASTTGVAARRR

SEQ ID NO: 163458 - protein, 1091 aa, Zea Mays
MLDQAALIIKKCHGLPLAISAIGGFLANKPKTATEWRKVNDRIRAELDMNPELRSIKTVLMRSYDGLPYHLKSAFLYMSIFPEDYKIKRKRLIRRWIAEGYCRGMHGMSAEEVGDRYFEELLDRSMILLLEEDTKYGGAIDSCQLHDIIREICILKAREENLAFTLEEGCCLSDAQGTIRHLAIGSNWKRDKDVLVESMLDLSHVRSLTVFGEWKPFFISDKMRFLRVLDLGDTFGLRDRHLDQIGQLLHLKYLSIRGCYDICCLPSCLGMKSEAPPNSGCKSCLIPDFENHLIYDPRSVSHDAMPRIVQDAFLLWHSEMSDGSRRVREYVPMRKNNCCTSLLYHIRMGLLRFIFGLSICYFCWRPEAMGAGFNRRDVFNFNMISTLNMILFGGVKAPRGIRKLKALHTLGVVDVSRSKTALKELEELTQLRKLAVAGVHSKYSNKFWSVISANKQLRSLSVKGLGLDSCFGGDLLPPIHLESLKLEGKLVRINEWIHKLQNLSKLQLYNTKIDSADPMQAIGQLPNLTMLTLCHGSFMDNSELLFHGPSSFPELMVLKLKDVDCEIVSFKEQAMPKLELIHADFQGGICGLAFLASLKEIRLGTRTRDTLKKDLQKQLTGDLERMKKINTLYRCKVLMSKISPATRIIRLRIQEPLQPRFSPILCSCFVSLMDSADSIADKAIGRMQEISDKIFSVARETIRPGRGLTSFDATKLRVALEEIACMLEQDSLVLQEHLDIVNNFNIPVDSSYEPSTLSSPPPSDDDLTPHWDFTEHFENFWGVEYDSDQMPSFSDNDMDKSGKVIAKWDSRATKIFTEICVEEVNARNRPQQFLNAEGYANLIRKFKERTGRTYTRDQMKNRWDSLKRMFTQWKTLNERATGLGRDPHTGSISAPDEWWAKQNEDYELVQAMPGCIMFKTGPLENEDELKVMFGPIVCTNERTLVPGVEDANSSSDDHLDHTFGGGENSTPDPCTNTTGKRKMRHDSPKPKKKKDSREEYMKRLVEAFESRSMTTNKSITSSENDPVRLEIKKQLLQVKEDGSPEGSELHLFATHLLIHKKYRDVFANLETKEGRIAWLRNAYELETKKTT

SEQ ID NO: 163459 - protein, 1319 aa, Zea Mays
MSFPLPSLPLPSLPLPSPDLPPPADASAPPTHSLTPVILPRPAATQPATPASASSPLFAQSVAVLPGGRSKAQRWLWDVGLAVEVPAPLFPCTPRPVPVDLRGKCFNCFSPSHRAADCGSLVRCFHCRLPGHRVRACPRRKKTLHHPAKVLVWRPVPRKVVPEKVPLCDMEGVSRVGGDGDGMKKMKRTRRGQRRRRMDREDLGAPGRVSSLASSSLPSVVHPPRSHILKHSRLIDQAEEDFQRALIVNVLGQEGSDCAAVILEALASKYGLEADALQIRRAASNLYLAFFPSVEHAVRALAGGHSFQYPPSGCILGGGHVRHQLLVEGLHPDSVDGTDLSVLKLKAWGFSMDCLPSRYDLHVEEPTSIGEDGSCFPRTLIYSVSVKVTTPVALPVEEQPLFSSPDDDEDRDSKHQRQRKHLPNHQFSAVRTSVHARLGPRITPYGGGGTVDAAPLPNSSVDELQAPVHSVPGNPSSPALGAPIIANIRPLPASVGDSVVSTVPLESTFNLEEQSESRFLVSSWDYNIRAKPPCFKVYARKKISVQLAQSEEIGTSTPLQKFKDGITKQINGILPAPIQPVKRKRKLIPSNFNQRRSRRVAKIPPELGSPSAAKPAHCYYPLEKVSMKLKRLSKRLQSWGHKMVGNVETQLGLAREVLHRLEIAQDIRTLAVEEVFNNHTENTNLGTDMLDQAALIIKKCHGLPLAISAIGGFLANKPKTATEWRKVNDRIRAELDMNPELRSIKTVLMRSYDGLPYHLKSAFLYMSIFPEDYKIKRKRLIRRWIAEGYCRGMHGMSAEEVGDRYFEELLDRSMILLLEEDTKYGGAIDSCQLHDIIREICILKAREENLAFTLEEGCCLSDAQGTIRHLAIGSNWKRDKDVLVESMLDLSHVRSLTVFGEWKPFFISDKMRFLRVLDLGDTFGLRDRHLDQIGQLLHLKYLSIRGCYDICCLPSCLGMKSEAPPNSGCKSCLIPDFENHLIYDPRSVSHDAMPRIVQDAFLLWHSEMSDGSRRVREYVPMRKNNCCTSLLYHIRMGLLRFIFGLSICYFCWRPEAMGAGFNRRDVFNFNMISTLNMILFGGVKAPRGIRKLKALHTLGVVDVSRSKTALKELEELTQLRKLAVAGVHSKYSNKFWSVISANKQLRSLSVKGLGLDSCFGGDLLPPIHLESLKLEGKLVRINEWIHKLQNLSKLQLYNTKIDSADPMQAIGQLPNLTMLTLCHGSFMDNSELLFHGPSSFPELMVLKLKDVDCEIVSFKEQAMPKLELIHADFQGGICGLAFLASLKEIRLGTRTRDTLKKDLQKQLTGDLERVSLKLL

SEQ ID NO: 163460 - protein, 101 aa, Zea Mays
MLYFFGTGCAMILESQYEKSHNCKLLKAVPYVCHLFRNNIICTCKSAGELQRRTLASKRVPPASRRAPTRQEGDLRRRELRRGRRLGARRKQIDRSKQSQG

SEQ ID NO: 163461 - protein, 151 aa, Zea Mays
MYFSIGEGRERKGKFSNQTMPTKFEVQTAPLSDGVLGIIRQIVIEVCHDIGIPVREISQLQTTESSTICLSFVQKQYYLHLQVCRRAPTTNTGVQTSPPGEQASSNAARGRSSAQGTPARAAAGCPPETNRSLKAKSGVALEIEKYEYLPV

SEQ ID NO: 163462 - protein, 159 aa, Zea Mays
MSITIHVMATTSEGEGRERKGKFSNQTMPTKFEVQTAPLSDGVLGIIRQIVIEVCHDIGIPVREISQLQTTESSTICLSFVQKQYYLHLQVCRRAPTTNTGVQTSPPGEQASSNAARGRSSAQGTPARAAAGCPPETNRSLKAKSGVALEIEKYEYLPV

SEQ ID NO: 163463 - protein, 123 aa, Zea Mays
MVLRGWKLLCSLFRLHPANGHEYRRFAGSCSAPGSLGGLASAAGLLYSSPCPRMCIRRFASRLNPFPQMVQKCVCGASISSSSSCSSSYERLSPSLVISCSSTRTPSSSTSMPPSVHPLNSSS

SEQ ID NO: 163464 - protein, 404 aa, Zea Mays
MPPGLLPRGCLLLVVPHLRRHLPALCSTLRSSHSHKRPAVIFSPVRAVSGYSAMAAGSPEQQQRSVVVKETVELTETEERIFRRLLEVVRHFSLGTQLRVAGGWVRDKLLGKDSADIDIALDNMTGQNFCEKVNEYSKLIGEQQKGIGVIQCNPDQSKHLETARMLILDIWIDFVNLRSETYTENSRIPTMEIGTAKEDAYRRDLTINSLFFNINNNSVEDLTGRGIEDLKKGLIVTPLPAKATFLDDPLRVLRAIRFAARFNFTLDEDLKEAASDEKVKSELGTKISRERIGHEIDLMMSDKHPVKAMCDIRDLGLFYVVFSFPEKSNPPVFDKCDWQCVSHIEAAWDLAYSIGSCVFSSGSDSKSQDERRRLYLYSALFNPLRSMFYLDKRSKKVTIKLCII

SEQ ID NO: 163465 - protein, 405 aa, Zea Mays
MPPGLLPRGCLLLVVPHLRRHLPALCSTLRSSHSHKRPAVIFSPVRAVSGYSAMAAGSPEQQQRSVVVKETVELTETEERIFRRLLEVVRHFSLGTQLRVAGGWVRDKLLGKDSADIDIALDNMTGQNFCEKVNEYSKLIGEQQKGIGVIQCNPDQSKHLETARMLILDIWIDFVNLRSETYTENSRIPTMEIGTAKEDAYRRDLTINSLFFNINNNSVEDLTGRGIEDLKKGLIVTPLPAKATFLDDPLRVLRAIRFAARFNFTLDEDLKEAASDEKVKSELGTKISRERIGHEIDLMMSDKHPVKAMCDIRDLGLFYVVFSFPEKSNPPVFDKCDWQCVSHIEAAWDLAYSIGSCVFSSGSDSKSQDERRRLYLYSALFNPLRSMFYLDKRSKKGKPGAAVRV

SEQ ID NO: 163466 - protein, 374 aa, Zea Mays
MFMLLCHHEGIEDLKKGLIVTPLPAKATFLDDPLRVLRAIRFAARFNFTLDEDLKEAASDEKVKSELGTKISRERIGHEIDLMMSDKHPVKAMCDIRDLGLFYVVFSFPEKSNPPVFDKCDWQCVSHIEAAWDLAYSIGSCVFSSGSDSKSQDERRRLYLYSALFNPLRSMFYLDKRSKKAPVSSFIIKDSLKLKTSDAETVVNIHAASEKFAELIPLLESNADVYALKEKLEDEYLEIPGDSVKRVFAGLILREIKEFWRVALLLSILFYRETGTPAGTLDEQDELRRRKEKYIRAERSITDLDLDGVWKLKPILDGKSIMGVMQVKSGGPLIGKWQQRVLKWQLAHPDGTVDECVEWMKQSQSKRQKVESST

SEQ ID NO: 163467 - protein, 335 aa, Zea Mays
MSLAGAGAAALRKPATWRRPGGRGVARRRVAVAALLLALAYAGGLLMFLLDERLSGGSVGGAAAGGLGPMVTVASSVRRRRPLPSPADAPPHAQPGSVYRSHLVFERLLPAMRDDATLASSLSASASWRRTMLMTSHYQNSGDPWMPCVNGRLTRSELPPSNGYLMIEANGGLNQQRLSVCDAVAVASLLNATLVIPTFHLNSVWRDPSKFGDIFDEDHFIETLKEHVRVVKKLPEDVLLRFNHNISSIPNMRTKAYSSPNHYVQNVLPKLLELGAVRIAPFSNRLAQSVPLNIQALRCLVNYHALRFAEPIRILSDELVGRMTKKSLLTGGKIW

SEQ ID NO: 163468 - protein, 239 aa, Zea Mays
MHSQLCHFSILLIPCMFQDMVAFSCCTYDGGWREKTEMDNARERSWRGKFRRHGRVINPEANRRDGKCPLTPLEVGMMLRGMGFDNTTSLYVASGKIYNSEKYMAPLRQMFPLLTTKDSLALPEELAQFKGHSSQLAALDYTVCVHSEVFVTTQGGNFPHFLMGHRRYMFGGNAKTIKPDKRKLVLSFDDPNIRWDQFKQNMQEILQHSDMRSIALRKPNDSVYTFPMPDCMCKQDGMI

SEQ ID NO: 163469 - protein, 383 aa, Zea Mays
MSLAGAGAAALRKPATWRRPGGRGVARRRVAVAALLLALAYAGGLLMFLLDERLSGGSVGGAAAGGLGPMVTVASSVRRRRPLPSPADAPPHAQPGSVYRSHLVFERLLPAMRDDATLASSLSASASWRRTMLMTSHYQNSGDPWMPCVNGRLTRSELPPSNGYLMIEANGGLNQQRLSVCDAVAVASLLNATLVIPTFHLNSVWRDPSKFGDIFDEDHFIETLKEHVRVVKKLPEDVLLRFNHNISSIPNMRTKAYSSPNHYVQNVLPKLLELGAVRIAPFSNRLAQSVPLNIQALRCLVNYHALRFAEPIRILSDELVGRMTKKSLLTGGKYVSVHLRFEEDMVAFSCCTYDGGWREKTEMDNARERSWRGWHDAKGHGIR

SEQ ID NO: 163470 - protein, 431 aa, Zea Mays
MTSHYQNSGDPWMPCVNGRLTRSELPPSNGYLMIEANGGLNQQRLSVCDAVAVASLLNATLVIPTFHLNSVWRDPSKFGDIFDEDHFIETLKEHVRVVKKLPEDVLLRFNHNISSIPNMRTKAYSSPNHYVQNVLPKLLELGAVRIAPFSNRLAQSVPLNIQALRCLVNYHALRFAEPIRILSDELVGRMTKKSLLTGGKYVSVHLRFEEDMVAFSCCTYDGGWREKTEMDNARERSWRGKFRRHGRVINPEANRRDGKCPLTPLEVGMMLRGMGFDNTTSLYVASGKIYNSEKYMAPLRQMFPLLTTKDSLALPEELAQFKGHSSQLAALDYTVCVHSEVFVTTQGGNFPHFLMGHRRYMFGGNAKTIKPDKRKLVLSFDDPNIRWDQFKQNMQEILQHSDMRSIALRKPNDSVYTFPMPDCMCKQDGMI

SEQ ID NO: 163471 - protein, 244 aa, Zea Mays
MTSHYQNSGDPWMPCVNGRLTRSELPPSNGYLMIEANGGLNQQRLSVCDAVAVASLLNATLVIPTFHLNSVWRDPSKFGDIFDEDHFIETLKEHVRVVKKLPEDVLLRFNHNISSIPNMRTKAYSSPNHYVQNVLPKLLELGAVRIAPFSNRLAQSVPLNIQALRCLVNYHALRFAEPIRILSDELVGRMTKKSLLTGGKYVSVHLRFEEPFHAVHMMVAGGKKLKWTMLVKGAGEVSFVGMVE

SEQ ID NO: 163472 - protein, 214 aa, Zea Mays
MTEDAQNALRRTTETYSKVTRFFFICNYISRIIEPLASRCAKFRFKPLSEEVMSSRIMHICNEEGLNLNAQAMSTLSVISQGDLRRAITYLQSAARLFGSSISSSDLISVSGVIPEDVVKSLLAACRSGEFDVANKEVSSIIADGYPVSQLMAQFLDVIVSADDIPDDQKARICKKLGETDKCLVDGADEYLQLLDVASETIRSLFNMPRTLVF

SEQ ID NO: 163473 - protein, 340 aa, Zea Mays
MAPLVPMSQPWVEKYRPRQVKDVAHQEEVIRVLNNTLQTADLPHMLFYGPPGTGKTTTALAIAYQLYGPELYKSRVLELNASDDRGINVVRTKIKNFAAVAVGTARKAGYPCPPYKIIILDEADSMTEDAQNALRRTTETYSKVTRFFFICNYISRIIEPLASRCAKFRFKPLSEEVMSSRIMHICNEEGLNLNAQAMSTLSVISQGDLRRAITYLQSAARLFGSSISSSDLISVSGVIPEDVVKSLLAACRSGEFDVANKEVSSIIADGYPVSQLMAQMLLLARMIFQMIKRQGYVKSLGKPISAWLMGQMSIYSCWMSPARLSALFSTCRGRWSSKSS

SEQ ID NO: 163474 - protein, 422 aa, Zea Mays
MDAEAAAAAAATAVEERERLRRSFASGRTRPAAWREAQLRGLLRMATEREDDICAALHADLAKPLTECYVHEISLVISSCKFALKNLKKWMKPRKVPGGLLTFPSAASVAAEPLGVVLVISAWNYPFCNSRVGRIVMSYAAKHLTPVVLELGGKCPVVVDSDVNLHVAAKRIAAGKWGCNSGQACVSPDYVVTTKSFAPKLLESLKRVLFEFYGEEPLRSPDLSRVVNSNHFNRLMALMDDYSVSGNVAFGGQIDERRLRIAPTLLLDVPLDSAMMKEEIFGPLLPIITVDKIGESFAVINSMPKPLAAYLFSNDGQLKQQFERTVSAGGIMFNDTGIHLTNPNLPFGGVGESGMGAYHGAFSFDAFSHRKAVLDRSFLGEARARYPPYTPAKLAILRGVLNGSPLATVQAAAGCTGGASAD

SEQ ID NO: 163475 - protein, 254 aa, Zea Mays
MAIHYLLRRGVSGGSLLHPIRGLFLASKELGRRPLGSAAAGDAAAELRGAREDVRQLLKATSCHPILVRLGWHDAGTYDKNITEWPKCGGANGSLRFEVELKHGANAGLVNALKLIQPIKDKFSGVTYADLFQLASATAIEEAGGPKIPMIYGRVDVIAPEQCPPEGRLPAAGPPSPAEHLREVFYRMGLNDKEIVALSGAHTLGRARPERSGWGKSETKYTKDGPGAPGGQSWTSHWLKFDNSYFKKDEMITS

SEQ ID NO: 163476 - protein, 187 aa, Zea Mays
MCFEVYNGRKWPLGPSSSRGIYNGHSVMCFELGCTSFRFVDFHNRLYLYVLLLFIWDWHIEEQNCDQRTKNQRERPTYVQLYTHTQKWRAIPATGGSSRRRIRSAAGRSALEAGRAAPSPPEVLLQRHGGGGGEDDHTGALLHLRQGDWEQVGPLPRPPPGRLLGRGCSGCSGTVPLLLQANAHDPC

SEQ ID NO: 163477 - protein, 72 aa, Zea Mays
MCFEVYNGRKWPLGPSSSRGIYNGHSVMCFELGCTSFRFVDFHNRLYLYVLLLFIWDWHIVRSDSSCFGLIR

SEQ ID NO: 163478 - protein, 68 aa, Zea Mays
MPWAPTCHRSCGPLQPPPWVRALRYKASWAPRTPPQPSHIYAIGAYASLCRRAVCAIRGEREGEPRPL

SEQ ID NO: 163479 - protein, 90 aa, Zea Mays
MCMHELLEACKKVADLIDGDAGGDGGVHRAQRALAAGRLGLDVRARRRRRRAPPPVGHALIDRSSPAADSRPYVSRCKTKDIICSTHMTS

SEQ ID NO: 163480 - protein, 498 aa, Zea Mays
MGAEPVDFSPPPPPEPTLSPEPEISGKDRGGNWKADMMSALGESVSFGRFLSEPLEWGKRSAFAHNRYLEEAAVQARPGSVAQKKAFFEAHYARKKRKSEDHAAAASDDVAGGDGELEAAEDGGAASWSLSATESSCMTDEPPAPAEEVCCGWEEDRVVDCGGSASDKPVHVPEELADITDAVGPCCRMDAPTDETQHMEGGDEVVGAVLPLQKQDLCMDSLTAVDATLKDITDSVKRRRIQMASLLPKPAKLSSPPTAKKGQNSSAKRRSMRHSAKENNSPPSAGSNKLRTTSTPKKRSTLSALHMSMSFPRCESGNTSMASRNLGTTIAARISELEHANATKPAEKNTKPHDLRLPRKKFSSALPEIAPRTSQVDEERSSHIMKIKEKLFGSTFPTLHQKYGITKEKERKINNEHGFKESRHSFCFKATLLPNFYRSNKQPKDTSHQATQEILSSSKSGHLSRDINQAHQTGKDAQTSKDASDAKQICCFPLRKMY

SEQ ID NO: 163481 - protein, 459 aa, Zea Mays
MGAEPVDFSPPPPPEPTLSPEPEISGKDRGGNWKADMMSALGESVSFGRFLSEPLEWGKRSAFAHNRYLEEAAVQARPGSVAQKKAFFEAHYARKKRKSEDHAAAASDDVAGGDGELEAAEDGGAASWSLSATESSCMTDEPPAPAEEVCCGWEEDRVVDCGGSASDKPVHVPEELADITDAVGPCCRMDAPTDETQHMEGGDEVVGAVLPLQKQDLCMDSLTAVDATLKDITDSVKRRRIQMASLLPKPAKLSSPPTAKKGQNSSAKRRSMRHSAKENNSPPSAGSNKLRTTSTPKKRSTLSALHMSMSFPRCESGNTSMASRNLGTTIAARISELEHANATKPAEKNTKPHDLRLPRKKFSSALPEIAPRTSQVDEERSSHIMKIKEKLFGSTFPTLHQKYGITKEKEATQEILSSSKSGHLSRDINQAHQTGKDAQTSKDASDAKQICCFPLRKMY

SEQ ID NO: 163482 - protein, 62 aa, Zea Mays
MSGTKCTLECLQNIYRMTQNGHQHPHVVRELDLVQDSPWFKTEDITGLTSGNWFSVPIPIES

SEQ ID NO: 163483 - protein, 354 aa, Zea Mays
MASQLRLHLAATPPLLPHRRPHLARPLCPTLNPIRAPLPPLSRVLSHARPARAVGGDESGGGPVLVGEDSAAFELKDQSVASWAYFAGILGAVLVALNVLWIDPSTGVGTKFLDAVASVSDSHEVVMLLLTIIFAVVHSGMASLRESGEKIVGERVYRVLFAGISLPLAVTTIVYFINHRYDGTQLWQVQGITGIHELLWFSSFISFFFLYPSTFNLLEVAAVDKPKLHMWETGIMRITRHPQMVGQVIWCLAHTLWIGNSVAVAASVGLISHHLFGAWNGDRRLLSRYGEAFEVLKKRTSVMPFAAIIDGRQKLPKDYHKEFFRLPYVAITMLTLGAYFAHPLMQASSYQLPW

SEQ ID NO: 163484 - protein, 317 aa, Zea Mays
MASQLRLHLAATPPLLPHRRPHLARPLCPTLNPIRAPLPPLSRVLSHARPARAVGGGIEPKEGVVAEGDESGGGPVLVGEDSAAFELKDQSVASWAYFAGILGAVLVALNVLWIDPSTGVGTKFLDAVASVSDSHEVYFINHRYDGTQLWQVQGITGIHELLWFSSFISFFFLYPSTFNLLEVAAVDKPKLHMWETGIMRITRHPQMVGQVIWCLAHTLWIGNSVAVAASVGLISHHLFGAWNGDRRLLSRYGEAFEVLKKRTSVMPFAAIIDGRQKLPKDYHKEFFRLPYVAITMLTLGAYFAHPLMQASSYQLPW

SEQ ID NO: 163485 - protein, 264 aa, Zea Mays
MQLYSLFDPVSGKERLQQQNLTPEEIETLEFNFMTYLFQVMEKSNFKLLSDEEFDIAQSGKYLLNLPIKVDESKLDKKLLTKYFKEHPHDNLPEFSNKYIIFRRGIGIDRTTDYFFIEKVDVMISRAWRSLLRVTRIDRLFSKKQHLKPKNGTKKTDEINEDEEDPELFVERIRLEKIELSLKNLMSKMTIQEPTFDRMIVVYRRAGTKTEPDRGIFVKHFKNIPMADMEIVLPEKKNPSLTPMDWVKFLISAVIGLLMTCRSL

SEQ ID NO: 163486 - protein, 422 aa, Zea Mays
MQLYSLFDPVSGKERLQQQNLTPEEIETLEFNFMTYLFQVMEKSNFKLLSDEEFDIAQSGKYLLNLPIKVDESKLDKKLLTKYFKEHPHDNLPEFSNKYIIFRRGIGIDRTTDYFFIEKVDVMISRAWRSLLRVTRIDRLFSKKQHLKPKNGTKKTDEINEDEEDPELFVERIRLEKIELSLKNLMSKMTIQEPTFDRMIVVYRRAGTKTEPDRGIFVKHFKNIPMADMEIVLPEKKNPSLTPMDWVKFLISAVIGLVTLVGSLEMPKADVWVVIAILSGVIGYCAKIYFTFQQNMTMYQNLITKSMYDKQLDSGKGTLLHLCDDVIQQEVKEVIICYYILMEQGKATIQDLDLRCEELIKEEFGADCNFDVHDAIKKLEKLSIVHRDSIGRILCVPLKRANEIIGTTTEELVMRAQQNLAS

SEQ ID NO: 163487 - protein, 151 aa, Zea Mays
MSDAAMGKLSLGAKALSEGGFEKLYKQTFSSSPDEHLKKTFACYLSTATGPVAGTLYLTNLNVAFCSDRPLSFAAPSGQTAWSYYKVMIPLGKIATVEPVTMKESPPEKYVHVVTVDSHDFWFMGFVSYDKAVHYLVEAVSQRGVATAGGK

SEQ ID NO: 163488 - protein, 210 aa, Zea Mays
MESKDGTHDPATTAAPPAGAPQPAMPSAETARWGTRQMGPPAAPGAHPENQEAARWTAARGDQELPPYVIIGEPVAAPPPPQHRGKGDSPMEHILDFFNTWSRKAEELASNIWVNLKAAPSMSDAAMGKLSLGAKALSEGGFEKLYKQTFSSSPDEHLKKTFACYLSTATGPVAGTLYLTNLNVAFCSDRPLSFAAPSGQTAWSYYKVWL

SEQ ID NO: 163489 - protein, 136 aa, Zea Mays
MVDKPVDTILLKLRGLYARAKELSENEISASNALIGLLDGLLQSGASTAQKKKIEVGEQKKKRIKSDTDSARFSAASMRNQLDQAASLKGEQVAARVKSDDEKDEWFVVKVIHFDKETKEYVSTLYFSLCRADIYF

SEQ ID NO: 163490 - protein, 246 aa, Zea Mays
MSSSVGGGSAGGGGVDMVSLLEKAKDLDQLKKEQDEIVADINKIHKKLLASPEMVDKPVDTILLKLRGLYARAKELSENEISASNALIGLLDGLLQSGASTAQKKKIEVGEQKKKRIKSDTDSARFSAASMRNQLDQAASLKGEQVAARVKSDDEKDEWFVVKVIHFDKETKEYEVLDEEPGDDEESTQKKYKLPMSYIIPFPKKGDPSSAPDFGQGRQVLAVYPGTTALYRATVASHRKLYSGVR

SEQ ID NO: 163491 - protein, 248 aa, Zea Mays
MASLWLARASSQLARRAAARRPPPRPARHGSGQPTSSWFLGSVPQAALGSPALDTSRRGFCSVRRFAGESSAAAAAAAVVDEEPESGFAAGDQQAVDFPGGKVSFVAEMNFLPESTRERINCYRVLDDDGRTISGSRFQEVSRELALKMYSEMVTLQIMDTIFYEAQRQGRISFYLTSNGEEAINIASAAALSMDDIVLPQSPKCSTGNLVFFYGVASLCRSLQTSALGTSWTMVKGGRCPFTMGRTV

SEQ ID NO: 163492 - protein, 542 aa, Zea Mays
MVPSGQHNPMGPGQQVGASLLRTSSSLLGGGAGAGAGGQPGMGMGVGVLPSQSPFSSLVSPRTQYGGVGGGNGLLAGASSVASMLSRQQSYGNGGTGVMPGSGAGLPIGGLQHRGGLDGVGDLVGTGGPDSMAFSSSGPGSLGNQLGVDSLQQQQQLDAPQDSQNQQEHQQQMSMTYNQQHMMSQTQQQQQPAVKLENGGVLGGVKLEQQMGQPDQSVSAQMLRSSSGGVKLEPQLQALRSLGAIKMEHQSSDPSVLLQQQQHMLQLSKQNPQAAATQLSLLQQQQRFLQLQQQQQQQQILKNLPLQRNQLQQQQQQQQQQQQQQLLRQQSLNMRTGKSAAYEPGTCAKRLTHYMYHQQNRPQDNNIEYWRNFVNEYFAPSAKKRWCVSLYGNGRQTTGVFPQDVWHCEICNRKPGRGFETTVEVLPRLCQIKYASGTLEELLYVDMPRESQNSSGQIVLDYTKAIQESVFEQLRVVREGHLRIVFNQDLKIASWEFCARRHEELIPRRSIIPQSTWCCSAEVPVFCSKFSITIKSGLAKQL

SEQ ID NO: 163493 - protein, 188 aa, Zea Mays
MENYQVWMILGTYHSLLHITLSQRKTWKIMATLSIYQCVTKAGFELTRVTLIDIKGLVVLDRLVKPANSIIDYNTRFSGITAEMLADVSTTLQEIQEEFVGLVYKETILVGHSLENDLMALQISHGLIIDTAVLYKYKRGSRCKIALRVLTRKFLGREIQNTGSGHDSVEDAKAALELAILKIKHGRN

SEQ ID NO: 163494 - protein, 356 aa, Zea Mays
MSTASGNGNGGSSSSMLYDLYGPNAKPDVVFKEAALNSTLNLQDVQGLVTWVIGDGMLPSWVFVKNKPLIPKVVLLYVPGLDATLYMSHTRLLSSLKELCGNPKPVLASSRMPDERHTIDALLTCRVKRKRDVKTSNESSKPDIDGKLSSLDDLGDIPFPVTYYTLSEKDLEDNGYSFNLPGFVPTVSAPSGSSPHKVLALDCEMCVTKAGFELTRVTLIDIKGLVVLDRLVKPANSIIDYNTRFSGITAEMLADVSTTLQEIQEEFVGLVYKETILVGHSLENDLMALQISHGLIIDTAVLYKYKRGSRCKIALRVLTRKFLGREIQNTGSGHDSVEDAKAALELAILKIKHGRN

SEQ ID NO: 163495 - protein, 496 aa, Zea Mays
MLPSWVFVKNKPLIPKVVLLYVPGLDATLYMSHTRLLSSLKELCGNPKPVLASSRMPDERHTIDALLTCRVKRKRDVKTSNESSKPDIDGKLSSLDDLGDIPFPVTYYTLSEKDLEDNGYSFNLPGFVPTVSAPSGSSPHKVLALDCEMCVTKAGFELTRVTLIDIKGLVVLDRLVKPANSIIDYNTRFSGITAEMLADVSTTLQEIQEEFVGLVYKETILVGHSLENDLMALQISHGLIIDTAVLYKYKRGSRCKIALRVLTRKFLGREIQNTGSGHDSVEDAKAALELAILKIKHGPDFGFQPSLSRQKLTSILHESGKKCSLVDDVSVLERYSDTSCNSIAVFCDDDALSRSMKEVKNNKVTFIWTQFSGLISYFHRRAQDPEKLKSCVAEAIALKTCDGKTASKEARSKICPELKEILCGLDKKIKKLYGALPENAMLIVCTGHGDTPLVQRLRKMLHHEEETIDSRETIVQALGDLQAQAEVALCFCCVKR

SEQ ID NO: 163496 - protein, 652 aa, Zea Mays
MGARATSPPPWRRHCLCRALHFLVLLLWGTSEANKEQAMLPPRGWNSYDSFSWIVDENAYLQNAQIMTEKLLPHGYQYAVIDFLWYRKYVDGAYTDSYGFDNIDEWGRPFPDLQRFPSSRVDRGFSQIASKVHGMGLKFGIHLMKGISVQAVNADTPILDIKTGKPYLEDGRQWTARDIGLSHRTCAWMTHGFMSVNTNIGAGRAFLRSLYRQYADWGVDFVKVDCIFGTDYSPEEIITISELLQEIDRPIILSISPGTAVTPALAENISDHVNMYRITGDDWDNWKDVSSHFGVSSSFATAKKIGATGLRGRSWPDLDMLPFGWLTDPNPISFVNAGVNQGPHRKCNLTLDEQKAQMALWSMTKSPLMYGGDLRNLDDSTLNIITNSGLLKINHYSRNNMEFHYVHSERTSNGEHSGHFRSPYPVRVTKNDGIFVSLTACSDDAAKGWYMFPQDGKPDHICRNYEILNDKNVSFCLGKTKRFLASDVLTMDTKEHQSKFHISVTNTDDTCLDASAGRRQTASEIRLPMFSACRWHAKQMWELNANGNLVSSYSRLCATVESRDEGGTSGGRAWIATGSEGEIYLAFFNLDSMSRKMTVQISDLGKVLGRNLLEKNPCSYTEVWSGKNFGPVKEEISAVVHSHGSMVFEIIC

SEQ ID NO: 163497 - protein, 329 aa, Zea Mays
MNRKHRLLMITSNLSVLYLFCIVMNSFFFDMTLQMALWSMTKSPLMYGGDLRNLDDSTLNIITNSGLLKINHYSRNNMEFHYVHSERTSNGEHSGHFRSPYPVRVTKNDGIFVSLTACSDDAAKGWYMFPQDGKPDHICRNYEILNDKNVSFCLGKTKRFLASDVLTMDTKEHQSKFHISVTNTDDTCLDASAGRRQTASEIRLPMFSACRWHAKQMWELNANGNLVSSYSRLCATVESRDEGGTSGGRAWIATGSEGEIYLAFFNLDSMSRKMTVQISDLGKVLGRNLLEKNPCSYTEVWSGKNFGPVKEEISAVVHSHGSMVFEIIC

SEQ ID NO: 163498 - protein, 378 aa, Zea Mays
MYRITGDDWDNWKDVSSHFGVSSSFATAKKIGATGLRGRSWPDLDMLPFGWLTDPNPISFVNAGVNQGPHRKCNLTLDEQKAQMALWSMTKSPLMYGGDLRNLDDSTLNIITNSGLLKINHYSRNNMEFHYVHSERTSNGEHSGHFRSPYPVRVTKNDGIFVSLTACSDDAAKGWYMFPQDGKPDHICRNYEILNDKNVSFCLGKTKRFLASDVLTMDTKEHQSKFHISVTNTDDTCLDASAGRRQTASEIRLPMFSACRWHAKQMWELNANGNLVSSYSRLCATVESRDEGGTSGGRAWIATGSEGEIYLAFFNLDSMSRKMTVQISDLGKVLGRNLLEKNPCSYTEVWSGKNFGPVKEEISAVVHSHGSMVFEIIC

SEQ ID NO: 163499 - protein, 606 aa, Zea Mays
MLPPRGWNSYDSFSWIVDENAYLQNAQIMTEKLLPHGYQYAVIDFLWYRKYVDGAYTDSYGFDNIDEWGRPFPDLQRFPSSRVDRGFSQIASKVHGMGLKFGIHLMKGISVQAVNADTPILDIKTGKPYLEDGRQWTARDIGLSHRTCAWMTHGFMSVNTNIGAGRAFLRSLYRQYADWGVDFVKVDCIFGTDYSPEEIITISELLQEIDRPIILSISPGTAVTPALAENISDHVNMYRITGDDWDNWKDVSSHFGVSSSFATAKKIGATGLRGRSWPDLDMLPFGWLTDPSVNQGPHRKCNLTLDEQKAQMALWSMTKSPLMYGGDLRNLDDSTLNIITNSGLLKINHYSRNNMEFHYVHSERTSNGEHSGHFRSPYPVRVTKNDGIFVSLTACSDDAAKGWYMFPQDGKPDHICRNYEILNDKNVSFCLGKTKRFLASDVLTMDTKEHQSKFHISVTNTDDTCLDASAGRRQTASEIRLPMFSACRWHAKQMWELNANGNLVSSYSRLCATVESRDEGGTSGGRAWIATGSEGEIYLAFFNLDSMSRKMTVQISDLGKVLGRNLLEKNPCSYTEVWSGKNFGPVKEEISAVVHSHGSMVFEIIC

SEQ ID NO: 163500 - protein, 129 aa, Zea Mays
MFSGLRACLVRSRPPNHATSCHPPRRKFRFPILFSNSTSNILRFLFYLLDGNAIDQLPKPYNTPVHSDKICTYYYYMVYSKSMDEILKLLYIAEASFFNFYVHNRNAYAVTNRPYTPVHDTKRNAGKLS

SEQ ID NO: 163501 - protein, 360 aa, Zea Mays
MPRRARHPVPHCGARGLQRFAVAQTHVRSPQTPPRQGVLRAPSHVASERRPQVHHEGAVREVRRRLRRALQHPPQVQHLGRVLRVRRVAEYTTRFLVVATGENCEGVIPDIPGLRDFPAGEVVHSSSYKSWKNYAGKRVLVVGCGNSGMEIAYDLAYNGVETSLVIRSPVHVMTKGLIYLGMRLLKWHLPVKLVDFIILTLANIQFGDLSRYGIVRPDMGPLLLKAKTGRSAVLDVGTTQLIKTGDIKVVGAISRIRGNTVEFEDGKERDFDSLVFATGYRSTANTWLKDGGSLLDDNGMPKKKAAGPQQGSRPWKGGNGLYCVGLGMAGLAGISRDAVSVAADIKAAVDSMVGPPAFWF

SEQ ID NO: 163502 - protein, 445 aa, Zea Mays
MFVVEDKGGAIALMLASLLFLGTWPAVLTLLERRGRLPQHTYLDYSVTNLLAAVLIALTFGQLGGARRGMPNFLTQLGQPNWPSVLFAMAGGVVLSVGNLSTQYAWAYVGLSVTEVVSSSMVVVIGTTLNYFLDNRINRAEILFPGVACFLVAVILGSAVHASNAADNEEKLSASTNAYQLGRTAGAAEPSKHVLDKDKKKSLISDVAKDLENGVSGTKQADKAEAGTAEYLIQLEERRSIKVFGSNTFIGLGIVFFAGACFSLFSPAFNLATNDQWRTLRGGVPHLVVYTAFFYFSVACFAVGVGLNVLFLYRPMAGVPRSSPRGLPRGLGRPALGAPRRPALRLRQRPPVHGRAGRGLRRRRRGPGAAARQHLLGRTALWGVPQVVAEDVPPARLHALHVRRRRRRAHGFVRSQDHRVILVLSVRLSRPNMHEIFGTKEWRCT

SEQ ID NO: 163503 - protein, 176 aa, Zea Mays
MALLPAAPSPCYSPILAAFRPCPLSPVESLRAQLQLGLVPDLLYCEVSALRACRSPSCCLVSRLLLLCARALLLASLLASLSMDERSFRRCSSCRAALFLVVRPCVLQWMFVESPASRPVLCVRKLSVGRARSYLFVVIASSTPSVSVVASRVQLYIRHPLCRRRSTRQQEISNVG

SEQ ID NO: 163504 - protein, 69 aa, Zea Mays
MDLGSKVRILNGRDSIGDVHGQIIGHHQSYPEMVYTSDLDRRLVSNGPAPFFLPPENIPGGRLRTAAAP

SEQ ID NO: 163505 - protein, 68 aa, Zea Mays
MECAETDTQEVDPRNPAMVTRFPTAPRISDCSIAREKIDSAVAAETDKLTPQAIGSARLSGQVTTAPW

SEQ ID NO: 163506 - protein, 161 aa, Zea Mays
MGRGISSGGGQSSLGYLFGSDEAPKSFEKPAPVQKPTPPSSAERLKDIAAGIQSSKSNNYKRSEGQNCGNFLTIAAENAQRQNLYLEIFVHLRILAVVGCCRTVRRPRCKQLQVATLHSVIFLVAAKMASDVHLLLVFAMIMGEGFCLTKEKGKRILYSHE

SEQ ID NO: 163507 - protein, 159 aa, Zea Mays
MGRGRGKVEVRRIENSVSRQVTFSKRRRGLAKKARELAVLCDADVALLVFSDKGRLHDFAAHGRNLMGEQLESLTFREVQQLEHRIDSALRNVRSRKVHVTCTLIVLQTYRSTVNCYSHRTSVLTVTVQVFFFFFFFLFPGPHLAQLDPGAPEQGKHAK

SEQ ID NO: 163508 - protein, 215 aa, Zea Mays
MTIGVALLLDLTSRLPRAGASAASAAVRSHPGLSTTAFAATAAAALSSSGVPLSARHLFGFHGFTVAHCDAGTPAGWNDGSDDLVNEINTKIIDSLQYARKDYFQNTTKEYPSELKPLFSAFGLKNFTITTLRSFLLYYLPLIQPKPHTGSDDEDDDLLHDTQEKTMDLVTPFYNSVKQIVRETSIVTTRRVFERIVVRHVSQRTAWKLLKAALA

SEQ ID NO: 163509 - protein, 184 aa, Zea Mays
MDLVTPFYNSVKQIVRETSIVTTRRVFERIVVRHVSQRTAWKLLKDASKSSKRKAARGMPTPQYTYCVARTTFRAHALGITAAWVVQSIIEVYRCFIRKPSEDCEALSSDGNEQFDDMNKFRLFGRKIYGITIKSCFSLVLASAGAGIGALVHPVHGQWLGCALGDVAGPIIAIIVFKKMQLPL

SEQ ID NO: 163510 - protein, 300 aa, Zea Mays
MVEVEGSSNFFHGFTVAHCDAGTPAGWNDGSDDLVNEINTKIIDSLQYARKDYFQNTTKEYPSELKPLFSAFGLKNFTITTLRSFLLYYLPLIQPKPHTGSDDEDDDLLHDTQEKTMDLVTPFYNSVKQIVRETSIVTTRRVFERIVVRHVSQRTAWKLLKDASKSSKRKAARGMPTPQYTYCVARTTFRAHALGITAAWVVQSIIEVYRCFIRKPSEDCEALSSDGNEQFDDMNKFRLFGRKIYGITIKSCFSLVLASAGAGIGALVHPVHGQWLGCALGDVAGPIIAIIVFKKMQLPL

SEQ ID NO: 163511 - protein, 317 aa, Zea Mays
MVTIALALNLHHCKFGSCVMLAERKFPFHGFTVAHCDAGTPAGWNDGSDDLVNEINTKIIDSLQYARKDYFQNTTKEYPSELKPLFSAFGLKNFTITTLRSFLLYYLPLIQPKPHTGSDDEDDDLLHDTQEKTMDLVTPFYNSVKQIVRETSIVTTRRVFERIVVRHVSQRTAWKLLKDASKSSKRKAARGMPTPQYTYCVARTTFRAHALGITAAWVVQSIIEVYRCFIRKPSEDCEALSSDGNEQFDDMNKFRLFGRKIYGITIKSCFSLVLASAGAGIGALVHPVHGQWLGCALGDVAGPIIAIIVFKKMQLPL

SEQ ID NO: 163512 - protein, 126 aa, Zea Mays
MPTPQYTYCVARTTFRAHALGITAAWVVQSIIEVYRCFIRKPSEDCEALSSDGNEQFDDMNKFRLFGRKIYGITIKSCFSLVLASAGAGIGALVHPVHGQWLGCALGDVAGPIIAIIVFKKMQLPL

SEQ ID NO: 163513 - protein, 207 aa, Zea Mays
MAAVGIPSPPAPHVFAPAASPSSSTYSTLAPRRLRLSTRLGLAAAAASCRTRCAAAADGGAAASEGASAVAELEGDPDAGTDVAGGAATSTRPPYSLISADNVQKAMRGLAITDADHYGRLGVTRLASTDEESFTILSTEEERRLYDWSLSRSGQPERYVWPFEVDPLELAPDPPKEPEDEFPTKLVGYFLLAWFILSVGLSVALNK

SEQ ID NO: 163514 - protein, 103 aa, Zea Mays
MAVMCALTRRVGGLALRVFSVCSTLGYLLVFVRFWARFFLKTGLIPFLIERRTITFKKRFAKPYRRGEALFFCTRLVKPPKCGCSRFCLLRLVVCKEARPNMA

SEQ ID NO: 163515 - protein, 130 aa, Zea Mays
MASGRRKSGIPALGWWLMAVGTIRSAIVWSCLFSSASLCLAVYPERASYGCVDSAILHALLPVRVQHGQQAALRGHLHVLRLRRRLPARGVLLLPQRPCSQYRSVLLHRRDIHGLDAASMELPWPWPPSP

SEQ ID NO: 163516 - protein, 264 aa, Zea Mays
MGGGAGVSIHGRFRVATDNTIFAMPETALGLFPDVGASYFLSRLPGFYGEYVGLTGARLDGAEMLACGLATHFVPSKRLPLLEESLKKLDTSSTFAVSGIIDQFSQRPLVKDSSSLNRMETINKCFSKRTVEEIIDALEQEISNVSDKWVAATIKSLKKASPTSLKISLRSIREGRTQTLGECLRREYRVVCHVLRGTFSRDLSEGFRAVLLEKDNKPEWIPPRLEQVPDEAVEQYFLRIDDPQWEDLNLPARLPHRRNIESKI

SEQ ID NO: 163517 - protein, 230 aa, Zea Mays
MIVLADRLLTYLSPGEYVGLTGARLDGAEMLACGLATHFVPSKRLPLLEESLKKLDTSSTFAVSGIIDQFSQRPLVKDSSSLNRMETINKCFSKRTVEEIIDALEQEISNVSDKWVAATIKSLKKASPTSLKISLRSIREGRTQTLGECLRREYRVVCHVLRGTFSRDLSEGFRAVLLEKDNKPEWIPPRLEQVPDEAVEQYFLRIDDPQWEDLNLPARLPHRRNIESKI

SEQ ID NO: 163518 - protein, 371 aa, Zea Mays
MLLVEAHGSTRTLILNRPKQLNALSSEMIKGLLWYFTAFEKDDGVRLLIMKGNRRVFCSGGDIAQCARCLYNGNWKWVDDFFQNEYLLNYIIATYIKPQVSILSGIVMGGGAGVSIHGRFRVATDNTIFAMPETALGLFPDVGASYFLSRLPGFYGEYVGLTGARLDGAEMLACGLATHFVPSKRLPLLEESLKKLDTSSTFAVSGIIDQFSQRPLVKDSSSLNRMETINKCFSKRTVEEIIDALEQEISNVSDKWVAATIKSLKKASPTSLKISLRSIREGRTQTLGECLRREYRVVCHVLRGTFSRDLSEGFRAVLLEKDNKPEWIPPRLEQVPDEAVEQYFLRIDDPQWEDLNLPARLPHRRNIESKI

SEQ ID NO: 163519 - protein, 75 aa, Zea Mays
MREKTCLAWLFPTHLYRLSPRPPIYRTVCLLMLSYPMTFLMTYQRWHVSPRSAPVCKQGLQGNNHFSSLKRIKGR

SEQ ID NO: 163520 - protein, 165 aa, Zea Mays
MESQGQGGRRRQIPAFGRWNQHSVGDEVPITQYFESAVQASLLARPGHCYHDAGAGEVLLFRSSASPPPHKPPKKVRSTTECHGHHQQVQVEEVGSRRRQQQRRRQEPLPPFVSGDVSRAARPRVVRAAVDEDLYKVPSDMLRKKKGRKHVRSVWMGCVGLTCVA

SEQ ID NO: 163521 - protein, 335 aa, Zea Mays
MSGVLELSEASIESSGAKAAACGTLSVLSSMSNKVYNDQGTPAAFRVPAGAVIPFGSMEDALKKSGSLKSYTNLLERIETAQIENGELDSLSSKLQATVSLLSPSEEIIESLKKTFDQNVRLIVRSTANVEDLAGMSAAGLYESIPNVSLSDPRSFGAAVGQVWASLYTRRAILSRRAAGVPQRDAKMAVLVQEMLQPDLSFVLHTISPVDHDPKLVEAEVAPGLGETLASGTRGTPWRLSCHKLDGKVTTLAFANFSEELMVLNSGPTDGEMSRRTVDYSKKPLSVDATFREQFGQRLAAIGQYLEQKFGSAQDVEGCLVGPDIFIVQSRPQPQ

SEQ ID NO: 163522 - protein, 472 aa, Zea Mays
MKEPVVLVVNKADGDEEVKAAGDNIVGVVLLQELPHLSHLGVRARQEKVVFVTCEDDDTIKNMRLLEGKHVRLGASSNNVDLSVVSNKDDCAAMSSEPSAGGDLFAQQFSLLTTDKKLELSEGPSLQQKSYTSVANGMSGVLELSEASIESSGAKAAACGTLSVLSSMSNKVYNDQGTPAAFRVPAGAVIPFGSMEDALKKSGSLKSYTNLLERIETAQIENGELDSLSSKLQATVSLLSPSEEIIESLKKTFDQNVRLIVRSTANVEDLAGMSAAGLYESIPNVSLSDPRSFGAAVGQVWASLYTRRAILSRRAAGVPQRDAKMAVLVQEMLQPDLSFVLHTISPVDHDPKLVEAEVAPGLGETLASGTRGTPWRLSCHKLDGKVTTLAFANFSEELMVLNSGPTDGEMSRRTVDYSKKPLSVDATFREQFGQRLAAIGQYLEQKFGSAQDVEGCLVGPDIFIVQSRPQPQ

SEQ ID NO: 163523 - protein, 2105 aa, Zea Mays
MASGSSRPQIDQFFPAKKRRPSSRKGESPRPGTQHESPGGAKGSLEGYLVRSPCNRAVAAASVVPVGSPRGGDPGARRSLSAAMDVDVGSSASVAAAAGDGADFDLRRSTADFLSHSCSAILPLRGDCDYSEQCQMKQKRSASQSFLVPCDNDYVKKQRVAHCGGFEALKESVEGEHIKVGFSLAPVETLKSVSRNSLTSPGEEFWNAAIELADGISAQADKVRGRPEFDAAEDKSSCAVAAFFKTLPRSGRDELDCQNTVGSNDTHHIEKLSNKVESLAVNCQHIISSPLPVKQLDFFHEDDIKVSGSKFETKGSYETCNAQADRVPLKGSGRLEKENLMDPVDVLKRSAINLHTDSAAMRCQGVFKSTTEGKVHPTQEAERDSNLIRRDLNQPTHNENKSLAAYSNNRKTWIDSKSKVASQEVEASTPTSSIPLKDHSKISSWLPPDLCAIYMKKGISELYPWQVECLLVEGVLGKRNLVYCASTSAGKSFVAEVLMLRQILSTGNMAILVLPYVSICAEKAEHLEQLLEPLGRHVRSFYGNQGGGSLPKDTAVAVCTIEKANSLVNKLLEDGRLSELGVIVIDELHMVGDQHRGYLLELMLTKLRYAAGEGTLQSCSGEVSSSSSGKIASHGLQIIGMSATMPNIAAVADWLQAALYQTDFRPVPLEEFIKVGNQIFDKDMNVVRVLPKVADHGGKDPDHIVELCNEVVLQGHSVLLFCSSRKGCESTARHVAKFLKLPSVGTTDVSSEFSDAAAAIEALRRCPAGLDPILGETLPFGVAYHHAGLTVEEREIVESCYRKGLVRVLTATSTLAAGVNLPARRVIFRQPKIGRDFIDGTRYRQMAGRAGRTGIDTKGESILVCRPEEVKRVTGIIRSNCPPLESCLSEDKNGMTHAIMEVVAGGIVQTANDIHRYVRCTLLNSTRPFDDVVKSAQDSLRWLCHKSFLEWNHETKIYSATPLGRAAFGSSLNPEESLVVLDDLSRAREGFVLASDLHLVYLVTPINVDLEPDWELYYEKFMQLSSLEQSVGNRVGVIEPFLMHMAHGASIPFRARPERNTGLSNKSAQAAGNTLVSEHTIRVSKRFYVALMLSRLAQEIPIADVCETFKVARGMIQALQENAGRFASMVSAFCQRLGWNDLEGLVSKFQNRVSFGVRAEIAELTSIPFVKGSRARALYKSGLRTPVAIAEASIPEIAKALFESSAWSGQGDSGLRRMQFGVAKKIKNGARKIVLEEAEAARVAAFSAFKSLGVEVPQFTAPPLAAIEEYPTHDTIDQAKLNKLASGTHSRDDKNMNTCSDYATPRASTYSLRKDTSPAPSIQMKENAGLSKNVQITRQGASSSLSTEIADGSSRDVAEKGPVHAYNFPGGFDCFLDQWSTASNFFFDVHFIKRSMKPSLNLFEVFGLAVCWEKSPIYYCNFPKDLVTTGNNNIKEMWGNFQRRWEKIADIMKQKSVQKMTWNLKIQIQALKSPYISCQRLERFHLDHKMLDKVEVLNNSYMLLSPVSVYNGLDICLLAWVLWPDEESRAVPNLEKFVKRRLHSQEAAAANRDGRWRNQMHKAAHNGCCRRAAQTRALYTVLKKLLTQNLSVLVETIEAPLVNVLADMELWGIGADMDACLRARHIITKKLKELEKEAYRLAGKNFSLNATADIADILYTHLKLPVPKGCEKGKLHPSTDKQSLDHLRDQHPIIPLIKEHRTLAKLLNGTLWSICSRAQLCTQSQRYIIHGNWLQTSTATGRLSMEEPNLQCVEHVVEFDTGKSDKDYSSISVDDHHKINARDFFIPTKENWLFITADYSQIELRLMAHFSKDHMLVELLKKPDGDVFTMIASRWAEKEEALISSKERENTKRFIYGILYGMGANSLAEQLQCSTEEAAQKIQSFRRFFPGVSSWLHEVVLSCRQKGFVETLLGRRRVLTKITAGNSKEKAKAQRQAVNSICQGSAADIIKVAMIRVHSIITNRTSAADSTDEVTRKFSELGGQCHLILQVHDELVLEVDPCMVAQAGRLLQICMEEAASLLVPLRTKIKVGKTWGSLEPFHPEPCLMQMVNVSWMPMFHDMQGPGRRLNNFQYAPTGDLGDSVWCSSVEPSLLCLQSSVIADRM

SEQ ID NO: 163524 - protein, 1237 aa, Zea Mays
MASGSSRPQIDQFFPAKKRRPSSRKGESPRPGTQHESPGGAKGSLEGYLVRSPCNRAVAAASVVPVGSPRGGDPGARRSLSAAMDVDVGSSASVAAAAGDGADFDLRRSTADFLSHSCSAILPLRGDCDYSEQCQMKQKRSASQSFLVPCDNDYVKKQRVAHCGGFEALKELDDNVASMKQCINHHGGSEAVEESVEGEHVSCVGFSALQRCSFTPSTAQIKVGFSLAPVETLKSVSRNSLTSPGEEFWNAAIELADGISAQADKVRGRPEFDAAEDKSSCAVAAFFKTLPRSGRDELDCQNTVGSNDTHHIEKLSNKVESLAVNCQHIISSPLPVKQLDFFHEDDIKVSGSKFETKGSYETCNAQADRVPLKGSGRLEKENLMDPVDVLKRSAINLHTDSAAMRCQGVFKSTTEGKVHPTQEAERDSNLIRRDLNQPTHNENKSLAAYSNNRKTWIDSKSKVASQEVEASTPTSSIPLKDHSKISSWLPPDLCAIYMKKGISELYPWQVECLLVEGVLGKRNLVYCASTSAGKSFVAEVLMLRQILSTGNMAILVLPYVSICAEKAEHLEQLLEPLGRHVRSFYGNQGGGSLPKDTAVAVCTIEKANSLVNKLLEDGRLSELGVIVIDELHMVGDQHRGYLLELMLTKLRYAAGEGTLQSCSGEVSSSSSGKIASHGLQIIGMSATMPNIAAVADWLQAALYQTDFRPVPLEEFIKVGNQIFDKDMNVVRVLPKVADHGGKDPDHIVELCNEVVLQGHSVLLFCSSRKGCESTARHVAKFLKLPSVGTTDVSSEFSDAAAAIEALRRCPAGLDPILGETLPFGVAYHHAGLTVEEREIVESCYRKGLVRVLTATSTLAAGVNLPARRVIFRQPKIGRDFIDGTRYRQMAGRAGRTGIDTKGESILVCRPEEVKRVTGIIRSNCPPLESCLSEDKNGMTHAIMEVVAGGIVQTANDIHRYVRCTLLNSTRPFDDVVKSAQDSLRWLCHKSFLEWNHETKIYSATPLGRAAFGSSLNPEESLVVLDDLSRAREGFVLASDLHLVYLVTPINVDLEPDWELYYEKFMQLSSLEQSVGNRVGVIEPFLMHMAHGASIPFRARPERNTGLSNKSAQAAGNTLVSEHTIRVSKRFYVALMLSRLAQEIPIADVCETFKVARGMIQALQENAGRFASMVSAFCQRLGWNDLEGLVSKFQNRVSFGVRAEIAELTSIPFVKVCFNYHAYMNYLSVSGSYFSMVM

SEQ ID NO: 163525 - protein, 2153 aa, Zea Mays
MASGSSRPQIDQFFPAKKRRPSSRKGESPRPGTQHESPGGAKGSLEGYLVRSPCNRAVAAASVVPVGSPRGGDPGARRSLSAAMDVDVGSSASVAAAAGDGADFDLRRSTADFLSHSCSAILPLRGDCDYSEQCQMKQKRSASQSFLVPCDNDYVKKQRVAHCGGFEALKFGSLQELDDNVASMKQCINHHGGSEAVEESVEGEHVSCVGFSALQRCSFTPSTAQIKVGFSLAPVETLKSVSRNSLTSPGEEFWNAAIELADGISAQADKVRGRPEFDAAEDKSSCAVAAFFKTLPRSGRDELDCQNTVGSNDTHHIEKLSNKVESLAVNCQHIISSPLPVKQLDFFHEDDIKVSGSKFETKGSYETCNAQADRVPLKGSGRLEKENLMDPVDVLKRSAINLHTDSAAMRCQGVFKSTTEGKVHPTQEAERDSNLIRRDLNQPTHNENKSLAAYSNNRKTWIDSKSKVASQEVEASTPTSSIPLKDHSKISSWLPPDLCAIYMKKGISELYPWQVECLLVEGVLGKRNLVYCASTSAGKSFVAEVLMLRQILSTGNMAILVLPYVSICAEKAEHLEQLLEPLGRHVRSFYGNQGGGSLPKDTAVAVCTIEKANSLVNKLLEDGRLSELGVIVIDELHMVGDQHRGYLLELMLTKLRYAAGEGTLQSCSGEVSSSSSGKIASHGLQIIGMSATMPNIAAVADWLQAALYQTDFRPVPLEEFIKVGNQIFDKDMNVVRVLPKVADHGGKDPDHIVELCNEVVLQGHSVLLFCSSRKGCESTARHVAKFLKLPSVGTTDVSSEFSDAAAAIEALRRCPAGLDPILGETLPFGVAYHHAGLTVEEREIVESCYRKGLVRVLTATSTLAAGVNLPARRVIFRQPKIGRDFIDGTRYRQMAGRAGRTGIDTKGESILVCRPEEVKRVTGIIRSNCPPLESCLSEDKNGMTHAIMEVVAGGIVQTANDIHRYVRCTLLNSTRPFDDVVKSAQDSLRWLCHKSFLEWNHETKIYSATPLGRAAFGSSLNPEESLVVLDDLSRAREGFVLASDLHLVYLVTPINVDLEPDWELYYEKFMQLSSLEQSVGNRVGVIEPFLMHMAHGASIPFRARPERNTGLSNKSAQAAGNTLVSEHTIRVSKRFYVALMLSRLAQEIPIADVCETFKVARGMIQALQENAGRFASMVSAFCQRLGWNDLEGLVSKFQNRVSFGVRAEIAELTSIPFVKGSRARALYKSGLRTPVAIAEASIPEIAKALFESSAWSGQGDSGLRRMQFGVAKKIKNGARKIVLEEAEAARVAAFSAFKSLGVEVPQFTAPPLAAIEEYPTHDTIDQAKLNKLASGTHSRDDKNMNTCSDYATPRASTYSLRKDTSPAPSIQMKENAGLSKNVQITRQGASSSLSTEIADGSSRDVAEKGPVHAYNFPGGFDCFLDQWSTASNFFFDVHFIKRSMKPSLNLFEVFGLAVCWEKSPIYYCNFPKDLVTTGNNNIKEMWGNFQRRWEKIADIMKQKSVQKMTWNLKIQIQALKSPYISCQRLERFHLDHKMLDKVEVLNNSYMLLSPVSVYNGLDICLLAWVLWPDEESRAVPNLEKFVKRRLHSQEAAAANRDGRWRNQMHKAAHNGCCRRAAQTRALYTVLKKLLTQNLSVLVETIEAPLVNVLADMELWGIGADMDACLRARHIITKKLKELEKEAYRLAGKNFSLNATADIADILYTHLKLPVPKGCEKGKLHPSTDKQSLDHLRDQHPIIPLIKEHRTLAKLLNGTLWSICSRAQLCTQSQRYIIHGNWLQTSTATGRLSMEEPNLQCVEHVVEFDTGKSDKDYSSISVDDHHKINARDFFIPTKENWLFITADYSQIELRLMAHFSKDHMLVELLKKPDGDVFTMIASRWAEKEEALISSKERENTKRFIYGILYGMGANSLAEQLQCSTEEAAQKIQSFRRFFPGVSSWLHEVVLSCRQKGFVETLLGRRRVLTKITAGNSKEKAKAQRQAVNSICQGSAADIIKVAMIRVHSIITNRTSAADSTDEVTRKFSELGGQCHLILQVHDELVLEVDPCMVAQAGRLLQICMEEAASLLVPLRTKIKVGKTWGSLEPFHPEPCLMQMVNVSWMPMFHDMQGPGRRLNNFQYAPTGDLGDSVWCSSVEPSLLCLQSSVIADRM

SEQ ID NO: 163526 - protein, 2093 aa, Zea Mays
MASGSSRPQIDQFFPAKKRRPSSRKGESPRPGTQHESPGGAKGSLEGYLVRSPCNRAVAAASVVPVGSPRGGDPGARRSLSAAMDVDVGSSASVAAAAGDGADFDLRRSTADFLSHSCSEQCQMKQKRSASQSFLVPCDNDYVKKQRVAHCGGFEALKESVEGEHIKVGFSLAPVETLKSVSRNSLTSPGEEFWNAAIELADGISAQADKVRGRPEFDAAEDKSSCAVAAFFKTLPRSGRDELDCQNTVGSNDTHHIEKLSNKVESLAVNCQHIISSPLPVKQLDFFHEDDIKVSGSKFETKGSYETCNAQADRVPLKGSGRLEKENLMDPVDVLKRSAINLHTDSAAMRCQGVFKSTTEGKVHPTQEAERDSNLIRRDLNQPTHNENKSLAAYSNNRKTWIDSKSKVASQEVEASTPTSSIPLKDHSKISSWLPPDLCAIYMKKGISELYPWQVECLLVEGVLGKRNLVYCASTSAGKSFVAEVLMLRQILSTGNMAILVLPYVSICAEKAEHLEQLLEPLGRHVRSFYGNQGGGSLPKDTAVAVCTIEKANSLVNKLLEDGRLSELGVIVIDELHMVGDQHRGYLLELMLTKLRYAAGEGTLQSCSGEVSSSSSGKIASHGLQIIGMSATMPNIAAVADWLQAALYQTDFRPVPLEEFIKVGNQIFDKDMNVVRVLPKVADHGGKDPDHIVELCNEVVLQGHSVLLFCSSRKGCESTARHVAKFLKLPSVGTTDVSSEFSDAAAAIEALRRCPAGLDPILGETLPFGVAYHHAGLTVEEREIVESCYRKGLVRVLTATSTLAAGVNLPARRVIFRQPKIGRDFIDGTRYRQMAGRAGRTGIDTKGESILVCRPEEVKRVTGIIRSNCPPLESCLSEDKNGMTHAIMEVVAGGIVQTANDIHRYVRCTLLNSTRPFDDVVKSAQDSLRWLCHKSFLEWNHETKIYSATPLGRAAFGSSLNPEESLVVLDDLSRAREGFVLASDLHLVYLVTPINVDLEPDWELYYEKFMQLSSLEQSVGNRVGVIEPFLMHMAHGASIPFRARPERNTGLSNKSAQAAGNTLVSEHTIRVSKRFYVALMLSRLAQEIPIADVCETFKVARGMIQALQENAGRFASMVSAFCQRLGWNDLEGLVSKFQNRVSFGVRAEIAELTSIPFVKGSRARALYKSGLRTPVAIAEASIPEIAKALFESSAWSGQGDSGLRRMQFGVAKKIKNGARKIVLEEAEAARVAAFSAFKSLGVEVPQFTAPPLAAIEEYPTHDTIDQAKLNKLASGTHSRDDKNMNTCSDYATPRASTYSLRKDTSPAPSIQMKENAGLSKNVQITRQGASSSLSTEIADGSSRDVAEKGPVHAYNFPGGFDCFLDQWSTASNFFFDVHFIKRSMKPSLNLFEVFGLAVCWEKSPIYYCNFPKDLVTTGNNNIKEMWGNFQRRWEKIADIMKQKSVQKMTWNLKIQIQALKSPYISCQRLERFHLDHKMLDKVEVLNNSYMLLSPVSVYNGLDICLLAWVLWPDEESRAVPNLEKFVKRRLHSQEAAAANRDGRWRNQMHKAAHNGCCRRAAQTRALYTVLKKLLTQNLSVLVETIEAPLVNVLADMELWGIGADMDACLRARHIITKKLKELEKEAYRLAGKNFSLNATADIADILYTHLKLPVPKGCEKGKLHPSTDKQSLDHLRDQHPIIPLIKEHRTLAKLLNGTLWSICSRAQLCTQSQRYIIHGNWLQTSTATGRLSMEEPNLQCVEHVVEFDTGKSDKDYSSISVDDHHKINARDFFIPTKENWLFITADYSQIELRLMAHFSKDHMLVELLKKPDGDVFTMIASRWAEKEEALISSKERENTKRFIYGILYGMGANSLAEQLQCSTEEAAQKIQSFRRFFPGVSSWLHEVVLSCRQKGFVETLLGRRRVLTKITAGNSKEKAKAQRQAVNSICQGSAADIIKVAMIRVHSIITNRTSAADSTDEVTRKFSELGGQCHLILQVHDELVLEVDPCMVAQAGRLLQICMEEAASLLVPLRTKIKVGKTWGSLEPFHPEPCLMQMVNVSWMPMFHDMQGPGRRLNNFQYAPTGDLGDSVWCSSVEPSLLCLQSSVIADRM

SEQ ID NO: 163527 - protein, 1315 aa, Zea Mays
MREDMEDICVAKAPSWRWTSARAVVIAANSDAWVADATLSSVLDPGISDTKLAALYQTDFRPVPLEEFIKVGNQIFDKDMNVVRVLPKVADHGGKDPDHIVELCNEVVLQGHSVLLFCSSRKGCESTARHVAKFLKLPSVGTTDVSSEFSDAAAAIEALRRCPAGLDPILGETLPFGVAYHHAGLTVEEREIVESCYRKGLVRVLTATSTLAAGVNLPARRVIFRQPKIGRDFIDGTRYRQMAGRAGRTGIDTKGESILVCRPEEVKRVTGIIRSNCPPLESCLSEDKNGMTHAIMEVVAGGIVQTANDIHRYVRCTLLNSTRPFDDVVKSAQDSLRWLCHKSFLEWNHETKIYSATPLGRAAFGSSLNPEESLVVLDDLSRAREGFVLASDLHLVYLVTPINVDLEPDWELYYEKFMQLSSLEQSVGNRVGVIEPFLMHMAHGASIPFRARPERNTGLSNKSAQAAGNTLVSEHTIRVSKRFYVALMLSRLAQEIPIADVCETFKVARGMIQALQENAGRFASMVSAFCQRLGWNDLEGLVSKFQNRVSFGVRAEIAELTSIPFVKGSRARALYKSGLRTPVAIAEASIPEIAKALFESSAWSGQGDSGLRRMQFGVAKKIKNGARKIVLEEAEAARVAAFSAFKSLGVEVPQFTAPPLAAIEEYPTHDTIDQAKLNKLASGTHSRDDKNMNTCSDYATPRASTYSLRKDTSPAPSIQMKENAGLSKNVQITRQGASSSLSTEIADGSSRDVAEKGPVHAYNFPGGFDCFLDQWSTASNFFFDVHFIKRSMKPSLNLFEVFGLAVCWEKSPIYYCNFPKDLVTTGNNNIKEMWGNFQRRWEKIADIMKQKSVQKMTWNLKIQIQALKSPYISCQRLERFHLDHKMLDKVEVLNNSYMLLSPVSVYNGLDICLLAWVLWPDEESRAVPNLEKFVKRRLHSQEAAAANRDGRWRNQMHKAAHNGCCRRAAQTRALYTVLKKLLTQNLSVLVETIEAPLVNVLADMELWGIGADMDACLRARHIITKKLKELEKEAYRLAGKNFSLNATADIADILYTHLKLPVPKGCEKGKLHPSTDKQSLDHLRDQHPIIPLIKEHRTLAKLLNGTLWSICSRAQLCTQSQRYIIHGNWLQTSTATGRLSMEEPNLQCVEHVVEFDTGKSDKDYSSISVDDHHKINARDFFIPTKENWLFITADYSQIELRLMAHFSKDHMLVELLKKPDGDVFTMIASRWAEKEEALISSKERENTKRFIYGILYGMGANSLAEQLQCSTEEAAQKIQSFRRFFPGVSSWLHEVVLSCRQKGLVSKCNKGPQYR

SEQ ID NO: 163528 - protein, 1501 aa, Zea Mays
MREDMEDICVAKAPSWRWTSARAVVIAANSDAWVADATLSSVLDPGISDTKLAALYQTDFRPVPLEEFIKVGNQIFDKDMNVVRVLPKVADHGGKDPDHIVELCNEVVLQGHSVLLFCSSRKGCESTARHVAKFLKLPSVGTTDVSSEFSDAAAAIEALRRCPAGLDPILGETLPFGVAYHHAGLTVEEREIVESCYRKGLVRVLTATSTLAAGVNLPARRVIFRQPKIGRDFIDGTRYRQMAGRAGRTGIDTKGESILVCRPEEVKRVTGIIRSNCPPLESCLSEDKNGMTHAIMEVVAGGIVQTANDIHRYVRCTLLNSTRPFDDVVKSAQDSLRWLCHKSFLEWNHETKIYSATPLGRAAFGSSLNPEESLVVLDDLSRAREGFVLASDLHLVYLVTPINVDLEPDWELYYEKFMQLSSLEQSVGNRVGVIEPFLMHMAHGASIPFRARPERNTGLSNKSAQAAGNTLVSEHTIRVSKRFYVALMLSRLAQEIPIADVCETFKVARGMIQALQENAGRFASMVSAFCQRLGWNDLEGLVSKFQNRVSFGVRAEIAELTSIPFVKGSRARALYKSGLRTPVAIAEASIPEIAKALFESSAWSGQGDSGLRRMQFGVAKKIKNGARKIVLEEAEAARVAAFSAFKSLGVEVPQFTAPPLAAIEEYPTHDTIDQAKLNKLASGTHSRDDKNMNTCSDYATPRASTYSLRKDTSPAPSIQMKENAGLSKNVQITRQGASSSLSTEIADGSSRDVAEKGPVHAYNFPGGFDCFLDQWSTASNFFFDVHFIKRSMKPSLNLFEVFGLAVCWEKSPIYYCNFPKDLVTTGNNNIKEMWGNFQRRWEKIADIMKQKSVQKMTWNLKIQIQALKSPYISCQRLERFHLDHKMLDKVEVLNNSYMLLSPVSVYNGLDICLLAWVLWPDEESRAVPNLEKFVKRRLHSQEAAAANRDGRWRNQMHKAAHNGCCRRAAQTRALYTVLKKLLTQNLSVLVETIEAPLVNVLADMELWGIGADMDACLRARHIITKKLKELEKEAYRLAGKNFSLNATADIADILYTHLKLPVPKGCEKGKLHPSTDKQSLDHLRDQHPIIPLIKEHRTLAKLLNGTLWSICSRAQLCTQSQRYIIHGNWLQTSTATGRLSMEEPNLQCVEHVVEFDTGKSDKDYSSISVDDHHKINARDFFIPTKENWLFITADYSQIELRLMAHFSKDHMLVELLKKPDGDVFTMIASRWAEKEEALISSKERENTKRFIYGILYGMGANSLAEQLQCSTEEAAQKIQSFRRFFPGVSSWLHEVVLSCRQKGFVETLLGRRRVLTKITAGNSKEKAKAQRQAVNSICQGSAADIIKVAMIRVHSIITNRTSAADSTDEVTRKFSELGGQCHLILQVHDELVLEVDPCMVAQAGRLLQICMEEAASLLVPLRTKIKVGKTWGSLEPFHPEPCLMQMVNVSWMPMFHDMQGPGRRLNNFQYAPTGDLGDSVWCSSVEPSLLCLQSSVIADRM

SEQ ID NO: 163529 - protein, 912 aa, Zea Mays
MCRTNFVWKLTQSDIYTSDSGLRRMQFGVAKKIKNGARKIVLEEAEAARVAAFSAFKSLGVEVPQFTAPPLAAIEEYPTHDTIDQAKLNKLASGTHSRDDKNMNTCSDYATPRASTYSLRKDTSPAPSIQMKENAGLSKNVQITRQGASSSLSTEIADGSSRDVAEKGPVHAYNFPGGFDCFLDQWSTASNFFFDVHFIKRSMKPSLNLFEVFGLAVCWEKSPIYYCNFPKDLVTTGNNNIKEMWGNFQRRWEKIADIMKQKSVQKMTWNLKIQIQALKSPYISCQRLERFHLDHKMLDKVEVLNNSYMLLSPVSVYNGLDICLLAWVLWPDEESRAVPNLEKFVKRRLHSQEAAAANRDGRWRNQMHKAAHNGCCRRAAQTRALYTVLKKLLTQNLSVLVETIEAPLVNVLADMELWGIGADMDACLRARHIITKKLKELEKEAYRLAGKNFSLNATADIADILYTHLKLPVPKGCEKGKLHPSTDKQSLDHLRDQHPIIPLIKEHRTLAKLLNGTLWSICSRAQLCTQSQRYIIHGNWLQTSTATGRLSMEEPNLQCVEHVVEFDTGKSDKDYSSISVDDHHKINARDFFIPTKENWLFITADYSQIELRLMAHFSKDHMLVELLKKPDGDVFTMIASRWAEKEEALISSKERENTKRFIYGILYGMGANSLAEQLQCSTEEAAQKIQSFRRFFPGVSSWLHEVVLSCRQKGFVETLLGRRRVLTKITAGNSKEKAKAQRQAVNSICQGSAADIIKVAMIRVHSIITNRTSAADSTDEVTRKFSELGGQCHLILQVHDELVLEVDPCMVAQAGRLLQICMEEAASLLVPLRTKIKVGKTWGSLEPFHPEPCLMQMVNVSWMPMFHDMQGPGRRLNNFQYAPTGDLGDSVWCSSVEPSLLCLQSSVIADRM

SEQ ID NO: 163530 - protein, 408 aa, Zea Mays
MANSVSPPRRRRHSHHDDVSPRRRKRRASPYPPRSPSLGVDADRRRRSRASPPDSDSRGRGRDAKPSEEKENGHAKPGRDEDGDNRSPRRDRVSDGEEGGERRRMRDRVSDDEKEEGRRRRRARDPDDEPDDRRGKRDREKDRRRHRRRSPSSESGSSPDGRRHRRRRRDEGSRRRDDRRRREDEGDERRRSPVKELTPPLPPPPPLLPEMIPGRTGGIYIPPFRMAQMMRDMEDKSSPEYQRLTWDALKKSINGLVNKVNATNIKNIVPELFAENLVRGRGLFCQSCIKSQMASPGFTDVFAALVAVVNTKFPEIGKLLLVRVVLQLKRAYKRNDKPQLLAATKFIAHLVNQVVAHELVALELLTVLLENPTDDSVEVAVGFVKECGAMLQDLSPQGLHGKLFQTIV

SEQ ID NO: 163531 - protein, 350 aa, Zea Mays
MANSVSPPRRRRHSHHDDVSPRRRKRRASPYPPRSPSLGVDADRRRRSRASPPDSDSRGRGRDAKPSEEKENGHAKPGRDEDGDNRSPRRDRVSDGEEGGERRRMRDRVSDDEKEEGRRRRRARDPDDEPDDRRGKRDREKDRRRHRRRSPSSESGSSPDGRRHRRRRRDEGSRRRDDRRRREDEGDERRRSPVKELTPPLPPPPPLLPEMIPGRTGGIYIPPFRMAQMMRDMEDKSSPEYQRLTWDALKKSINGLVNKVNATNIKNIVPELFAENLVRGRGLFCQSCIKSQMASPGFTDVFAALVAVVNTKFPEIGKLLLVRVVLQLKRAYKRNDKVSLSSFSSAQEVF

SEQ ID NO: 163532 - protein, 99 aa, Zea Mays
MQGSFESIFPKDHPKNTRFSINFFTSIGLGGITESLREYLKNMPRLIMQQQKPESSESDSSGSESGSESSSSGSSSEPESESSPDERDRRRSNKRRKRT

SEQ ID NO: 163533 - protein, 239 aa, Zea Mays
MEIRDRTETNLVNLRRTIYLTIMSSVDFEEAGHKLMKIKLEPGQEMELCIMLLECCSQERTYLRYYGLLGQRFCMINKVYQENFEKCFVQQYSMIHRLETNKLTEEDTTSSSRIFIKILFQELSEHLGIRLLNERLNDPNMQGSFESIFPKDHPKNTRFSINFFTSIGLGGITESLREYLKNMPRLIMQQQKPESSESDSSGSESGSESSSSGSSSEPESESSPDERDRRRSNKRRKRT

SEQ ID NO: 163534 - protein, 922 aa, Zea Mays
MATATRSGPRTDTAAVAVAAASLDSRSRPTSAPAAAGRSPGRPAYLRPSSVLTALGFFLTWRIRHPNPEAVWLWALSVTCEVWFAFSWLLDSLPKLCPIHRAADLDVLAERFELPTARNPKGHSDLPGIDVFVSTADPEKEPPLVTANTILSILAADYPVEKLACYLSDDGGALLTFEALAETASFARTWVPFCRKHGVEPRCPEAYFGQKRDFLRNKVRVDFVRERRKVKREYDEFKVRVNSLPEAIRRRSDAYNAGEELRARRRQQEEAMAAGTILGALPEAAGAVKATWMSDGSQWPGTWLTSAPDHSRGDHAGIIQAMLAPPTSEPVLGAEPAESGGLIDTTGVDIRLPMLVYVSREKRPGYDHNKKAGAMNALVRTSAIMSNGPFILNLDCDHYVHNSAALREGMCFMLDRGGDRVCYVQFPQRFEGIDPNDRYANHNLVFFDVAMRAMDGLQGPMYVGTGCVFRRTALYGFSPPRATEHHGWLGRRKIKLLLRKPTMGKKTDRENNSDKEMMLPPIEDDAFQQLDDIESSALLPRRFGSSATFVASIPVAEYQGRLLQDTPGAHQGRPAGALAVPREPLDADTVAEAISVISCFYEDKTEWGRRIGWIYGSVTEDVVTGYRMHNRGWRSVYCVTRRDAFRGTAPINLTDRLHQVLRWATGSVEIFFSRNNALFASPRMKFLQRVAYFNVGMYPFTSIFLLVYCVLPAVSLFSGKFIVQSLNATFLALLLVITITLCLLALLEIKWSGITLHEWWRNEQFWVIGGTSAHPAAVLQGLLKVIAGVDISFTLTSKPGTGDDGEEDAFAELYEVRWSFLMVPPVTIMMVNAVAVAVASARTLYSEFPQWSKLLGGAFFSFWVLCHLYPFAKGLLGRRGRVPTIVFVWSGLISMTISLLWVYISPPAGARELIGGGGFSFP

SEQ ID NO: 163535 - protein, 357 aa, Zea Mays
MVVAARWIAKQAIPCLSKAIEQFPEYEVKIIGHSMGAGIATILTYILRENEKLASSTCIAFGPAACMTWDLAESGKDFVTSIVNRNDLVPSLGLVSAAKLRAEVMSSSWAHDLRKQIQQTRFLGFVNRSVSFIRSHVPFVSDPRSKVVDVDMMQSQSPEAGSKPSADTHAVVKKRPALACWSCVAAPKQSMESSIQIEGTKVQTDTGVQTEKTTEAATAALVSIHLGELNLQEPDNREEKGSALTETDEDAMELLESLTDEKQLPSSSSSGQEPHQLYPPGKILHMVGLPAAEEATTSQQGAQEEVIALYETPRHLYSKIRLARSMIGEHYMPKYIKTMEQLIDKLAEDIDDQLDSL

SEQ ID NO: 163536 - protein, 449 aa, Zea Mays
MYFSKKPYNVFLEYGGYGQNDVLIKKSKARILKPAFTIVCDRSSQCFLLFIRGAISVKERLTAATGAEVPFHHVVVQEGQVSNLVLGYAHCGMVVAARWIAKQAIPCLSKAIEQFPEYEVKIIGHSMGAGIATILTYILRENEKLASSTCIAFGPAACMTWDLAESGKDFVTSIVNRNDLVPSLGLVSAAKLRAEVMSSSWAHDLRKQIQQTRFLGFVNRSVSFIRSHVPFVSDPRSKVVDVDMMQSQSPEAGSKPSADTHAVVKKRPALACWSCVAAPKQSMESSIQIEGTKVQTDTGVQTEKTTEAATAALVSIHLGELNLQEPDNREEKGSALTETDEDAMELLESLTDEKQLPSSSSSGQEPHQLYPPGKILHMVGLPAAEEATTSQQGAQEEVIALYETPRHLYSKIRLARSMIGEHYMPKYIKTMEQLIDKLAEDIDDQLDSL

SEQ ID NO: 163537 - protein, 323 aa, Zea Mays
MGAGIATILTYILRENEKLASSTCIAFGPAACMTWDLAESGKDFVTSIVNRNDLVPSLGLVSAAKLRAEVMSSSWAHDLRKQIQQTRFLGFVNRSVSFIRSHVPFVSDPRSKVVDVDMMQSQSPEAGSKPSADTHAVVKKRPALACWSCVAAPKQSMESSIQIEGTKVQTDTGVQTEKTTEAATAALVSIHLGELNLQEPDNREEKGSALTETDEDAMELLESLTDEKQLPSSSSSGQEPHQLYPPGKILHMVGLPAAEEATTSQQGAQEEVIALYETPRHLYSKIRLARSMIGEHYMPKYIKTMEQLIDKLAEDIDDQLDSL

SEQ ID NO: 163538 - protein, 369 aa, Zea Mays
MLLLCSLLVVCRLLALVLRCPTPASSPQSAPADPTTAQALTQHLSVSRGKEHLRVTSAIARSTSPPAAAARPRRMLGHRFPTALRLPHGLLQRRSIMARRGLTIMAGGEAEGPLAGFFDYMERLRNYERSGVPRGAGTDSDDGFDLGRMRRLLRRLGDPHTHFPAVHIAGTKGKGSTAAFLSNIMRAQGYNVGCYSSPHLLTIRERISVGNDGGPVPVRLLSDLFDEAKKAIDEAIESENGSLTHFEVFTALSFLLFSQQNVDIAIIEAGLGGARDATNVIRSTELAASVITTVGREHLVALGGSLQSIAIAKSGIIKQGRPVVIGGPFSEDIEQIIRDRAFLTQSPVISACGHGIKSFTKCIDWDNVD

SEQ ID NO: 163539 - protein, 239 aa, Zea Mays
MLLLCSLLVVCRLLALVLRCPTPASSPQSAPADPTTAQALTQHLSVSRGKEHLRVTSAIARSTSPPAAAARPRRMLGHRFPTALRLPHGLLQRRSIMARRGLTIMAGGEAEGPLAGFFDYMERLRNYERSGVPRGAGTDSDDGFDLGRMRRLLRRLGDPHTHFPAVHIAGTKGKGSTAAFLSNIMRAQGYNVGCYSRIPPPKDKTFRISWLSRRTCSPPQPFTAYCVSSRGRFILRRSL

SEQ ID NO: 163540 - protein, 263 aa, Zea Mays
MLLLCSLLVVCRLLALVLRCPTPASSPQSAPADPTTAQALTQHLSVSRGKEHLRVTSAIARSTSPPAAAARPRRMLGHRFPTALRLPHGLLQRRSIMARRGLTIMAGGEAEGPLAGFFDYMERLRNYERSGVPRGAGTDSDDGFDLGRMRRLLRRLGDPHTHFPAVHIAGTKGKGSTAAFLSNIMRAQGYNVGCYSSPHLLTIRERISVGNDGGPVPVRLLSDLFDEAKKAIDEAIESENGSLTHFEVLVELGMQQMLFEVLN

SEQ ID NO: 163541 - protein, 348 aa, Zea Mays
MLLLCSLLVVCRLLALVLRCPTPASSPQSAPADPTTAQALTQHLSVSRGKEHLRVTSAIARSTSPPAAAARPRRMLGHRFPTALRLPHGLLQRRSIMARRGLTIMAGGEAEGPLAGFFDYMERLRNYERSGVPRGAGTDSDDGFDLGRMRRLLRRLGDPHTHFPAVHIAGTKGKGSTAAFLSNIMRAQGYNVGCYSSPHLLTIRERISVGNDGGPVPVRLLSDLFDEAKKAIDEAIESENGSLTHFEVFTALSFLLFSQQNVDIAIIEAGLGGARDATNVIRSTELAASVITTVGREHLVALGGSLQSIAIAKSGIIKQGRPGILDTISRDICLWSWHQELYKMHRLG

SEQ ID NO: 163542 - protein, 459 aa, Zea Mays
MGVDETPCCCRRGNTGADARWRSPHLLTIRERISVGNDGGPVPVRLLSDLFDEAKKAIDEAIESENGSLTHFEVFTALSFLLFSQQNVDIAIIEAGLGGARDATNVIRSTELAASVITTVGREHLVALGGSLQSIAIAKSGIIKQGRPVVIGGPFSEDIEQIIRDRAFLTQSPVISACGHGIKSFTKCIDWDNGKPYQRCYISIKISRDVPLSIEMHDINLQLLGDHQRQNAVTAACAALCLCSQGWDISDASIQAGLEETQLPGRSQFLTAEEASALGFDSASTVLIDGAHTEESAKALSGVIKTVRPEGPLALVVGMASDKEHLAFAEQLLSGQTPDVVLLTEASVAGGTSRAMPASSLKEVWIAAARDRGIEYVDIGGVSGAETPEHISDLLDCSPSSNSGRKPMVIGCQDVAPFSSNLIVAASQLLESRGTAPGLICVTGSLHLVGAVLQQMGRH

SEQ ID NO: 163543 - protein, 248 aa, Zea Mays
MSIEMHDINLQLLGDHQRQNAVTAACAALCLCSQGWDISDASIQAGLEETQLPGRSQFLTAEEASALGFDSASTVLIDGAHTEESAKALSGVIKTVRPEGPLALVVGMASDKEHLAFAEQLLSGQTPDVVLLTEASVAGGTSRAMPASSLKEVWIAAARDRGIEYVDIGGVSGAETPEHISDLLDCSPSSNSGRKPMVIGCQDVAPFSSNLIVAASQLLESRGTAPGLICVTGSLHLVGAVLQQMGRH

SEQ ID NO: 163544 - protein, 440 aa, Zea Mays
MAVSPHLLTIRERISVGNDGGPVPVRLLSDLFDEAKKAIDEAIESENGSLTHFEVFTALSFLLFSQQNVDIAIIEAGLGGARDATNVIRSTELAASVITTVGREHLVALGGSLQSIAIAKSGIIKQGRPVVIGGPFSEDIEQIIRDRAFLTQSPVISACGHGIKSFTKCIDWDNGKPYQRCYISIKISRDVPLSIEMHDINLQLLGDHQRQNAVTAACAALCLCSQGWDISDASIQAGLEETQLPGRSQFLTAEEASALGFDSASTVLIDGAHTEESAKALSGVIKTVRPEGPLALVVGMASDKEHLAFAEQLLSGQTPDVVLLTEASVAGGTSRAMPASSLKEVWIAAARDRGIEYVDIGGVSGAETPEHISDLLDCSPSSNSGRKPMVIGCQDVAPFSSNLIVAASQLLESRGTAPGLICVTGSLHLVGAVLQQMGRH

SEQ ID NO: 163545 - protein, 53 aa, Zea Mays
MCFEKQTCAKSLGHWKSFKPFNKNPFFSKREIISPTYMHQIHYVLSELKHERR

SEQ ID NO: 163546 - protein, 913 aa, Zea Mays
MAMAAAVLEEALRWGGGSVGDDNVAARRAEEAAIRRHEAASWLRKTVGIVCAKDLPEEPSEEEFQLGLRNGIVLCNALNKVQPGAIPKIVGVQSDTAVPADGSALCAYQYFENLRNFVVVIQDFGLPTFEVSDLEKGGKSVRIVDCVLALKSFSEKEATLNGFRGEQNLSLDCSPESYEVITSDNLSTIIRTILLDKKPEEIPLIVESLLNKVIQEYELRFANQNLMDEEKQNNLTTKEEASFAVNGSNAAQKFHLKAEINFDLQHKQIKGLRGTVSSIKSGMEQLKLHYSEEFTKLGKHLYTISNAASGYHKVLEENRKLYNQIQDLKGNIRVYCRVRPFLPGQISSLSSVAGMEERTITIMTPTKYGKDGNKSFTFNKVFGPAATQDEVFSDMQPLIRSVLDGFNVCIFAYGQTGSGKTYTMSGPKVLTEESLGVNYKALNDLFNLQAQRKGTIDYDISVQMIEIYNEQVRDLLQDSGNRRLEIKNTSQKGLAVPDASIVPVTSTSDVVELMNQGQKNRAVGSTAINDRSSRSHSCLTVHVQGRDLTSGTVLRGCMHLVDLAGSERVDKSEVVGDRLKEAQYINKSLSALGDVIASLSQKNTHVPYRNSKLTQLLQDSLGGQAKTLMFVHISPELDAAGETISTLKFAERVASVELGAAKQNKEGSEIRELKEQIASLKAALAKKEGEPENILSTRSSPSIYRIRKGNATPATPKDRQPMEEVGSLEVQNVFTPAQKRSKMHLLGILTENNSSNSVQNCNVPQKEIGLGGWVDKMALGDNHFENSNSILELEPDTAQLPTSFYHQRYSPVQQSCRTESVPSLGLHGFDSATSCSNQEIVVSTMGLKASGVANRGASTVKKYEATSTRSTNLASKSPLLQKKLQTPTRNRNQLTSSTIGGRRTPNGKIGIAK

SEQ ID NO: 163547 - protein, 893 aa, Zea Mays
MAMAAAVLEEALRWGGGSVGDDNVAARRAEEAAIRRHEAASWLRKTVGIVCAKDLPEEPSEEEFQLGLRNGIVLCNALNKVQPGAIPKIVGVQSDTAVPADGSALCAYQYFENLRNFVVVIQDFGLPTFEVSDLEKGGKSVRIVDCVLALKSFSEKEATLNGFRGEQNLSLDCSPESYEVITSDNLSTIIRTILLDKKPEEIPLIVESLLNKVIQEYELRFANQNLMDEEKQNNLTTKEEASFAVNGSNAAQKFHLKAEINFDLQHKQIKGLRGTVSSIKSGMEQLKLHYSEEFTKLGKHLYTISNAASGYHKVLEENRKLYNQIQDLKGNIRVYCRVRPFLPGQISSLSSVAGMEERTITIMTPTKYGKDGNKSFTFNKVFGPAATQDEVFSDMQPLIRSVLDGFNVCIFAYGQTGSGKTYTMSGPKVLTEESLGVNYKALNDLFNLQAQRKGTIDYDISVQMIEIYNEQKGLAVPDASIVPVTSTSDVVELMNQGQKNRAVGSTAINDRSSRSHSCLTVHVQGRDLTSGTVLRGCMHLVDLAGSERVDKSEVVGDRLKEAQYINKSLSALGDVIASLSQKNTHVPYRNSKLTQLLQDSLGGQAKTLMFVHISPELDAAGETISTLKFAERVASVELGAAKQNKEGSEIRELKEQIASLKAALAKKEGEPENILSTRSSPSIYRIRKGNATPATPKDRQPMEEVGSLEVQNVFTPAQKRSKMHLLGILTENNSSNSVQNCNVPQKEIGLGGWVDKMALGDNHFENSNSILELEPDTAQLPTSFYHQRYSPVQQSCRTESVPSLGLHGFDSATSCSNQEIVVSTMGLKASGVANRGASTVKKYEATSTRSTNLASKSPLLQKKLQTPTRNRNQLTSSTIGGRRTPNGKIGIAK

SEQ ID NO: 163548 - protein, 954 aa, Zea Mays
MAMAAAVLEEALRWGGGSVGDDNVAARRAEEAAIRRHEAASWLRKTVGIVCAKDLPEEPSEEEFQLGLRNGIVLCNALNKVQPGAIPKIVGVQSDTAVPADGSALCAYQYFENLRNFVVVIQDFGLPTFEVSDLEKGGKSVRIVDCVLALKSFSESKKTGRQAACKYGGILKPLVSGNYFILKNCDAFMNKNARIHTEEATLNGFRGEQNLSLDCSPESYEITSDNLSTIIRTILLDKKPEEIPLIVESLLNKVIQEYELRFANQNLMDEEKQNNLTTKEEASFAVNGSNAAQKFHLKAEINFDLQHKQIKGLRGTVSSIKSGMEQLKLHYSEEFTKLGKHLYTISNAASGYHKVLEENRKLYNQIQDLKGNIRVYCRVRPFLPGQISSLSSVAGMEERTITIMTPTKYGKDGNKSFTFNKVFGPAATQDEVFSDMQPLIRSVLDGFNVCIFAYGQTGSGKTYTMSGPKVLTEESLGVNYKALNDLFNLQAQRKGTIDYDISVQMIEIYNEQVRDLLQDSGNRRLEIKNTSQKGLAVPDASIVPVTSTSDVVELMNQGQKNRAVGSTAINDRSSRSHSCLTVHVQGRDLTSGTVLRGCMHLVDLAGSERVDKSEVVGDRLKEAQYINKSLSALGDVIASLSQKNTHVPYRNSKLTQLLQDSLGGQAKTLMFVHISPELDAAGETISTLKFAERVASVELGAAKQNKEGSEIRELKEQIASLKAALAKKEGEPENILSTRSSPSIYRIRKGNATPATPKDRQPMEEVGSLEVQNVFTPAQKRSKMHLLGILTENNSSNSVQNCNVPQKEIGLGGWVDKMALGDNHFENSNSILELEPDTAQLPTSFYHQRYSPVQQSCRTESVPSLGLHGFDSATSCSNQEIVVSTMGLKASGVANRGASTVKKYEATSTRSTNLASKSPLLQKKLQTPTRNRNQLTSSTIGGRRTPNGKIGIAK

SEQ ID NO: 163549 - protein, 600 aa, Zea Mays
MAMAAAVLEEALRWGGGSVGDDNVAARRAEEAAIRRHEAASWLRKTVGIVCAKDLPEEPSEEEFQLGLRNGIVLCNALNKVQPGAIPKIVGVQSDTAVPADGSALCAYQYFENLRNFVVVIQDFGLPTFEVSDLEKGGKSVRIVDCVLALKSFSESKKTGRQAACKYGGILKPLVSGNYFILKNCDAFMNKNARIHTEEATLNGFRGEQNLSLDCSPESYEVITSDNLSTIIRTILLDKKPEEIPLIVESLLNKVIQEYELRFANQNLMDEEKQNNLTTKEEASFAVNGSNAAQKFHLKAEINFDLQHKQIKGLRGTVSSIKSGMEQLKLHYSEEFTKLGKHLYTISNAASGYHKVLEENRKLYNQIQDLKGNIRVYCRVRPFLPGQISSLSSVAGMEERTITIMTPTKYGKDGNKSFTFNKVFGPAATQDEVFSDMQPLIRSVLDGFNVCIFAYGQTGSGKTYTMSGPKVLTEESLGVNYKALNDLFNLQAQRKGTIDYDISVQMIEIYNEQVRDLLQDSGNRRLEIKNTSQKGLAVPDASIVPVTSTSDVVELMNQGQKNRAVGSTAINDRSSRSHRKRFDIWDSFKRLHASGRSSRQ

SEQ ID NO: 163550 - protein, 525 aa, Zea Mays
MAMAAAVLEEALRWGGGSVGDDNVAARRAEEAAIRRHEAASWLRKTVGIVCAKDLPEEPSEEEFQLGLRNGIVLCNALNKVQPGAIPKIVGVQSDTAVPADGSALCAYQYFENLRNFVVVIQDFGLPTFEVSDLEKGGKSVRIVDCVLALKSFSESKKTGRQAACKYGGILKPLVSGNYFILKNCDAFMNKNARIHTEEATLNGFRGEQNLSLDCSPESYEVITSDNLSTIIRTILLDKKPEEIPLIVESLLNKVIQEYELRFANQNLMDEEKQNNLTTKEEASFAVNGSNAAQKFHLKAEINFDLQHKQIKGLRGTVSSIKSGMEQLKLHYSEEFTKLGKHLYTISNAASGYHKVLEENRKLYNQIQDLKGNIRVYCRVRPFLPGQISSLSSVAGMEERTITIMTPTKYGKDGNKSFTFNKVFGPAATQDEVFSDMQPLIRSVLDGFNVCIFAYGQTGSGKTYTMSGPKVLTEESLGVNYKALNDLFNLQAQRKGTIDYDISVQMIEIYNEQVRDLLQDSGNRR

SEQ ID NO: 163551 - protein, 95 aa, Zea Mays
MALAGRAPLLAGSPRRAWLSSFLIRARSSAPACPCFSLSPPWPRLAEVPAAACPSPCARARRRPLLVLQAVAGRASPSRSDLAINAQTCVLSPSS

SEQ ID NO: 163552 - protein, 57 aa, Zea Mays
MSLAFLRIYRMMDWRMSWRATTRQLVMLWKGCPQMISSAKPDELMMYLVLTLCLYEG

SEQ ID NO: 163553 - protein, 104 aa, Zea Mays
MISWSHMYEFGFLIQIYNLNCRLNPGRAEDLVFTHQNLRLLSRKSDEYRCGPSAMWDVGADTFEADFEGGADFLEQADLSLDEPELEERLFEDLEALGLTEDAE

SEQ ID NO: 163554 - protein, 902 aa, Zea Mays
MDRSINFRGIAGSAGNIMQGMGKFVFGNEGIESKEDSYVERYLYRISNGTIPDDRRSAMTELQSLVAESRSAQMSFGAMGFPILLNILKEDREDVELVRGALETFVSALTPIETSQGPNTEVQPASVNSDLLSQETENISLLLSLLSEEDFYVRYYTIQLLTALLTNSLKRLQEAILLIPRGITVLMDMLMDREVIRNEALLLLTYLTRDAEEIQKIVVFEGVFEKIFSIIREEGYSDGGVVVQDCLELLNNLIRHNASNQMLLKETMGFDPLISILKIRRGSAFNFTQQKTVNLLGALNTVELLLMGGPSGEAGKDANKNANQTALAQALRCIGNLVLRNPQNLDSLARKQVGEEPHVQPALNAIFSIILRTSVAQEFVAADYVFKCFCERNPNGQALLASTIVPHPNQGNMHEPAIDMPFGSVLLQALVSSDVNGDMEACCRASSVLSHIVKDNMQSKDRVLQIQLETLTPSLGRTEPVLHRIVTCLSIAASTEGENNQNNQPEEPYIQPVILRLLIIWLVDCSNAVNCLLESAVHLNYIIELASSKRYTACVRGLAAVVLGACILYNASHEKGRDAFAVADAISQKIGLTTYFLRFDELRRSLAHPLPEQHHRKELSRSSANSMSDFQEIEEDETNKDDQHPVLSEIFDSQFVNFLSKLEADIRENIMDIFSRTKTATALLPTELEQKNGEVDGEYIKRLKSFVEKQCNEMQDLLARNAMLAEELVRTGGGTTTDTSQRPNNGRERVQIEALRQELEGARRQIEALETDKSQIEAEANNQRNLAVKLESDLKSLSEAYNSIEQANYRLDAEVKTLRQGGSVPYPDVEAIKAQAKEEAEKDSEAELNDLLVCLGQEQTKVEKLSTRLAELGEDVDALLQGIGDDTAIPDDDDDDDEDSEE

SEQ ID NO: 163555 - protein, 740 aa, Zea Mays
MDMLMDREVIRNEALLLLTYLTRDAEEIQKIVVFEGVFEKIFSIIREEGYSDGGVVVQDCLELLNNLIRHNASNQMLLKETMGFDPLISILKIRRGSAFNFTQQKTVNLLGALNTVELLLMGGPSGEAGKDANKNANQTALAQKNILDHLLLLGVESQWAPVVLRCMALRCIGNLVLRNPQNLDSLARKQVGEEPHVQPALNAIFSIILRTSVAQEFVAADYVFKCFCERNPNGQALLASTIVPHPNQGNMHEPAIDMPFGSVLLQALVSSDVNGDMEACCRASSVLSHIVKDNMQSKDRVLQIQLETLTPSLGRTEPVLHRIVTCLSIAASTEGENNQNNQPEEPYIQPVILRLLIIWLVDCSNAVNCLLESAVHLNYIIELASSKRYTACVRGLAAVVLGACILYNASHEKGRDAFAVADAISQKIGLTTYFLRFDELRRSLAHPLPEQHHRKELSRSSANSMSDFQEIEEDETNKDDQHPVLSEIFDSQFVNFLSKLEADIRENIMDIFSRTKTATALLPTELEQKNGEVDGEYIKRLKSFVEKQCNEMQDLLARNAMLAEELVRTGGGTTTDTSQRPNNGRERVQIEALRQELEGARRQIEALETDKSQIEAEANNQRNLAVKLESDLKSLSEAYNSIEQANYRLDAEVKTLRQGGSVPYPDVEAIKAQAKEEAEKDSEAELNDLLVCLGQEQTKVEKLSTRLAELGEDVDALLQGIGDDTAIPDDDDDDDEDSEE

SEQ ID NO: 163556 - protein, 839 aa, Zea Mays
MDRSINFRGIAGSAGNIMQGMGKFVFGNEGIESKEDSYVERYLYRISNGTIPDDRRSAMTELQSLVAESRSAQMSFGAMGFPILLNILKEDREDVELVRGALETFVSALTPIETSQGPNTEVQPALQEAILLIPRGITVLMDMLMDREVIRNEALLLLTYLTRDAEEIQKIVVFEGVFEKIFSIIREEGYSDGGVVVQMLLKETMGFDPLISILKIRRGSAFNFTQQKTVNLLGALNTVELLLMGGPSGEAGKDANKNANQTALAQALRCIGNLVLRNPQNLDSLARKQVGEEPHVQPALNAIFSIILRTSVAQEFVAADYVFKCFCERNPNGQALLASTIVPHPNQGNMHEPAIDMPFGSVLLQALVSSDVNGDMEACCRASSVLSHIVKDNMQSKDRVLQIQLETLTPSLGRTEPVLHRIVTCLSIAASTEGENNQNNQPEEPYIQPVILRLLIIWLVDCSNAVNCLLESAVHLNYIIELASSKRYTACVRGLAAVVLGACILYNASHEKGRDAFAVADAISQKIGLTTYFLRFDELRRSLAHPLPEQHHRKELSRSSANSMSDFQEIEEDETNKDDQHPVLSEIFDSQFVNFLSKLEADIRENIMDIFSRTKTATALLPTELEQKNGEVDGEYIKRLKSFVEKQCNEMQDLLARNAMLAEELVRTGGGTTTDTSQRPNNGRERVQIEALRQELEGARRQIEALETDKSQIEAEANNQRNLAVKLESDLKSLSEAYNSIEQANYRLDAEVKTLRQGGSVPYPDVEAIKAQAKEEAEKDSEAELNDLLVCLGQEQTKVEKLSTRLAELGEDVDALLQGIGDDTAIPDDDDDDDEDSEE

SEQ ID NO: 163557 - protein, 620 aa, Zea Mays
MGGPSGEAGKDANKNANQTALAQKNILDHLLLLGVESQWAPVVLRCMALRCIGNLVLRNPQNLDSLARKQVGEEPHVQPALNAIFSIILRTSVAQEFVAADYVFKCFCERNPNGQALLASTIVPHPNQGNMHEPAIDMPFGSVLLQALVSSDVNGDMEACCRASSVLSHIVKDNMQSKDRVLQIQLETLTPSLGRTEPVLHRIVTCLSIAASTEGENNQNNQPEEPYIQPVILRLLIIWLVDCSNAVNCLLESAVHLNYIIELASSKRYTACVRGLAAVVLGACILYNASHEKGRDAFAVADAISQKIGLTTYFLRFDELRRSLAHPLPEQHHRKELSRSSANSMSDFQEIEEDETNKDDQHPVLSEIFDSQFVNFLSKLEADIRENIMDIFSRTKTATALLPTELEQKNGEVDGEYIKRLKSFVEKQCNEMQDLLARNAMLAEELVRTGGGTTTDTSQRPNNGRERVQIEALRQELEGARRQIEALETDKSQIEAEANNQRNLAVKLESDLKSLSEAYNSIEQANYRLDAEVKTLRQGGSVPYPDVEAIKAQAKEEAEKDSEAELNDLLVCLGQEQTKVEKLSTRLAELGEDVDALLQGIGDDTAIPDDDDDDDEDSEE

SEQ ID NO: 163558 - protein, 909 aa, Zea Mays
MDRSINFRGIAGSAGNIMQGMGKFVFGNEGIESKEDSYVERYLYRISNGTIPDDRRSAMTELQSLVAESRSAQMSFGAMGFPILLNILKEDREDVELVRGALETFVSALTPIETSQGPNTEVQPASVNSDLLSQETENISLLLSLLSEEDFYVRYYTIQLLTALLTNSLKRLQEAILLIPRGITVLMDMLMDREVIRNEALLLLTYLTRDAEEIQKIVVFEGVFEKIFSIIREEGYSDGGVVVQMLLKETMGFDPLISILKIRRGSAFNFTQQKTVNLLGALNTVELLLMGGPSGEAGKDANKNANQTALAQKNILDHLLLLGVESQWAPVVLRCMALRCIGNLVLRNPQNLDSLARKQVGEEPHVQPALNAIFSIILRTSVAQEFVAADYVFKCFCERNPNGQALLASTIVPHPNQGNMHEPAIDMPFGSVLLQALVSSDVNGDMEACCRASSVLSHIVKDNMQSKDRVLQIQLETLTPSLGRTEPVLHRIVTCLSIAASTEGENNQNNQPEEPYIQPVILRLLIIWLVDCSNAVNCLLESAVHLNYIIELASSKRYTACVRGLAAVVLGACILYNASHEKGRDAFAVADAISQKIGLTTYFLRFDELRRSLAHPLPEQHHRKELSRSSANSMSDFQEIEEDETNKDDQHPVLSEIFDSQFVNFLSKLEADIRENIMDIFSRTKTATALLPTELEQKNGEVDGEYIKRLKSFVEKQCNEMQDLLARNAMLAEELVRTGGGTTTDTSQRPNNGRERVQIEALRQELEGARRQIEALETDKSQIEAEANNQRNLAVKLESDLKSLSEAYNSIEQANYRLDAEVKTLRQGGSVPYPDVEAIKAQAKEEAEKDSEAELNDLLVCLGQEQTKVEKLSTRLAELGEDVDALLQGIGDDTAIPDDDDDDDEDSEE

SEQ ID NO: 163559 - protein, 339 aa, Zea Mays
MDRSINFRGIAGSAGNIMQGMGKFVFGNEGIESKEDSYVERYLYRISNGTIPDDRRSAMTELQSLVAESRSAQMSFGAMGFPILLNILKEDREDVELVRGALETFVSALTPIETSQGPNTEVQPASVNSDLLSQETENISLLLSLLSEEDFYVRYYTIQLLTALLTNSLKRLQEAILLIPRGITVLMDMLMDREVIRNEALLLLTYLTRDAEEIQKIVVFEGVFEKIFSIIREEGYSDGGVVVQDCLELLNNLIRHNASNQMLLKETMGFDPLISILKIRRGSAFNFTQQKVKTLTRMQIKLHWLRKTFWTIFFCWALRVNGPLSFSAVWHCDVLAIWY

SEQ ID NO: 163560 - protein, 665 aa, Zea Mays
MLLKETMGFDPLISILKIRRGSAFNFTQQKTVNLLGALNTVELLLMGGPSGEAGKDANKNANQTALAQKNILDHLLLLGVESQWAPVVLRCMALRCIGNLVLRNPQNLDSLARKQVGEEPHVQPALNAIFSIILRTSVAQEFVAADYVFKCFCERNPNGQALLASTIVPHPNQGNMHEPAIDMPFGSVLLQALVSSDVNGDMEACCRASSVLSHIVKDNMQSKDRVLQIQLETLTPSLGRTEPVLHRIVTCLSIAASTEGENNQNNQPEEPYIQPVILRLLIIWLVDCSNAVNCLLESAVHLNYIIELASSKRYTACVRGLAAVVLGACILYNASHEKGRDAFAVADAISQKIGLTTYFLRFDELRRSLAHPLPEQHHRKELSRSSANSMSDFQEIEEDETNKDDQHPVLSEIFDSQFVNFLSKLEADIRENIMDIFSRTKTATALLPTELEQKNGEVDGEYIKRLKSFVEKQCNEMQDLLARNAMLAEELVRTGGGTTTDTSQRPNNGRERVQIEALRQELEGARRQIEALETDKSQIEAEANNQRNLAVKLESDLKSLSEAYNSIEQANYRLDAEVKTLRQGGSVPYPDVEAIKAQAKEEAEKDSEAELNDLLVCLGQEQTKVEKLSTRLAELGEDVDALLQGIGDDTAIPDDDDDDDEDSEE

SEQ ID NO: 163561 - protein, 490 aa, Zea Mays
MHEPAIDMPFGSVLLQALVSSDVNGDMEACCRASSVLSHIVKDNMQSKDRVLQIQLETLTPSLGRTEPVLHRIVTCLSIAASTEGENNQNNQPEEPYIQPVILRLLIIWLVDCSNAVNCLLESAVHLNYIIELASSKRYTACVRGLAAVVLGACILYNASHEKGRDAFAVADAISQKIGLTTYFLRFDELRRSLAHPLPEQHHRKELSRSSANSMSDFQEIEEDETNKDDQHPVLSEIFDSQFVNFLSKLEADIRENIMDIFSRTKTATALLPTELEQKNGEVDGEYIKRLKSFVEKQCNEMQDLLARNAMLAEELVRTGGGTTTDTSQRPNNGRERVQIEALRQELEGARRQIEALETDKSQIEAEANNQRNLAVKLESDLKSLSEAYNSIEQANYRLDAEVKTLRQGGSVPYPDVEAIKAQAKEEAEKDSEAELNDLLVCLGQEQTKVEKLSTRLAELGEDVDALLQGIGDDTAIPDDDDDDDEDSEE

SEQ ID NO: 163562 - protein, 596 aa, Zea Mays
MGGPSGEAGKDANKNANQTALAQALRCIGNLVLRNPQNLDSLARKQVGEEPHVQPALNAIFSIILRTSVAQEFVAADYVFKCFCERNPNGQALLASTIVPHPNQGNMHEPAIDMPFGSVLLQALVSSDVNGDMEACCRASSVLSHIVKDNMQSKDRVLQIQLETLTPSLGRTEPVLHRIVTCLSIAASTEGENNQNNQPEEPYIQPVILRLLIIWLVDCSNAVNCLLESAVHLNYIIELASSKRYTACVRGLAAVVLGACILYNASHEKGRDAFAVADAISQKIGLTTYFLRFDELRRSLAHPLPEQHHRKELSRSSANSMSDFQEIEEDETNKDDQHPVLSEIFDSQFVNFLSKLEADIRENIMDIFSRTKTATALLPTELEQKNGEVDGEYIKRLKSFVEKQCNEMQDLLARNAMLAEELVRTGGGTTTDTSQRPNNGRERVQIEALRQELEGARRQIEALETDKSQIEAEANNQRNLAVKLESDLKSLSEAYNSIEQANYRLDAEVKTLRQGGSVPYPDVEAIKAQAKEEAEKDSEAELNDLLVCLGQEQTKVEKLSTRLAELGEDVDALLQGIGDDTAIPDDDDDDDEDSEE

SEQ ID NO: 163563 - protein, 901 aa, Zea Mays
MDRSINFRGIAGSAGNIMQGMGKFVFGNEGIESKEDSYVERYLYRISNGTIPDDRRSAMTELQSLVAESRSAQMSFGAMGFPILLNILKEDREDVELVRGALETFVSALTPIETSQGPNTEVQPASVNSDLLSQETENISLLLSLLSEEDFYVRYYTIQLLTALLTNSLKRLQEAILLIPRGITVLMDMLMDREVIRNEALLLLTYLTRDAEEIQKIVVFEGVFEKIFSIIREEGYSDGGVVVQDCLELLNNLIRHNASNQMLLKETMGFDPLISILKIRRGSAFNFTQQKVKTLTRMQIKLHWLRKTFWTIFFCWALRVNGPLSFSAALRCIGNLVLRNPQNLDSLARKQVGEEPHVQPALNAIFSIILRTSVAQEFVAADYVFKCFCERNPNGQALLASTIVPHPNQGNMHEPAIDMPFGSVLLQALVSSDVNGDMEACCRASSVLSHIVKDNMQSKDRVLQIQLETLTPSLGRTEPVLHRIVTCLSIAASTEGENNQNNQPEEPYIQPVILRLLIIWLVDCSNAVNCLLESAVHLNYIIELASSKRYTACVRGLAAVVLGACILYNASHEKGRDAFAVADAISQKIGLTTYFLRFDELRRSLAHPLPEQHHRKELSRSSANSMSDFQEIEEDETNKDDQHPVLSEIFDSQFVNFLSKLEADIRENIMDIFSRTKTATALLPTELEQKNGEVDGEYIKRLKSFVEKQCNEMQDLLARNAMLAEELVRTGGGTTTDTSQRPNNGRERVQIEALRQELEGARRQIEALETDKSQIEAEANNQRNLAVKLESDLKSLSEAYNSIEQANYRLDAEVKTLRQGGSVPYPDVEAIKAQAKEEAEKDSEAELNDLLVCLGQEQTKVEKLSTRLAELGEDVDALLQGIGDDTAIPDDDDDDDEDSEE

SEQ ID NO: 163564 - protein, 863 aa, Zea Mays
MDRSINFRGIAGSAGNIMQGMGKFVFGNEGIESKEDSYVERYLYRISNGTIPDDRRSAMTELQSLVAESRSAQMSFGAMGFPILLNILKEDREDVELVRGALETFVSALTPIETSQGPNTEVQPALQEAILLIPRGITVLMDMLMDREVIRNEALLLLTYLTRDAEEIQKIVVFEGVFEKIFSIIREEGYSDGGVVVQMLLKETMGFDPLISILKIRRGSAFNFTQQKTVNLLGALNTVELLLMGGPSGEAGKDANKNANQTALAQKNILDHLLLLGVESQWAPVVLRCMALRCIGNLVLRNPQNLDSLARKQVGEEPHVQPALNAIFSIILRTSVAQEFVAADYVFKCFCERNPNGQALLASTIVPHPNQGNMHEPAIDMPFGSVLLQALVSSDVNGDMEACCRASSVLSHIVKDNMQSKDRVLQIQLETLTPSLGRTEPVLHRIVTCLSIAASTEGENNQNNQPEEPYIQPVILRLLIIWLVDCSNAVNCLLESAVHLNYIIELASSKRYTACVRGLAAVVLGACILYNASHEKGRDAFAVADAISQKIGLTTYFLRFDELRRSLAHPLPEQHHRKELSRSSANSMSDFQEIEEDETNKDDQHPVLSEIFDSQFVNFLSKLEADIRENIMDIFSRTKTATALLPTELEQKNGEVDGEYIKRLKSFVEKQCNEMQDLLARNAMLAEELVRTGGGTTTDTSQRPNNGRERVQIEALRQELEGARRQIEALETDKSQIEAEANNQRNLAVKLESDLKSLSEAYNSIEQANYRLDAEVKTLRQGGSVPYPDVEAIKAQAKEEAEKDSEAELNDLLVCLGQEQTKVEKLSTRLAELGEDVDALLQGIGDDTAIPDDDDDDDEDSEE

SEQ ID NO: 163565 - protein, 715 aa, Zea Mays
MDMLMDREVIRNEALLLLTYLTRDAEEIQKIVVFEGVFEKIFSIIREEGYSDGGVVVQDCLELLNNLIRHNASNQMLLKETMGFDPLISILKIRRGSAFNFTQQKVKTLTRMQIKLHWLRKTFWTIFFCWALRVNGPLSFSAALRCIGNLVLRNPQNLDSLARKQVGEEPHVQPALNAIFSIILRTSVAQEFVAADYVFKCFCERNPNGQALLASTIVPHPNQGNMHEPAIDMPFGSVLLQALVSSDVNGDMEACCRASSVLSHIVKDNMQSKDRVLQIQLETLTPSLGRTEPVLHRIVTCLSIAASTEGENNQNNQPEEPYIQPVILRLLIIWLVDCSNAVNCLLESAVHLNYIIELASSKRYTACVRGLAAVVLGACILYNASHEKGRDAFAVADAISQKIGLTTYFLRFDELRRSLAHPLPEQHHRKELSRSSANSMSDFQEIEEDETNKDDQHPVLSEIFDSQFVNFLSKLEADIRENIMDIFSRTKTATALLPTELEQKNGEVDGEYIKRLKSFVEKQCNEMQDLLARNAMLAEELVRTGGGTTTDTSQRPNNGRERVQIEALRQELEGARRQIEALETDKSQIEAEANNQRNLAVKLESDLKSLSEAYNSIEQANYRLDAEVKTLRQGGSVPYPDVEAIKAQAKEEAEKDSEAELNDLLVCLGQEQTKVEKLSTRLAELGEDVDALLQGIGDDTAIPDDDDDDDEDSEE

SEQ ID NO: 163566 - protein, 733 aa, Zea Mays
MVIRNEALLLLTYLTRDAEEIQKIVVFEGVFEKIFSIIREEGYSDGGVVVQDCLELLNNLIRHNASNQMLLKETMGFDPLISILKIRRGSAFNFTQQKTVNLLGALNTVELLLMGGPSGEAGKDANKNANQTALAQKNILDHLLLLGVESQWAPVVLRCMALRCIGNLVLRNPQNLDSLARKQVGEEPHVQPALNAIFSIILRTSVAQEFVAADYVFKCFCERNPNGQALLASTIVPHPNQGNMHEPAIDMPFGSVLLQALVSSDVNGDMEACCRASSVLSHIVKDNMQSKDRVLQIQLETLTPSLGRTEPVLHRIVTCLSIAASTEGENNQNNQPEEPYIQPVILRLLIIWLVDCSNAVNCLLESAVHLNYIIELASSKRYTACVRGLAAVVLGACILYNASHEKGRDAFAVADAISQKIGLTTYFLRFDELRRSLAHPLPEQHHRKELSRSSANSMSDFQEIEEDETNKDDQHPVLSEIFDSQFVNFLSKLEADIRENIMDIFSRTKTATALLPTELEQKNGEVDGEYIKRLKSFVEKQCNEMQDLLARNAMLAEELVRTGGGTTTDTSQRPNNGRERVQIEALRQELEGARRQIEALETDKSQIEAEANNQRNLAVKLESDLKSLSEAYNSIEQANYRLDAEVKTLRQGGSVPYPDVEAIKAQAKEEAEKDSEAELNDLLVCLGQEQTKVEKLSTRLAELGEDVDALLQGIGDDTAIPDDDDDDDEDSEE

SEQ ID NO: 163567 - protein, 300 aa, Zea Mays
MTAAQVLQKQLFDAHEPNLLDENDMHIFGSKPMADPLDLVCCSTCKKPVKASQYAIHTGQCSSGKVNTNGSVGVDHANPTKPLKKGRKIKLISNGNQKVHIKVKAKSQTESNNIANSFELDNGHVTKVQPIDSTGLGLSADSSATINVPKNHPRDAPVPLATKMYHSQGNYRLRFELGQLYRESCVQHLSGHTTPNVSHENGLMASSRFSSCGNSALPTQKSLVPQTKPLADPQQLAASRPNQSQGTKTDRASAQASAIKNEGSRSRCNKATIPHSRNKGSKKTQQQPNGRVHAIKFPVE

SEQ ID NO: 163568 - protein, 76 aa, Zea Mays
MAHSLAASFSPAAARRQVTNVIPSWTSVSFQSHRMTSVSIRSRQRSLGFKICCSVCIISSFVASNSCLVDEATAYL

SEQ ID NO: 163569 - protein, 140 aa, Zea Mays
MKSTNFSAGERDPLKSIDNFFPKKRKEEKNVIFYLLSCSSPWPPPLSFPSVEGASFPSSPQQPYPFPGLRLRPGRLSSPVASPRRRRGAGQPRAGAEGARFLADACRSNADKIDKKRRRIHGILIMVFEGGTFATGTKGI

SEQ ID NO: 163570 - protein, 295 aa, Zea Mays
MQPRYGEARQPLPGRYALYHFGTSGAAVAAATAVTHPFDVIKVRLQMQLAGQRGNLVGMVLKVTAPTGARSLYLGLAPALARAVVYGGLRFGLYEPCKHVCSYAFGSTNFAFKFASGVIAGGLATALTNPMEVLKVRLQMSKSSTSTIREMRKVIAHEGFKALWKGVGPAMTRAGCLTASQMATYDEAKQALMKWTPLEEGFQLHLISSFIAGTAGTLVTAPVDMIKTRLMLQQESIGARVYRNGFHCASQVVVTEGVKSLYKGGFATFARVGPQTTITFVVCEKLRELAGMTAI

SEQ ID NO: 163571 - protein, 182 aa, Zea Mays
MDVIKVRLQMQLAGQRGNLVGMGTIFTQMVEREGARSLYLGLAPALARAVVYGGLRFGLYEPCKHVCSYAFGSTNFAFKFASGVIAGGLATALTNPMEVLKVRLQMSKSSTSTIREMRKVIAHEGFKALWKGVGPAMTRAGCLTASQMATYDEAKQALMKWTPLEEGFQLHLMYSEFSISLL

SEQ ID NO: 163572 - protein, 252 aa, Zea Mays
MQLAGQRGNLVGMGTIFTQMVEREGARSLYLGLAPALARAVVYGGLRFGLYEPCKHVCSYAFGSTNFAFKFASGVIAGGLATALTNPMEVLKVRLQMSKSSTSTIREMRKVIAHEGFKALWKGVGPAMTRAGCLTASQMATYDEAKQALMKWTPLEEGFQLHLISSFIAGTAGTLVTAPVDMIKTRLMLQQESIGARVYRNGFHCASQVVVTEGVKSLYKGGFATFARVGPQTTITFVVCEKLRELAGMTAI

SEQ ID NO: 163573 - protein, 207 aa, Zea Mays
MQPRYGEARQPLPGRYALYHFGTSGAAVAAATAVTHPFDVIKVRLQMQLAGQRGNLVGMGTIFTQMVEREGARSLYLGLAPALARAVVYGGLRFGLYEPCKHVCSYAFGSTNFAFKFASGVIAGGLATALTNPMEVLKVRLQMSKSSTSTIREMRKVIAHEGFKALWKGVGPAMTRAGCLTASQMATYDEAKQALMKWTPLEEARVS

SEQ ID NO: 163574 - protein, 174 aa, Zea Mays
MNGLVPYFSVQVHATLLLFSPQPDMILEGMVEMIGKESIHAIVLGVFSVAIMSEDIKFKFKWKSDGGKFVSLTDKKHVIERGTMIRFSVKRVDTEMSCHITGSLIPPHTGCMRWLSVHDPKYASELKSGESRSRDTSIKIEQNEQEHRILKNEDGMVKSERPYKSRKRGRHIEK

SEQ ID NO: 163575 - protein, 112 aa, Zea Mays
MEALRKAEAELTVYVHPSNAKRVRHAVSRQLSALLFTYVDRFDGVLLMHEVSFLIGKDKEGKPIYERSDRNDQIAEPVSYGKIMNGLVPYFSVQVHATLLLFSPQPDMILEK

SEQ ID NO: 163576 - protein, 202 aa, Zea Mays
MEALRKAEAELTVYVHPSNAKRVRHAVSRQLSALLFTVQVHATLLLFSPQPDMILEGMVEMIGKESIHAIVLGVFSVAIMSEDIKFKFKWKSDGGKFVSLTDKKHVIERGTMIRFSVKRVDTEMSCHITGSLIPPHTGCMRWLSVHDPKYASELKSGESRSRDTSIKIEQNEQEHRILKNEDGMVKSERPYKSRKRGRHIEK

SEQ ID NO: 163577 - protein, 91 aa, Zea Mays
MIRFSVKRVDTEMSCHITGSLIPPHTGCMRWLSVHDPKYASELKSGESRSRDTSIKIEQNEQEHRILKNEDGMVKSERPYKSRKRGRHIEK

SEQ ID NO: 163578 - protein, 225 aa, Zea Mays
MRFAKYVDRFDGVLLMHEVSFLIGKDKEGKPIYERSDRNDQIAEPVSYGKIMNGLVPYFSVQVHATLLLFSPQPDMILEGMVEMIGKESIHAIVLGVFSVAIMSEDIKFKFKWKSDGGKFVSLTDKKHVIERGTMIRFSVKRVDTEMSCHITGSLIPPHTGCMRWLSVHDPKYASELKSGESRSRDTSIKIEQNEQEHRILKNEDGMVKSERPYKSRKRGRHIEK

SEQ ID NO: 163579 - protein, 517 aa, Zea Mays
MHFDCCGSSCHIECALKHRKTGCIELGQSIQLDGNYCCAACGKVIGILGFWKRQLVVAKDARRVDNLCSRIYLSHRLLDGTTRFKELHRIVEDAKAKLESEVGPLDGTSSKMARGIVGRLHVAADVQKLCTLAIEKANEWLSSNIQSETKQNDTLPSACRFKFEDITASSLVLVLKEAVSSQYHAIKGYKLWYWNSREAPFTGEPAVFPKDQRRILISNLQPCTEYSFRIISFTEDGELGHSESKVFTKSVEIIRKNTELGAEGCSSSAKGAGKRQNVRSLGFQVRQLGNVFRKAQTEENGYPSALCKDEIEDSCDQSDSVIPVKDQIPRGASRKLDLNETSVPDLNAEVVMPTECCQNDNGCSSGKNAFTKSNGCGDSETCAEGHVGDAPAMESLSQSRKQASDLEQETCVDDSNLVARAVRLFAPKLGQLDDNYEYCVKIIRWLECSGLIEKDFRMKFLTWFSLRSTEQERRVVITFIRTLIDEPSSLAAQLLDSFEEIVTSKRLRTGFCTKLWH

SEQ ID NO: 163580 - protein, 273 aa, Zea Mays
MHFDCCGSSCHIECALKHRKTGCIELGQSIQLDGNYCCAACGKVIGILGFWKRQLVVAKDARRVDNLCSRIYLSHRLLDGTTRFKELHRIVEDAKAKLESEVGPLDGTSSKMARGIVGRLHVAADVQKLCTLAIEKANEWLSSNIQSETKQNGLNLKILQLHLWCWFSRKLFPHSIMLSKAINSGTGIAEKHLSQESLLFSPKTKEGFLYPICSPAQNIRSVLFHLLRMVNWAILNQKYLPRVWKLFVRTQSSEQKVAHLLPRELVRDKMLGH

SEQ ID NO: 163581 - protein, 476 aa, Zea Mays
MAASGGDAPELAGVPPCPISSARMALSGDLFRSAVITNACNAASAPEENRLADDSNTISENAQESLSSLPEQESNDASVNTEKKEPGISKCKSVDEIPKTVAVKRCKNIDSKKVSSNNNNNPSFTGSLVLKKQPAKGGHLFQLCENGMSQDTKTPSTRICINSACKAVFNSDNAFCKRCSCCICHGFDDNKDPSLWLVCSSEIGDQDCCGSSCHIECALKHRKTGCIELGQSIQLDGNYCCAACGKVIGILGFWKRQLVVAKDARRVDNLCSRIYLSHRLLDGTTRFKELHRIVEDAKAKLESEVGPLDGTSSKMARGIVGRLHVAADVQKLCTLAIEKANEWLSSNIQSETKQNGLNLKILQLHLWCWFSRKLFPHSIMLSKAINSGTGIAEKHLSQESLLFSPKTKEGFLYPICSPAQNIRSVLFHLLRMVNWAILNQKYLPRVWKLFVRTQSSEQKVAHLLPRELVRDKMLGH

SEQ ID NO: 163582 - protein, 127 aa, Zea Mays
MHVAVASRSVLPACGVDVHVAWRRIQNEQHRPGHRRTRQVHRAPAELNTSPPWTWRRRRQRREPRTRDVLPATAGREGGCGGGGGRPAAAAAARTGAAAARRVQRAAGADVNACFLLGSLDEPQSTQ

SEQ ID NO: 163583 - protein, 361 aa, Zea Mays
MVLNFEDFADSSGSSMKHELGQDNIEILDTSGSEVSKGYVPEISNTDGSFLLQDNAISNQTLLGSSNILEAGILNSVVQNGSAADAIFMETNLEKQDEVPSGESIEFDLNSSEEQAHLFAQVSDSDENIALDSQADAQDVMASSATNRAILPLEASAVYDAALLRDHETLPNDNHDASTDSSVDDASHVETTNGVQAKQASLHEHDASTGNVSIENAQSLDGQFSNISTDPINGAKLEAEVATKTVEASKVHRLQDGFEQPLADASCDGQENSDSPVSHPALDTKGLLHTEDQQSVVQVDESEFKNSTSGITKEDFKHEQGISTATVISRRTLKAQQKKDDNLFWLVLRAFVVAISKIWAK

SEQ ID NO: 163584 - protein, 53 aa, Zea Mays
MSHTLSASTLASGPGTAASARCLNELAEIVRGDLAGEPALQTSPRLSTIRPLL

SEQ ID NO: 163585 - protein, 154 aa, Zea Mays
MLPSVRRFNEEPHEVKRPYYTRDARRKDSHAQGGLQALLASRWLDVPPVAGALLVNVGDLLQLVSNGRFKSVEHRVVANRSRDTARVSVACFCNADIARSTRLYGPIAELIAADDSDGAGRALYRNVTVPEFLAHYDKKGLDGRPALHRFQLLQ

SEQ ID NO: 163586 - protein, 183 aa, Zea Mays
MSPTEEAAGGGGDDYDRLSELKAFDDSKAGVKGLVDAGVTTIPAIFRGHLLQEGPKDSHAQGGLQALLASRWLDVPPVAGALLVNVGDLLQLVSNGRFKSVEHRVVANRSRDTARVSVACFCNADIARSTRLYGPIAELIAADDSDGAGRALYRNVTVPEFLAHYDKKGLDGRPALHRFQLLQ

SEQ ID NO: 163587 - protein, 82 aa, Zea Mays
MDNLCITQVNCNFGNISSISYLVQAPLVSYPVLLYKIAIFQFLLVAVTPVKYSLNPNWFEQEKIQVSVLFGQLCVMQECRMN

SEQ ID NO: 163588 - protein, 60 aa, Zea Mays
MPPAHQNRTKNTGYLDTIAGGDGSPWEKVGTPRAGFVEHDIVISGREQVPHNEAHEGILR

SEQ ID NO: 163589 - protein, 468 aa, Zea Mays
MVVLAASIVSKSGKGLYLLLITNKQSNILEDLDTLRLLSKLVPEYSPSLDEEGICKTAFEIIFAFDEAISLGNKENVTVQQVKQYCEMESHEEKAHKLMMQTKINETKDLMKKRANELDKMRMERGKLDKGGYSSISGPRVIEKTFSDMSISGSGLGGLSTDMDSFASKPKGRPSTAATAPGKGFGMKLGKTQKTNQFLESLKAEGEVILEDVQPSAVSTRSSALPSDPVTVTIEEKLNVVVKRDGGINNFDVQGTLALQVLNDTDGFIQLQIESQDIPGLSFKTHPNINKDLFNSQQILGAKDPNRPFPSGQNETPLVKWRIQGMDESSLPLSVNCWPSVSGNETYVNIEYEASEMFDLHNVVISIPLPAVREAPSVRQIDGEWKLDSRNSVLEWSILLIDQSNRSGSMEFVVPPADPSSFFPISVGFSASSTFSDLKVTGILPLKEGNPPKFSQRARLLTANYQVV

SEQ ID NO: 163590 - protein, 261 aa, Zea Mays
MSSPTHVRKAIRFASLRAKIAQQGAGISPGRRAGVRQGERGPAAGGGGGAGALHHLERDAAADRGRDRGVAARAAAPRALQLPRLRAGPRQPYVGGAEPRRPHRVPGGGRVVDRQRAFQAPGARVLPRRLRHRAHRRRLAPGAPRPPGLRRAARPRRRRRRVLPPRARPQGPPARLPRTGVGPRHGRRAHGVDAAGARTDGRHLHRRHGGARAQARGRTHRRLRARRRPTRRGQLLQGVPVRGIPRRAGRPDQALRHPVPP

SEQ ID NO: 163591 - protein, 303 aa, Zea Mays
MSSPTHVRKAIRFASLRAKIAQQGKTGLALRLLLAAALAGFLLVFAARTLVTPSPAPTSSSQAQEYHQDAAPECGKGNAGLPLAVAEALVHYTTSNVTPQQTADEIGVSLRVLQRRAPCNFLVFGLGLDSPMWAALNHGGRTVFLEEDASWIASVRSKHPGLESYHVAYDTVLTDADSLLGLRDHPACVAQPDLAAAAAASCRLALALKGLPPVFHELEWDLVMVDAPTGWTPQAPGRMAAIYTAGMAARARRPGDGPTDVFVHDVDRPVEDNFSKAFLCEGYLAEQVGRIRHFVIPSHQFCG

SEQ ID NO: 163592 - protein, 320 aa, Zea Mays
MSSPTHVRKAIRFASLRAKIAQQGKTGLALRLLLAAALAGFLLVFAARTLVTPSPAPTSSSQAQEYHQDAAPECGKGNAGLPLAVAEALVHYTTSNVTPQQTADEIGVSLRVLQRRAPCNFLVFGLGLDSPMWAALNHGGRTVFLEEDASWIASVRSKHPGLESYHVAYDTVLTDADSLLGLRDHPACVAQPDLAAAAAASCRLALALKGLPPVFHELEWDLVMVDAPTGWTPQAPGRMAAIYTAGMAARARRPGDGPTDVFVHDVDRPVEDNFSKAFLCEGYLAEQNFAGEPHHDGVKRRVCARRPIRKWTRQIRRRMH

SEQ ID NO: 163593 - protein, 100 aa, Zea Mays
MAIIRGLKEPDVFTNAVTSAKAQSKTKPSNMGLGNKEAMDPTERNCWSVHTGRWSREVTGNRKKDLGNGGRPGTGRSNAAEAVPWFARALGTRHCFVMTT

SEQ ID NO: 163594 - protein, 282 aa, Zea Mays
MTKWLYMAEISSMGRGRIEIKRIENNTSRQVTFCKRRNGLLKKAYELSVLCDAEVALVVFSSRGRLYEYANNSVKATIERYKKAHAVGSSSGPPLLEHNAQQFYQQESAKLRNQIQMLQNTNRHLVGDSVGNLSLKELKQLESRLEKGISKIRARKSELLAAEINYMGQKENLSFQMDTWNLQTRYGIAIEEGEQQLQQVTVAQSVAAAAATDVELNPFLEMDTKCFFPGGPFATLDMKCFFPGSLQMLEAQQRQMLATELNLGYQLAPPDTDVANNNPQQF

SEQ ID NO: 163595 - protein, 166 aa, Zea Mays
MLQNTNRHLVGDSVGNLSLKELKQLESRLEKGISKIRARKSELLAAEINYMGQKENLSFQMDTWNLQTRYGIAIEEGEQQLQQVTVAQSVAAAAATDVELNPFLEMDTKCFFPGGPFATLDMKCFFPGSLQMLEAQQRQMLATELNLGYQLAPPDTDVANNNPQQF

SEQ ID NO: 163596 - protein, 266 aa, Zea Mays
MGRGRIEIKRIENNTSRQVTFCKRRNGLLKKAYELSVLCDAEVALVVFSSRGRLYEYANNSVKATIERYKKAHAVGSSSGPPLLEHNAQQESAKLRNQIQMLQNTNRHLVGDSVGNLSLKELKQLESRLEKGISKIRARKSELLAAEINYMGQKENLSFQMDTWNLQTRYGIAIEEGEQQLQQVTVAQSVAAAAATDVELNPFLEMDTKCFFPGGPFATLDMKCFFPGSLQMLEAQQRQMLATELNLGYQLAPPDTDVANNNPQQF

SEQ ID NO: 163597 - protein, 214 aa, Zea Mays
MLFANKLHAFVEYETPEDAAKAILELNDEKNWRNGLRVRLLNTCTVKGAGKGKNGMNETDGNSEEDVSTLNHSNEKQFEQSSQLLDVLPEHLFDENFNKEVPKRGKGRGRGGRGHGRGNHQYNNHHHNNQHHQNNQPQYNNHGNNHLGGNRGSLHSVGTTPHNLITKLEPHPQLPIGANKLPPGPRMPDGTRGFTMGRGKPQAVLPGLCAVGVE

SEQ ID NO: 163598 - protein, 303 aa, Zea Mays
MLAAALRTSSKLVVSDDGKRVKRQQPFTESDLQELQSRIVVAENLPGDPSYQNLKKIFSAVGSLISIRTCYPQTPNGTGPATNRSSKLDMLFANKLHAFVEYETPEDAAKAILELNDEKNWRNGLRVRLLNTCTVKGAGKGKNGMNETDGNSEEDVSTLNHSNEKQFEQSSQLLDVLPEHLFDENFNKEVPKRGKGRGRGGRGHGRGNHQYNNHHHNNQHHQNNQPQYNNHGNNHLGGNRGSLHSVGTTPHNLITKLEPHPQLPIGANKLPPGPRMPDGTRGFTMGRGKPQAVLPGLCAVGVE

SEQ ID NO: 163599 - protein, 250 aa, Zea Mays
MLDPSPYCRLTAQQVLEHPWIQNASAAPNIPLGEAVRSRLKQFTVMNKFKKKALLVVAEYLPAEELEAIRELFQLLDTNKDGHLTIEELRKGMRLIGHNVHDTDVDMLMEAADIDGNGTLDCKEFVTVSIHLKKIRSEDHLPKVFSYFDKNGSGYIEIEELKEALSPRGDQKAIEDIILDVDIDRDGKISYEEFELMMKAGVDWRNTSRQYSRAVYNTLSRKMFKDASLKLGSNNGPLAAAAVKEQQDVD

SEQ ID NO: 163600 - protein, 177 aa, Zea Mays
MLDPSPYCRLTAQQVLEHPWIQNASAAPNIPLGEAVRSRLKQFTVMNKFKKKALLVVAEYLPAEELEAIRELFQLLDTNKDGHLTIEELRKGMRLIGHNVHDTDVDMLMEAADIDGNGTLDCKEFVTVSIHLKKIRSEDHLPKVFSYFDKNGSGYIEIEELKEALSPRGREDKLRGV

SEQ ID NO: 163601 - protein, 100 aa, Zea Mays
MTTTVTPEAKMAAQQQAPASRSSSRPRRRVPIPAGPRYLRRPLDPAGAGDRCSALSIRAERRWLDGRPCATTGRIPSPPRPPPGARRRRRRPHPELGPCT

SEQ ID NO: 163602 - protein, 150 aa, Zea Mays
MQCALDPCRAQVVGWPPVRNYRKNTLAAATASRSKAPTEEAASGAGPMYVKVSMDGAPYLRKVDIKMYSSYEDLSLALEKMFSCFIAGQSGLHKSSSKDRLTNGSKVDALKDQEYVLTYEDKDADWMLVGDLPWELPSELEELTIRAVLL

SEQ ID NO: 163603 - protein, 903 aa, Zea Mays
MRTHCWRSHGTRRPASMLAVSLSRPVKMSAFVGLRSVHSFSVTPTVSNSRSAVASYRSSRQTRRSRFVTQAMFERFTEKAIKVIMLAQEEARRLGHNFVGTEQILLGLIGEGTGIAAKVLKSMGINLKDARVEVEKIIGRGNGFVAVEIPFTPRAKRVLELSLEEARQLGHNYIGSEHLLLGLLREGEGVAARVLESLGADPSNIRTQVIRMIGETTEAVGAGVGGGSSGNKMPTLEEYGTNLTKLAEEGKLDPVVGRQPQIERVVQILGRRTKNNPCLIGEPGVGKTAIAEGLAQRISTGDVPETIEGKKVITLDMGLLVAGTKYRGEFEERLKKLMEEIKQSDEIILFIDEVHTLIGAGAAEGAIDAANILKPALARGELQCIGATTLDEYRKHIEKDPALERRFQPVKVPEPTVDETIEILRGLRERYEIHHKLRYTDEALIAAAKLSYQYISDRFLPDKAIDLIDEAGSRVRLQHAQVPEEARELDKELKQVTKQKNEAVRSQDFEKAGELRDREMELKAQITALIDKSKELSKAEEESGETGPMVNEEDIQHIVSSWTGIPVEKVSSDESDKLLKMEETLHKRVIGQDEAVVAISRSIRRARVGLKNPNRPIASFIFAGPTGVGKSELAKALAAYYFGSEEAMIRLDMSEFMERHTVSKLIGSPPGYVGYTEGGQLTEAVRRRPYTVVLFDEIEKAHPDVFNMMLQILEDGRLTDSKGRTVDFKNTLLIMTSNVGSSVIEKGGRKIGFDLDSDEKDSSYSRIKSLVIEEMKQYFRPEFLNRLDEMIVFRQLTKLEVKEIADIMLQEVFDRLKAKDINLQVTEKFKERVVDEGYNPSYGARPLRRAIMRLLEDSLAEKMLAGEVKEGDSAIVDVDSEGKVVVLNGQGGIPELSTPAITV

SEQ ID NO: 163604 - protein, 692 aa, Zea Mays
MIGETTEAVGAGVGGGSSGNKMPTLEEYGTNLTKLAEEGKLDPVVGRQPQIERVVQILGRRTKNNPCLIGEPGVGKTAIAEGLAQRISTGDVPETIEGKKVITLDMGLLVAGTKYRGEFEERLKKLMEEIKQSDEIILFIDEVHTLIGAGAAEGAIDAANILKPALARGELQCIGATTLDEYRKHIEKDPALERRFQPVKVPEPTVDETIEILRGLRERYEIHHKLRYTDEALIAAAKLSYQYISDRFLPDKAIDLIDEAGSRVRLQHAQVPEEARELDKELKQVTKQKNEAVRSQDFEKAGELRDREMELKAQITALIDKSKELSKAEEESGETGPMVNEEDIQHIVSSWTGIPVEKVSSDESDKLLKMEETLHKRVIGQDEAVVAISRSIRRARVGLKNPNRPIASFIFAGPTGVGKSELAKALAAYYFGSEEAMIRLDMSEFMERHTVSKLIGSPPGYVGYTEGGQLTEAVRRRPYTVVLFDEIEKAHPDVFNMMLQILEDGRLTDSKGRTVDFKNTLLIMTSNVGSSVIEKGGRKIGFDLDSDEKDSSYSRIKSLVIEEMKQYFRPEFLNRLDEMIVFRQLTKLEVKEIADIMLQEVFDRLKAKDINLQVTEKFKERVVDEGYNPSYGARPLRRAIMRLLEDSLAEKMLAGEVKEGDSAIVDVDSEGKVVVLNGQGGIPELSTPAITV

SEQ ID NO: 163605 - protein, 234 aa, Zea Mays
MAGGGGAGAGSSSGGGGGGGREGDWDCGSCGNRNYAFRSLCNRCKHPRLLVDPNTPRDSKWLPRAGDWICTGCSNNNYASRKNCKKCGLPKEEAAMPALQMAGMAMPAYATYIARLQSLAASASAYNMNFGMAANSPLQQQLLANANWPYGMAGRYGMQSSGWPFGNGNPNQFLGVPKDWRNGDWFCSCGSHNYSSRTQCKECGAPVPSSIPSTTMKATSDASSTHRRPGYSLS

SEQ ID NO: 163606 - protein, 192 aa, Zea Mays
MAGRYGMQSSGWPFGNGNPNQFLGVPKDWRNGDWFCSCGSHNYSSRTQCKECGAPVPSSIPSTTMKATSDASSTLGTKRLASEDLANDWDNKRLNPGNDNYPLSTGAANNLFLGIEQGAGSSNGQSAFPKFDNGSSVALPSGQGMSGLMGKGAKWRDGDWLCNNCNNHNYASRAFCNRCKTQKESAVHPGVL

SEQ ID NO: 163607 - protein, 155 aa, Zea Mays
MPALQMAGMAMPAYATYIARLQSLAASASAYNMNFGMAANSPLQQQLLANANWPYGMAGRYGMQSSGWPFGNGNPNQFLGVPKDWRNGDWFCSCGSHNYSSRTQCKECGAPVPSSIPSTTMKATSDASSSIYAMLYTVLNIWQVVHWWTHLQVRA

SEQ ID NO: 163608 - protein, 347 aa, Zea Mays
MWILGHEFNMVTDNVSRWNIECQCAPDAQLTCDNHATIPDKAPDAQLTGDNRATIPDKAQVVEPAHAEQVPMQSERAAEKTWQLCLNQLSHIPSFAPGEQLTDEKVVEPAHAKQVHLAQLSPSPSRERARLSQFAQGAQLTDEEAAALEEEDHPQIDLLDGLRRGGRLRGSGAARLAEVRRRRRSGVLTSMASLSSKHHVLIQVLLARGPLSERDFHAFIDGAFGKNTALGTKRLASEDLANDWDNKRLNPGNDNYPLSTGAANNLFLGIEQGAGSSNGQSAFPKFDNGSSVALPSGQGMSGLMGKGAKWRDGDWLCNNCNNHNYASRAFCNRCKTQKESAVHPGVL

SEQ ID NO: 163609 - protein, 112 aa, Zea Mays
MAGRYGMQSSGWPFGNGNPNQFLGVPKDWRNGDWFCSCGSHNYSSRTQCKECGAPVPSSIPSTTMKATSDASSSAKLRKNLQFTLVCYSLLLDYFVPGYVAACSSSFLKAAV

SEQ ID NO: 163610 - protein, 177 aa, Zea Mays
MTIPLKDLQNRFKYFKDLWGRYNKLTRQLSSGAGPIKLSLEEIKKELESGKYERMLQYLDQLTHIFISCDEHKSPSVPAYRANIRCGNLSSASTGKRSIDETSSSHVRQKSSKVHLAQSLQNDITHEDAMQYLKDHDILGGTLKFCIANKLLKDYQNLTTFSRLKSLEERISFLEGT

SEQ ID NO: 163611 - protein, 123 aa, Zea Mays
MLQYLDQLTHIFISCDEHKSPSVPAYRANIRCGNLSSASTGKRSIDETSSSHVRQKSSKVHLAQSLQNDITHEDAMQYLKDHDILGGTLKFCIANKLLKDYQNLTTFSRLKSLEERISFLEGT

SEQ ID NO: 163612 - protein, 349 aa, Zea Mays
MTFFLLKYALLIHVKVLRKTLILSTVRQNNGGNIGFVDCVMRTNVALTRAKHCMWILGHEFNMVTDNVSRWNIECQCAPDAQLTCDNHATIPDKAPDAQLTGEQLTDEKVVEPAHAKQVHLAQLSPSPSRERARLSQFAQGAQLTDEEAAALEEEDHPQIDLLDGLRRGGRLRGSGAARLAEVRRRRRSGVLTSMASLSSKHHVLIQVLLARGPLSERDFHAFIDGAFGKNTGTKRLASEDLANDWDNKRLNPGNDNYPLSTGAANNLFLGIEQGAGSSNGQSAFPKFDNGSSVALPSGQGMSGLMGKGAKWRDGDWLCNNCNNHNYASRAFCNRCKTQKESAVHPGVL

SEQ ID NO: 163613 - protein, 352 aa, Zea Mays
MNSTWYDLVKDAKDRECFFKARDDDFFARTMDQFRLMQNSQVTDNVSRWNIECQCAPDAQLTCDNHATIPDKAPDAQLTGDNRATIPDKAQVVEPAHAEQVPMQSERAAEKTWQLCLNQLSHIPSFAPGEQLTDEKVVEPAHAKQVHLAQLSPSPSRERARLSQFAQGAQLTDEEAAALEEEDHPQIDLLDGLRRGGRLRGSGAARLAEVRRRRRSGVLTSMASLSSKHHVLIQVLLARGPLSERDFHAFIDGAFGKNTALGTKRLASEDLANDWDNKRLNPGNDNYPLSTGAANNLFLGIEQGAGSSNGQSAFPKFDNGSSVALPSGQGMSGLMGKGCKTQKESAVHPGVL

SEQ ID NO: 163614 - protein, 157 aa, Zea Mays
MASLSSKHHVLIQVLLARGPLSERDFHAFIDGAFGKNTALGTKRLASEDLANDWDNKRLNPGNDNYPLSTGAANNLFLGIEQGAGSSNGQSAFPKFDNGSSVALPSGQGMSGLMGKGAKWRDGDWLCNNCNNHNYASRAFCNRCKTQKESAVHPGVL

SEQ ID NO: 163615 - protein, 345 aa, Zea Mays
MRRAEEENQRWYSISICSPIRQNNGGNIGFVDCVMRTNVALTRAKHCMWILGHEFNMVTDNVSRWNIECQCAPDAQLTCDNHATIPDKAPDAQLTGEQLTDEKVVEPAHAKQVHLAQLSPSPSRERARLSQFAQGAQLTDEEAAALEEEDHPQIDLLDGLRRGGRLRGSGAARLAEVRRRRRSGVLTSMASLSSKHHVLIQVLLARGPLSERDFHAFIDGAFGKNTALGTKRLASEDLANDWDNKRLNPGNDNYPLSTGAANNLFLGIEQGAGSSNGQSAFPKFDNGSSVALPSGQGMSGLMGKGAKWRDGDWLCNNCNNHNYASRAFCNRCKTQKESAVHPGVL

SEQ ID NO: 163616 - protein, 242 aa, Zea Mays
MNSTWYDLVKDAKDRECFFKARDDDFFARTMDQFRLMQNSQVTDNVSRWNIECQCAPDAQLTDEEAAALEEEDHPQIDLLDGLRRGGRLRGSGAARLAEVRRRRRSGVLTSMASLSSKHHVLIQVLLARGPLSERDFHAFIDGAFGKNTALGTKRLASEDLANDWDNKRLNPGNDNYPLSTGAANNLFLGIEQGAGSSNGQSAFPKFDNGSSVALPSGQGMSGLMGKGCKTQKESAVHPGVL

SEQ ID NO: 163617 - protein, 153 aa, Zea Mays
MCREFATSLLSSQPLDTKRSTQNCPRRLSIESIGCLLNGAYSAFFFFLSHPPVSSREGWTLDTPANKKTGKRKKKRRKATGEARPRSWQPRTRLLLLMTRFSSSSPQSLDLALLRSCDNKSPYPQLPLLCDSNLHIFACHPCQRGPTFIYNVE

SEQ ID NO: 163618 - protein, 319 aa, Zea Mays
MRRAEEENQRWYSISICSPIRQNNGGNIGFVDCVMRTNVALTRAKHCMWILGHEFNMVTDNVSRWNIECQCAPDAQLTCDNHATIPDKAPDAQLTGEQLTDEKVVEPAHAKQVHLAQLSPSPSRERARLSQFAQGAQLTDEEAAALEEEDHPQIDLLDGLRRGGRLRGSGAARLAEVRRRRRSGVLTSMASLSSKHHVLIQVLLARGPLSERDFHAFIDGAFGKNTALGTKRLASEDLANDWDNKRLNPGNDNYPLSTGAANNLFLGIEQGAGSSNGQSAFPKFDNGSSVALPSGQGMSGLMGKGCKTQKESAVHPGVL

SEQ ID NO: 163619 - protein, 65 aa, Zea Mays
MPTCNLKIISGSRQPRAQLLHRPVSCHGGYTLFSSSLHFHCVVAFLVLVKLRLGLPYPIPGHVAS

SEQ ID NO: 163620 - protein, 216 aa, Zea Mays
MPRLPGSQPAPERRLAVLLSHFHPCCEPPRTIACVASVECLRTAAEEEAEMQLSLSTSPCAGGEKGGSSGGGHCVFCNIVAGTAQAFKLYEDDMCLCILDAKPLTSGHSLIIPKSHYPSVQTTPPTVLAAICSKLPLLGTAIMKATQCDAFNVLINNGEKAGQVIFHTHVHIIPRSKDDNLWSSEETTHLVSSIKEIISSSPEDYSTVMSSTPKEL

SEQ ID NO: 163621 - protein, 357 aa, Zea Mays
MLCCAGHQASLLLFALLSVSSLLLVDGSHQDQEFGEAVGSRILQTNPDAHEVHCSRERSRAAWEAIDEYLMPFVEKEKYELPSKCRLRPDNDMFREQEQHKIHFDINEWHCGFCKKAFRAEKFIDQHFENRHKNLVDNSEGRCMADLCGALHCDLMMQFKKPKSKCNAAAATRNRHLCESLADSCFPINQGLAASRLHETNKQVIPRSLHFDADTFAAVLSNCVPAPEGNEERYPRSKTVFENWAEEKAILVSNSHNVLELMEPRMSWIRNVVCSVKCFYGQGRNFPHFQDGNNVRRSRNAGFDLFFSFSFFFVSTCRCKLREASMCGLCEITAIFYIVNHNRSPIDNLRIFGRPQA

SEQ ID NO: 163622 - protein, 262 aa, Zea Mays
MLCCAGHQASLLLFALLSVSSLLLVDGSHQDQEFGEAVGSRILQTNPDAHEVHCSRERSRAAWEAIDEYLMPFVEKEKYELPSKCRLRPDNDMFREQEQHKIHFDINEWHCGFCKKAFRAEKFIDQHFENRHKNLVDNSEGRCMADLCGALHCDLMMQFKKPKSKCNAAAATRNRHLCESLADSCFPINQGLAASRLHEFFLRQFCDAHTCSKGTKPFPKGGRVSKFLPVDLTVYECLIYFRLFSFALNNEATSDRCRLYKQ

SEQ ID NO: 163623 - protein, 172 aa, Zea Mays
MLCCAGHQASLLLFALLSVSSLLLVDGSHQDQEFGEAVGSRILQTNPDAHEVHCSRERSRAAWEAIDEYLMPFVEKEKYELPSKCRLRPDNDMFREQEQHKIHFDINEWHCGFCKKAFRAEKFIDQHFENRHKNLVDNSEGRCMADLCGALHCDLMMQFKKPKKPCRQLLSY

SEQ ID NO: 163624 - protein, 205 aa, Zea Mays
MPFVEKEKYELPSKCRLRPDNDMFREQEQHKIHFDINEWHCGFCKKAFRAEKFIDQHFENRHKNLVDNSEGRCMADLCGALHCDLMMQFKKPKSKCNAAAATRNRHLCESLADSCFPINQGLAASRLHEFFLRQFCDAHTCSKGTKPFPKGGRKQTNRLYLALSILTLILLPLFYLIVFLHQREMRKGTQDLKRFSKIGQKKKPS

SEQ ID NO: 163625 - protein, 250 aa, Zea Mays
MGRVPYGTSFLDEQAKERSMDINLGWFLEPVVRGDYPFSMRSLARERLPFFSDKQQEKLVGSYNMLGINYYTSIFSKHIDISPKYSPVLNTDDAYASQETYGPDGKPIGPPMGNPWIYLYPEGLKDILMIMKNKYGNPPIYITENGIGDVDTKEKPLPMEAALNDYKRLDYIQRHISTLKESIDLGANVHGYFAWSLLDNFEWYAGYTERYGIVYVDRKNNYTRYMKESAKWLKEFNTAKKPSKKIITPA

SEQ ID NO: 163626 - protein, 292 aa, Zea Mays
MHARTAWSNCPVVVSTAEDRQGRGARAGVSPRVQPAAVRPRRGEAIEHPPRRRLHRTRRRLRPCPPAGRGRLRPRRAALHGWCRAPRRRHPVRQATGAGYGSGPFRRRRRVPRAGSACARCKADAEVGRVLVRCGAAGVADGPRPGRRPRVAVDVGVVLGARVRVDGDGPVRERGARGWRGAGGGAVGSPWLRGGRSPPGGDGGPGAATRPRAAQEGGGGGVPRRAPVHGERPGAPATDEGRCRQPRKDRLMSHKVMLAYTTPCMLIQGHCYFYYLFRLLPDFLSLVIQSFF

SEQ ID NO: 163627 - protein, 155 aa, Zea Mays
MAVQVHRHRNKVRNGQAIRCAMATGKEQGAISTASSGDQTKGGLRGKLNKVVLAYSGGLDTSVIVPWLRENYGCEVVCFTADVGQGAIELEGLEKKAKASGACQLVVKDLKEEFVSEYIYPCLRAGAVYERKYLLGTSMARPVIAKPCRVGGSAV

SEQ ID NO: 163628 - protein, 294 aa, Zea Mays
MASARGPCGISVRSDFSSACLIHKAGAPSNSVSGVMAVQVHRHRNKVRNGQAIRCAMATGKEQGAISTASSGDQTKGGLRGKLNKVVLAYSGGLDTSVIVPWLRENYGCEVVCFTADVGQGAIELEGLEKKAKASGACQLVVKDLKEEFVSEYIYPCLRAGAVYERKYLLGTSMARPVIAKAMVDVAKEVGADAVAHGCTGKGNDQVRFELTFYALNPELKVVAPWREWDITGREDAIEYAKKHNVPVPVSKKSIYSRDRNLWHLSHENLSYQNFTRWVTSWRTQQMSQRKICI

SEQ ID NO: 163629 - protein, 108 aa, Zea Mays
MCTHPCFKNQPTLGCPCDSPPKLSGPHAPILALLTSDGYARVPGNLTRLSSSPTGTHHPKDLPHNRYITVITFDTHTLEIERKTFTKYSLHSRTQVLHGRMRCIYYKS

SEQ ID NO: 163630 - protein, 90 aa, Zea Mays
MCFSRADCKFVPLGLWPLDGVLCGIRNLLLSSRTEGQAWKCRQPAVDTKQALRLWQPWCSVLSPVVSLDAKCSLLCMGILLSGVCPVGNG

SEQ ID NO: 163631 - protein, 52 aa, Zea Mays
MNLYIIGGGWFVFMLMLLGHNIYCTGRDKSNSDSVEFVESGNWYKGRSILFF

SEQ ID NO: 163632 - protein, 351 aa, Zea Mays
MPSDHFLGGRHYDHDTDLLPRRCQLDIPEQDFGAIYIGVETCNLGVNNNGDDIFFSALRRTTQSTFTSPGGIWSQSDPHRRRGRLLGWSPGLDETEARVDDGGDEDDEAEEGKPMPAAGARRSTRVFMPKAAKPPQSQEHVDPATRVLRSGKRLAADRIRWDAKEAAAFHVDINHGHDQQHQKEDYPKPGLPALTKSFGLVYRRKRRRRRRHPADEVVAEDEDGSRRFGIVYTRRKGKRSKGAPIRRGHLSQKSAMKRKRSFKRQKSQAGRGKPEALLQYNAEEDAALHRVAQAERAAKQAVERAIRLRNRAQSLMTNAELAAYKSVMALRIAEAARISDSSRDIVCTILD

SEQ ID NO: 163633 - protein, 323 aa, Zea Mays
MPALYFISRAVSNISSVPKEIYDDLSQKDVESLSGRTLSSANTTAIGPASAGGAKANSSWKLKSVVTLALTLLTSSQAILIVWSKRAGKYEYSVTTANFSVEALKCLLSLAALFRTWNCHGVTDDNRLTTSFDEVGVYPIPAVLYMVKNLLQYYIFVYVDAPAYQILKNLNIISTGVLYRIILKKKLSEIQWAAFVLLCAGCTTAQLNPSSDHVLQTPIQGWMMAIVMALLSGFAGVYTEAIIKKRPSRNINVQNFWLYIFGVIFNLVAICVQDYDAVMNKGFFHGYSFITVLMILNHALSGIAVSMVMKYADNIVKACGTSM

SEQ ID NO: 163634 - protein, 306 aa, Zea Mays
MVHKMIYDDLSQKDVESLSGRTLSSANTIGPASAGGAKANSSWKLKSVVTLALTLLTSSQAILIVWSKRAGKYEYSVTTANFSVEALKCLLSLAALFRTWNCHGVTDDNRLTTSFDEVGVYPIPAVLYMVKNLLQYYIFVYVDAPAYQILKNLNIISTGVLYRIILKKKLSEIQWAAFVLLCAGCTTAQLNPSSDHVLQTPIQGWMMAIVMALLSGFAGVYTEAIIKKRPSRNINVQNFWLYIFGVIFNLVAICVQDYDAVMNKGFFHGYSFITVLMILNHALSGIAVSMVMKYADNIVKACGTSM

SEQ ID NO: 163635 - protein, 233 aa, Zea Mays
MPALYFISRAVSNISSVPKEIYDDLSQKDVESLSGRTLSSANTTAIGPASAGGAKANSSWKLKSVVTLALTLLTSSQAILIVWSKRAGKYEYSVTTANFSVEALKCLLSLAALFRTWNCHGVTDDNRLTTSFDEVGVYPIPAVLYMVKNLLQYYIFVYVDAPAYQILKNLNIISTGVLYRIILKKKLVSFEQLEIIFTDLLYSKSGTPRIMVTIYFVDYCLTWIEAESEFQVF

SEQ ID NO: 163636 - protein, 249 aa, Zea Mays
MPALYFISRAVSNISSVPKEIYDDLSQKDVESLSGRTLSSANTIGPASAGGAKANSSWKLKSVVTLALTLLTSSQAILIVWSKRAGKYEYSVTTANFSVEALKCLLSLAALFRTWNCHGVTDDNRLTTSFDEVGVYPIPAVLYMVKNLLQYYIFVYVDAPAYQILKNLNIISTGVLYRIILKKKLSEIQWAAFVLLCAGCTTAQLNPSSDHVLQTPIQGWMMAIVMALLSGFAGVYTELECFYLSLNTA

SEQ ID NO: 163637 - protein, 178 aa, Zea Mays
MVKNLLQYYIFVYVDAPAYQILKNLNIISTGVLYRIILKKKLSEIQWAAFVLLCAGCTTAQLNPSSDHVLQTPIQGWMMAIVMALLSGFAGVYTEAIIKKRPSRNINVQNFWLYIFGVIFNLVAICVQDYDAVMNKGFFHGYSFITVLMILNHALSGIAVSMVMKYADNIVKACGTSM

SEQ ID NO: 163638 - protein, 83 aa, Zea Mays
MCLNLECVWTVLIVQAAANYQIANYFFTLYSSCAGSTKLNLVAQDDRKLHPRPKTAFYDQNKPLQFKLSPKLTNICHNLGPLS

SEQ ID NO: 163639 - protein, 113 aa, Zea Mays
MIFPPAFFDIMIHLPIHLAKEAKLGGLVCYRWMYPIERYLRTLKAYVRNKAHPEGSMAEGYILDECMTFCSRFLQDVETKLNHADRHEADAVNEPPSGLSIFANIDYTKKEFI

SEQ ID NO: 163640 - protein, 555 aa, Zea Mays
MEDCAPFESITLPSTLNLDALNLDDAISLMDTPDNHQKTLDQITLPEGEYVMIELDEDARVEQSGPAPSLHMGPTAIEDETSPPFHDGFGANNDPNEEAPIDRPIGNSPVNSNIANLTDGALDPPEKMREAPHEFPHLKLTESILGNDDPMDLDHDSSPFVQNKAITPPVIDETTSAGRQVPGRSISNLRAPNTFDAFADDAPLNFDIQLPEFRLEPSPRPVQENKDNRRPKAQVSNRNRKRGMKFDYKIVLSNDCMRKQIDGAELDELICKRRKLPQTALDVWRFSRTNRQGSFLLEPLLHGTCSDLQETYERNFPCVSGLDAECSNVAGVANDDPDASLERQLSPNVPRTAELSYHELTPTSPGNAEAQPEPPLPTLKSPGAAGAVPDDDMLPELPRFSPIDVPSSIRGNDTPYKTPGGTPSWLGGSAVSEIPSSDGNYSLPGQSTRDSDNMSFLFPINEDDEHPEIPGLMSTPGGVSSVATGTTGLGSMSARTRAVALFFKDHASSPSDDQPGKFSLNKILEGKTRKQAARMFFETTDLLSICKKIESPKAT

SEQ ID NO: 163641 - protein, 573 aa, Zea Mays
MEDCAPFESITLPSTLNLDALNLDDAISLMDTPDNHQKTLDQITLPEGEYVMIELDEDARVEQSGPAPSLHMGPTAIEDETSPPFHDGFGANNDPNEEAPIDRPIGNSPVNSNIANLTDGALDPPEKMREAPHEFPHLKLTESILGNDDPMDLDHDSSPFVQNKAITPPVIDETTSAGRQVPGRSISNLRAPNTFDAFADDAPLNFDIQLPEFRLEPSPRPVQENKDNRRPKAQVSNRNRKRGMKFDYKIVLSNDCMRKQIDGAELDELICKRRKLPQTALDVWRFSRTNRQGSFLLEPLLHGTCSDLQETYERNFPCVSGLDAECSNVAGVANDDPDASLERQLSPNVPRTAELSYHELTPTSPGNAEAQPEPPLPTLKSPGAAGAVPDDDMLPELPRFSPIDVPSSIRGNDTPYKTPGGTPSWLGGSAVSEIPSSDGNYSLPGQSTRDSDNMSFLFPINEDDEHPEIPGLMSTPGGVSSVATGTTGLGSMSARTRAVALFFKDHASSPSDDQPGKFSLNKILEGKTRKQAARMFFETTVLKSYNYIDVQQEDPYGAIEILVKPLLSAAKLT

SEQ ID NO: 163642 - protein, 609 aa, Zea Mays
MFPEVPIALRLSGHLLLGLVRIYSWKVQYLFQDCNRMLTTMRTSFASVQVDLPIDADCAPFESITLPSTLNLDALNLDDAISLMDTPDNHQKTLDQITLPEGEYVMIELDEDARVEQSGPAPSLHMGPTAIEDETSPPFHDGFGANNDPNEEAPIDRPIGNSPVNSNIANLTDGALDPPEKMREAPHEFPHLKLTESILGNDDPMDLDHDSSPFVQNKAITPPVIDETTSAGRQVPGRSISNLRAPNTFDAFADDAPLNFDIQLPEFRLEPSPRPVQENKDNRRPKAQVSNRNRKRGMKFDYKIVLSNDCMRKQIDGAELDELICKRRKLPQTALDVWRFSRTNRQGSFLLEPLLHGTCSDLQETYERNFPCVSGLDAECSNVAGVANDDPDASLERQLSPNVPRTAELSYHELTPTSPGNAEAQPEPPLPTLKSPGAAGAVPDDDMLPELPRFSPIDVPSSIRGNDTPYKTPGGTPSWLGGSAVSEIPSSDGNYSLPGQSTRDSDNMSFLFPINEDDEHPEIPGLMSTPGGVSSVATGTTGLGSMSARTRAVALFFKDHASSPSDDQPGKFSLNKILEGKTRKQAARMFFETTDLLSICKKIESPKAT

SEQ ID NO: 163643 - protein, 633 aa, Zea Mays
MFYSHTILARKSPLGTVWIAAHLERKIKKPQIDGIDIPTYAGLVRIYSWKVQYLFQDCNRMLTTMRTSFASVQVDLPIDADCAPFESITLPSTLNLDALNLDDAISLMDTPDNHQKTLDQITLPEGEYVMIELDEDARVEQSGPAPSLHMGPTAIEDETSPPFHDGFGANNDPNEEAPIDRPIGNSPVNSNIANLTDGALDPPEKMREAPHEFPHLKLTESILGNDDPMDLDHDSSPFVQNKAITPPVIDETTSAGRQVPGRSISNLRAPNTFDAFADDAPLNFDIQLPEFRLEPSPRPVQENKDNRRPKAQVSNRNRKRGMKFDYKIVLSNDCMRKQIDGAELDELICKRRKLPQTALDVWRFSRTNRQGSFLLEPLLHGTCSDLQETYERNFPCVSGLDAECSNVAGVANDDPDASLERQLSPNVPRTAELSYHELTPTSPGNAEAQPEPPLPTLKSPGAAGAVPDDDMLPELPRFSPIDVPSSIRGNDTPYKTPGGTPSWLGGSAVSEIPSSDGNYSLPGQSTRDSDNMSFLFPINEDDEHPEIPGLMSTPGGVSSVATGTTGLGSMSARTRAVALFFKDHASSPSDDQPGKFSLNKILEGKTRKQAARMFFETTDLLSICKKIESPKAT

SEQ ID NO: 163644 - protein, 66 aa, Zea Mays
MNCFWCPVHLKMKKSTTVLAISILVLSLASQFSWCAEAAEGSAGISTEPDLQVQEQVHGSQPEAWP

SEQ ID NO: 163645 - protein, 127 aa, Zea Mays
MEPIMIVPILRAGLALADLATSILPSTRTFHLGMARDETTLMASVYLNKLPDRFPKGCKILIVDPMLATGGTVTAAVDLVMERGAEISQIKISLVCRYQLLLPLLPSRSSIKDSQGFVCIQEPWIKL

SEQ ID NO: 163646 - protein, 255 aa, Zea Mays
MEASSRLELQQAHTELWNLTFSYLKSMALECVVQLNIPNVIHNFGGNATLPSILSAIQVPEHRKPYLPRLMRFLVVSDFVVAEYGDVFDGVSSLLDVGGGDGSTARTIRKAFPHIKCSVLDLPNVIIDIQPGDGMVDYIAGDMFSSIPPTDAIMLKYVLHDWNDDDCVKILQQCKKAICSCKPAGGKVLIIDVVVGSPLKEMFEAQVTSDLLMMVIAGGKERDKKEWHKIFVESGFKDYKISPVLGYLSIIELYS

SEQ ID NO: 163647 - protein, 77 aa, Zea Mays
MVGRTGGSRGWAPPWELGGKGIPAMGGAKREHGEDAERREMKELRPWRWAAELGGRLRADRTLANSRAWGNGKRDGQ

SEQ ID NO: 163648 - protein, 98 aa, Zea Mays
MHTSGARRCHVLVSIMSCATRSSVVCRVLHVLTISNFQRSLLSATRNHATTTPSTTYVRAKNPRKLDIKGNKSACSQKIFDVNGEGSKVRVVLTTCST

SEQ ID NO: 163649 - protein, 58 aa, Zea Mays
MFLLVLNSSPVSRVICSRAIHTVFLGLVTAPHRFSYLTMAKSSGAVVHLGKACSMITM

SEQ ID NO: 163650 - protein, 436 aa, Zea Mays
MQTPTMSTSMATTAPAKPPAPPRQCCRYLLLPSTGHRRSVAAWSAKKKNPWLDPFDDGPDEEFDYQGMFSGGKQEEDPRPPEDPENPYGFLRFPQGYNPELDSLASKMLKDRYPGVLVDVVASARGKQVYEMCKNVRYANVYDPDDDWPEPAEYTHMLGVLKNRYYDLIISTRLAGIGHALFLFMSSARDKVGYVYPNVNSVGAGLFLNEMFKAPTNNLADGGYKDMLEWIGRPAKNVPQQPTQPLRVSISKKLRAYVEDKYSRAGVEKGKYVVIHGIASDSVANMKSRGDDDCLLPLGHWAQIAKEISSGDRGLKPLFVIPHEKHRDEIEEEVGDDTSILFITTPGQLTCLINDSAGVVATNTAAVQLANARDKPCVALFSSAEKARLFLPYVEGKSSCTVISSATGNLIDIDLNAVKNVVKDLEPAPSFALAQK

SEQ ID NO: 163651 - protein, 255 aa, Zea Mays
MSSARDKVGYVYPNVNSVGAGLFLNEMFKAPTNNLADGGYHMYKDMLEWIGRPAKNVPQQPTQPLRVSISKKLRAYVEDKYSRAGVEKGKYVVIHGIASDSVANMKSRGDDDCLLPLGHWAQIAKEISSGDRGLKPLFVIPHEKHRDEIEEEVGDDTSILFITTPGQLTCLINDSAGVVATNTAAVQLANARDKPCVALFSSAEKARLFLPYVEGKSSCTVISSATGNLIDIDLNAVKNVVKDLEPAPSFALAQK

SEQ ID NO: 163652 - protein, 210 aa, Zea Mays
MLEWIGRPAKNVPQQPTQPLRVSISKKLRAYVEDKYSRAGVEKGKYVVIHGIASDSVANMKSRGDDDCLLPLGHWAQIAKEISSGDRGLKPLFVIPHEKHRDEIEEEVGDDTSILFITTPGQLTCLINDSAGVVATNTAAVQLANARDKPCVALFSSAEKARLFLPYVEGKSSCTVISSATGNLIDIDLNAVKNVVKDLEPAPSFALAQK

SEQ ID NO: 163653 - protein, 432 aa, Zea Mays
MQTPTMSTSMATTAPAKPPAPPRQCCRYLLLPSTGHRRSVAAWSAKKKNPWLDPFDDGPDEEFDYQGMFSGGKQEEDPRPPEDPENPYGFLRFPQGYNPELDSLASKMLKDRYPGVLVDVVASARGKQVYEMCKNVRYANVYDPDDDWPEPAEYTHMLGVLKNRYYDLIISTRLAGIGHALFLFMSSARDKVGYVYPNVNSVGAGLFLNEMFKAPTNNLADGGYKDMLEWIGRPAKNVPQQPTQPLRVSISKKLRAYVEDKYSRAGVEKGKYVVIHGIASDSVANMKSRGDDDCLLPLGHWAQIAKEIRGLKPLFVIPHEKHRDEIEEEVGDDTSILFITTPGQLTCLINDSAGVVATNTAAVQLANARDKPCVALFSSAEKARLFLPYVEGKSSCTVISSATGNLIDIDLNAVKNVVKDLEPAPSFALAQK

SEQ ID NO: 163654 - protein, 75 aa, Zea Mays
MWIVERSPPQQAYIEWSLIDTDGRPCPLSVWSRCIQTIFPFLVPDRGTLFQMMNPLWPKWNHHHKSALIFETKGP

SEQ ID NO: 163655 - protein, 177 aa, Zea Mays
MGRKKHTRSGCRPGPTGQTTRSGARDCEAATVGPLVCQRPDIDGALKDIEGLPLPFRHLQCAYTCSFILHQLPHMLPSEKAFLVVVSALGIYNKDEIVVYDGKGLFSDARVWWIPHSDGQPQRKGREWLFTPIGLTKKKRSSKTERKDKDAKKRSKKRRKFIKVKFQLIFRIFKQRR

SEQ ID NO: 163656 - protein, 51 aa, Zea Mays
MRIGVQGSQDHSRDQREQGRKRRACQGPSAEAVKARRKAQLSEPFTMVFSI

SEQ ID NO: 163657 - protein, 90 aa, Zea Mays
MRGGRPCSLEELLVGEADNHGEQGARAGRDPGGATMGRGGDGGELQVEESAAVRESAWEVELGRAPCPGAKGECKPARRESDVREFGFFT

SEQ ID NO: 163658 - protein, 110 aa, Zea Mays
MHNPCLPLLLCTAAALHLALAVAWCLGLVAVHHASPSSHPCLADWQPSMLRASLSSILHQHRRPSRLRSVPELQGTDDQDLVNHSSPRSSSSSPTKLKTLNICLVKASVL

SEQ ID NO: 163659 - protein, 596 aa, Zea Mays
MDTIEECGDGGRHLLLGLGTRILVGVPDNSRGCSELLSWAIGAVAKPSDSVVAVHVLGGRGRKRRLQKANAFVIYMLGEFVKACEAKQINLEAKVICSSNIGRALTQEAALTDGNILIVGRSRNAYHRSHFEIANYCFMHAPKNCSVIAVGRQGVAQSSTRLRPRSFDADSTISSSSTWSRRFPPLQKLLRTNSTRKLAQSDDKSSPRAVLDGPEGEGGENQECYSTSSHEVSRRGHNGLWRRLSDMKLWLPFLRNIGDDSTRGSDVGSAFAEDHKPAWRCFSFQEISVATNDFHPDNMAGRGGYAEVYKGTLADGHLVAVKRLAKGTPSEQKEKEFLAELGIQGHVCHPNTSYLLGCCVENGLYLIFEFCTNGTLASALHGKGGRTLEWPLRYKIAVGVARGLQYLHMFCRHRIIHRDIKASNVLLGHDFEPQISDFGLAKWLPKQWTHHSVVPIEGTFGYLAPEYFMHGIVDEKTDIFAFGVLLLEIVTGRRPIDCSKQSLLQWAKPLLEAGQVTELADPSLGDDYDKDQLNRMVAVASRCIMRPAMWRPSMAEVLHFLSTTDECLNEPEKWNIPDDEVDDMDDCTLFSESFSM

SEQ ID NO: 163660 - protein, 330 aa, Zea Mays
MAAAARAALPRPHLSLFSSSHRSPHLSLTPSSAPRLRSGAATSPALQQHHQVTTRLGDVIEAQQFDRDALNEIFEVAREMEAVERGSHGAPSRVLEGYLMATLFYEPSTRTRLSFEAAMRRLGGEVVTTENAREFSSAAKGETLEDTIRTVEGYSDIIVLRHFESGAARKAADTANIPVINAGDGPGQHPTQALLDVYTIKREIGTLDGIKLGLVGDLANGRTVRSLAYLIAKYQNIKIYFVSPDVVKMKDDIKNYLNSKGVEWEESSDLLEVASKCDVIYQTRIQKERFGERIDLYEAARGKYIVDKKVLDVLPKHAVIMHPLPRLDEL

SEQ ID NO: 163661 - protein, 155 aa, Zea Mays
MVHMEYPSICCFLMITKALLDVYTIKREIGTLDGIKLGLVGDLANGRTVRSLAYLIAKYQNIKIYFVSPDVVKMKDDIKNYLNSKGVEWEESSDLLEVASKCDVIYQTRIQKERFGERIDLYEAARGKYIVDKKVLDVLPKHAVIMHPLPRLDEL

SEQ ID NO: 163662 - protein, 157 aa, Zea Mays
MVHMEYPSICCFLMITKALLDVYTIKREIGTLDGIKLGLVGDLANGRTVRSLAYLIAKYQNIKIYFVSPDVVKMKDDIKNYLNSKGVEWEESSDLLEVASKCDVIYQTRIQKERFGERIDLYEAARGKYIVDKKVLDVLPKHAVIMHPLPRLDEMSK

SEQ ID NO: 163663 - protein, 154 aa, Zea Mays
MVHMEYPSICCFLMITKALLDVYTIKREIGTLDGIKLGLVGDLANGRTVRSLAYLIAKYQNIKIYFVSPDVVKMKDDIKNYLNSKGVEWEESSDLLEVASKCDVIYQTRIQKERFGERIDLYEAARGKYIVDKKVLDVLPKHAVIMHPLPRLDE

SEQ ID NO: 163664 - protein, 157 aa, Zea Mays
MITKALLDVYTIKREIGTLDGIKLGLVGDLANGRTVRSLAYLIAKYQNIKIYFVSPDVVKMKDDIKNYLNSKGVEWEESSDLLEVASKCDVIYQTRIQKERFGERIDLYEAARGKYIVDKKVLDVLPKHAVIMHPLPRLDEVKDSYHRMRRMKEKTS

SEQ ID NO: 163665 - protein, 66 aa, Zea Mays
MFAACLLAAQLQPGGWCLSESTKLSDVICKTYSVLVKLNLLTGFLSNCWAPEHCCAPYVRLSSCIC

SEQ ID NO: 163666 - protein, 221 aa, Zea Mays
MVEELVVDDTPETSRGIIGLCSDPSTGLFYAYDESSIFQVSTSDEGCDMWQVYLDMNHYAAALSHCRNPFQRDQVYLVQADAAFAAKEYYIAASFYAKINYILSFEEISLKFISIGEQDALRTFLLRRLDNLTKEDKMQITMISTWATELYLDKINRLLLEDTTVTIINSVAEPNSSEYRSIVNEFRAFLSDSKDVLDEATTMKLLERVTEEWMSLCTLPV

SEQ ID NO: 163667 - protein, 127 aa, Zea Mays
MVEELVVDDTPETSRGIIGLCSDPSTGLFYAYDESSIFQVSTSDEGCDMWQVYLDMNHYAAALSHCRNPFQRDQVYLVQADAAFAAKEYYIAASFYAKINYILSFEEISLKFISIGCSQNFLIEKAR

SEQ ID NO: 163668 - protein, 97 aa, Zea Mays
MPPCGRERFGVGSPLPPTPPSTKPRIHCRCAIHIALSASSQLAVGVRKLNMRDYRLGDREFFVGEVAPPWPHPPSRPSLFTLLILKSQWPSIPVFSR

SEQ ID NO: 163669 - protein, 1960 aa, Zea Mays
MVHSTTSSHKCVSQVSATTIGQLTALIRQSRPITRPFTAPGPSVRARMTFTSVVDHRSCAPHLHTTSRPTWLHKHNLTLWTNMQIRRKSMVQCGKALVGFCGASDGHERGEPRGARVLKRTVGHSVANDGPRHPARFSMGDGGVACAVRSVESFRAGALVRRGGAGEAMPDKGERAHGHRHQHQHWKNQQSATAADLEEGELLNGEAGTNGLPERSMPPKKWRKVLAASAAAVEVEPGEIVSTKQAVPLKKERRNGDVEKVELLPERQRKEKSSGKSTRKSIKDDVEPGEIALPGKRRDAKSQLAHDNSRRPSSSAQKGSLRDSDEEPGEIKPESGISGSVRKNRPTEPHSSNHKHHTDTSDQSGSKHRRKGEGKSSSAARHLSGRIREVSPPTRDRRDKHERSPGILGRFPHDRFRHDRYDRSPSRLERSPHRTRHYDSRDRSPYISPRHRARPPQFRDNTPSRVDNSPRGRVQHEDIRDRSPFRHDRSPSERCRPTDTHEASKKSRSSNNSEKSHHKSKSAKQSSKIKSGSNGKNEEKISKEKHTESSQYTELPPPPPLPLPPPPPPPPPPPPLPPAVPPPLPPSPEPEPPGVLAEDMIEDMDICDTPPHTSAVPEPTEPICDIGRWFYLDHFGIEQGPSKLAELKKLVQDGYLLSDHLIKHADSNRWVTVENAASPLVPSDFPSLYSDTSTQLVNPPEAPGNLLDEALEEASNLASGAEDKQMEETSAEDSEEFCIDDRVEALMDGSILVHGQELEIIGELLGADFQPADWQRWSRREDFTRLNVHTEVNNEINGGTENRATDAYGLVSVEKNFHHNAESSEWFSGRWSCKGGDWRRNDELSQDTPFRKKLVLNEGYPLCQMPKGSCEDPRRPCKDELYYPVRAKKYELPLWAFSLTEEDIDSVNDTTKSGVVPGRPGQTRQPSRGVKGMMLSVVRINSRVVKDQSSVEPHTKPRGTDRPLSRSSRSHSIGAERSSVHEGSSHFRKHHDHDSQSSHKSKPVPNIPKDRVCTVDELSVYRGDWYYLDGTGHEHGPFSYSELQELVKNGTIIEQSSVFRKIDNTWFPVLKDLKPGSSVPSAARSSSFTAALMLPDQYNFGVNQGSGSFNQLHPQFVGYTRGKLHELVMKYFKSRELTLAINEVLDPWISAKQPKKEFEAYFSHNSASRNLLPEDGGSAKKAKLLPDQSDEDIHLSQDILASRKEDICFDELCDAEPSVDNDSLNPGAGNETWGLLNGHVLARIFHFMRADVKALISSAATCRSWNAAVKYYRNMCRFIDLSSVGPLCTDSVFCDIMAGYEKQNIRTLILAGCSNLSSHALGRVLEQLPQISYVDIHGCGHLGDLKNKFQHVKWIRSSLNPEESYRKIKTLKQIGDGNNYASKVARNFTNHLDGSDELDGYFADISNRENANLSFGQGFYKRSKLLDARKSSAVLSRDAEMRRLMQRQAETSYRKMEEFIINRLREIMRSNRFDFFIPKVSKIEGRLKNGYYARHGFRTIKHDIRTMCQDALRYKDGNDSGDIKQIVVSFIQLAKRLGNPRYISDRYGAGAQDSLDINQYSFDTKLKKKQNKIRGANSLAAGADNSSRAFDLEIKRSLSKLKKKDVYSGSETSDDDDGYSEVDETESETTVSDTESDLDVNSGAWDLKGNSLKLIEPGESVTDDRILGARMTKASLVPPVTRKYEVIEEYLIVADLEEVQRKMRVALPDDYSEKLLSQKNGTENLELPEVKDYQPRKVAGDEILEQEVYGIDPYTHNLLSDIMPADLELSPTDKHIFIEELLLNTLNKQVRHFTGSGNTPMTYNLRPVIEEIQRSAEDNGDRRTSKMCLGMLKTMRNRSEQNFVAYRKGLGVVCNKKGGFGVDDFVVEFFGEVYPSWRWYEKQDGIKHIQNNSEDQAPEFYNIMLERPKGDGDGYDLVFVDAMHKANYASRICHSCNPNCEAKLEFTHFDQLQKARKSLL

SEQ ID NO: 163670 - protein, 1832 aa, Zea Mays
MGDGGVACAVRSVESFRAGALVRRGGAGEAMPDKGERAHGHRHQHQHWKNQQSATAADLEEGELLNGEAGTNGLPERSMPPKKWRKVLAASAAAVEVEPGEIVSTKQAVPLKKERRNGDVEKVELLPERQRKEKSSGKSTRKSIKDDVEPGEIALPGKRRDAKSQLAHDNSRRPSSSAQKGSLRDSDEEPGEIKPESGISGSVRKNRPTEPHSSNHKHHTDTSDQSGSKHRRKGEGKSSSAARHLSGRIREVSPPTRDRRDKHERSPGILGRFPHDRFRHDRYDRSPSRLERSPHRTRHYDSRDRSPYISPRHRARPPQFRDNTPSRVDNSPRGRVQHEDIRDRSPFRHDRSPSERCRPTDTHEASKKSRSSNNSEKSHHKSKSAKQSSKIKSGSNGKNEEKISKEKHTESSQYTELPPPPPLPLPPPPPPPPPPPPLPPAVPPPLPPSPEPEPPGVLAEDMIEDMDICDTPPHTSAVPEPTEPICDIGRWFYLDHFGIEQGPSKLAELKKLVQDGYLLSDHLIKHADSNRWVTVENAASPLVPSDFPSLYSDTSTQLVNPPEAPGNLLDEALEEASNLASGAEDKQMEETSAEDSEEFCIDDRVEALMDGSILVHGQELEIIGDFTRLNVHTEVNNEINGGTENRATDAYGLVSVEKNFHHNAESSEWFSGRWSCKGGDWRRNDELSQDTPFRKKLVLNEGYPLCQMPKGSCEDPRRPCKDELYYPVRAKKYELPLWAFSLTEEDIDSVNDTTKSGVVPGRPGQTRQPSRGVKGMMLSVVRINSRVVKDQSSVEPHTKPRGTDRPLSRSSRSHSIGAERSSVHEGSSHFRKHHDHDSQSSHKSKPVPNIPKDRVCTVDELSVYRGDWYYLDGTGHEHGPFSYSELQELVKNGTIIEQSSVFRKIDNTWFPVLKDLKPGSSVPSAARSSSFTAALMLPDQYNFGVNQGSGSFNQLHPQFVGYTRGKLHELVMKYFKSRELTLAINEVLDPWISAKQPKKEFEAYFSHNSASRNLLPEDGGSAKKAKLLPDQSDEDIHLSQDILASRKEDICFDELCDAEPSVDNDSLNPGAGNETWGLLNGHVLARIFHFMRADVKALISSAATCRSWNAAVKYYRNMCRFIDLSSVGPLCTDSVFCDIMAGYEKQNIRTLILAGCSNLSSHALGRVLEQLPQISYVDIHGCGHLGDLKNKFQHVKWIRSSLNPEESYRKIKTLKQIGDGNNYASKVARNFTNHLDGSDELDGYFADISNRENANLSFGQGFYKRSKLLDARKSSAVLSRDAEMRRLMQRQAETSYRKMEEFIINRLREIMRSNRFDFFIPKVSKIEGRLKNGYYARHGFRTIKHDIRTMCQDALRYKDGNDSGDIKQIVVSFIQLAKRLGNPRYISDRYGAGAQDSLDINQYSFDTKLKKKQNKIRGANSLAAGADNSSRAFDLEIKRSLSKLKKKDVYSGSETSDDDDGYSEVDETESETTVSDTESDLDVNSGAWDLKGNSLKLIEPGESVTDDRILGARMTKASLVPPVTRKYEVIEEYLIVADLEEVQRKMRVALPDDYSEKLLSQKNGTENLELPEVKDYQPRKVAGDEILEQEVYGIDPYTHNLLSDIMPADLELSPTDKHIFIEELLLNTLNKQVRHFTGSGNTPMTYNLRPVIEEIQRSAEDNGDRRTSKMCLGMLKTMRNRSEQNFVAYRKGLGVVCNKKGGFGVDDFVVEFFGEVYPSWRWYEKQDGIKHIQNNSEDQAPEFYNIMLERPKGDGDGYDLVFVDAMHKANYASRICHSCNPNCEAKVTAVNGKYQIGVYTLRPIAEGEEITFDYNSVTESASVEVKYAVAAI

SEQ ID NO: 163671 - protein, 1856 aa, Zea Mays
MGDGGVACAVRSVESFRAGALVRRGGAGEAMPDKGERAHGHRHQHQHWKNQQSATAADLEEGELLNGEAGTNGLPERSMPPKKWRKVLAASAAAVEVEPGEIVSTKQAVPLKKERRNGDVEKVELLPERQRKEKSSGKSTRKSIKDDVEPGEIALPGKRRDAKSQLAHDNSRRPSSSAQKGSLRDSDEEPGEIKPESGISGSVRKNRPTEPHSSNHKHHTDTSDQSGSKHRRKGEGKSSSAARHLSGRIREVSPPTRDRRDKHERSPGILGRFPHDRFRHDRYDRSPSRLERSPHRTRHYDSRDRSPYISPRHRARPPQFRDNTPSRVDNSPRGRVQHEDIRDRSPFRHDRSPSERCRPTDTHEASKKSRSSNNSEKSHHKSKSAKQSSKIKSGSNGKNEEKISKEKHTESSQYTELPPPPPLPLPPPPPPPPPPPPLPPAVPPPLPPSPEPEPPGVLAEDMIEDMDICDTPPHTSAVPEPTEPICDIGRWFYLDHFGIEQGPSKLAELKKLVQDGYLLSDHLIKHADSNRWVTVENAASPLVPSDFPSLYSDTSTQLVNPPEAPGNLLDEALEEASNLASGAEDKQMEETSAEDSEEFCIDDRVEALMDGSILVHGQELEIIGELLGADFQPADWQRWSRREDFTRLNVHTEVNNEINGGTENRATDAYGLVSVEKNFHHNAESSEWFSGRWSCKGGDWRRNDELSQDTPFRKKLVLNEGYPLCQMPKGSCEDPRRPCKDELYYPVRAKKYELPLWAFSLTEEDIDSVNDTTKSGVVPGRPGQTRQPSRGVKGMMLSVVRINSRVVKDQSSVEPHTKPRGTDRPLSRSSRSHSIGAERSSVHEGSSHFRKHHDHDSQSSHKSKPVPNIPKDRVCTVDELSVYRGDWYYLDGTGHEHGPFSYSELQELVKNGTIIEQSSVFRKIDNTWFPVLKDLKPGSSVPSAARSSSFTAALMLPDQYNFGVNQGSGSFNQLHPQFVGYTRGKLHELVMKYFKSRELTLAINEVLDPWISAKQPKKEFEAYFSHNSASRNLLPDGGSAKKAKLLPDQSDEDIHLSQDILASRKEDICFDELCDAEPSVDNDSLNPGAGNETWGLLNGHVLARIFHFMRADVKALISSAATCRSWNAAVKYYRNMCRFIDLSSVGPLCTDSVFCDIMAGYEKQNIRTLILAGCSNLSSHALGRVLEQLPQISYVDIHGCGHLGDLKNKFQHVKWIRSSLNPEESYRKIKTLKQIGDGNNYASKVARNFTNHLDGSDELDGYFADISNRENANLSFGQGFYKRSKLLDARKSSAVLSRDAEMRRLMQRQAETSYRKMEEFIINRLREIMRSNRFDFFIPKVSKIEGRLKNGYYARHGFRTIKHDIRTMCQDALRYKDGNDSGDIKQIVVSFIQLAKRLGNPRYISDRYGAGAQDSLDINQYSFDTKLKKKQNKIRGANSLAAGADNSSRAFDLEIKRSLSKLKKKDVYSGSETSDDDDGYSEVDETESETTVSDTESDLDVNSGAWDLKGNSLKLIEPGESVTDDRILGARMTKASLVPPVTRKYEVIEEYLIVADLEEVQRKMRVALPDDYSEKLLSQKNGTENLELPEVKDYQPRKVAGDEILEQEVYGIDPYTHNLLSDIMPADLELSPTDKHIFIEELLLNTLNKQVRHFTGSGNTPMTYNLRPVIEEIQRSAEDNGDRRTSKMCLGMLKTMRNRSEQNFVAYRKGLGVVCNKKGGFGVDDFVVEFFGEVYPSWRWYEKQDGIKHIQNNSEDQAPEFYNIMLERPKGDGDGYDLVFVDAMHKANYASRICHSCNPNCEAKVTAVNGKYQIGVYTLRPIAEGEEITFDYNSVTEKSMKHQSASVEVKYAVAAI

SEQ ID NO: 163672 - protein, 1403 aa, Zea Mays
MGDGGVACAVRSVESFRAGALVRRGGAGEAMPDKGERAHGHRHQHQHWKNQQSATAADLEEGELLNGEAGTNGLPERSMPPKKWRKVLAASAAAVEVEPGEIVSTKQAVPLKKERRNGDVEKVELLPERQRKEKSSGKSTRKSIKDDVEPGEIALPGKRRDAKSQLAHDNSRRPSSSAQKGSLRDSDEEPGEIKPESGISGSVRKNRPTEPHSSNHKHHTDTSDQSGSKHRRKGEGKSSSAARHLSGRIREVSPPTRDRRDKHERSPGILGRFPHDRFRHDRYDRSPSRLERSPHRTRHYDSRDRSPYISPRHRARPPQFRDNTPSRVDNSPRGRVQHEDIRDRSPFRHDRSPSERCRPTDTHEASKKSRSSNNSEKSHHKSKSAKQSSKIKSGSNGKNEEKISKEKHTESSQYTELPPPPPLPLPPPPPPPPPPPPLPPAVPPPLPPSPEPEPPGVLAEDMIEDMDICDTPPHTSAVPEPTEPICDIGRWFYLDHFGIEQGPSKLAELKKLVQDGYLLSDHLIKHADSNRWVTVENAASPLVPSDFPSLYSDTSTQLVNPPEAPGNLLDEALEEASNLASGAEDKQMEETSAEDSEEFCIDDRVEALMDGSILVHGQELEIIGELLGADFQPADWQRWSRREDFTRLNVHTEVNNEINGGTENRATDAYGLVSVEKNFHHNAESSEWFSGRWSCKGGDWRRNDELSQDTPFRKKLVLNEGYPLCQMPKGSCEDPRRPCKDELYYPVRAKKYELPLWAFSLTEEDIDSVNDTTKSGVVPGRPGQTRQPSRGVKGMMLSVVRINSRVVKDQSSVEPHTKPRGTDRPLSRSSRSHSIGAERSSVHEGSSHFRKHHDHDSQSSHKSKPVPNIPKDRVCTVDELSVYRGDWYYLDGTGHEHGPFSYSELQELVKNGTIIEQSSVFRKIDNTWFPVLKDLKPGSSVPSAARSSSFTAALMLPDQYNFGVNQGSGSFNQLHPQFVGYTRGKLHELVMKYFKSRELTLAINEVLDPWISAKQPKKEFEAYFSHNSASRNLLPEDGGSAKKAKLLPDQSDEDIHLSQDILASRKEDICFDELCDAEPSVDNDSLNPGAGNETWGLLNGHVLARIFHFMRADVKALISSAATCRSWNAAVKYYRNMCRFIDLSSVGPLCTDSVFCDIMAGYEKQNIRTLILAGCSNLSSHALGRVLEQLPQISYVDIHGCGHLGDLKNKFQHVKWIRSSLNPEESYRKIKTLKQIGDGNNYASKVARNFTNHLDGSDELDGYFADISNRENANLSFGQGFYKRSKLLDARKSSAVLSRDAEMRRLMQRQAETSYRKMEEFIINRLREIMRSNRFDFFIPKVSKIEGRLKNGYYARHGFRTIKHDIRTMCQDALRYKDGNDSGDIKQIVVSFIQLAKRLGNPR

SEQ ID NO: 163673 - protein, 1714 aa, Zea Mays
MGDGGVACAVRSVESFRAGALVRRGGAGEAMPDKGERAHGHRHQHQHWKNQQSATAADLEEGELLNGEAGTNGLPERSMPPKKWRKVLAASAAAVEVEPGEIVSTKQAVPLKKERRNGDVEKVELLPERQRKEKSSGKSTRKSIKDDVEPGEIALPGKRRDAKSQLAHDNSRRPSSSAQKGSLRDSDEEPGEIKPESGISGSVRKNRPTEPHSSNHKHHTDTSDQSGSKHRRKGEGKSSSAARHLSGRIREVSPPTRDRRDKHERSPGILGRFPHDRFRHDRYDRSPSRLERSPHRTRHYDSRDRSPYISPRHRARPPQFRDNTPSRVDNSPRGRVQHEDIRDRSPFRHDRSPSERCRPTDTHEASKKSRSSNNSEKSHHKSKSAKQSSKIKSGSNGKNEEKISKEKHTESSQYTELPPPPPLPLPPPPPPPPPPPPLPPAVPPPLPPSPEPEPPGVLAEDMIEDMDICDTPPHTSAVPEPTEPICDIGRWFYLDHFGIEQGPSKLAELKKLVQDGYLLSDHLIKHADSNRWVTVENAASPLVPSDFPSLYSDTSTQLVNPPEAPGNLLDEALEEASNLASGAEDKQMEETSAEDSEEFCIDDRVEALMDGSILVHGQELEIIGELLGADFQPADWQRWSRREDFTRLNVHTEVNNEINGGTENRATDAYGLVSVEKNFHHNAESSEWFSGRWSCKGGDWRRNDELSQDTPFRKKLVLNEGYPLCQMPKGSCEDPRRPCKDELYYPVRAKKYELPLWAFSLTEEDIDSVNDTTKSGVVPGRPGQTRQPSRGVKGMMLSVVRINSRVVKDQSSVEPHTKPRGTDRPLSRSSRSHSIGAERSSVHEGSSHFRKHHDHDSQSSHKSKPVPNIPKDRVCTVDELSVYRGDWYYLDGTGHEHGPFSYSELQELVKNGTIIEQSSVFRKIDNTWFPVLKDLKPGSSVPSAARSSSFTAALMLPDQYNFGVNQGSGSFNQLHPQFVGYTRGKLHELVMKYFKSRELTLAINEVLDPWISAKQPKKEFEAYFSHNSASRNLLPEDGGSAKKAKLLPDQSDEDIHLSQDILASRKEDICFDELCDAEPSVDNDSLNPGAGNETWGLLNGHVLARIFHFMRADVKALISSAATCRSWNAAVKYYRNMCRFIDLSSVGPLCTDSVFCDIMAGYEKQNIRTLILAGCSNLSSHALGRVLEQLPQISYVDIHGCGHLGDLKNKFQHVKWIRSSLNPEESYRKIKTLKQIGDGNNYASKVARNFTNHLDGSDELDGYFADISNRENANLSFGQGFYKRSKLLDARKSSAVLSRDAEMRRLMQRQAETSYRKMEEFIINRLREIMRSNRFDFFIPKVSKIEGRLKNGYYARHGFRTIKHDIRTMCQDALRYKDGNDSGDIKQIVVSFIQLAKRLGNPRYISDRYGAGAQDSLDINQYSFDTKLKKKQNKIRGANSLAAGADNSSRAFDLEIKRSLSKLKKKDVYSGSETSDDDDGYSEVDETESETTVSDTESDLDVNSGAWDLKGNSLKLIEPGESVTDDRILGARMTKASLVPPVTRKYEVIEEYLIVADLEEVQRKMRVALPDDYSEKLLSQKNGTENLELPEVKDYQPRKVAGDEILEQEVYGIDPYTHNLLSDIMPADLELSPTDKHIFIEELLLNTLNKQVRHFTGSGNTPMTYNLRPVIEEIQRSAEDNGDRRTSKMCLGMLKTMRNRSEQNFVAYRKVDLV

SEQ ID NO: 163674 - protein, 1804 aa, Zea Mays
MGDGGVACAVRSVESFRAGALVRRGGAGEAMPDKGERAHGHRHQHQHWKNQQSATAADLEEGELLNGEAGTNGLPERSMPPKKWRKVLAASAAAVEVEPGEIVSTKQAVPLKKERRNGDVEKVELLPERQRKEKSSGKSTRKSIKDDVEPGEIALPGKRRDAKSQLAHDNSRRPSSSAQKGSLRDSDEEPGEIKPESGISGSVRKNRPTEPHSSNHKHHTDTSDQSGSKHRRKGEGKSSSAARHLSGRIREVSPPTRDRRDKHERSPGILGRFPHDRFRHDRYDRSPSRLERSPHRTRHYDSRDRSPYISPRHRARPPQFRDNTPSRVDNSPRGRVQHEDIRDRSPFRHDRSPSERCRPTDTHEASKKSRSSNNSEKSHHKSKSAKQSSKIKSGSNGKNEEKISKEKHTESSQYTELPPPPPLPLPPPPPPPPPPPPLPPAVPPPLPPSPEPEPPGVLAEDMIEDMDICDTPPHTSAVPEPTEPICDIGRWFYLDHFGIEQGPSKLAELKKLVQDGYLLSDHLIKHADSNRWVTVENAASPLVPSDFPSLYSDTSTQLVNPPEAPGNLLDEALEEASNLASGAEDKQMEETSAEDSEEFCIDDRVEALMDGSILVHGQELEIIGELLGADFQPADWQRWSRREDFTRLNVHTEVNNEINGGTENRATDAYGLVSVEKNFHHNAESSEWFSGRWSCKGGDWRRNDELSQDTPFRKKLVLNEGYPLCQMPKGSCEDPRRPCKDELYYPVRAKKYELPLWAFSLTEEDIDSVNDTTKSGVVPGRPGQTRQPSRGVKGMMLSVVRINSRVVKDQSSVEPHTKPRGTDRPLSRSSRSHSIGAERSSVHEGSSHFRKHHDHDSQSSHKSKPVPNIPKDRVCTVDELSVYRGDWYYLDGTGHEHGPFSYSELQELVKNGTIIEQSSVFRKIDNTWFPVLKDLKPGSSVPSAARSSSFTAALMLPDQYNFGVNQGSGSFNQLHPQFVGYTRGKLHELVMKYFKSRELTLAINEVLDPWISAKQPKKEFEAYFSHNSASRNLLPEDGGSAKKAKLLPDQSDEDIHLSQDILASRKEDICFDELCDAEPSVDNDSLNPGAGNETWGLLNGHVLARIFHFMRADVKALISSAATCRSWNAAVKYYRNMCRFIDLSSVGPLCTDSVFCDIMAGYEKQNIRTLILAGCSNLSSHALGRVLEQLPQISYVDIHGCGHLGDLKNKFQHVKWIRSSLNPEESYRKIKTLKQIGDGNNYASKVARNFTNHLDGSDELDGYFADISNRENANLSFGQGFYKRSKLLDARKSSAVLSRDAEMRRLMQRQAETSYRKMEEFIINRLREIMRSNRFDFFIPKVSKIEGRLKNGYYARHGFRTIKHDIRTMCQDALRYKDGNDSGDIKQIVVSFIQLAKRLGNPRYISDRYGAGAQDSLDINQYSFDTKLKKKQNKIRGANSLAAGADNSSRAFDLEIKRSLSKLKKKDVYSGSETSDDDDGYSEVDETESETTVSDTESDLDVNSGAWDLKGNSLKLIEPGESVTDDRILGARMTKASLVPPVTRKYEVIEEYLIVADLEEVQRKMRVALPDDYSEKLLSQKNGTENLELPEVKDYQPRKVAGDEILEQEVYGIDPYTHNLLSDIMPADLELSPTDKHIFIEELLLNTLNKQVRHFTGSGNTPMTYNLRPVIEEIQRSAEDNGDRRTSKMCLGMLKTMRNRSEQNFVAYRKGLGVVCNKKGGFGVDDFVVEFFGEVYPSWRWYEKQDGIKHIQNNSEDQAPEFYNIMLERPKTEMDMTWFLLMRCTRPTTLVESATPATQTAKQK

SEQ ID NO: 163675 - protein, 2258 aa, Zea Mays
MGDGGVACAVRSVESFRAGALVRRGGAGEAMPDKGERAHGHRHQHQHWKNQQSATAADLEEGELLNGEAGTNGLPERSMPPKKWRKVLAASAAAVEVEPGEIVSTKQAVPLKKERRNGDVEKVELLPERQRKEKSSGKSTRKSIKDDVEPGEIALPGKRRDAKSQLAHDNSRRPSSSAQKGSLRDSDEEPGEIKPESGISGSVRKNRPTEPHSSNHKHHTDTSDQSGSKHRRKGEGKSSSAARHLSGRIREVSPPTRDRRDKHERSPGILGRFPHDRFRHDRYDRSPSRLERSPHRTRHYDSRDRSPYISPRHRARPPQFRDNTPSRVDNSPRGRVQHEDIRDRSPFRHDRSPSERCRPTDTHEASKKSRSSNNSEKSHHKSKSAKQSSKIKSGSNGKNEEKISKEKHTESSQYTELPPPPPLPLPPPPPPPPPPPPLPPAVPPPLPPSPEPEPPGVLAEDMIEDMDICDTPPHTSAVPEPTEPICDIGRWFYLDHFGIEQGPSKLAELKKLVQDGYLLSDHLIKHADSNRWVTVENAASPLVPSDFPSLYSDTSTQLVNPPEAPGNLLDEALEEASNLASGAEDKQMEETSAEDSEEFCIDDRVEALMDGSILVHGQELEIIGELLGADFQPADWQRWSRREDFTRLNVHTEVNNEINGGTENRATDAYGLVSVEKNFHHNAESSEWFSGRWSCKGGDWRRNDELSQDTPFRKKLVLNEGYPLCQMPKGSCEDPRRPCKDELYYPVRAKKYELPLWAFSLTEEDIDSVNDTTKSGVVPGRPGQTRQPSRGVKGMMLSVVRINSRVVKDQSSVEPHTKPRGTDRPLSRSSRSHSIGAERSSVHEGSSHFRKHHDHDSQSSHKSKPVPNIPKDRVCTVDELSVYRGDWYYLDGTGHEHGPFSYSELQELVKNGTIIEQSSVFRKIDNTWFPVLKDLKPGSSVPSAARSSSFTAALMLPDQYNFGVNQGSGSFNQLHPQFVGYTRGKLHELVMKYFKSRELTLAINEVLDPWISAKQPKKEFEAYFSHNSASRNLLPDGGSAKKAKLLPDQSDEDIHLSQDILASRKEDICFDELCDAEPSVDNDSLNPGAGNETWGLLNGHVLARIFHFMRADVKALISSAATCRSWNAAVKYYRNMCRFIDLSSVGPLCTDSVFCDIMAGYEKQNIRTLILAGCSNLSSHALGRVLEQLPQISYVDIHGCGHLGDLKNKFQHVKWIRSSLNPEESYRKIKTLKQIGDGNNYASKVARNFTNHLDGSDELDGYFADISNRENANLSFGQGFYKRSKLLDARKSSAVLSRDAEMRRLMQRQAETSYRKMEEFIINRLREIMRSNRFDFFIPKVSKIEGRLKNGYYARHGFRTIKHDIRTMCQDALRYKDGNDSGDIKQIVVSFIQLAKRLGNPRYISDRYGAGAQDSLDINQYSFDTKLKKKQNKIRGANSLAAGADNSSRAFDLEIKRSLSKLKKKDVYSGSETSDDDDGYSEVDETESETTVSDTESDLDVNSGAWDLKGNSLKLIEPGESVTDDRILGARMTKASLVPPVTRKYEVIEEYLIVADLEEVQRKMRVALPDDYSEKLLSQKNGTENLELPEVKDYQPRKVAGDEILEQEVYGIDPYTHNLLSDIMPADLELSPTDKHIFIEELLLNTLNKQVRHFTGSGNTPMTYNLRPVIEEIQRSAEDNGDRRTSKMCLGMLKTMRNRSEQNFVAYRKGLGVVCNKKGGFGVDDFVVEFFGEVYPSWRWYEKQDGIKHIQNNSEDQAPEFYNIMLERPKGDGDGYDLVFVDAMHKANYASRICHSCNPNCEAKVTAVNGKYQIGVYTLRPIAEGEEITFDYNSVTESKEEHEASVCLCGSQVCRGSYLNFSGEGAFEKVLMEFHGVLDRHSLLLQACETDSVSQQDLIDLGRAGLGTCLLAGLPGWLVAYTAHLVRFIYLERQKLPDEILRHNVDEKRQFLIEINMDSEKNDAEVQAEGVLNSRLQQIVHTLDKVRYVMRCIFGDPKNAPPPLVRLSGKSLVSAIWKGDSSIVAELIQSMEPHVEEEVLSDLKAKIRAHDPSESEDIEGGIRNSLLWLRDELRTLSCTYKCRHDAAADLIHLYAYTKCFFRVRDYKTVKSPPVHISPLDLGPKYADKLGPGFQEYCKTYPENYCLAQLIYWYSQNSEPESRLTRARKGCMSLPDVSSFYVKSAKPSQERAYGNRTVRFMLSRMEKQAQRPWPKDRIWVFKSDPRFFGSPMMDTVLNNSPLDKEMVHWLKTRPNVFLG

SEQ ID NO: 163676 - protein, 1826 aa, Zea Mays
MGDGGVACAVRSVESFRAGALVRRGGAGEAMPDKGERAHGHRHQHQHWKNQQSATAADLEEGELLNGEAGTNGLPERSMPPKKWRKVLAASAAAVEVEPGEIVSTKQAVPLKKERRNGDVEKVELLPERQRKEKSSGKSTRKSIKDDVEPGEIALPGKRRDAKSQLAHDNSRRPSSSAQKGSLRDSDEEPGEIKPESGISGSVRKNRPTEPHSSNHKHHTDTSDQSGSKHRRKGEGKSSSAARHLSGRIREVSPPTRDRRDKHERSPGILGRFPHDRFRHDRYDRSPSRLERSPHRTRHYDSRDRSPYISPRHRARPPQFRDNTPSRVDNSPRGRVQHEDIRDRSPFRHDRSPSERCRPTDTHEASKKSRSSNNSEKSHHKSKSAKQSSKIKSGSNGKNEEKISKEKHTESSQYTELPPPPPLPLPPPPPPPPPPPPLPPAVPPPLPPSPEPEPPGVLAEDMIEDMDICDTPPHTSAVPEPTEPICDIGRWFYLDHFGIEQGPSKLAELKKLVQDGYLLSDHLIKHADSNRWVTVENAASPLVPSDFPSLYSDTSTQLVNPPEAPGNLLDEALEEASNLASGAEDKQMEETSAEDSEEFCIDDRVEALMDGSILVHGQELEIIGELLGADFQPADWQRWSRREDFTRLNVHTEVNNEINGGTENRATDAYGLVSVEKNFHHNAESSEWFSGRWSCKGGDWRRNDELSQDTPFRKKLVLNEGYPLCQMPKGSCEDPRRPCKDELYYPVRAKKYELPLWAFSLTEEDIDSVNDTTKSGVVPGRPGQTRQPSRGVKGMMLSVVRINSRVVKDQSSVEPHTKPRGTDRPLSRSSRSHSIGAERSSVHEGSSHFRKHHDHDSQSSHKSKPVPNIPKDRVCTVDELSVYRGDWYYLDGTGHEHGPFSYSELQELVKNGTIIEQSSVFRKIDNTWFPVLKDLKPGSSVPSAARSSSFTAALMLPDQYNFGVNQGSGSFNQLHPQFVGYTRGKLHELVMKYFKSRELTLAINEVLDPWISAKQPKKEFEAYFSHNSASRNLLPEDGGSAKKAKLLPDQSDEDIHLSQDILASRKEDICFDELCDAEPSVDNDSLNPGAGNETWGLLNGHVLARIFHFMRADVKALISSAATCRSWNAAVKYYRNMCRFIDLSSVGPLCTDSVFCDIMAGYEKQNIRTLILAGCSNLSSHALGRVLEQLPQISYVDIHGCGHLGDLKNKFQHVKWIRSSLNPEESYRKIKTLKQIGDGNNYASKVARNFTNHLDGSDELDGYFADISNRENANLSFGQGFYKRSKLLDARKSSAVLSRDAEMRRLMQRQAETSYRKMEEFIINRLREIMRSNRFDFFIPKVSKIEGRLKNGYYARHGFRTIKHDIRTMCQDALRYKDGNDSGDIKQIVVSFIQLAKRLGNPRYISDRYGAGAQDSLDINQYSFDTKLKKKQNKIRGANSLAAGADNSSRAFDLEIKRSLSKLKKKDVYSGSETSDDDDGYSEVDETESETTVSDTESDLDVNSGAWDLKGNSLKLIEPGESVTDDRILGARMTKASLVPPVTRKYEVIEEYLIVADLEEVQRKMRVALPDDYSEKLLSQKNGTENLELPEVKDYQPRKVAGDEILEQEVYGIDPYTHNLLSDIMPADLELSPTDKHIFIEELLLNTLNKQVRHFTGSGNTPMTYNLRPVIEEIQRSAEDNGDRRTSKMCLGMLKTMRNRSEQNFVAYRKGLGVVCNKKGGFGVDDFVVEFFGEVYPSWRWYEKQDGIKHIQNNSEDQAPEFYNIMLERPKGDGDGYDLVFVDAMHKANYASRICHSCNPNCEAKLEFTHFDQLQKARKSLLITIL

SEQ ID NO: 163677 - protein, 557 aa, Zea Mays
MDDMNPSEQNTSSAQAATDITRKPDQEASYHELTRMIISHGYPLSIVEHEEMRRFAKILNPTFNMASSIDIEEYSTLLFQKEKSELKERIALLSHRVSLSASVWVPHGAEASVKYLCLAVHFVDSNWKLQRKTIKFGVFWSSSTSLERMIQFKEACVLDSDIGPFNVIQEAIRDWNLDQKHFSLTSGSEIRNDEGTSKLMDLLIQRKCLPIRGKLYNIACVNDVLNGIVSKGQPVLYHVGNILEKFIQAQMSSSLTRQQLLEVVAHMGLKCPQEEAKWWHIIYFRLEVLLHFKKAFPSEDLLSAEDNKTFESVCRILRAFYRAVEVICGPVCPTANMYFNELWKVRTVLQEEASTDRAALANMVLEMLEAFNEYWKNSYVWLSIPVVLDPRFKITFIEFRLKRAFGTNAEKHVSAIRDTIRELFHEYCGLSDNLGADTSTREAHDVELYGFDSDSLEDWDEHLNAQTRNQQLTELDNYLEDGLVPRKDDFDILNWWMSNCTKYPTLSVMARDVLAIPASADNFEAALSGEANVIHKQWSTLSIKTIEALVCTRDWGK

SEQ ID NO: 163678 - protein, 506 aa, Zea Mays
MAGAAASPVAAHVVERFRSRLREEAGSGEPGASAVVRLYAEALRELTFNCKPVITELTIVAGQHAALAAGGIAGAVCARVAEVPPDQILPSLYLLDSIVKNIGGEYVEHFAIRLQSVFVDAYYRVHPNQYASMRRLFRTWWPVFPSSVLHSIEDDLQFSPSENNRPTTSTNVHQTESLSPRPSHGIHVNPKYLEAQHKFKRVNVAHQSAAQDTRQMSDVQEDLINGLTSNSSQGRPSVFQKSSLQYADDPGQQEMFRPLAGAIRATSPHLLRTHASDVNLDGPLANSRRNLSRSPPLDVFPRNVSPKRPLERLPPSHSVLGPDPRKLPDRNGRLRWALDDGAQWPTISMLDEEYRKQSARELIDAYGNCQGRDADERLPKVQRLDSNGMTSKSGARNWLTSEEEYSWEDMSPTLTDRVRSSMPSFPPGTMRIGFPGANAGLLESDVGRHNFLSQATRSSVDVSPFNIEDRISAASVCMLTFPQGDIQAILVFRMELFWSTRILNIL

SEQ ID NO: 163679 - protein, 526 aa, Zea Mays
MKSTGSKVQGNLLMHMEIVKDEMLMNDFLKYSAWIQMHVDISTRRYPSNFGVQNGALLEYQNSEHTLNHGRIATMPAPPWQQPIGLPLRIQGPEHPSVLGRIPQPVDGEMPVKRLDISGTYNGLNVDKPLVKHRSSPAPAPTEWLPLHHAQSQTLPLIPPDTKHVRSASDSLEISSFVSHGGSSSVFVPRHQYDAVDRKTGTSNLAQPPSPYQNQDLLPSSQQNQGTILGNQAHPHRPLKLHPHAHPHHQETFRSFAPGMSVSPFQGQGGNATMTPVSVLPTSFSVPPAVPPYGVLSAPGFPMPPLPPGPPAPVSLQMGSSSSQVGGPQPFVSGLLSNLMRHGVISLEPPSQSQDSVGVDFNVDLKVRNESVTNALYQDLPRQCKTCGLRFKCQEEHRAHMDWHVTKNRNSKNRKKSSRKYFVTAVEWLRAAETVGNDGVPAFVLSDPVPDRQEEKEIAVPADEEQTSCALCQEPFEDFYSDETDEWMYRGAVYMNAPDGNIDGLEWSQLGPIVHAKCRSGPGNTS

SEQ ID NO: 163680 - protein, 959 aa, Zea Mays
MAGAAASPVAAHVVERFRSRLREEAGSGEPGASAVVRLYAEALRELTFNCKPVITELTIVAGQHAALAAGGIAGAVCARVAEVPPDQILPSLYLLDSIVKNIGGEYVEHFAIRLQSVFVDAYYRVHPNQYASMRRLFRTWWPVFPSSVLHSIEDDLQFSPSENNRPTTSTNVHQTESLSPRPSHGIHVNPKYLEAQHKFKRVNVAHQSAAQDTRQMSDVQEDLINGLTSNSSQGRPSVFQYADDPGQQEMFRPLAGAIRATSPHLLRTHASDVNLDGPLANSRRNLSRSPPLDVFPRNVSPKRPLERLPPSHSVLGPDPRKLPDRNGRLRWALDDGAQWPTISMLDEEYRKQSARELIDAYGNCQGRDADERLPKVQRLDSNGMTSKSGARNWLTSEEEYSWEDMSPTLTDRVRSSMPSFPPGTMRIGFPGANAGLLESDVGRHNFLSQATRSSVDVSPFNIEDRISAASHVDISTRRYPSNFGVQNGALLEYQNSEHTLNHGRIATMPAPPWQQPIGLPLRIQGPEHPSVLGRIPQPVDGEMPVKRLDISGTYNGLNVDKPLVKHRSSPAPAPTEWLPLHHAQSQTLPLIPPDTKHVRSASDSLEISSFVSHGGSSSVFVPRHQYDAVDRKTGTSNLAQPPSPYQNQDLLPSSQQNQGTILGNQAHPHRPLKLHPHAHPHHQETFRSFAPGMSVSPFQGQGGNATMTPVSVLPTSFSVPPAVPPYGVLSAPGFPMPPLPPGPPAPVSLQMGSSSSQVGGPQPFVSGLLSNLMRHGVISLEPPSQSQDSVGVDFNVDLKVRNESVTNALYQDLPRQCKTCGLRFKCQEEHRAHMDWHVTKNRNSKNRKKSSRKYFVTAVEWLRAAETVGNDGVPAFVLSDPVPDRQEEKEIAVPADEEQTSCALCQEPFEDFYSDETDEWMYRGAVYMNAPDGNIDGLEWSQLGPIVHAKCRSGPGNTS

SEQ ID NO: 163681 - protein, 135 aa, Zea Mays
MQGWWLHPIRPHHRVLEPASLASRHTLQPSLSSPMLRVCFTGVRGEIGERSAAIKALIHRRCGVRFGPEIFVRFQGPIPWRREGACDDRDAGIARRCQEPSRSRQTPSSALSTDLSPVKDRYPRMRNMKDGVMCS

SEQ ID NO: 163682 - protein, 269 aa, Zea Mays
MEQQMVPLCVKSVKRKRKRVDHSNIILALPAIYPFPQKKTVASAAGKKRAATKKNTTGRNKTRNKAARAPKQGLRKGKRKNAKAAHAPNDDALTEGRIGSVDISNGASNEHPVQEDQKDLIRQQHNFSNTGDDIIVDDRSGDANEPKIVSNEQYISDEEAGTVQLPNPAKQDILEADSAVEQPYVINNEQQIMEEQPGVENQQNVAVNQQHKPDEQAGIMQEQNIGNALEENVPEDPTGERWRMKTQTLEGIYATSTKGRAFKPPSNMH

SEQ ID NO: 163683 - protein, 251 aa, Zea Mays
MEQQMVPLCVKSVKRKRKRVDHSNIILALPAIYPFPQKKTVASAAGKKRAATKKNTTGRNKTRNKAARAPKQGLRKGKRKNAKAAHAPNDDALTEGRIGSVDISNGASNEHPVQEDQKDLIRQQHNFSNTGDDIIVDDRSGDANEPKIVSNEQYISDEEAGTVQLPNPAKQDILEADSAVEQPYVINNEQQIMEEQPGVENQQNVAVNQQHKPDEQAGIMQEQNIGNALEENVPEDPTGTQNYQSFIRRMF

SEQ ID NO: 163684 - protein, 267 aa, Zea Mays
MEQQMVPLCVKSVKRKRKRVDHSNIILALPAIYPFPQKKTVASAAGKKRAATKKNTTVYIFSLVSGRNKTRNKAARAPKQGLRKGKRKNAKAAHAPNDDALTEGRIGSVDISNGASNEHPVQEDQKDLIRQQHNFSNTGDDIIVDDRSGDANEPKIVSNEQYISDEEAGTVQLPNPAKQDILEADSAVEQPYVINNEQQIMEEQPGVENQQNVAVNQQHKPDEQAGIMQEQNIGNALEENVPEDPTGTMKVYAKASNFDVEKLHMRS

SEQ ID NO: 163685 - protein, 311 aa, Zea Mays
MEQQMVPLCVKSVKRKRKRVDHSNIILALPAIYPFPQKKTVASAAGKKRAATKKNTTGRNKTRNKAARAPKQGLRKGKRKNAKAAHAPNDDALTEGRIGSVDISNGASNEHPVQEDQKDLIRQQHNFSNTGDDIIVDDRSGDANEPKIVSNEQYISDEEAGTVQLPNPAKQDILEADSAVEQPYVINNEQQIMEEQPGVENQQNVAVNQQHKPDEQAGIMQEQNIGNALEENVPEDPTVFADIFNFPLNNELMDLSNIEDNLEDSTGVQDEQTIMNNQQLIPDQQAGLVHQQNPENAIEKVVAEDDPAAFL

SEQ ID NO: 163686 - protein, 1357 aa, Zea Mays
MEMVLRSQSPLCLRSGPVLIFRPTVAGGGGGTQSLLRTTRFARRRVIRCVVASPGCPNRKSRTASPNVKVAAYSNYAPRLLVESSSKKSEHHDSSRHREETIDTYNGLSGSDAAELTSNRDVEIEVDLQHISEEELPGKVSINASLGEMETVDEAEVEEDKFEVDTSGIVLRNVAVREVDPKDEHNAKDVFVVDSSGTAPDNAAVEEVVDEAEVEEDMVDVDILGLDLNNATIEEIDLMEEALLENFDVDSPGNASSGRTYGGVDELGELPSTSVDCIAINGKRRSLKPKPLPIVRFQEQEQIVLSIVDEEGLIASSCEEGQPVVDYDKQEENSTAFDEQKQLTDDFPEEGISIVHFPEPNNDIVGSSKFLEQKQELDGSYKQDRSTTGLHEQDQSVVSSHGQDKSIVGVPQQIQYNDQSIAGSHRQDQSIAGAPEQIQSVAGYIKPNQSIVGSCKQHELIIPEPKKIESIISYNEIDQSIVGSHKQDKSVVSVPEQIQSIVSHSKPNQSTVDSYRQAESIIGVPEKVQSITSYDKLDQSIVGSLKQDEPIISVPEKIQSIVHYTKPNQSIVGLPKQQQSIVHIVEPKQSIDGFPKQDLSIVGISNEFQTKQLATVGTHDGLLMKGVEAKETSQKTEGDTLQATFNVDNLSQKQEGLTKEADEITIIEKINDEDLVMIEEQKSIAMNEEQTIVTEEDIPMAKVEIGIDKAKFLHLLSEEESSWDENEVGIIEADEQYEVDETSMSTEQDIQESPNDDLDPQALWSMLQELAEKNYSLGNKLFTYPDVLKADSTIDLYFNRDLSAVANEPDVLIKGAFNGWKWRFFTEKLHKSELAGDWWCCKLYIPKQAYRMDFVFFNGHTVYENNNNNDFVIQIESTMDENLFEDFLAEEKQRELENLANEEAERRRQTDEQRRMEEERAADKADRVQAKVEVETKKNKLCNVLGLARAPVDNLWYIEPITTGQEATVRLYYNINSRPLVHSTEIWMHGGYNNWIDGLSFAERLVHHHDKDCDWWFVDVVVPERTYVLDWVFADGPPGSARNYDNNGGHDFHATLPNNMTEEEYWMEEEQRIYTRLQQERREREEAIKRKAERNAKMKAEMKEKTMRMFLVSQKHIVYTEPLEIHAGTTIDVLYNPSNTVLTGKPEVWFRCSFNRWMYPGGVLPPQKMVQAENGSHLKVTVYVPRDAYMMDFVFSESEEGGIYDNRNGLDYHIPVFGSIAKEPPMHIVHIAVEMAPIAKVGGLGDVVTSLSRAVQDLGHNVEVILPKYGCLNLSNVKNLHIHQSFSWGGSEIKVWRGLVEGLCVYFLEPQNGMFGVGYVYGRDDDRRFGFFCRSALEFLLQSGSSPRSCTVSFSLK

SEQ ID NO: 163687 - protein, 1329 aa, Zea Mays
MEMVLRSQSPLCLRSGPVLIFRPTVAGGGGGTQSLLRTTRFARRRVIRCVVASPGCPNRKSRTASPNVKVAAYSNYAPRLLVESSSKKSEHHDSSRHREETIDTYNGLSGSDAAELTSNRDVEIEVDLQHISEEELPGKVSINASLGEMETVDEAEVEEDKFEVDTSGIVLRNVAVREVDPKDEHNAKDVFVVDSSGTAPDNAAVEEVVDEAEVEEDMVDVDILGLDLNNATIEEIDLMEEALLENFDVDSPGNASSGRTYGGVDELGELPSTSVDCIAINGKRRSLKPKPLPIVRFQEQEQIVLSIVDEEGLIASSCEEGQPVVDYDKQEENSTAFDEQKQLTDDFPEEGISIVHFPEPNNDIVGSSKFLEQKQELDGSYKQDRSTTGLHEQDQSVVSSHGQDKSIVGVPQQIQYNDQSIAGSHRQDQSIAGAPEQIQSVAGYIKPNQSIVGSCKQHELIIPEPKKIESIISYNEIDQSIVGSHKQDKSVVSVPEQIQSIVSHSKPNQSTVDSYRQAESIIGVPEKVQSITSYDKLDQSIVGSLKQDEPIISVPEKIQSIVHYTKPNQSIVGLPKQQQSIVHIVEPKQSIDGFPKQDLSIVGISNEFQTKQLATVGTHDGLLMKGVEAKETSQKTEGDTLQATFNVDNLSQKQEGLTKEADEITIIEKINDEDLVMIEEQKSIAMNEEQTIVTEEDIPMAKVEIGIDKAKFLHLLSEEESSWDENEVGIIEADEQYEVDETSMSTEQDIQESPNDDLDPQALWSMLQELAEKNYSLGNKLFTYPDVLKADSTIDLYFNRDLSAVANEPDVLIKGAFNGWKWRFFTEKLHKSELAGDWWCCKLYIPKQAYRMDFVFFNGHTVYENNNNNDFVIQIESTMDENLFEDFLAEEKQRELENLANEEAERRRQTDEQRRMEEERAADKADRVQAKVEVETKKNKLCNVLGLARAPVDNLWYIEPITTGQEATVRLYYNINSRPLVHSTEIWMHGGYNNWIDGLSFAERLVHHHDKDCDWWFVDVVVPERTYVLDWVFADGPPGSARNYDNNGGHDFHATLPNNMTEEEYWMEEEQRIYTRLQQERREREEAIKRKAERNAKMKAEMKEKTMRMFLVSQKHIVYTEPLEIHAGTTIDVLYNPSNTVLTGKPEVWFRCSFNRWMYPGGVLPPQKMVQAENGSHLKVTVYVPRDAYMMDFVFSESEEGGIYDNRNGLDYHIPVFGSIAKEPPMHIVHIAVEMAPIAKVGGLGDVVTSLSRAVQDLGHNVEVILPKYGCLNLSNVKNLHIHQSFSWGGSEIKVWRGLVEGLCVYFLEPQNGPNITMSLRAADEERKK

SEQ ID NO: 163688 - protein, 1149 aa, Zea Mays
MEMVLRSQSPLCLRSGPVLIFRPTVAGGGGGTQSLLRTTRFARRRVIRCVVASPGCPNRKSRTASPNVKVAAYSNYAPRLLVESSSKKSEHHDSSRHREETIDTYNGLSGSDAAELTSNRDVEIEVDLQHISEEELPGKVSINASLGEMETVDEAEVEEDKFEVDTSGIVLRNVAVREVDPKDEHNAKDVFVVDSSGTAPDNAAVEEVVDEAEVEEDMVDVDILGLDLNNATIEEIDLMEEALLENFDVDSPGNASSGRTYGGVDELGELPSTSVDCIAINGKRRSLKPKPLPIVRFQEQEQIVLSIVDEEGLIASSCEEGQPVVDYDKQEENSTAFDEQKQLTDDFPEEGISIVHFPEPNNDIVGSSKFLEQKQELDGSYKQDRSTTGLHEQDQSVVSSHGQDKSIVGVPQQIQYNDQSIAGSHRQDQSIAGAPEQIQSVAGYIKPNQSIVGSCKQHELIIPEPKKIESIISYNEIDQSIVGSHKQDKSVVSVPEQIQSIVSHSKPNQSTVDSYRQAESIIGVPEKVQSITSYDKLDQSIVGSLKQDEPIISVPEKIQSIVHYTKPNQSIVGLPKQQQSIVHIVEPKQSIDGFPKQDLSIVGISNEFQTKQLATVGTHDGLLMKGVEAKETSQKTEGDTLQATFNVDNLSQKQEGLTKEADEITIIEKINDEDLVMIEEQKSIAMNEEQTIVTEEDIPMAKVEIGIDKAKFLHLLSEEESSWDENEVGIIEADEQYEVDETSMSTEQDIQESPNDDLDPQALWSMLQELAEKNYSLGNKLFTYPDVLKADSTIDLYFNRDLSAVANEPDVLIKGAFNGWKWRFFTEKLHKSELAGDWWCCKLYIPKQAYRMDFVFFNGHTVYENNNNNDFVIQIESTMDENLFEDFLAEEKQRELENLANEEAERRRQTDEQRRMEEERAADKADRVQAKVEVETKKNKLCNVLGLARAPVDNLWYIEPITTGQEATVRLYYNINSRPLVHSTEIWMHGGYNNWIDGLSFAERLVHHHDKDCDWWFVDVVVPERTYVLDWVFADGPPGSARNYDNNGGHDFHATLPNNMTEEEYWMEEEQRIYTRLQQERREREEAIKRKAERNAKMKAEMKEKTMRMFLVSQKHIVYTEPLEIHAGTTIDVGCCHLRRWYKQKMVHT

SEQ ID NO: 163689 - protein, 75 aa, Zea Mays
MGRNPPPLSRRCHPAPANLTCPVKLRLVATTAHQWKPTSPRVGIYLPHHHADLTFHRSYLGTVTYYRYMTLYIFV

SEQ ID NO: 163690 - protein, 78 aa, Zea Mays
MARSSFKLEHPFERRQAEANRIREKYPDRIPVIVEKAERSDIPDIDKKKSAISRVPCSCRPHSRTVCVCGTEADQAQR

SEQ ID NO: 163691 - protein, 79 aa, Zea Mays
MDVFTDDRYELTSYSGNLLLVEANQWSHATPCLETSKGKLAGHKPFVRARATDGHCKALCVCVCNWSYHRESVQPKGQL

SEQ ID NO: 163692 - protein, 151 aa, Zea Mays
MQQIISACKLPHTQRAAAFLPPRPSLRRLPVPGGAPPPRRLVVRRRCQEENKQQQEAEEGSGADEQEQQKRTFLSLEEAGLVEMSGLSTHERFLCRLTISSLNLLRVISEQEGVPIEELNAGRVCDWFLKDKLKREQNVGTAVLQWDDPGF

SEQ ID NO: 163693 - protein, 152 aa, Zea Mays
MQQIISACKLPHTQRAAAFLPPRPSLRRLPVPAGGAPPPRRLVVRRRCQEENKQQQEAEEGSGADEQEQQKRTFLSLEEAGLVEMSGLSTHERFLCRLTISSLNLLRVISEQEGVPIEELNAGRVCDWFLKDKLKREQNVGTAVLQWDDPGF

SEQ ID NO: 163694 - protein, 255 aa, Zea Mays
MNFPYIHALWNSDLIDRSSLKDTLNHFSHPSLLVDTPCSHPRTLHTLNRTSDKCFRSWNYENIDNNVRFSNDSSIIFEGTKIFDYINNEIQPLNYFNDKCGSTDQLGSEEDLITWKSKFDMRLSVNISPETAGDNGCHLNVPSLNMANGNLFTQDLLNQHNSGLNQRPKTSKCSRFRSHSAPPFYGGRLKFSRLNVPLSKPSTYSDKDICVNNPEDNAPGHVDISCISSTQPIPETGSSEFLELNFRRQNRTERK

SEQ ID NO: 163695 - protein, 239 aa, Zea Mays
MNLRLLVPNKVIGCLIGRGGSIVNDMRKKTKANILISKGDKPRRASSSDELVEVSGEADKLRDALVQIILRLREAVLKESVESQNSDRDGQLTVAASDSLYGSSLPLPALLPHNQQIAPLGYDRRGEPERALEVFPRTSSYGYSSMQVTDDGYGGLPSYASKAYEEHVPRLEMTVPASGISKVMGKHGTNLDNIRKISGAHIEIIEPKSSRHEHIAYISGTSEQRHSAENLIKAFIMST

SEQ ID NO: 163696 - protein, 309 aa, Zea Mays
MRQQTGKRPSQHREYEREERKDQHKRPFPRAQESSNNDGLVLYRILCPDSLIGSVIGKHGNVINAIRHQTSAKVKVVDPYPGADKRVILVYCYVKHRDLDAEGDDNEPVCAAQDALLRVHNAIVDALQTLHKNHKDSDKKSTEEANILVPASQASNVIGKSGAVIKHLRSTSRAFIKVSPKDPSDPTHSCAMSFDNFVQITGGAEAVKKALFGVSTIIYKHPSKENIPLETSIPDPTPSIIIPSELPVYPASNFYSAPDAAIPSVHPSMSVLGSTRHVPELAVPADDHGELEFRVLCPGGKIGLVIGRG

SEQ ID NO: 163697 - protein, 610 aa, Zea Mays
MRQQTGKRPSQHREYEREERKDQHKRPFPRAQESSNNDGLVLYRILCPDSLIGSVIGKHGNVINAIRHQTSAKVKVVDPYPGADKRVILVYCYVKHRDLDAEGDDNEPVCAAQDALLRVHNAIVDALQTLHKNHKDSDKKSTEEANILVPASQASNVIGKSGAVIKHLRSTSRAFIKITGGAEAVKKALFGVSTIIYKHPSKENIPLETSIPDPTPSIIIPSELPVYPASNFYSAPDAAIPSVHPSMSVLGSTRHVPELAVPADDHGRLPIYQSILPVIPTYSAPKCSGELEFRVLCPGGKIGLVIGRGGATIKNIRQESGARIDVDDAKNDKEESIITIISTESTDDVKSAAVEAVLLLQAKINDSEDDRMNLRLLVPNKVIGCLIGRGGSIVNDMRKKTKANILISKGDKPRRASSSDELVEVSGEADKLRDALVQIILRLREAVLKESVESQNSDRDGQLTVAASDSLYGSSLPLPALLPHNQQIAPLGYDRRGEPERALEVFPRTSSYGYSSMQVTDDGYGGLPSYASKAYEEHVPRLEMTVPASGISKVMGKHGTNLDNIRKISGAHIEIIEPKSSRHEHIAYISGTSEQRHSAENLIKAFIMST

SEQ ID NO: 163698 - protein, 87 aa, Zea Mays
MTVVFLGSYLIRLLVLVIGGPMSGMWTPGAWKDCSLRVKEKNIMHLLSLSVSTTTNGAVQTPSWLSCLWQWHLHHLWGFTGLFCGCN

SEQ ID NO: 163699 - protein, 383 aa, Zea Mays
MYYKCAQDNCNTNKLVVCSADGHQVLETVLSGCHNHPRQQDCDLPIPKVSKTDTSMPVSREGDDEQLSSSSDSDEDDVDQARVEGDGSVTRHVPHPAERITAQTGTANSHRHAGRRRPKSKVWEEFSAVLRDDKIQWAECKHCKMSLGGTSTGRTTHLRRHLKICPALPATDRMQKQRSSPHPGSTIESIWKFDQDRSLELLIKVLVSNLFSSPLTSSTTFRQLWAGICPTNDVLSDAAIEEKFLSIFENEKLKLKEEIALAPGGVFLTAASSSLETKNFIFLTVHFIDKEWNLNRKIIRCCFTGCEDFDAEYFVSMFPNLQSCHNFINGNVRAAEEEIVKEAVQNWRLEWKLLGISSRKSLADAAVLALEKNLTEQNYLLAK

SEQ ID NO: 163700 - protein, 752 aa, Zea Mays
MYYKCAQDNCNTNKLVVCSADGHQVLETVLSGCHNHPRQQDCDLPIPKVSKTDTSMPVSREGDDEQLSSSSDSDEDDVDQARVEGDGSVTRHVPHPAERITAQTGTANSHRHAGRRRPKSKVWEEFSAVLRDDKIQWAECKHCKMSLGGTSTGRTTHLRRHLKICPALPATDRMQKQRSSPHPGSTIESIWKFDQDRSLELLIKVLVSNLFSSPLTSSTTFRQLWAGICPTNDVLSDAAIEEKFLSIFENEKLKLKEEIALAPGGVFLTAASSSLETKNFIFLTVHFIDKEWNLNRKIIRCCFTGCEDFDAEYFVSMFPNLQSCHNFINGNVRAAEEEIVKEAVQNWRLEWKLLGISSRKSLADAAVLALEKNLTEQNYLLAKCKLLNLPCIIDALNDLFGYEINEYVLSTSKMWFQYMTCTPLRRDKYKEILSRLQINRPSFGSQRWYLTFHSLEAALQFNNELPDPQQIDSRYYPAKPSFAQLKAAENFCDLVRAIYHAVKVVSRTCNGALNSQFHAIWNLKMALLRSSTKENIDQVFNIEQMKLKFDQLWRKWYLWLSLAVVLDPRYKFRFLLVCFKEAFGSHAKRYIFEVRGKLYELFLQYSCHVDQQNSDSFDQRTNDLQLDTHGSTPVHATSQNFIEQAAHEELGEVIRYLEAELIPQNANFDILKWWKENALTYPALARLACDILAIPGSAVSAESAFDETDERVGLFNLKLSPELVEALVCTQDWIKSSEIISDEVGGNINMPA

SEQ ID NO: 163701 - protein, 462 aa, Zea Mays
MENKSDDLQHEHGMPDQTSRPFTSLLLSATSVAQAAQQDTGSDIKSLSLLHGSSLLPPDDGYIWKARAQNIVPGCEYPTMYYKCAQDNCNTNKLVVCSADGHQVLETVLSGCHNHPRQQDCDLPIPKVSKTDTSMPVSREGDDEQLSSSSDSDEDDVDQARVEGDGSVTRHVPHPAERITAQTGTANSHRHAGRRRPKSKVWEEFSAVLRDDKIQWAECKHCKMSLGGTSTGRTTHLRRHLKICPALPATDRMQKQRSSPHPGSTIESIWKFDQDRSLELLIKVLVSNLFSSPLTSSTTFRQLWAGICPTNDVLSDAAIEEKFLSIFENEKLKLKEEIALAPGGVFLTAASSSLETKNFIFLTVHFIDKEWNLNRKIIRCCFTGCEDFDAEYFVSMFPNLQSCHNFINGNVRAAEEEIVKEAVQNWRLEWKLLGISSRKSLADAAVLALEKNLTEQNYLLAK

SEQ ID NO: 163702 - protein, 89 aa, Zea Mays
MKWRILLDLPNYPMSKQSKIIHACMALHNFFRDSKLADEEFDRCDRDENYMTIHPTQQDSTSQLGDDEGEVDMNNIQDQIANALFARRM

SEQ ID NO: 163703 - protein, 210 aa, Zea Mays
MALCFLQSSFQRCSPSPIPLCSQSSLCLLPMALVPTCSASSSGSPAILRVPSRVRTDLCSFISRACFSVPTHKAPCVPRLDPFIPQALCHSLSPSRLAGSLLDHGSHGSQLLCPAAVMFPARVELSRRILFLACRDARRPLCSPASATRWCSNSSAVVVLSASARDRGSVRRVRQRSVADSIVVAVVCFAACSPSVIGCTSTLVLVAGLR

SEQ ID NO: 163704 - protein, 136 aa, Zea Mays
MASILGVVLRPSKMATPFPTRISKDKPGELEKAIDVSVAPDCTKAGPSEIRSTEQINESLSEKISLSIPKAVSTRDLEFIIRHASKKQLTHKQIVEAQHYAKDLNYPQYWLLKRTSIKFVIYTSLRERLWISRRRL

SEQ ID NO: 163705 - protein, 896 aa, Zea Mays
MNLLTGRRQSDARRKRTQRTPLLRTNEGASEMDMAGRSRCRCSSHGRLLWLLLACSWVAAARGQQTARTDPAEAAALSTILGRWGLKASPGWNISGELCSGVAVDDTDVDNSPTINPSIKCDCSYDDNTVCHITKLRVYGLNVVGQIPAELENLTYLSNLNLMQNYLTGPVPSFIGKFPMQYLSLAINPLSGTLPKELGNLTDLISLGISLNNFTGELPPELGNLSKLEQIYFDSSGFSGPFPSTFSKLKNLKILWASDNDFTGKIPDFIGNLTQLEVLRFQGNSFEGPIPKSLSNLTKLTTLRIGDVVNGSSSLSFISNLTSLDVLILRNCRISDTLATVNFSNLAGLTLLDLSFNNLTGQIPQSILNLDNLGFLFLGNNSLSGSLPDIKSPSLNNLDFSYNQLSGSFPSWATQNNLQLNLVANNFILGSSNNSILPSGLNCLQQDIPCFRGSPEYSSIAVDCGSNKSFRGLDNTFYEMDPTNIGAASYYVTGQTRWGVSNVGKFNEAPNGSYTIDSSEQFQNALDSQLFQTARMSPSSLRYYGIGLENGNYTVELQFAEFAYPESPTWQSTGRRVFDIYIQGGLKEKNFDIRKTAGGKSYVAVYKKYNATVSKNFLEIHLFWAGKGTCCIPTQGYYGPMISALSVTPNFTPTVRNGVPKKKSKAGAIVGIVIGASVLGLAALAGIFMLVQKRRRAAQQQEELYNMVGRPNIFSNAELKLATDNFSSQNILGEGGYGPVYKGKLPDERVIAVKQLSQTSHQGKSQFVTEVATISAVQHRNLVKLYGCCIDSSTPLLVYEYHENGSLDRALFGDSGTILDWPTRFEIILGIARGLTYLHEESSVRIVHRDIKASNVLLDTDLTPKISDFGLAKLFDEKKTHVSTKIAVATWRLSMQ

SEQ ID NO: 163706 - protein, 442 aa, Zea Mays
MVIIIRRQHYEWQKSNYLRICNLKHPVRKTSPAPAAAAMESAPQTPTMAAAGDVLRVADLPGRGRGLVAARNVREGEVLLSEPPVLLYPSTLSSLRSYCSACFRSLPPAATIPCVSCRAAAFCSPACAAASHPHLLCAALSHGGGAGLAAAAPTEAIQEPLLFLLSAYSLPESTMRSMLSLSSAPPPPPGAQDAAGLHAAVAALAPPHMLPQGLSPDLTAALLAKDRGNSFAIMEPYRHGMSLELLKARAYAVYPRASLFNHDCLPNACHFDYPDRPGPGNTDIVVRALHDIPEGREVCISYFAANWRYADRQRRLLEDYGFRCECDRCQVESQWKDDDDNNGDDGDDTMEEEGEDDVGDRGDDGIEEEEGDGATNGGDDDFPHAYFFVRYLCDNEGCWGMLAPLPPSPNGDLSHVFECNLCGKLRKEEDVIPDEGTSGMVH

SEQ ID NO: 163707 - protein, 475 aa, Zea Mays
MSLPCIGYSVVFPCLLLAYTGQAAYIIDNKDHVVDAFYRSIPEAIYWPAFIIATLAAVVASQATISATYSIIKQALALGCFPRVNVVHTSKKFLGQIYIPDINWVLMILCIAVTAGFKNQSQIGNAYGTAVVIVMLVTTFLMVPVMLLVWKSHWILVVIFLVLSLTVELPYFTACINKVDQGGWVPLVIAITFFVIMHVWHFCTVKRYEFEMHSKVSMAWILGLGPSLGLVRVPGIGFVYTELASGVPHIFSHFVTNLPAIHSVVVFVCVKYLPVYTVPAEERFIMKRIGPKNYHMFRCVARYGYKDIHKKDDNFEKMLLDRLLIFVRLESMMDGYSDSEDLTVMEHKAKRSTRSLQLIEKAGGNNTMSSTGDLSYSSSQDSIVLAKSPLTGNSLTRYSSQTPGDELEFLNRSKDAGVVHFLGNTVVQARRDSGILKKVAVNYVYAFLRKMCRENSVIFNVPHESLLNVGQIYYI

SEQ ID NO: 163708 - protein, 787 aa, Zea Mays
MLMASMSDSETTNRGSMWELDQNLDQPMDEEASQLKNMYKEKKFSSILLLRLAFQSLGVVFGDLGTSPLYVFYNIFPHGVDEDEDVIGALSLIIYTLTLIPLMKYVFVVLRANDNGQGGTFALYSLLCRHAKVSTIPNQHKTDEELTTYSRQTYEENSLAAKVKKWLEGHAYKKNCLLILVLIGTCTAIGDGILTPAISGGIRVQNQNMSTDVVVIVAVFILIGLFCMQHYGTDKVGWLFAPLVLLWFILIGSVGLVNIRKYNSSVLKAYNPVYIFRYFRRGKSEIWTSLGGVMLSITGTEALYADLCHFPVLAIQFAFTLVVFPCLLLAYTGQAAYIIDNKDHVVDAFYRSIPEAIYWPAFIIATLAAVVASQATISATYSIIKQALALGCFPRVNVVHTSKKFLGQIYIPDINWVLMILCIAVTAGFKNQSQIGNAYGTAVVIVMLVTTFLMVPVMLLVWKSHWILVVIFLVLSLTVELPYFTACINKVDQGGWVPLVIAITFFVIMHVWHFCTVKRYEFEMHSKVSMAWILGLGPSLGLVRVPGIGFVYTELASGVPHIFSHFVTNLPAIHSVVVFVCVKYLPVYTVPAEERFIMKRIGPKNYHMFRCVARYGYKDIHKKDDNFEKMLLDRLLIFVRLESMMDGYSDSEDLTVMEHKAKRSTRSLQLIEKAGGNNTMSSTGDLSYSSSQDSIVLAKSPLTGNSLTRYSSQTPGDELEFLNRSKDAGVVHFLGNTVVQARRDSGILKKVAVNYVYAFLRKMCRENSVIFNVPHESLLNVGQIYYI

SEQ ID NO: 163709 - protein, 707 aa, Zea Mays
MLMASMSDSETTNRGSMWELDQNLDQPMDEEASQLKNMYKEKKFSSILLLRLAFQSLGVVFGDLGTSPLYVFYNIFPHGVDEDEDVIGALSLIIYTLTLIPLMKYVFVVLRANDNGQGGTFALYSLLCRHAKVSTIPNQHKTDEELTTYSRQTYEENSLAAKVKKWLEGHAYKKNCLLILVLIGTCTAIGDGILTPAISVLSAAGGIRVQNQNMSTDVVVIVAVFILIGLFCMQHYGTDKVGWLFAPLVLLWFILIGSVGLVNIRKYNSSVLKAYNPVYIFRYFRRGKSEIWTSLGGVMLSITGTEALYADLCHFPVLAIQFAFTLVVFPCLLLAYTGQAAYIIDNKDHVVDAFYRSIPGTAVVIVMLVTTFLMVPVMLLVWKSHWILVVIFLVLSLTVELPYFTACINKVDQGGWVPLVIAITFFVIMHVWHFCTVKRYEFEMHSKVSMAWILGLGPSLGLVRVPGIGFVYTELASGVPHIFSHFVTNLPAIHSVVVFVCVKYLPVYTVPAEERFIMKRIGPKNYHMFRCVARYGYKDIHKKDDNFEKMLLDRLLIFVRLESMMDGYSDSEDLTVMEHKAKRSTRSLQLIEKAGGNNTMSSTGDLSYSSSQDSIVLAKSPLTGNSLTRYSSQTPGDELEFLNRSKDAGVVHFLGNTVVQARRDSGILKKVAVNYVYAFLRKMCRENSVIFNVPHESLLNVGQIYYI

SEQ ID NO: 163710 - protein, 658 aa, Zea Mays
MHHFTNHEICRRWHVCSLFSTVPACKAKVKKWLEGHAYKKNCLLILVLIGTCTAIGDGILTPAISVLSAAGGIRVQNQNMSTDVVVIVAVFILIGLFCMQHYGTDKVGWLFAPLVLLWFILIGSVGLVNIRKYNSSVLKAYNPVYIFRYFRRGKSEIWTSLGGVMLSITGTEALYADLCHFPVLAIQFAFTLVVFPCLLLAYTGQAAYIIDNKDHVVDAFYRSIPEAIYWPAFIIATLAAVVASQATISATYSIIKQALALGCFPRVNVVHTSKKFLGQIYIPDINWVLMILCIAVTAGFKNQSQIGNAYGTAVVIVMLVTTFLMVPVMLLVWKSHWILVVIFLVLSLTVELPYFTACINKVDQGGWVPLVIAITFFVIMHVWHFCTVKRYEFEMHSKVSMAWILGLGPSLGLVRVPGIGFVYTELASGVPHIFSHFVTNLPAIHSVVVFVCVKYLPVYTVPAEERFIMKRIGPKNYHMFRCVARYGYKDIHKKDDNFEKMLLDRLLIFVRLESMMDGYSDSEDLTVMEHKAKRSTRSLQLIEKAGGNNTMSSTGDLSYSSSQDSIVLAKSPLTGNSLTRYSSQTPGDELEFLNRSKDAGVVHFLGNTVVQARRDSGILKKVAVNYVYAFLRKMCRENSVIFNVPHESLLNVGQIYYI

SEQ ID NO: 163711 - protein, 278 aa, Zea Mays
MPLYLFSSPAAAKLATGPHASLHRRRQFLFRVPHRPSRRAPLLTSAAERPAGRTMATADTGASTVTDSRLRGVKQALISLSDKTDLANLGNGLQRLGFSIISTGGTASSLEASGVNVTKVEEITQFPEMLDGRVKTLHPSIHGGILARRDQEHHLKALKEHGIGTFDVVVVNLYPFYDKVTSGAISFEDGIENIDIGGPTLIRAAAKNHKDVLVVVDHKDYPALLEYLEGKQDDPDFRRTLAWKAFQHVASYDSAISEWLWKQSNKGVVIFLVNVMLV

SEQ ID NO: 163712 - protein, 329 aa, Zea Mays
MPLYLFSSPAAAKLATGPHASLHRRRQFLFRVPHRPSRRAPLLTSAAERPAGRTMATADTGASTVTDSRLRATGVKQALISLSDKTDLANLGNGLQRLGFSIISTGGTASSLEASGVNVTKVEEITQFPEMLDGRVKTLHPSIHGGILARRDQEHHLKALKEHGIGTFDVVVVNLYPFYDKVTSGAISFEDGIENIDIGGPTLIRAAAKNHKDVLVVVDHKDYPALLEYLEGKQDDPDFRRTLAWKAFQHVASYDSAISEWLWKQSNKADSFPPSFTVPLTMKSTLRYGENPHQKAAFYGDRSLSLVNAGGIATAIQHHGKGFAILRTS

SEQ ID NO: 163713 - protein, 321 aa, Zea Mays
MKSTLRYGENPHQKAAFYGDRSLSLVNAGGIATAIQHHGKEMSYNNYLDADAAWNCVSEFESPTCVVVKHTNPCGVASRHDILEAYRLAVRADPVSAFGGIVAFNTTVDEDLAREIREFRRPTDGETRMFYEIVVAPGYTAEGLEVLKGKSKTLRILEAKRRRSGKGTLLSLRQVGGGWLAQEPDDVTPEDVAFTNVSERAPDARELSDAKFACLCVKHVKSNAIVIAKNSCMLGMGSGQPNRLESLRIAFRKAGEEAKGAALASDAFFPFAWNDAVEEACQRGVAVIAEPGGSIRDQDAVECCNKYGVALVFTGVRHFRH

SEQ ID NO: 163714 - protein, 911 aa, Zea Mays
MHWDGRQCPKIQGGVVRINCIMDSGNSSCSRTRSGLVRKKDTFALSRSSCSRTRSGLLRVKSSVDSSDVSSSRTRSGLLRIKSFLDSHDGSFSRSQSDHVGGSPPIVEAINDESVLKESPDRLMKEEMPVTTPNGLVRQSFTEQAVTKDKSGMRTLLDGCLSEDMPSRTRSGLVRRSPTVKTLSKDKSVIKGLADGCLKEDKPLGTRSGLVSGSLAAKVPIKAEVLTKGQHDRWLKNDKAAAMRSDHGGRRLAAKYYIDPVSGYEFRSLKDVHNYLETGDISQCAVTPKKSTICEDITESQTHTSTSPQHMRPGTANKGIQCEILTSDGIMAPWEDNGNDTEHTMLPEPESLKATQGYGNKLETSEPTRVQPVSPHNGSRQTKSVKRKESNAEVKSKKRKTSSAVTRVRASPRLAALNAHLDVSIEHEDDMVSTNHVDWVQTIEERAIDQAQKSQSGSFDQIHGNLESTFSQLQLSQADPANGMQVIQANTTIHSQPSQLDTLSPTQKKQENSSKQLQSVVTDSSIPKRTTQKCTIDQPSQPDINHIRTDQEFTGNQFPSSLPVDTVISLGDTEEFTAGHSQPRNSDTAGQIQANEENTADQVQLSLAETVILVPAIQEYAAGYSLLSKADTTDQTQANQEYIADQVQSCLTDALIPVKAIEEYTTDYSHISKADITNQIQVNQESTDDHLYLRQVDCLAEMQIIEQNLSKQPQLSQPDTGDQIRIDLESTTNHLQPNYDENSMLQSGFSWAPEQNRGAPTTDFWKNVESQASSVSMPINGAPLSSFPANVRFQNAAAAAAAAEPALPPQVAPTETGSDQSGLAFQSLFGNIWSDPCIEFAFKTLTGDIPVLDDTTAVTDYFPEQQDLNKDPAPNCAGSVFDSSRNHTQVDVNLPPPAPDGFYDGSWFPPQ

SEQ ID NO: 163715 - protein, 601 aa, Zea Mays
MRPGTANKGIQCEILTSDGIMAPWEDNGNDTEHTMLPEPESLKATQGYGNKLETSEPTRVQPVSPHNGSRQTKSVKRKESNAEVKSKKRKTSSAVTRVRASPRLAALNAHLDVSIEHEDDMVSTNHVDWVQTIEERAIDQAQKSQSGSFDQIHGNLESTFSQLQLSQADPANGMQVIQANTTIHSQPSQLDTLSPTQKKQENSSKQLQSVVTDSSIPKRTTQKCTIDQPSQPDINHIRTDQEFTGNQFPSSLPVDTVISLGDTEEFTAGHSQPRNSDTAGQIQANEENTADQVQLSLAETVILVPAIQEYAAGYSLLSKADTTDQTQANQEYIADQVQSCLTDALIPVKAIEEYTTDYSHISKADITNQIQVNQESTDDHLYLRQVDCLAEMQIIEQNLSKQPQLSQPDTGDQIRIDLESTTNHLQPNYDENSMLQSGFSWAPEQNRGAPTTDFWKNVESQASSVSMPINGAPLSSFPANVRFQNAAAAAAAAEPALPPQVAPTETGSDQSGLAFQSLFGNIWSDPCIEFAFKTLTGDIPVLDDTTAVTDYFPEQQDLNKDPAPNCAGSVFDSSRNHTQVDVNLPPPAPDGFYDGSWFPPQ

SEQ ID NO: 163716 - protein, 200 aa, Zea Mays
MFDVNRHLNLPDSRVIKLIKRFGTEVNPNQRRILCMNKVDLVEDKKDLLKVAKEFEDLPGYERYFMVSGLKGKGVKDLIQYLMDQAVRRPWDEEPTVMTEEVMKTISLEVVREKMLHHIHQEIPYVIEHRLMGWKELKDGSLRVEQHFIAPKQSQRQILVGKNGSKIGRIGIEANEELRSIFKRDVHLILQVRVAKKRSA

SEQ ID NO: 163717 - protein, 231 aa, Zea Mays
MLGHHGFPYRDVTVRVESAWSSINLYDLLIVMFDVNRHLNLPDSRVIKLIKRFGTEVNPNQRRILCMNKVDLVEDKKDLLKVAKEFEDLPGYERYFMVSGLKGKGVKDLIQYLMDQAVRRPWDEEPTVMTEEVMKTISLEVVREKMLHHIHQEIPYVIEHRLMGWKELKDGSLRVEQHFIAPKQSQRQILVGKNGSKIGRIGIEANEELRSIFKRDVHLILQVRVAKKRSA

SEQ ID NO: 163718 - protein, 152 aa, Zea Mays
MIWCYVPMMRSKGGISRGLVGRPTMIILPLGLSRPMYGAKVRFADTVLMMPSMVLAAAFISSASLLTTKASAPSRSSASCFFPGDVLMTVTLAPNALANLTATWPRPPSPITPTCFPGTFRPWYFMGLYTVMPAHSSGAPRSSGIASGNRTT

SEQ ID NO: 163719 - protein, 334 aa, Zea Mays
MDPEKQNEMSLMDKRQLVYEVARWPQGAVEILKCWTRRELLELICVELGKERKYTNVPKAKMIAYLLKLVSRKSGKNGQLKDDNANVMLLEQDNKDETQMKESEEQEQSRPLKTANSDSSIRREAHACCSVVCSNVACQATRNAGDNYCKRCSCCICNKYDDNKDPSLWLVCSSDNPYSGCSCGVSCHLNCALKNKKAGIVNNGCNKLDCSFYCVSCGKINWLMRSLQKQLAIAREARRVDVLCERLSLSHKMVKGSERYKEITSIISSAAKTLEKEVGGALDQVSAITGRGIVNRLTCGAEVQKLCSSALEIVDSTVDSILEFESNNSPKLLG

SEQ ID NO: 163720 - protein, 363 aa, Zea Mays
MDPEKQNEMSLMDKRQLVYEVARWPQGAVEILKCWTRRELLELICVELGKERKYTNVPKAKMIAYLLKLVSRKSGKNGQLKDDNANVMLLEQDNKDETQMKESEEQEQSRPLKTANSDSSIRREAHACCSVVCSNVACQATRNAGDNYCKRCSCCICNKYDDNKDPSLWLVCSSDNPYSGCSCGVSCHLNCALKNKKAGIVNNGCNKLDCSFYCVSCGKINWLMRSLQKQLAIAREARRVDVLCERLSLSHKMVKGSERYKEITSIISSAAKTLEKEVGGALDQVSAITGRGIVNRLTCGAEVQKLCSSALEIVDSTVDSILEFESNNSPKLLASVRSRLMVPKFGTEVPRFATIHRSPHATY

SEQ ID NO: 163721 - protein, 465 aa, Zea Mays
MDPEKQNEMSLMDKRQLVYEVARWPQGAVEILKCWTRRELLELICVELGKERKSLQKQLAIAREARRVDVLCERLSLSHKMVKGSERYKEITSIISSAAKTLEKEVGGALDQVSAITGRGIVNRLTCGAEVQKLCSSALEIVDSTVDSILEFESNNSPKLLGPQPQILFDEITPFSVVIVLNYQDSIGKEQVDGSKVWHRSAKVCNYSSEPTCHILRPNTRSLVSGLSPSTEYFFKVLPFSSVQGFTEWEAKCSTRSLDHGSSQCSTQNSESMCLKVDPMQHQKKDLNVQNHQRTIQYDSPKGSTNSSENNLLCDRYSKRAKVARLDGASDNDESQLPPTSEVLPFASSNYSPSEAPSKPDLLIGTPDSASKNYVEQQYEYCVKVVRWLEHEGHMDNDFRVKFLTWFSLKATAQDRRIVGALVDVLIGDPASLVAQLVDAFKDIIYTKEKPFQTQQKDARCKIWH

SEQ ID NO: 163722 - protein, 416 aa, Zea Mays
MAARSLQKQLAIAREARRVDVLCERLSLSHKMVKGSERYKEITSIISSAAKTLEKEVGGALDQVSAITGRGIVNRLTCGAEVQKLCSSALEIVDSTVDSILEFESNNSPKLLGPQPQILFDEITPFSVVIVLNYQDSIGKEQVDGSKVWHRSAKVCNYSSEPTCHILRPNTRSLVSGLSPSTEYFFKVLPFSSVQGFTEWEAKCSTRSLDHGSSQCSTQNSESMCLKVDPMQHQKKDLNVQNHQRTIQYDSPKGSTNSSENNLLCDRYSKRAKVARLDGASDNDESQLPPTSEVLPFASSNYSPSEAPSKPDLLIGTPDSASKNYVEQQYEYCVKVVRWLEHEGHMDNDFRVKFLTWFSLKATAQDRRIVGALVDVLIGDPASLVAQLVDAFKDIIYTKEKPFQTQQKDARCKIWH

SEQ ID NO: 163723 - protein, 115 aa, Zea Mays
MEGAYNRVLSARQAVPHETYVYFMDLLAKTVRDEIAGCSEKGYDSLSVSDAKQMLMFSSDQDLHEYITEEHPEWELKNGAVFFQKAKESQPYKEIPSLQLINQTLSYARELERIV

SEQ ID NO: 163724 - protein, 590 aa, Zea Mays
MAGRGASPAAAAAVQVRCAGCRGVLAVAPGMTEFICPKCRMAQRLPPELMPPSPPKASPTPPPSGPTPPPPPPPSLPPPPPPPPQPVPHPLTRRSAPRAQGVDPTKIQLPCARCKAVLNVPHGLDRFRCPQCGVDLAVDLSKLRHFLASAGPGFFPPPLPPPPPPQPPVPMPHLPFLPMMPRLPLPMLPMLSPAELPEEINEAISYENLLRACLDAIILVISCLRMQELAKLTFDFVRHTSMMMDGSLCDLDFYVAVDVERDEDESGTFGETFIDYRPPKLSFGFPHPDPVVETSSLSAVQPPEPTYKLTIMKELDETNALSSLQIETIVYACQRHHHHLPTGARAGFFIGDGAGVGKGRTVAGLIWENWQQGRHKALWISIGSDLKYDARRDLDDVGAKCVEVHALNKLPYSKLDSKTFGITDGVVFVTYSSLIASSENRSRLQQLVQWCGSEFDGLLVFDECHKAKNLIPEAGSQPTRTGKAVLEIQDMLPQARVVYCSATGASEPRNLGYMVRLGLWGDGTSFENFNQFLGALEKGGVGALELVAMDMKARGMYVCRTLSYKGANFDILESLLEERMMDIFVSMIAH

SEQ ID NO: 163725 - protein, 358 aa, Zea Mays
MAGRGASPAAAAAVQVRCAGCRGVLAVAPGMTEFICPKCRMAQRLPPELMPPSPPKASPTPPPSGPTPPPPPPPSLPPPPPPPPQPVPHPLTRRSAPRAQGVDPTKIQLPCARCKAVLNVPHGLDRFRCPQCGVDLAVDLSKLRHFLASAGPGFFPPPLPPPPPPQPPVPMPHLPFLPMMPRLPLPMLPMLSPAELPEEINEVAVDVERDEDESGTFGETFIDYRPPKLSFGFPHPDPVVETSSLSAVQPPEPTYKLTIMKELDETNALSSLQIETIVYACQRHHHHLPTGARAGFFIGDGAGVGKGRTVAGLIWENWQQGRHKALWISIGSDLKYDARRDLDDVGAKCVEVGTVVRV

SEQ ID NO: 163726 - protein, 363 aa, Zea Mays
MAGRGASPAAAAAVQVRCAGCRGVLAVAPGMTEFICPKCRMAQRLPPELMPPSPPKASPTPPPSGPTPPPPPPPSLPPPPPPPPQPVPHPLTRRSAPRAQGVDPTKIQLPCARCKAVLNVPHGLDRFRCPQCGVDLAVDLSKLRHFLASAGPGFFPPPLPPPPPPQPPVPMPHLPFLPMMPRLPLPMLPMLSPAELPEEINEVAVDVERDEDESGTFGETFIDYRPPKLSFGFPHPDPVVETSSLSAVQPPEPTYKLTIMKELDETNALSSLQIETIVYACQRHHHHLPTGARAGFFIGDGAGVGKGRTVAGLIWENWQQGRHKALWISIGSDLKYDARRDLDDVGAKCVEGLQGFCQPFQLD

SEQ ID NO: 163727 - protein, 446 aa, Zea Mays
MAGRGASPAAAAAVQVRCAGCRGVLAVAPGMTEFICPKCRMAQRLPPELMPPSPPKASPTPPPSGPTPPPPPPPSLPPPPPPPPQPVPHPLTRRSAPRAQGVDPTKIQLPCARCKAVLNVPHGLDRFRCPQCGVDLAVDLSKLRHFLASAGPGFFPPPLPPPPPPQPPVPMPHLPFLPMMPRLPLPMLPMLSPAELPEEINEVAVDVERDEDESGTFGETFIDYRPPKLSFGFPHPDPVVETSSLSAVQPPEPTYKLTIMKELDETNALSSLQIETIVYACQRHHHHLPTGARAGFFIGDGAGVGKGRTVAGLIWENWQQGRHKALWISIGSDLKYDARRDLDDVGAKCVEVHALNKLPYSKLDSKTFGITDGVVFVTYSSLIASSENRSRLQQLVQWCGSEFDGLLVFDECHKAKNLIPEAGSQPTRTGYVTSSTGCLLFSDWCI

SEQ ID NO: 163728 - protein, 240 aa, Zea Mays
MAGRGASPAAAAAVQVRCAGCRGVLAVAPGMTEFICPKCRMAQRLPPELMPPSPPKASPTPPPSGPTPPPPPPPSLPPPPPPPPQPVPHPLTRRSAPRAQGVDPTKIQLPCARCKAVLNVPHGLDRFRCPQCGVDLAVDLSKLRHFLASAGPGFFPPPLPPPPPPQPPVPMPHLPFLPMMPRLPLPMLPMLSPAELPEEINEVAVDVERDEDESGTFGETFIDYKHPPCQQCNLQNLLTS

SEQ ID NO: 163729 - protein, 408 aa, Zea Mays
MAGRGASPAAAAAVQVRCAGCRGVLAVAPGMTEFICPKCRMAQRLPPELMPPSPPKASPTPPPSGPTPPPPPPPSLPPPPPPPPQPVPHPLTRRSAPRAQGVDPTKIQLPCARCKAVLNVPHGLDRFRCPQCGVDLAVDLSKLRHFLASAGPGFFPPPLPPPPPPQPPVPMPHLPFLPMMPRLPLPMLPMLSPAELPEEINEVAVDVERDEDESGTFGETFIDYRPPKLSFGFPHPDPVVETSSLSAVQPPEPTYKLTIMKELDETNALSSLQIETIVYACQRHHHHLPTGARAGFFIGDGAGVGKGRTVAGLIWENWQQGRHKALWISIGSDLKYDARRDLDDVGAKCVEGALEKGGVGALELVAMDMKARGMYVCRTLSYKGANFDILESLLEERMMDIFVSMIAH

SEQ ID NO: 163730 - protein, 609 aa, Zea Mays
MAGRGASPAAAAAVQVRCAGCRGVLAVAPGMTEFICPKCRMAQRLPPELMPPSPPKASPTPPPSGPTPPPPPPPSLPPPPPPPPQPVPHPLTRRSAPRAQGVDPTKIQLPCARCKAVLNVPHGLDRFRCPQCGVDLAVDLSKLRHFLASAGPGFFPPPLPPPPPPQPPVPMPHLPFLPMMPRLPLPMLPMLSPAELPEEINEVAVDVERDEDESGTFGETFIDYRPPKLSFGFPHPDPVVETSSLSAVQPPEPTYKLTIMKELDETNALSSLQIETIVYACQRHHHHLPTGARAGFFIGDGAGVGKGRTVAGLIWENWQQGRHKALWISIGSDLKYDARRDLDDVGAKCVEVHALNKLPYSKLDSKTFGITDGVVFVTYSSLIASSENRSRLQQLVQWCGSEFDGLLVFDECHKAKNLIPEAGSQPTRTGKAVLEIQDMLPQARVVYCSATGASEPRNLGYMVRLGLWGDGTSFENFNQFLGALEKGGVGALELVAMDMKARGMYVCRTLSYKGANFDILESLLEERMMDFATRTLVRCDSFEPLYTLRLPAFSSSTSTTHALTAATSSITWHRRLLGHPRRDVMSSCLAVLSSHVVGVLLSICVMPVS

SEQ ID NO: 163731 - protein, 57 aa, Zea Mays
MIRLSVPRTPNKPLTTRTARLSKHKSHTNNFAAENLLPNFMSYIKFYNVHDRSAYKK

SEQ ID NO: 163732 - protein, 82 aa, Zea Mays
MCWAVWGPRKRASMPRHVVRNACVASIGWTHARSTEEWLIRVIKPPWIRCPLWAGVFDTPITVRSRESEDHSGTWNLKSQAS

SEQ ID NO: 163733 - protein, 83 aa, Zea Mays
MCWAVWGPRKRASMPRHVVRNACVASIGWTHARSTEEWLIRVIKPPWIRCPLWAGVFDTPITEVRSRESEDHSGTWNLKSQAS

SEQ ID NO: 163734 - protein, 99 aa, Zea Mays
MAITILHIHFWAPTFKWGISIANIADFAKPPEKISYPQQVAVACTGIIWSRYSLVITPKNWNLFSVNVAMAGTGLYQLSRKIRQDYLSGEKDAAPQLQE

SEQ ID NO: 163735 - protein, 64 aa, Zea Mays
MIRILSFCSLYLVFVNSKLFANLIDHSPVFRDVSALHRPHFVMIVVKLNCYPWRMRAFNKECLV

SEQ ID NO: 163736 - protein, 387 aa, Zea Mays
MASAAVMVSSAGSLLAMLQEPAPELKLHALASLNSLVHAFWHEISTSVSSIESLYEDEEFVQRQLAALVASKVFFYLGELNDALSYALGAGPLFDVSDDSDYAQTLLAKALDEYTAIQSRGTGEEKTIDPRLEAIVERMLDKCILDGKYQQAMGMSVECRRLDKLEAAISRCDNLHGVLSYCINLSHQYVSHREYRLEILQCLVKIYQTLPNPDYLSICQCLMFLGEPESVANMLDKLISGSKDDALLAYQTAFDLAENENQAFLLNVRNHLDALSSHTSAHVDLDSGPTVPSNQTNAATELSGDVQMRDDINMPNGSATTVDSNAATHADRLTKIKGILSGETSIQLTLQFLYSHNSSYKKLPSSKCEDVPRSGFHCINAACPVNV

SEQ ID NO: 163737 - protein, 374 aa, Zea Mays
MRCFLSRQVLPAVWARGSLVGGREATHASTSPNWRGHTTPHHSSVQPLPLSSPLLPKQEQRDARARATSWWNLAASRGRSRAEPWFRREIRARRPPLAASVPEHYQDYTSTLKMAIGLLAFESHQGLWNSGYYSQLFGIGGVLITLTILMLSTGYFGGIGAPFAPYFWPYLGQVPKKRERKRPVRVYMDGCFDLMHYGHANALRQAKLLGDQLVVGVVSDEEIVANKGPPVLSMEERLTLVSGLKWVDEVVPNAPYEITEEFMNTLFNKYSIDYIIHGDDPCLLPDGTDAYALAKKVGRYKQIKRTEGVSSTDIVGRILLTFRQKDADTDLSVVVAEKSGEKSNDEVKSQLSHFLPTSRRIMQFSNGQVLVLSM

SEQ ID NO: 163738 - protein, 367 aa, Zea Mays
MTHFAPSLASTPGLDMKVGDEEALIEAEGNCFSNFHVAGSSSRVAFALVKRKAMKARHINDYTYPVRDWFPSEPTRELTDAETAARVVFRQILSTPPFISRNPKIAFMFLTPGKLPFEKLWELFFKGHDGRYTIYVHASREKHEHVSPIFIGRDIHSEKVGWGMITMVDAERRLLAKALEDIDNQHFVLLSDSFHDPGPHGVYRYSKNMLPEVRESEFRKGSQWFSMKRQHAMVVIADSLYYSKFRLYCRPGMEEGRNCYADEHYLPTLFHMMDPAGIANWSVTYVDWSEGKWHPRSFRAKDVTYERLKNMTSIDVSYHITSDDKKDLLQRPCMWNGLKRPCYLFARKFYPEALDNLVNLFSNYTIF

SEQ ID NO: 163739 - protein, 93 aa, Zea Mays
MGFTSKLKRSRHGVSMKLRVRDPRPTQTVQDGLSFVASLKRVFACEPDNIRSAVVVERVKVLLEGHPGLLRHFNQFLPWGYIRAHGPVGRISV

SEQ ID NO: 163740 - protein, 121 aa, Zea Mays
MGFTSKLKRSRHGVSMKLRVRDPRPTQTVQDGLSFVASLKRVFACEPDKYDEIIATMRQFKSGRSIDSLFVLSVNCSIRSAVVVERVKVLLEGHPGLLRHFNQFLPWGYIRAHGPVGRISV

SEQ ID NO: 163741 - protein, 282 aa, Zea Mays
MTTGTSLTTPAPEHSSSPTVSSYACPAPTPHLRMVKLSASSVLPITPFALFSFRPASHQPSGLKHSTRQHFFSTFYPPKPFIFPLLTSPSSKLYPPMNIFACSVAPAIPTYLPPLATNLIPIPLSVFFLATRRITKGTGVLTSYPTVSSFPVTLFSMSPLFPLLNSNPLASSQDFDFLDTITTNPVPSPIGPPPLFLSGLIPENVAAPNTPTGAAAPSAQAVPGAPAAPGAAAPSTPAAGAAPPSAAGGAPDATAPRRFGQVFTRRPHPQCRTWPLQPPRLV

SEQ ID NO: 163742 - protein, 119 aa, Zea Mays
MEFQSSSQVLPIFSSSNPLWEAWKGPYYWVKCKPDEPIPVSQPNQGSVRGRKEKKRIKQRKDFIMAEKKKRRAQYSAAVKRKEAERTERKMAAVARERAWVARLIELKQLEEEIKAVMA

SEQ ID NO: 163743 - protein, 125 aa, Zea Mays
MDDYLVTDKITAFIVQMQHAATEVLKECSLTGIETGTASSVGTQIKATSTSSRRRLEHEHGGEWWFYMPLSTRMSLYWLTILVGFIWIKALESAKGTCLAYIERYACSSSCSFNPSIIGLQQATS

SEQ ID NO: 163744 - protein, 54 aa, Zea Mays
MTVGPHFKEANNFLWPFKLKAPLGGLKKKRNHYVEGGDAGNRENYINELIKRMN

SEQ ID NO: 163745 - protein, 168 aa, Zea Mays
MGRARPGSRRRCESRIAEQNLEFKTKNDVTKNDVIETLNMIVKEKSQKITTMQNEAKGSLAAEEQASKANALAIELEKQTEKLKKDITKQKIKKEALEARAGNADKKVQELNMKLEKLQRTSSDQKRRIQKTGHALKAAEDELMKAQLETTTKVKQLRELDCSNFEDS

SEQ ID NO: 163746 - protein, 300 aa, Zea Mays
MIVKEKSQKITTMQNEAKGSLAAEEQASKANALAIELEKQTEKLKKDITKQKIKKEALEARAGNADKKVQELNMKLEKLQRTSSDQKRRIQKTGHALKAAEDELMKAQLETTTKVKQLREVEIVDGRSESRDNDMMTTHGTKDRFVVMGLHTEQRRLEHCALAGGCFTVHWLVAGGSLEHRSSAHRVLDTNSSRIRTAAGPADLGGCALAARWSRSTGRLRLDLEHCALAAAVGGGRTGGGRRGAAAYLEGGGRPTAAASGSGGSAVVLVGSLAARAVRVGSLAAGASLLVKGPLRPKNS

SEQ ID NO: 163747 - protein, 110 aa, Zea Mays
MQDYQQLVWKSCKLYLPQAFQHHQQLVWKPCKFNLRQQLVWKSCKFYLPPTLSTSSTTALKTLQVLSTTGSLLSKKGTKRRLQPTFSIPFPLFFFAHFCCISFGKQPPDI

SEQ ID NO: 163748 - protein, 340 aa, Zea Mays
MGETMGRRTVSGLLVTKGGSILVFREESPRHKATACCTRLWCSSKLFPNKDTNTRRASRETSALQRSQVSRKSNWMSHQGSISYDRSTSRNTASTFGETHNKPREKENLGCDLPARLKERINTSRKSSLGGLGSPNKSSTNTSSSSRSVSRSVCRPASRMRKDGGRGAESMRMHRARDSGGSSWGDVLTRNSDQDSSHRSLSRNVLRHRSRSQQGPISSLEDNLDDSSEYWHFDTDDSEEVEDDYAFNDQHRGMRMDIDNMSYEDLLALGERIGTVSTGLSDDALSECLKRNLYVPTTSSSNEDGGVLFWCGGGQDGMRALLPYHLYPTVASAKELVPDL

SEQ ID NO: 163749 - protein, 502 aa, Zea Mays
MAALRIQTSAGPPELRRRNLASNPVHVGLDLVGFSSWMLPVGDHWCAGSAAVTSHGVGYVGAGRKNCHRACLKNGVVCSFDDSGVRVSMLCSSLPSEDVSFSSKMSLVNSTGFAQKKKGSKVWRRSQGGKKLVRHRAPKHGLGKDRHGHRSSVKDDDTDAVLSGISKESSIEECNSALIRLEKLSDEKALKFFEWMKVSGKLKGNTHAYHLALKAIAWKEDWKMAELLLHEMVADSDCALDARAFNGLIYVCAKRRLDAWATKWFHMMLEREVQPNLSTVGMLMGLYQKTGKLSEAEFTFEKMRNCNIKCVNAYSAMITLYTRLGLFAKSEDTINLMNNDGLVPNMENWLVRLNVYCQQGKMEEAELVLQSIVDEGFTLNVIAYNTLITGYGKSSDMQKANKVFDSFGSAGLAPDETTYRSMVEGFGRANIYEETILYYRKLKGAGFRPNASNFYTMINLLARHDDNETAAEILQDMRAAGCQCSSIVTFSCSGLWSSRKNA

SEQ ID NO: 163750 - protein, 202 aa, Zea Mays
MIASESIGVGDIALEIPESLIISDELLCQSEVFLSLKDFNNITSETMLLLWSMRERYNLGSKFKPYFDTLPANFNTGLSFGIDALAALEGTLLFDEIIQARQHLRQQYDELFPLLCTNFPEIFRKDVCTWDDFLWACELWYSNSMMIVLSSGKLSTCLVPVAGLLNHSGSNAFSVMGNIQGRIFLRSMDSYQEETTLMMLYL

SEQ ID NO: 163751 - protein, 270 aa, Zea Mays
MIASESIGVGDIALEIPESLIISDELLCQSEVFLSLKDFNNITSETMLLLWSMRERYNLGSKFKPYFDTLPANFNTGLSFGIDALAALEGTLLFDEIIQARQHLRQQYDELFPLLCTNFPEIFRKDVCTWDDFLWACELWYSNSMMIVLSSGKLSTCLVPVAGLLNHSVSPHILNYGRVDEATKSLKFPLSRPCDAGEQCFLSYGKHPGSHLLTFYGFLPRGDNPYDVIPLDLDTSADDEDITAQSSATTSQTTHMVRGTWLSTSGGFPT

SEQ ID NO: 163752 - protein, 277 aa, Zea Mays
MKKLLLTSNTAAKEVLQILHDEIVVKLKSVGKSDNAWMVVQTQNHDAEDSLLKWGEHLGIKSRLQIAYFQGAGRGMIASESIGVGDIALEIPESLIISDELLCQSEVFLSLKDFNNITSETMLLLWSMRERYNLGSKFKPYFDTLPANFNTGLSFGIDALAALEGTLLFDEIIQARQHLRQQYDELFPLLCTNFPEIFRKDVCTWDDFLWACELWYSNSMMIVLSSGKLSTCLVPVAGLLNHSGSNAFSVMGNIQGRIFLRSMDSYQEETTLMMLYL

SEQ ID NO: 163753 - protein, 355 aa, Zea Mays
MIASESIGVGDIALEIPESLIISDELLCQSEVFLSLKDFNNITSETMLLLWSMRERYNLGSKFKPYFDTLPANFNTGLSFGIDALAALEGTLLFDEIIQARQHLRQQYDELFPLLCTNFPEIFRKDVCTWDDFLWACELWYSNSMMIVLSSGKLSTCLVPVAGLLNHSVSPHILNYGRVDEATKSLKFPLSRPCDAGEQCFLSYGKHPGSHLLTFYGFLPRGDNPYDVIPLDLDTSADDEDITAQSSATTSQTTHMVRGTWLSTSGGFPTYGLPQPLLTYLRAALGCEMKESDKVVLETILSIFSPMLEALLPEQDDPNRESASWDVKLASDYKDLQRKIVSSIVTSCTSALENL

SEQ ID NO: 163754 - protein, 352 aa, Zea Mays
MHSTNEMILEKRNLSCEIQIPVACSAVDALKLLDHIIEAARVVYMDELELYFAGDDVGPFSARNELESLNLLLKTMKKLLLTSNTAAKEVLQILHDEIVVKLKSVGKSDNAWMVVQTQNHDAEDSLLKWGEHLGIKSRLQIAYFQGAGRGMIASESIGVGDIALEIPESLIISDELLCQSEVFLSLKDFNNITSETMLLLWSMRERYNLGSKFKPYFDTLPANFNTGLSFGIDALAALEGTLLFDEIIQARQHLRQQYDELFPLLCTNFPEIFRKDVCTWDDFLWACELWYSNSMMIVLSSGKLSTCLVPVAGLLNHSGSNAFSVMGNIQGRIFLRSMDSYQEETTLMMLYL

SEQ ID NO: 163755 - protein, 301 aa, Zea Mays
MIASESIGVGDIALEIPESLIISDELLCQSEVFLSLKDFNNITSETMLLLWSMRERYNLGSKFKPYFDTLPANFNTGLSFGIDALAALEGTLLFDEIIQARQHLRQQYDELFPLLCTNFPEIFRKDVCTWDDFLWACELWYSNSMMIVLSSGKLSTCLVPVAGLLNHSVSPHILNYGRVDEATKSLKFPLSRPCDAGEQCFLSYGKHPGSHLLTFYGFLPRGDNPYDVIPLDLDTSADDEDITAQSSATTSQTTHMVRGTWLSTSGGFPTYGLPQPLLTYLRAALGCEVDEPAAEADVRVL

SEQ ID NO: 163756 - protein, 235 aa, Zea Mays
MAMDPSVAARQSEEAAEAFFRAAPPLRDRDRLAASLADFLARHSAVPQSHSSVVKAAISNYRKAIDECLLLKLPFTTIFEYLQLLQMVATSMNCLGHRGMFYLAAAVSDFYVPWESMAKHKIESAGGPLNMQLNQVPKMLFILRKNWAPAAFCVSFKLETDPNILLQKAEMALKKYGMNVVVANELANYKDVVVMVTSNGGRTTVSRTSKAEDLEVQLTDLLVKMHSEHIAQPNS

SEQ ID NO: 163757 - protein, 926 aa, Zea Mays
MVAAQVTPAPLLRRHGSAPPWLSSSPPFLLRRRASSPFSLHRRASPPLAISGCRRQDYSHCSDMAVRGSSAFKLRFYPNLEVQNIAQEWVKESRRLFYLRTANNVTNNIYKGNTPLWTGMVQNELSEDCRGLNYTYLNNLRERVSSKSIVNRHGNNRELIGHSTINQHVKSVPAPVRVVNDSVKCFSMPRASKVEIPWPAYSPAEDPLLDKSNTEVANINAKEETPVGHGEVICFSIYSANSDVQAADFGNGKTCIWVDVLDGGRGVLMEFAPFFEDSSIKKVWHNYSFDSHVIENYGIKIAGFHADTMHLARLWDSSRKIDGGYSLEGLTNDRRVMDTVPEDLPKPGKTSMKTIFGRKNIRKDGSEGKVVSVEPVKKLQREDRELWICYSSLDSMSTLRLYDSLKSKLTTRRWILDGCPRGTMYDFYEQYWRPFGALLVKMETEGMLVDRGYLSEIEKAAIAERKLAADKFRKWASKYCPDAKYMNVNSDIQIRQLLFGGIENRHKSGETWPHSKTFKVLNEESVATEGKKTSKYRTIKLCSIVEDLKIDMFTPSGWPTVSGDALRSLAGKIPTEYIYTIDDIQDDDEYTSGSENPDGNSSYGTAYEAFGGGKNGKEACHAIAALCEICSIDSLISNFILPLQGDHISCAEGRIHCSLNINTETGRLSARTPNLQNQPALEKDRYRIRQAFVAAPGNSLIVADYGQLELRILAHLTNCKSMLHAFKAGGDFHSRTAMNMYQHIRDAVQEKKVLLEWHPQPGQEKPPVPLLKVSVKEARDTLKLWYRDRKEVLAWQKSQKKLASEKGEVYTLLGRSRHFPYLTQYGPGQRGHIERAAINAPVQGSAADVAMCAMLEIERNVRLKELGWRLLLQVHDEVILEGPSESAEVAKAIVVECMSKPFYGTNILNVDLAVDAKCAKSWYAAK

SEQ ID NO: 163758 - protein, 80 aa, Zea Mays
MAGIIIKMLVLCAGWEIARGIVFSSLGSPALCVPVPCFVLFGFSFYASSPVLLQIERIFSSRGVLQIERGYIATQHNTQA

SEQ ID NO: 163759 - protein, 104 aa, Zea Mays
MAGIIIKMLVLCAGWEIARGIVFSSLGSPALCVPVPCFVLFGFSFYASSPVLLQIERIFSSRCVLQIERGYIATQHNTQDQLPVPTRWTEYLYDVKVNCSASSV

SEQ ID NO: 163760 - protein, 135 aa, Zea Mays
MAGIIIKMLVLCAGWEIARGIVFSSLGSPALCVPVPCFVLFGFSFYASSPVLLQIERIFSSRCVLQIERGYIATQHNTQVSLNDTSSSPHEDLLLSHMKTCCLIMVFVYEDQLPVPTRWTEYLYDVKVNCSASSV

SEQ ID NO: 163761 - protein, 84 aa, Zea Mays
MAGIIIKMLVLCAGWEIARGIVFSSLGSPALCVPVPCFVLFGFSFYASSPVLLQIERIFSSRCVLQIERGYIATQHNTQGTPPK

SEQ ID NO: 163762 - protein, 169 aa, Zea Mays
MLSRSGSTCHKRLHPTIPSIPTHTNTPMTPKSKLPAPHLLLAMAAPCAATAHCTSEPSTPSNLICIRGRYALRRQALPALLHVQLCRGCISPRAARCSRRRGPGQQPLPRPRLDPCVSFFSLATGKLFTATDPPCPCASVRPYIQRTSPHRWVPHAARRTSLHAPSVSR

SEQ ID NO: 163763 - protein, 87 aa, Zea Mays
MTPKSKLPAPHLLLAMAAPCAATAHCTSEPSTPSNLICIRGRYALRRQDCNLVDGEYILVLEQGVAQEVAPDLAPEPAIEDLPAPAL

SEQ ID NO: 163764 - protein, 55 aa, Zea Mays
MTPKSKLPAPHLLLAMAAPCAATAHCTSEPSTPSNLICIRGRYALRRQDCDPVPS

SEQ ID NO: 163765 - protein, 142 aa, Zea Mays
MPPAAAALLRCAPAVPFAARSSAVSRSGMARRLVAASAAAGRLAPAYRGLLLDAGGTLLQVARPVAETYASIGRRYGVTKTKKRIMEGFKRAFSAPWPKTLREMGGHSGELSWQKRPTALMVIISKKCISYYNDEIEQEQMF

SEQ ID NO: 163766 - protein, 135 aa, Zea Mays
MPPAAAALLRCAPAVPFAARSSAVSRSGMARRLVAASAAAGRLAPAYRGLLLDAGGTLLQVARPVAETYASIGRRYGVTKTKKRIMEGFKRAFSAPWPKTLRYQGDGRPFWRIVVAEATDCTDGDYFEEVYQLLQ

SEQ ID NO: 163767 - protein, 97 aa, Zea Mays
MVVVLLVPSISRPPPRLDSVVGGINRVPPRSLDQAITDLRARLGSHRSSPPPKSQDSCAGNLDRDRRRGPPSYTSLLATWERPTVVAWALFTWALLV

SEQ ID NO: 163768 - protein, 91 aa, Zea Mays
MGARIRRPRPGDQLLAGPIAGDENPIGMPTPFLIFLQPSAQTLTEVIWLHVFRSDVMLSFYTHVIFLQPSTQTQIEAICPIGDGVRKSGLW

SEQ ID NO: 163769 - protein, 80 aa, Zea Mays
MRVGEGKRNGRYWITDGAIDSSSTLTLSQVRARSMSSSLAIRHRQDSSHHRIQQLQAQLEEERREQQGMETRMIAEREAH

SEQ ID NO: 163770 - protein, 60 aa, Zea Mays
MGKQLRTQVLSRWKVPSRSSLKAVSHWAATEHKSPDTNRRHGPPPGDPAPYRAARFPSSW

SEQ ID NO: 163771 - protein, 307 aa, Zea Mays
MIGELFAVVEADGEEPRFAGVLGDSKKALSPSSSHSKLSFMVRMLYMKSRYRINNTAFSAMMKLMSDGYPNSELPKSYDEAMIYLKELGLGYENIHVCKNNCVLFRNVNAKMNECIVCKESKWKDETSLKRVPHKVLRHFPLLPRLKRIFASKQTSEETRWHKKVRKPVANLMSHPADGETWKDFDRKYPGFADDPRNLRLALATDGFNPFGNMSTQYSMWPVLVTPLNLPPWECVNPANCFMSLLIPGPRCPGKDFDLFLEPLIEELLKLWKGVNTYDACTGRKFDLRAAVLRCIHDYPALATLSG

SEQ ID NO: 163772 - protein, 203 aa, Zea Mays
MCLFLSILQVVQHEITDYERRRDKQVEENIKKMQDLGLNKYTSVLNKSLPPSASTKGNNAANKKTNSSDSDSYVSDYLLDDDDQGDPDDDDTESYEQPQPLAIKYPRSATNTTRASKKKTNPNMAPGIRFSKTVRAGPQLEEQPSKGFSLQRQMATMYRNQHMLMMTYQTALLHLDLLIISAELQRKTWHPLLMIVQVMLKAM

SEQ ID NO: 163773 - protein, 449 aa, Zea Mays
MDKQSDAQGSEKVAEEKQLDEKELERKLKKDQKAKEKEEKKLKAKQKEAARLQAQATSDGTKKAERKQRKKAVEDENPQDFIDPNTPNGRKKLLAPQMAKQYSPSAVERSWYAWWESSGYFGADSASTKPPFVIVLPPPNVTGALHIGHALTVAIEDAMIRWRRMSGYNALWVPGVDHAGIATQVVVEKKLMRERKLTRHDIGRENFVSEVLKWKDQYGGTILNQLRRLGASLDWSREAFTMDEQRSKAVTEAFVRLHKESLIYRDYRLVNWDCTLRTAISDIEVDHIDLKEDTMLKVPGYANPVQFGVLISFAYPLEEGLGEIVVATTRIETMLGDTAIAVHPEDERYKHLHGRYAVHPFNGRKLKIICDAELVDPTFGTGAVKITPAHDPNDFEVGKRHNLEFINIFTDDGKINSNGGAQFDGMPRFTARVAVIEALKEKHHGQGRP

SEQ ID NO: 163774 - protein, 203 aa, Zea Mays
MDKQSDAQGSEKVAEEKQLDEKELERKLKKDQKAKEKEEKKLKAQATSDGTKKAERKQRKKAVEDENPQDFIDPNTPNGRKKLLAPQMAKQYSPSAVERSWYAWWESSGYFGADSASTKPPFVIVLPPPNVTGALHIGHALTVAIEDAMIRWRRMSGYNALWVPGVDHAGIATQVVVEKKLMRERKLTRHDIGRENFVSEVSI

SEQ ID NO: 163775 - protein, 959 aa, Zea Mays
MAKQYSPSAVERSWYAWWESSGYFGADSASTKPPFVIVLPPPNVTGALHIGHALTVAIEDAMIRWRRMSGYNALWVPGVDHAGIATQVVVEKKLMRERKLTRHDIGRENFVSEVLKWKDQYGGTILNQLRRLGASLDWSREAFTMDEQRSKAVTEAFVRLHKESLIYRDYRLVNWDCTLRTAISDIEVDHIDLKEDTMLKVPGYANPVQFGVLISFAYPLEEGLGEIVVATTRIETMLGDTAIAVHPEDERYKHLHGRYAVHPFNGRKLKIICDAELVDPTFGTGAVKITPAHDPNDFEVGKRHNLEFINIFTDDGKINSNGGAQFDGMPRFTARVAVIEALKEKGLYKDTKKNEMSLGVCSRTNDVVEPMIKPQWFVNCSTMAKAGLDAVRSKKIEIIPQQYEQDWYRWLENIRDWCVSRQLWWGHRIPAWYVTLEDDLDKNLGSNNDRWIVARNESDAKLEAQKKYVGMKLRLDQDPDVLDTWFSSGLFPLTVLGWPSDTTDLRAFYPTSVLETGLDILFFWVARMVMMGMQLGGDVPFQKVYLHPMIRDAHGRKMSKSLGNVVDPLEVINGMSLDGLLKRLEEGNLDPNELNIARDGKTKDFPDGIAECGTDALRFALISYTSQSDRINLDIKRVVGYRQWCNKLWNAIRFAMGKLGDDYIPPATVDVSLMPPICKWILSVLNKAVGKTVTSLEAYKLSDATSAIYSWWQYELCDVFIEAIKPYFSDSQEFESARAASRDTLWICLETGLRLLHPFMPYVTEELWQRLPQPKDSSRRKDSIMISEYPSLVEEWSNGGVENEMDIVLDAVNKIRSLKPPTDSNERRPAFALCRGQEVAATIQCYQSLIVCLSSISHLKILTESDETPADCATAVVNKDLSVYLQLQGDLNEDAEREKLRKKKDEIQKLQNALAQKMDASGYREKAPQSVQEEDMRKLTALLEQLEVISEAEKKLDSN

SEQ ID NO: 163776 - protein, 411 aa, Zea Mays
MIRDAHGRKMSKSLGNVVDPLEVINGMSLDGLLKRLEEGNLDPNELNIARDGKTKDFPDGIAECGTDALRFALISYTSQSDRINLDIKRVVGYRQWCNKLWNAIRFAMGKLGDDYIPPATVDVSLMPPICKWILSVLNKAVGKTVTSLEAYKLSDATSAIYSWWQYELCDVFIEAIKPYFSDSQEFESARAASRDTLWICLETGLRLLHPFMPYVTEELWQRLPQPKDSSRRKDSIMISEYPSLVEEWSNGGVENEMDIVLDAVNKIRSLKPPTDSNERRPAFALCRGQEVAATIQCYQSLIVCLSSISHLKILTESDETPADCATAVVNKDLSVYLQLQGDLNEDAEREKLRKKKDEIQKLQNALAQKMDASGYREKAPQSVQEEDMRKLTALLEQLEVISEAEKKLDSN

SEQ ID NO: 163777 - protein, 127 aa, Zea Mays
MSFLSYSFPYRHQILTVVYTYVLCELGGGEERNSSASHTLCLTKCLNQNLSSHPQFGLIMILRHLLRRTLQRCLLSFVHKQLIQRARKVTGPWMEVWEVARHCHTAKDFVQCIFCLKILPSRIKRFK

SEQ ID NO: 163778 - protein, 111 aa, Zea Mays
MFESEFIIASAVWFNHVVPKSGRFSLPLICTEIHGSRRGAGNVEILRHLLRRTLQRCLLSFVHKQLIQRARKVTGPWMEVWEVARHCHTAKDFVQCIFCLKILPSRIKRFK

SEQ ID NO: 163779 - protein, 263 aa, Zea Mays
MEMGDSFEYYWEMQQYLESEELSLYMGTQDDALSCYDSSSPDGSISNSSWAPAGVAATASEKREGPGGAAAANKNILMERDRRRKLNEKLYALRSVVPNITKMDKASIIKDAIEYIEQLQAEERRALQALEAGEGARCGGHGHGEEARVVLQQPAAAPAPVEVLELRVSEVGDRVLVVNVTCSKGRDAMARVCRAVEELRLRVITASVTSVAGCLMHTIFVEVRRRQVDSDQTNRIQIKHMIEAALAQLDDASASPPSVMSYY

SEQ ID NO: 163780 - protein, 271 aa, Zea Mays
MEMGDSFEYYWEMQQYLESEELSLYMGTQDDALSCYDSSSPDGSISNSSWAPAGVAATASEKREGPGGAAAANKNILMERDRRRKLNEKLYALRSVVPNITKMDKASIIKDAIEYIEQLQAEERRALQALEAGEGARCGGHGHGEEARVVLQQPAAAPAPVEVLELRVSEVGDRVLVVNVTCSKGRDAMARVCRAVEELRLRVITASVTSVAGCLMHTIFVEVRRRQASTSSSIYVRIVHCLRSKHRVLCFFLSSFRMLRNLGDVGFDRIV

SEQ ID NO: 163781 - protein, 156 aa, Zea Mays
MDKASIIKDAIEYIEQLQAEERRALQALEAGEGARCGGHGHGEEARVVLQQPAAAPAPVEVLELRVSEVGDRVLVVNVTCSKGRDAMARVCRAVEELRLRVITASVTSVAGCLMHTIFVEVDSDQTNRIQIKHMIEAALAQLDDASASPPSVMSYY

SEQ ID NO: 163782 - protein, 120 aa, Zea Mays
MKAAEDAAGPEATPTAAAQTVWYDPMSSPQAPAPQQQPAIEAAAPTSPSVSSEARPLRVYADGIYDLFHFGHARALEQAKKSFPNTYLLVGCCSDEITHMYKGKTVMTEDERYESLRHCK

SEQ ID NO: 163783 - protein, 391 aa, Zea Mays
MPSGCSVSSLAARFAFFPPEPATYAVRKDEATGRLVASGVPRDNAMDVLLVDTSRGNKVVAFYFRNPCARLTLLYSHGNAADLGQLYDLFVQLKVNLKINLMGYDYSGYGASTGKVHLQASWMSKLSISLLWHDMQPSEENTYADIEAVYQCLETEYGISQEDIILYGQSVGSGPTLHLASRLPRLRGVVLHSAILSGLRVVCHVNFTFCFDIYKNVKKIKKVKCPVLVIHGTDDDVVDWSHGKELWRLAREPHDPLWIKGGGHCNLELYPDFIRHLSRFVREMETVTTKARLRKIRPALHQLRKKAAHRASTAATTTTTTTFTANCCCRVRVRKPTCPSCGSFGCGCCGPLRSCLALRFPRCCRPPAACFTCGGCCWSCRCRSCFKCCCC

SEQ ID NO: 163784 - protein, 349 aa, Zea Mays
MPSGCSVSSLAARFAFFPPEPATYAVRKDEATGRLVASGVPRDNAMDVLLVDTSRGNKVVAFYFRNPCARLTLLYSHGNAADLGQLYDLFVQLKVNLKINLMGYDYSGYGASTGKPSEENTYADIEAVYQCLETEYGISQEDIILYGQSVGSGPTLHLASRLPRLRGVVLHSAILSGLRVVCHVNFTFCFDIYKNVKKIKKVKCPVLVIHGTDDDVVDWSHGKELWRLAREPHDPLWIKGGGHCNLELYPDFIRHLSRFVREMETVTTKARLRKIRPALHQLRKKAAHRASTAATTTTTTTFTANCCCRVRVRKPTCPSCGSFGCGCCGPLRSCLALRFPRSCFKCCCC

SEQ ID NO: 163785 - protein, 368 aa, Zea Mays
MSERCLRCRRGARCPVSRRGSPSSRRSRRRTPSGRTRPRAASSPPACRGTTPWTSCSSTPAGGTRWWPSTSGTPARASPCSTRTATLPTSASCTTSLCSSRYDYSGYGASTGKPSEENTYADIEAVYQCLETEYGISQEDIILYGQSVGSGPTLHLASRLPRLRGVVLHSAILSGLRVVCHVNFTFCFDIYKNVKKIKKVKCPVLVIHGTDDDVVDWSHGKELWRLAREPHDPLWIKGGGHCNLELYPDFIRHLSRFVREMETVTTKARLRKIRPALHQLRKKAAHRASTAATTTTTTTFTANCCCRVRVRKPTCPSCGSFGCGCCGPLRSCLALRFPRCCRPPAACFTCGGCCWSCRCRSCFKCCCC

SEQ ID NO: 163786 - protein, 151 aa, Zea Mays
MAGLDLGTSSYLHHHHHQSLHLHHEDGGRPPGSKNKPKPPVIITRESANALRAHILEVAAGCDVFEALTAYARRRQRGVCVLSAAGTVANVTLRQPQSSQAGPASPAVATLHGRFEILSLAGSFLPPPAPPGATSLAAFLAGGQGQVVGGS

SEQ ID NO: 163787 - protein, 258 aa, Zea Mays
MLQSVLSQQQNVKQRSASLRFVQGRKKLEEAFQHGKHAIDDLVNVAKALRSMPVVDLHIPTLCLVGSPNVGKSSLVRILSSGKPEVCSYPFTTRGILMGHIVSNQERFQVTDTPGLLTRHDDDRNNIERLTLAVLSYLPIAVLYVHDLSEDCGTSVADQYITYKHIKDRFGDRLWLDVISKCDLLGKKEPISFHDADEDVARYRRLGPEGALQVSVQTEIGVKQLKERVHELLTSQMARIKSSKAEHETHEVGTSVVY

SEQ ID NO: 163788 - protein, 448 aa, Zea Mays
MRATATAGGRAVFHLQHLRPRPPWRALPPAATTHLSRSAPARRADHRCLPKGVSLCRRAHATCSYSLDDKLQGELDDTQGEQRKLETVGAFQKIPMVMPATDILMSAQRKSRNVPPTKGIANIAKRERNKGAKQLDALMKELSVPLRTYTENFPKRRDLHPYERSLIELTFGEGYYEQVLGRVDTLRKRITSVGKQHASVCAKSTTKREAEERLTEGRKKLEEAFQHGKHAIDDLVNALRSMPVVDLHIPTLCLVGSPNVGKSSLVRILSSGKPEVCSYPFTTRGILMGHIVSNQERFQVTDTPGLLTRHDDDRNNIERLTLAVLSYLPIAVLYVHDLSEDCGTSVADQYITYKHIKDRFGDRLWLDVISKCDLLGKKEPISFHDADEDVARYRRLGPEGALQVSVQTEIGVKQLKERVHELLTSQMARIKSSKAEHETHEVGTSVVY

SEQ ID NO: 163789 - protein, 524 aa, Zea Mays
MHEYRTTEPQFESGKQGGYVLYRLFWKPEEKTERSSPKEMDRSGNSPTTIRSSRDNQEANEEANTPLNKKSLESALHDPIELPNSAETPAGPRKMCLADRNDNLVATAPVVSHIPFQGHAAGVAKVDPSAAASAHFVNPQNGNDDCNNFMSDFTPILPHENAFFTGTQQGAFGFDGNGIMNHPDALDAFLNQTLVDTDEHSSTTSKVQYDSDIPTEFANHWNMQDEHQDWWEKLDFEPYEPTLLPYDTTDLDVLSVDSGADSFNDLFNVTGITLRPQQLDSTVQPDCVFPDQGTALRRLKLQVVECGESITKDESEDEVSCVESPNYFDESVEFAAEKGVASYGDGADSTGIVIRSRYPAPSSSSESSFTQQGTAMRRLRLQLGLNEGTCPSSGDSSSCIVDESESQQKAEIEEDASTNLAGSVDNLPGNSHDDEQKDIPEHGVKSVLRLRKTSAESLKDVKQEDCLEPDGRAPMQRVGFQSSIIWLVLSVAVLLLLYCGVWMSMICILVRCFAHMGSWHQPDV

SEQ ID NO: 163790 - protein, 504 aa, Zea Mays
MALSKELNPDFGVKPLVLSACTSPCVTMADDLNPDPSECSVDSPCWRGTASRLSPFDGLPTSIVQSVKQELVPIDAGKEQSSTTDCEAPTKLQNLVCSKSTQNHSQSHVKLGLSKEPGDICANITQYSHRKKHFAEHSAVNCNADQHCLAVIDDCIKRSGLNSAAPDFVPLAVRKSNTSDGSCSSSGTNVSGILKEINSLSEVLCNNYSDEIKLEEHDHSLLQSVIGNLQSYLHKASKVPAMVDSDKSGGLKACYAQNAVSKPVAGDYNGSFTADNGKGISISNLGDSSPLVGDLRKKSVTGYQPALSNFPKELSWEERSQALIYKKLWFDAERTNCALKYQLKQTRVEIDLESSTAHIGGGPRNSSFHLCDVGVDPSSSYGSAITCPPMMLKGHPGERKSHNLLSAADHIQSGDSSALSRPKGYIAVPENIEDGYFLSGPEETGVRRHARPGLQSRPLGRLNTSTSDGMSSSYVTGRDDILRGSCEFGSSDWEHVLKEEIGST

SEQ ID NO: 163791 - protein, 487 aa, Zea Mays
MPSSTSAGGGAIPAGPPSTLSPNAAPYTFLARQSRAPPGRLQDGDAPRLIDNNFVLYGEDNSSYSVPLAAQSGMKQSDTVYSSSSHGTHQGKGSRQPRVTIRSPPNKTSETNNTIFGSVSKLAIRKNDESNKETGKHVSFSRNLQLGSPAHGNGNSNGAMALSKELNPDFGVKPLVLSACTSPCVTMADDLNPDPSECSVDSPCWRGTASRLSPFDGLPTSIVQSVKQELVPIDAGKEQSSTTDCEAPTKLQNLVCSKSTQNHSQSHVKLGLSKEPGDICANITQYSHRKKHFAEHSAVNCNADQHCLAVIDDCIKRSGLNSAAPDFVPLAVRKSNTSDGSCSSSGTNVSGILKEINSLSEVLCNNYSDEIKLEEHDHSLLQSVIGNLQSYLHKASKVPAMVDSDKSGGLKACYAQNAVSKPVAGDYNGSFTADNGKGISISNLGDSSPLVGDLRKKSVTGYQVTFPTRLRKFCYFERGEYLHFVSQ

SEQ ID NO: 163792 - protein, 70 aa, Zea Mays
MVADDDTVAGQIGGSEVAIPSTDPIIIDSDPDVAEVEETDTHTSSRVRNRASTSDMWNDFDKRTHLLVLG

SEQ ID NO: 163793 - protein, 62 aa, Zea Mays
MGKPEPGYSICEKTIAHWEWRDGGSGVYPPGTWLDGGVPYSRVARTGSRSGGPVGMVDICKG

SEQ ID NO: 163794 - protein, 242 aa, Zea Mays
MRKQLGAAGLLAELRMGFRQLADPIAPPPVRLSPVPCGLRPCPTPNALPLPSYGSGQPPACPPCPAVPCPGAQPNGQRRERTKYESGFQKRKKQKRIEGLIQSQKGAMDRFVIKESQVSPVNQPADGGPAIDSTAANNEVDDVPIDNTNVGMGNNSDNLNTSASMNDVTVASAERSFSKLKLLKSYLRSTMLQQRLTDLAQISLESELLEKIEYERIIEEFISSNTKKNEVVQINMIQQSVE

SEQ ID NO: 163795 - protein, 250 aa, Zea Mays
MDTDLHHLLRSNQQLTDDHCQYFVYQLLRGLKYVHSANVLHRDLRPSNMLLNAKCDLKIGDFGLARTTTETDFMMEYVVTRWYRAPELLLNCSEYTQAIDMWSVGCIFGEMVTREPLFPGKDYVHQLRLITELVGSPDDTSLGFLRSDHARRYVRSLPQHPKQQFRVRFPTMSSGAMDLLERMLVFDPSKRITVDEALCHPYLASLHEVNDEPICPAPFSFDFEQPSLTEEAIKELIWKESLKFNPDPIH

SEQ ID NO: 163796 - protein, 232 aa, Zea Mays
MDTDLHHLLRSNQQLTDDHCQYFVYQLLRGLKYVHSANVLHRDLRPSNMLLNAKCDLKIGDFGLARTTTETDFMMEYVVTRWYRAPELLLNCSEYTQAIDMWSVGCIFGEMVTREPLFPDDTSLGFLRSDHARRYVRSLPQHPKQQFRVRFPTMSSGAMDLLERMLVFDPSKRITVDEALCHPYLASLHEVNDEPICPAPFSFDFEQPSLTEEAIKELIWKESLKFNPDPIH

SEQ ID NO: 163797 - protein, 1848 aa, Zea Mays
MRGSRTRRPRWPRSSSCSSASSAPTRSQMSVIQIEHAETMERGKPKPGGLSDPRLGTIDRKIKCETCMAGMAECPGHFGHLELAKPMFHIGFIKTVLSIMRCVCFNCSKILADEDETKFKQALKIRNPKNRLKRIYDACKSKKVCAGGDDLDVQEQDTDEPIKKRGGCGAQQPNITVDGMKMVAEFKAPKKKTDDQDQLPEPVERKQILSAERVLNVLKRISDEDCLLLGLNPKYARPDWMILQVLPVPPPPVRPSVMMDTSSRSEDDLTHQLAMIIRHNENLRRQERNGAPAHIITEFAQLLQFHIATYFDNDLPGQPRATQRSGRPIKSICSRLKAKEGRIRGNLMGKRVDFSARTVITPDPNINIDELGVPWSIALNLTYPETVTPYNIERLKELVEYGPHPPPGKTGAKYIIREDGQRLDLRYVKKSSDQHLELGYKVERHLNDGDFVLFNRQPSLHKMSIMGHRIKIMPYSTFRLNLSVTSPYNADFDGDEMNMHVPQSFETRAEVLELMMVPKCIVSPQSNRPVMGIVQDTLLGCRKITKRDTLIEKDVFMNILMWWQDFDGKIPAPTILKPRPIWTGKQVFNLIIPKQINLIRFSAWHSEEEKGFITPGDTMVRIEKGELLSGTLCKKSLGTGSGSLIHVIWEEVGPDAARKFLGHTQWLVNYWLLQNGFSIGIGDTIADASTMETINDTISKAKNAVKELIKKAHEKQLEAEPGRTMMESFENRVNQVLNKARDDAGSSAQNSLSESNNLKAMVTAGSKGSFINISQMTACVGQQNVEGKRIPFGFIDRTLPHFTKDDYGPESRGFVENSYLRGLTPQEFFFHAMGGREGLIDTAVKTSETGYIQRRLVKAMEDIMVKYDGTVRNSLGDVIQFLYGEDGMDAVWIESQKLDSLKMKKPEFDNVFRYELDDENWRPNYMLPEHVDDLKTIREFRNVFEAEVQKLEADRYQLGSEITTTGDNSWPMPVNLKRLIWNAQKTFKIDFRRPSDMHPMEIVEAIDKLQERLKVVPGDDAMSIEAQKNATLFFNILLRSTFASKRVLKEYRLTKEAFEWVIGEIESRFLQSLVAPGEMIGCVAAQSIGEPATQMTLNTFHYAGVSAKNVTLGVPRLREIINVAKKIKTPSLSVYLKPQVNQKKELAKNVQCALEYTTLRSVTHATEIWYDPDPLGTIIEEDTEFVQSYYEMPDEDIDPDKISPWLLRIELNREMMVDKKLSMADIAEKINREFDDDLSCIFNDDNADKLILRIRITNDEAPKGEIQDESAEDDVFLKKIEGNMLTEMALRGIPDINKVFIKEGKVNTFYQDDGFKAANEWMLDTEGVNLLAVMCHEDVDATRTTSNHLIEVIEVLGIEAVRRSLLDELRVVISFDGSYVNYRHLAILCDTMTYRGHLMAITRHGINRNDTGPLMRCSFEETVDILLDAAVYAESDHLRGVTENIMLGQLAPIGTGGCALYLNDQMLQQAIELQLPSYVEGLDFGMTPARSPITGTPYHEGMMSPSYLLSPNIRASPINTDASFSPYVGHMAFSPFPSPGGYSPSSGGYSPSSPVFTPEKGYSPLSPSYSPASPSYSPTSPSYTPGSPTYSPTSPNYSPTSPTYSPTSPSYSPTSPSYSPTSPSYSPTSPSYSPTSPSYSPTSPSYSPTSPVYSPTSPAYSPTSPAYSPTSPSYSPTSPSYSPTSPSYSPTSPSYSPTSPSYSPTSPSYSPTSPAYSPTSPGYSPTSPSYSPTSPSYSPTSPSYNPSSAKYSPSHAYSPSSPRMSPYSQTSPSYSPTSPTYSPTSPSYSQPSPSYSPTSPFNTSGGPSPDYSPTSPNYSPSGSYSPTAPGYSPSSTGQGNDKDDKSAR

SEQ ID NO: 163798 - protein, 1745 aa, Zea Mays
MDARFPYSPAEVAKVEFVQFGILSPDEIRQMSVIQIEHAETMERGKPKPGGLSDPRLGTIDRKIKCETCMAGMAECPGHFGHLELAKPMFHIGFIKTVLSIMRCVCFNCSKILADEDETKFKQALKIRNPKNRLKRIYDACKSKKVCAGGDDLDVQEQDTDEPIKKRGGCGAQQPNITVDGMKMVAEFKAPKKKTDDQDQLPEPVERKQILSAERVLNVLKRISDEDCLLLGLNPKYARPDWMILQVLPVPPPPVRPSVMMDTSSRSEDDLTHQLAMIIRHNENLRRQERNGAPAHIITEFAQLLQFHIATYFDNDLPGQPRATQRSGRPIKSICSRLKAKEGRIRGNLMGKRVDFSARTVITPDPNINIDELGVPWSIALNLTYPETVTPYNIERLKELVEYGPHPPPGKTGAKYIIREDGQRLDLRYVKKSSDQHLELGYKVERHLNDGDFVLFNRQPSLHKMSIMGHRIKIMPYSTFRLNLSVTSPYNADFDGDEMNMHVPQSFETRAEVLELMMVPKCIVSPQSNRPVMGIVQDTLLGCRKITKRDTLIEKDVFMNILMWWQDFDGKIPAPTILKPRPIWTGKQVFNLIIPKQINLIRFSAWHSEEEKGFITPGDTMVRIEKGELLSGTLCKKSLGTGSGSLIHVIWEEVGPDAARKFLGHTQWLVNYWLLQNGFSIGIGDTIADASTMETINDTISKAKNAVKELIKKAHEKQLEAEPGRTMMESFENRVNQVLNKARDDAGSSAQNSLSESNNLKAMVTAGSKGSFINISQMTACVGQQNVEGKRIPFGFIDRTLPHFTKDDYGPESRGFVENSYLRGLTPQEFFFHAMGGREGLIDTAVKTSETGYIQRRLVKAMEDIMVKYDGTVRNSLGDVIQFLYGEDGMDAVWIESQKLDSLKMKKPEFDNVFRYELDDENWRPNYMLPEHVDDLKTIREFRNVFEAEVQKLEADRYQLGSEITTTGDNSWPMPVNLKRLIWNAQKTFKIDFRRPSDMHPMEIVEAIDKLQERLKVVPGDDAMSIEAQKNATLFFNILLRSTFASKRVLKEYRLTKEAFEWVIGEIESRFLQSLVAPGEMIGCVAAQSIGEPATQMTLNTFHYAGVSAKNVTLGVPRLREIINVAKKIKTPSLSVYLKPQVNQKKELAKNVQCALEYTTLRSVTHATEIWYDPDPLGTIIEEDTEFVQSYYEMPDEDIDPDKISPWLLRIELNREMMVDKKLSMADIAEKINREFDDDLSCIFNDDNADKLILRIRITNDEAPKGEIQDESAEDDVFLKKIEGNMLTEMALRGIPDINKVFIKEGKVNTFYQDDGFKAANEWMLDTEGVNLLAVMCHEDVDATRTTSNHLIEVIEVLGIEAVRRSLLDELRVVISFDGSYVNYRHLAILCDTMTYRGHLMAITRHGINRNDTGPLMRCSFEETVDILLDAAVYAESDHLRGVTENIMLGQLAPIGTGGCALYLNDQMLQQAIELQLPSYVEGLDFGMTPARSPITGTPYHEGMMSPSYLLSPNIRASPINTDASFSPYVGHMAFSPFPSPGGYSPSSGGYSPSSPVFTPEKGYSPLSPSYSPASPSYSPTSPSYTPGSPTYSPTSPNYSPTSPTYSPTSPSYSPTSPSYSPTSPSYSPTSPSYSPTSPSYNPSSAKYSPSHAYSPSSPRMSPYSQTSPSYSPTSPTYSPTSPSYSQPSPSYSPTSPFNTSGGPSPDYSPTSPNYSPSGSYSPTAPGYSPSSTGQGNDKDDKSAR

SEQ ID NO: 163799 - protein, 1805 aa, Zea Mays
MDARFPYSPAEVAKVEFVQFGILSPDEIRQMSVIQIEHAETMERGKPKPGGLSDPRLGTIDRKIKCETCMAGMAECPGHFGHLELAKPMFHIGFIKTVLSIMRCVCFNCSKILADEDETKFKQALKIRNPKNRLKRIYDACKSKKVCAGGDDLDVQEQDTDEPIKKRGGCGAQQPNITVDGMKMVAEFKAPKKKTDDQDQLPEPVERKQILSAERVLNVLKRISDEDCLLLGLNPKYARPDWMILQVLPVPPPPVRPSVMMDTSSRSEDDLTHQLAMIIRHNENLRRQERNGAPAHIITEFAQLLQFHIATYFDNDLPGQPRATQRSGRPIKSICSRLKAKEGRIRGNLMGKRVDFSARTVITPDPNINIDELGVPWSIALNLTYPETVTPYNIERLKELVEYGPHPPPGKTGAKYIIREDGQRLDLRYVKKSSDQHLNDGDFVLFNRQPSLHKMSIMGHRIKIMPYSTFRLNLSVTSPYNADFDGDEMNMHVPQSFETRAEVLELMMVPKCIVSPQSNRPVMGIVQDTLLGCRKITKRDTLIEKDVFMNILMWWQDFDGKIPAPTILKPRPIWTGKQVFNLIIPKQINLIRFSAWHSEEEKGFITPGDTMVRIEKGELLSGTLCKKSLGTGSGSLIHVIWEEVGPDAARKFLGHTQWLVNYWLLQNGFSIGIGDTIADASTMETINDTISKAKNAVKELIKKAHEKQLEAEPGRTMMESFENRVNQVLNKARDDAGSSAQNSLSESNNLKAMVTAGSKGSFINISQMTACVGQQNVEGKRIPFGFIDRTLPHFTKDDYGPESRGFVENSYLRGLTPQEFFFHAMGGREGLIDTAVKTSETGYIQRRLVKAMEDIMVKYDGTVRNSLGDVIQFLYGEDGMDAVWIESQKLDSLKMKKPEFDNVFRYELDDENWRPNYMLPEHVDDLKTIREFRNVFEAEVQKLEADRYQLGSEITTTGDNSWPMPVNLKRLIWNAQKTFKIDFRRPSDMHPMEIVEAIDKLQERLKVVPGDDAMSIEAQKNATLFFNILLRSTFASKRVLKEYRLTKEAFEWVIGEIESRFLQSLVAPGEMIGCVAAQSIGEPATQMTLNTFHYAGVSAKNVTLGVPRLREIINVAKKIKTPSLSVYLKPQVNQKKELAKNVQCALEYTTLRSVTHATEIWYDPDPLGTIIEEDTEFVQSYYEMPDEDIDPDKISPWLLRIELNREMMVDKKLSMADIAEKINREFDDDLSCIFNDDNADKLILRIRITNDEAPKGEIQDESAEDDVFLKKIEGNMLTEMALRGIPDINKVFIKEGKVNTFYQDDGFKAANEWMLDTEGVNLLAVMCHEDVDATRTTSNHLIEVIEVLGIEAVRRSLLDELRVVISFDGSYVNYRHLAILCDTMTYRGHLMAITRHGINRNDTGPLMRCSFEETVDILLDAAVYAESDHLRGVTENIMLGQLAPIGTGGCALYLNDQMLQQAIELQLPSYVEGLDFGMTPARSPITGTPYHEGMMSPSYLLSPNIRASPINTDASFSPYVGHMAFSPFPSPGGYSPSSGGYSPSSPVFTPEKGYSPLSPSYSPASPSYSPTSPSYTPGSPTYSPTSPNYSPTSPTYSPTSPSYSPTSPVYSPTSPAYSPTSPAYSPTSPSYSPTSPSYSPTSPSYSPTSPSYSPTSPSYSPTSPSYSPTSPAYSPTSPGYSPTSPSYSPTSPSYSPTSPSYNPSSAKYSPSHAYSPSSPRMSPYSQTSPSYSPTSPTYSPTSPSYSQPSPSYSPTSPFNTSGGPSPDYSPTSPNYSPSGSYSPTAPGYSPSSTGQGNDKDDKSAR

SEQ ID NO: 163800 - protein, 1632 aa, Zea Mays
MKMVAEFKAPKKKTDDQDQLPEPVERKQILSAERVLNVLKRISDEDCLLLGLNPKYARPDWMILQVLPVPPPPVRPSVMMDTSSRSEDDLTHQLAMIIRHNENLRRQERNGAPAHIITEFAQLLQFHIATYFDNDLPGQPRATQRSGRPIKSICSRLKAKEGRIRGNLMGKRVDFSARTVITPDPNINIDELGVPWSIALNLTYPETVTPYNIERLKELVEYGPHPPPGKTGAKYIIREDGQRLDLRYVKKSSDQHLELGYKVERHLNDGDFVLFNRQPSLHKMSIMGHRIKIMPYSTFRLNLSVTSPYNADFDGDEMNMHVPQSFETRAEVLELMMVPKCIVSPQSNRPVMGIVQDTLLGCRKITKRDTLIEKDVFMNILMWWQDFDGKIPAPTILKPRPIWTGKQVFNLIIPKQINLIRFSAWHSEEEKGFITPGDTMVRIEKGELLSGTLCKKSLGTGSGSLIHVIWEEVGPDAARKFLGHTQWLVNYWLLQNGFSIGIGDTIADASTMETINDTISKAKNAVKELIKKAHEKQLEAEPGRTMMESFENRVNQVLNKARDDAGSSAQNSLSESNNLKAMVTAGSKGSFINISQMTACVGQQNVEGKRIPFGFIDRTLPHFTKDDYGPESRGFVENSYLRGLTPQEFFFHAMGGREGLIDTAVKTSETGYIQRRLVKAMEDIMVKYDGTVRNSLGDVIQFLYGEDGMDAVWIESQKLDSLKMKKPEFDNVFRYELDDENWRPNYMLPEHVDDLKTIREFRNVFEAEVQKLEADRYQLGSEITTTGDNSWPMPVNLKRLIWNAQKTFKIDFRRPSDMHPMEIVEAIDKLQERLKVVPGDDAMSIEAQKNATLFFNILLRSTFASKRVLKEYRLTKEAFEWVIGEIESRFLQSLVAPGEMIGCVAAQSIGEPATQMTLNTFHYAGVSAKNVTLGVPRLREIINVAKKIKTPSLSVYLKPQVNQKKELAKNVQCALEYTTLRSVTHATEIWYDPDPLGTIIEEDTEFVQSYYEMPDEDIDPDKISPWLLRIELNREMMVDKKLSMADIAEKINREFDDDLSCIFNDDNADKLILRIRITNDEAPKGEIQDESAEDDVFLKKIEGNMLTEMALRGIPDINKVFIKEGKVNTFYQDDGFKAANEWMLDTEGVNLLAVMCHEDVDATRTTSNHLIEVIEVLGIEAVRRSLLDELRVVISFDGSYVNYRHLAILCDTMTYRGHLMAITRHGINRNDTGPLMRCSFEETVDILLDAAVYAESDHLRGVTENIMLGQLAPIGTGGCALYLNDQMLQQAIELQLPSYVEGLDFGMTPARSPITGTPYHEGMMSPSYLLSPNIRASPINTDASFSPYVGHMAFSPFPSPGGYSPSSGGYSPSSPVFTPEKGYSPLSPSYSPASPSYSPTSPSYTPGSPTYSPTSPNYSPTSPTYSPTSPSYSPTSPSYSPTSPSYSPTSPSYSPTSPSYSPTSPSYSPTSPVYSPTSPAYSPTSPAYSPTSPSYSPTSPSYSPTSPSYSPTSPSYSPTSPSYSPTSPSYSPTSPAYSPTSPGYSPTSPSYSPTSPSYSPTSPTYSPTSPSYSQPSPSYSPTSPFNTSGGPSPDYSPTSPNYSPSGSYSPTAPGYSPSSTGQGNDKDDKSAR

SEQ ID NO: 163801 - protein, 546 aa, Zea Mays
MHGGAVDSRRGSTISSFCFPPLLAAELLDSILASSAWRDDPDDLDGGAGATAGVLLRDRRRRRRGVRAGVGGAAGGAVPGAVPDGAGHGWAKVERVGVRVGPVRRVGRRGEAADDALLQLVLLLHLAGVAAGRHRAGVRPGQPGQALGLRRLRLRHRRGPPRLPGRHTQVPLQEAGRQPPHADRRRRRRRLAQAPPPSPRRPRHALRRRRRQGRRRRGWVLQQEEQAQGAPPPHRPVPLPGPRGDQRGSGGGGEQQQQVAAGDADGRGGGEDGGADAADLGDHDHVLDGVRADDHLLGVAGHHHGPPRRGLVPDPRGLPHRLLRRLHPAHRARLRPPGGARRAPRQRQPARPHPAAADRRRPRALRRRHGGRRAHGGPPPPRRARFLRVRLRRRRAHVRVLAHPAVLPRGGGRGVHVHRPARLLPARVPQGDEDHEHGAVPQHPVAGILRQLRARRRRAQGHGRPPPLDRQRPQQGPPRQLLLAARRRLPRQPTSLPRRRPLVQVQGGPPRRRRQRQRRRDGRRAHAPLIHPCSIDRRGTRRTTLN

SEQ ID NO: 163802 - protein, 329 aa, Zea Mays
MPLRVSLFKWPPPHCTDSNLNLPGPRGDQRGSGGGGEQQQQVAAGDADGRGGGEDGGADAADLGDHDHVLDGVRADDHLLGVAGHHHGPPRRGLVPDPRGLPHRLLRRLHPAHRARLRPPGGARRAPRQRQPARPHPAAADRRRPRALRRRHGGRRAHGGPPPPRRARFLRVRLRRRRAHVRVLAHPAVLPRGGGRGVHVHRPARLLPARVPQGDEDHEHGAVPQHPVAGILRQLRARRRRAQGHGRPPPLDRQRPQQGPPRQLLLAARRRLPRQPTSLPRRRPLVQVQGGPPRRRRQRQRRRDGRRAHAPLIHPCSIDRRGTRRTTLN

SEQ ID NO: 163803 - protein, 312 aa, Zea Mays
MMGYCGIGLIGWSWKVTIPLRTSSWPPRAKLSTKAPPVSRRSWCSTVMPPCSADWLLHNTFAATMQRGSSSQLDYVLVPLGLAVMVGYHVWLLLRIRSRPETTVIGINAVNRRIWVRHIMEDPSGKHAVLAVQTLRNTIMASTVLASVAITLSSLVAALMASGAAAHGGLLLSAPGGGSEAALAAKFLAVLVCFLVAFLLNVQSIRYYSHTGLLVNVPLAAHRRPARAVGYVTAALNRGFYFWSLGVRAYYFSCPVFLWLFGPVPMCASCVAMVAALYFLDVNKEWEDKDDDGSEDEADGDGRSTATVCGGV

SEQ ID NO: 163804 - protein, 73 aa, Zea Mays
MMGYCGIGLIGWSWKVTIPLRTSSWPPRAKLSTKAPPVSRRSWCSTVMPPCSADWLLHNTFADNGKRSSPPWA

SEQ ID NO: 163805 - protein, 98 aa, Zea Mays
MVASRHALAARAGAGAGTAGRLASRWVAVLRNNWRSAEGEGTKHEGGGGGGGTTGERPLLPTRAMTLPAGMDNENPWRIGLSWREGYAKCTLRNLISP

SEQ ID NO: 163806 - protein, 58 aa, Zea Mays
MVASRHALAARAGAGAGTAGRLASRWVAVLRNNWRSAEGEGTKHEGGGGGGGTTGERV

SEQ ID NO: 163807 - protein, 52 aa, Zea Mays
MRPIHPIKGLDGETTKAWLTGNLIWVEKTENPAVILPDGVNKRGGGKMLNFH

SEQ ID NO: 163808 - protein, 1032 aa, Zea Mays
MKGLSSRTSALNTASECLHILRFWSRDYGRGISLAESSHSLTVLVSIVSFLQAELNISDKPANATGISSRNSGSANSKNSNIWDMKISAFSMLEDILSKVASNMTENLWQSVIEVLRKVMDFVTARNLVIESSIMSRFYTSFLRCLHLVLVDPKGPLSGHVAGFVANLQIFFVYGLRSSSPPTLAPKETRTDSKPRASRGRYRPPHLRNKERRENDSLEGQNSDSEYSWYDMSSSDSDLSDSDGYAKSGDRFRSSKARLAAILCIQDICHADPKLLTSQWPVLLPENDVLQQRKYQATLMTCLLFDPITKVRVEAASTIATMLERQALVLTQVAEYKESSKRGSFTTLSSSLGQILMQLHTGALYLIQRETQATLLAALFRVLILLISATPYARMPKELLPTVIKVLCSRLLNKHSNKTEHYAVLVTVLSCLETAFSKVPPTLDVFAVLTEDCCAGPSHEQEESNVIAFLLHCIEEEMHYSVRHGAFQVLRSAVHNYPSCANMIWEKLRDNVLNLLQIQSFEDQKYDANFGPPGAKEESSIKGRCLVAGIKVMDECLRVSSGFTGADDIKECRLLDIQQISDCTINKTIKSAPHFEMEAAGSSQNCTLDITLGINRWIEVIETHLPQGLSHGSAMVRTASLTCFAGMTSDVFFSLPENKRDYVTSSSVHAALNDMVPSVRSAACRAIGIVACFPQILSSSSLPGKFIDAIEFNTHNSSTPVRVTAAWALANLCSCIRFRALEVHTDPYAGVLSKSSISLLVEVALRLAKDSEKVKSNAVRALGYLSRFIRFNYHAGTINDPSDSVFYGDPVWLERMVQALMSCVTTGNVKVQWNVCHALSNLFMNDTLRLQDMPWASSVYSILLLLIRDSNNYKIKMHAAVALSVPVSRLDYGSSFPDVVRGLVHALESLNSNNSSLPSNFKQRDNLEKQLTFTALHLLSFVSPNDDPSLKDFLTKKSSFLEDWLRSLCASFNSSERQPLPTEATNDEDGFSPNVTQKGMLSSALQSLLGVYAGRTQQVITQRFEQLARSVA

SEQ ID NO: 163809 - protein, 837 aa, Zea Mays
MKGLSSRTSALNTASECLHILRFWSRDYGRGISLAESSHSLTVLVSIVSFLQAELNISDKPANATGISSRNSGSANSKNSNIWDMKISAFSMLEDILSKVASNMTENLWQSVIEVLRKVMDFVTARNLVIESSIMSRFYTSFLRCLHLVLVDPKGPLSGHVAGFVANLQIFFVYGLRSSSPPTLAPKETRTDSKPRASRGRYRPPHLRNKERRENDSLEGQNSDSEYSWYDMSSSDSDLSDSDGYAKSGDRFRSSKARLAAILCIQDICHADPKLLTSQWPVLLPENDVLQQRKYQATLMTCLLFDPITKVRVEAASTIATMLERQALVLTQVAEYKESSKRGSFTTLSSSLGQILMQLHTGALYLIQRETQATLLAALFRVLILLISATPYARMPKELLPTVIKVLCSRLLNKHSNKTEHYAVLVTVLSCLETAFSKVPPTLDVFAVLTEDCCAGPSHEQEESNVIAFLLHCIEEEMHYSVRHGAFQVLRSAVHNYPSCANMIWEKLRDNVLNLLQIQSFEDQKYDANFGPPGAKEESSIKGRCLVAGIKVMDECLRVSSGFTGADDIKECRLLDIQQISDCTINKTIKSAPHFEMEAAGSSQNCTLDITLGINRWIEVIETHLPQGLSHGSAMVRTASLTCFAGMTSDVFFSLPENKRDYVTSSSVHAALNDMVPSVRSAACRAIGIVACFPQILSSSSLPGKFIDAIEFNTHNSSTPVRVTAAWALANLCSCIRFRALEVHTDPYAGVGVLSKSSISLLVEVALRLAKDSEKVKSNAVRALGYLSRFIRFNYHAGTINDPSDSVFYGDPVWLERMVQALMSCVTTGNVKGIKCL

SEQ ID NO: 163810 - protein, 581 aa, Zea Mays
MSSSDSDLSDSDGYAKSGDRFRSSKARLAAILCIQDICHADPKLLTSQWPVLLPENDVLQQRKYQATLMTCLLFDPITKVRVEAASTIATMLERQALVLTQVAEYKESSKRGSFTTLSSSLGQILMQLHTGALYLIQRETQATLLAALFRVLILLISATPYARMPKELLPTVIKVLCSRLLNKHSNKTEHYAVLVTVLSCLETAFSKVPPTLDVFAVLTEDCCAGPSHEQEESNVIAFLLHCIEEEMHYSVRHGAFQVLRSAVHNYPSCANMIWEKLRDNVLNLLQIQSFEDQKYDANFGPPGAKEESSIKGRCLVAGIKVMDECLRVSSGFTGADDIKECRLLDIQQISDCTINKTIKSAPHFEMEAAGSSQNCTLDITLGINRWIEVIETHLPQGLSHGSAMVRTASLTCFAGMTSDVFFSLPENKRDYVTSSSVHAALNDMVPSVRSAACRAIGIVACFPQILSSSSLPGKFIDAIEFNTHNSSTPVRVTAAWALANLCSCIRFRALEVHTDPYAGVGVLSKSSISLLVEVALRLAKDSEKVKSNAVRALGYLSRFIRFNYHAGTINDPSFLWRSCVA

SEQ ID NO: 163811 - protein, 699 aa, Zea Mays
MLTGLVVLYVPKEHHGSRKDFVQPLLGALYLIQRETQATLLAALFRVLILLISATPYARMPKELLPTVIKVLCSRLLNKHSNKTEHYAVLVTVLSCLETAFSKVPPTLDVFAVLTEDCCAGPSHEQEESNVIAFLLHCIEEEMHYSVRHGAFQVLRSAVHNYPSCANMIWEKLRDNVLNLLQIQSFEDQKYDANFGPPGAKEESSIKGRCLVAGIKVMDECLRVSSGFTGADDIKECRLLDIQQISDCTINKTIKSAPHFEMEAAGSSQNCTLDITLGINRWIEVIETHLPQGLSHGSAMVRTASLTCFAGMTSDVFFSLPENKRDYVTSSSVHAALNDMVPSVRSAACRAIGIVACFPQILSSSSLPGKFIDAIEFNTHNSSTPVRVTAAWALANLCSCIRFRALEVHTDPYAGVGVLSKSSISLLVEVALRLAKDSEKVKSNAVRALGYLSRFIRFNYHAGTINDPSDSVFYGDPVWLERMVQALMSCVTTGNVKVQWNVCHALSNLFMNDTLRLQDMPWASSVYSILLLLIRDSNNYKIKMHAAVALSVPVSRLDYGSSFPDVVRGLVHALESLNSNNSSLPSNFKQRDNLEKQLTFTALHLLSFVSPNDDPSLKDFLTKKSSFLEDWLRSLCASFNSSERQPLPTEATNDEDGFSPNVTQKGMLSSALQSLLGVYAGRTQQVITQRFEQLARSVA

SEQ ID NO: 163812 - protein, 792 aa, Zea Mays
MKGLSSRTSALNTASECLHILRFWSRDYGRGISLAESSHSLTVLVSIVSFLQAELNISDKPANATGISSRNSGSANSKNSNIWDMKISAFSMLEDILSKVASNMTENLWQSVIEVLRKVMDFVTARNLVIESSIMSRFYTSFLRCLHLVLVDPKGPLSGHVAGFVANLQIFFVYGLRSSSPPTLAPKETRTDSKPRASRGRYRPPHLRNKERRENDSLEGQNSDSEYSWYDMSSSDSDLSDSDGYAKSGDRFRSSKARLAAILCIQDICHADPKLLTSQWPVLLPENDVLQQRKYQATLMTCLLFDPITKVRVEAASTIATMLERQALVLTQVAEYKESSKRGSFTTLSSSLGQILMQLHTGALYLIQRETQATLLAALFRVLILLISATPYARMPKELLPTVIKVLCSRLLNKHSNKTEHYAVLVTVLSCLETAFSKVPPTLDVFAVLTEDCCAGPSHEQEESNVIAFLLHCIEEEMHYSVRHGAFQVLRSAVHNYPSCANMIWEKLRDNVLNLLQIQSFEDQKYDANFGPPGAKEESSIKGRCLVAGIKVMDECLRVSSGFTGADDIKECRLLDIQQISDCTINKTIKSAPHFEMEAAGSSQNCTLDITLGINRWIEVIETHLPQGLSHGSAMVRTASLTCFAGMTSDVFFSLPENKRDYVTSSSVHAALNDMVPSVRSAACRAIGIVACFPQILSSSSLPGKFIDAIEFNTHNSSTPVRVTAAWALANLCSCIRFRALEVHTDPYAGVGVLSKSSISLLVEVALRLAKDSEKKRILSSGGIALNGGSDR

SEQ ID NO: 163813 - protein, 839 aa, Zea Mays
MKGLSSRTSALNTASECLHILRFWSRDYGRGISLAESSHSLTVLVSIVSFLQAELNISDKPANATGISSRNSGSANSKNSNIWDMKISAFSMLEDILSKVASNMTENLWQSVIEVLRKVMDFVTARNLVIESSIMSRFYTSFLRCLHLVLVDPKGPLSGHVAGFVANLQIFFVYGLRSSSPPTLAPKETRTDSKPRASRGRYRPPHLRNKERRENDSLEGQNSDSEYSWYDMSSSDSDLSDSDGYAKSGDRFRSSKARLAAILCIQDICHADPKLLTSQWPVLLPENDVLQQRKYQATLMTCLLFDPITKVRVEAASTIATMLERQALVLTQVAEYKESSKRGSFTTLSSSLGQILMQLHTGALYLIQRETQATLLAALFRVLILLISATPYARMPKELLPTVIKVLCSRLLNKHSNKTEHYAVLVTVLSCLETAFSKVPPTLDVFAVLTEDCCAGPSHEQEESNVIAFLLHCIEEEMHYSVRHGAFQVLRSAVHNYPSCANMIWEKLRDNVLNLLQIQSFEDQKYDANFGPPGAKEESSIKGRCLVAGIKVMDECLRVSSGFTGADDIKECRLLDIQQISDCTINKTIKSAPHFEMEAAGSSQNCTLDITLGINRWIEVIETHLPQGLSHGSAMVRTASLTCFAGMTSDVFFSLPENKRDYVTSSSVHAALNDMVPSVRSAACRAIGIVACFPQILSSSSLPGKFIDAIEFNTHNSSTPVRVTAAWALANLCSCIRFRALEVHTDPYAGVGVLSKSSISLLVEVALRLAKDSEKVKSNAVRALGYLSRFIRFNYHAGTINDPSNSDSVFYGDPVWLERMVQALMSCVTTGNVKGIKCL

SEQ ID NO: 163814 - protein, 917 aa, Zea Mays
MDFVTARNLVIESSIMSRFYTSFLRCLHLVLVDPKGPLSGHVAGFVANLQIFFVYGLRSSSPPTLAPKETRTDSKPRASRGRYRPPHLRNKERRENDSLEGQNSDSEYSWYDMSSSDSDLSDSDGYAKSGDRFRSSKARLAAILCIQDICHADPKLLTSQWPVLLPENDVLQQRKYQATLMTCLLFDPITKVRVEAASTIATMLERQALVLTQVAEYKESSKRGSFTTLSSSLGQILMQLHTGALYLIQRETQATLLAALFRVLILLISATPYARMPKELLPTVIKVLCSRLLNKHSNKTEHYAVLVTVLSCLETAFSKVPPTLDVFAVLTEDCCAGPSHEQEESNVIAFLLHCIEEEMHYSVRHGAFQVLRSAVHNYPSCANMIWEKLRDNVLNLLQIQSFEDQKYDANFGPPGAKEESSIKGRCLVAGIKVMDECLRVSSGFTGADDIKECRLLDIQQISDCTINKTIKSAPHFEMEAAGSSQNCTLDITLGINRWIEVIETHLPQGLSHGSAMVRTASLTCFAGMTSDVFFSLPENKRDYVTSSSVHAALNDMVPSVRSAACRAIGIVACFPQILSSSSLPGKFIDAIEFNTHNSSTPVRVTAAWALANLCSCIRFRALEVHTDPYAGVGVLSKSSISLLVEVALRLAKDSEKVKSNAVRALGYLSRFIRFNYHAGTINDPSNSDSVFYGDPVWLERMVQALMSCVTTGNVKVQWNVCHALSNLFMNDTLRLQDMPWASSVYSILLLLIRDSNNYKIKMHAAVALSVPVSRLDYGSSFPDVVRGLVHALESLNSNNSSLPSNFKQRDNLEKQLTFTALHLLSFVSPNDDPSLKDFLTKKSSFLEDWLRSLCASFNSSERQPLPTEATNDEDGFSPNVTQKGMLSSALQSLLGVYAGRTQQVITQRFEQLARSVA

SEQ ID NO: 163815 - protein, 812 aa, Zea Mays
MKGLSSRTSALNTASECLHILRFWSRDYGRGISLAESSHSLTVLVSIVSFLQAELNISDKPANATGISSRNSGSANSKNSNIWDMKISAFSMLEDILSKVASNMTENLWQSVIEVLRKVMDFVTARNLVIESSIMSRFYTSFLRCLHLVLVDPKGPLSGHVAGFVANLQIFFVYGLRSSSPPTLAPKETRTDSKPRASRGRYRPPHLRNKERRENDSLEGQNSDSEYSWYDMSSSDSDLSDSDGYAKSGDRFRSSKARLAAILCIQDICHADPKLLTSQWPVLLPENDVLQQRKYQATLMTCLLFDPITKVRVEAASTIATMLERQALVLTQVAEYKESSKRGSFTTLSSSLGQILMQLHTGALYLIQRETQATLLAALFRVLILLISATPYARMPKELLPTVIKVLCSRLLNKHSNKTEHYAVLVTVLSCLETAFSKVPPTLDVFAVLTEDCCAGPSHEQEESNVIAFLLHCIEEEMHYSVRHGAFQVLRSAVHNYPSCANMIWEKLRDNVLNLLQIQSFEDQKYDANFGPPGAKEESSIKGRCLVAGIKVMDECLRVSSGFTGADDIKECRLLDIQQISDCTINKTIKSAPHFEMEAAGSSQNCTLDITLGINRWIEVIETHLPQGLSHGSAMVRTASLTCFAGMTSDVFFSLPENKRDYVTSSSVHAALNDMVPSVRSAACRAIGIVACFPQILSSSSLPGKFIDAIEFNTHNSSTPVRVTAAWALANLCSCIRFRALEVHTDPYAGVGVLSKSSISLLVEVALRLAKDSEKVKSNAVRALGYLSRFIRFNYHAGTINDPSFLWRSCVA

SEQ ID NO: 163816 - protein, 774 aa, Zea Mays
MLTGLVVLYVPKEHHGSRKDFVQPLLGALYLIQRETQATLLAALFRVLILLISATPYARMPKELLPTVIKVLCSRLLNKHSNKTEHYAVLVTVLSCLETAFSKVPPTLDVFAVLTEDCCAGPSHEQEESNVIAFLLHCIEEEMHYSVRHGAFQVLRSAVHNYPSCANMIWEKLRDNVLNLLQIQSFEDQKYDANFGPPGAKEESSIKGRCLVAGIKVTAGAYGMCLAHMAREDLIPLIGIGIDRILPIWDIDRIPSIREISQVMDECLRVSSGFTGADDIKECRLLDIQQISDCTINKTIKSAPHFEMEAAGSSQNCTLDITLGINRWIEVIETHLPQGLSHGSAMVRTASLTCFAGMTSDVFFSLPENKRDYVTSSSVHAALNDMVPSVRSAACRAIGIVACFPQILSSSSLPGKFIDAIEFNTHNSSTPVRVTAAWALANLCSCIRFRALEVHTDPYAGTYFMLMVTVPVYIPIEHAYVFIIFLSGVGVLSKSSISLLVEVALRLAKDSEKVKSNAVRALGYLSRFIRFNYHAGTINDPSNSDSVFYGDPVWLERMVQALMSCVTTGNVKVQWNVCHALSNLFMNDTLRLQDMPWASSVYSILLLLIRDSNNYKIKMHAAVALSVPVSRLDYGSSFPDVVRGLVHALESLNSNNSSLPSNFKQRDNLEKQLTFTALHLLSFVSPNDDPSLKDFLTKKSSFLEDWLRSLCASFNSSERQPLPTEATNDEDGFSPNVTQKGMLSSALQSLLGVYAGRTQQVITQRFEQLARSVA

SEQ ID NO: 163817 - protein, 686 aa, Zea Mays
MPKELLPTVIKVLCSRLLNKHSNKTEHYAVLVTVLSCLETAFSKVPPTLDVFAVLTEDCCAGPSHEQEESNVIAFLLHCIEEEMHYSVRHGAFQVLRSAVHNYPSCANMIWEKLRDNVLNLLQIQSFEDQKYDANFGPPGAKEESSIKGRCLVAGIKVTAGAYGMCLAHMAREDLIPLIGIGIDRILPIWDIDRIPSIREISQVMDECLRVSSGFTGADDIKECRLLDIQQISDCTINKTIKSAPHFEMEAAGSSQNCTLDITLGINRWIEVIETHLPQGLSHGSAMVRTASLTCFAGMTSDVFFSLPENKRDYVTSSSVHAALNDMVPSVRSAACRAIGIVACFPQILSSSSLPGKFIDAIEFNTHNSSTPVRVTAAWALANLCSCIRFRALEVHTDPYAGVGVLSKSSISLLVEVALRLAKDSEKVKSNAVRALGYLSRFIRFNYHAGTINDPSDSVFYGDPVWLERMVQALMSCVTTGNVKVQWNVCHALSNLFMNDTLRLQDMPWASSVYSILLLLIRDSNNYKIKMHAAVALSVPVSRLDYGSSFPDVVRGLVHALESLNSNNSSLPSNFKQRDNLEKQLTFTALHLLSFVSPNDDPSLKDFLTKKSSFLEDWLRSLCASFNSSERQPLPTEATNDEDGFSPNVTQKGMLSSALQSLLGVYAGRTQQVITQRFEQLARSVA

SEQ ID NO: 163818 - protein, 217 aa, Zea Mays
MVQALMSCVTTGNVKVQWNVCHALSNLFMNDTLRLQDMPWASSVYSILLLLIRDSNNYKIKMHAAVALSVPVSRLDYGSSFPDVVRGLVHALESLNSNNSSLPSNFKQRDNLEKQLTFTALHLLSFVSPNDDPSLKDFLTKKSSFLEDWLRSLCASFNSSERQPLPTEATNDEDGFSPNVTQKGMLSSALQSLLGVYAGRTQQVITQRFEQLARSVA

SEQ ID NO: 163819 - protein, 110 aa, Zea Mays
MPQKLLIGCTFTALHLLSFVSPNDDPSLKDFLTKKSSFLEDWLRSLCASFNSSERQPLPTEATNDEDGFSPNVTQKGMLSSALQSLLGVYAGRTQQVITQRFEQLARSVA

SEQ ID NO: 163820 - protein, 437 aa, Zea Mays
MLHRDGGSTSSRHQRLPPFVYPSQVAATATQKLPFLPWNGNETWELGRASSRNLLSFPSQDAIQNPTRSRRSQGPLHILPPPSARFPDRAIAGARLGDLVGSRPVLPLRRRCVAVTRQSGLRIPKMASSNGEAEQQWIENIKSGGTVPCLAPENCPNGWATPPGDSFMVRGPEYLTNKVKIPGGEYLLKPLGFDWIKGPAKICEILKDSNHRVRKAIDDEVSRSNQPFVWAFNLQLPKDNFSAIFYFVSLEAIPEGSLMDQFLKGDDAFRNSRLKLIANIVKGPWIVRTAVGEQAICILGRALSCKYVQGSNFIEVDVDIGSSIVANAIVHLAFGYITTLTVDLAFLIESQTEPELPERLIGAVRFSELNPGSAGLFERRSEEHQESTQSRPVGFWQGFSQLLNNQGNTREPSPNLQNTNGTLRKEEANEDAKWVSS

SEQ ID NO: 163821 - protein, 308 aa, Zea Mays
MASSNGEAEQQWIENIKSGGTVPCLAPENCPNGWATPPGDSFMVRGPEYLTNKVKIPGGEYLLKPLGFDWIKGPAKICEILKDSNHRVRKAIDDEVSRSNQPFVWAFNLQLPKDNFSAIFYFVSLEAIPEGSLMDQFLKGDDAFRNSRLKLIANIVKGPWIVRTAVGEQAICILGRALSCKYVQGSNFIEVDVDIGSSIVANAIVHLAFGYITTLTVDLAFLIESQTEPELPERLIGAVRFSELNPGSAGLFERRSEEHQESTQSRPVGFWQGFSQLLNNQGNTREPSPNLQNTNGTLRKEEANEDAK

SEQ ID NO: 163822 - protein, 185 aa, Zea Mays
MEDSICAVRSMADFGLPLADDMIKDINRSLQIMSKTQPKRGLIQNPSWGFQSRKSSGTWDELGSTNGSSSRNYLSSMFNTAKQKASGLRWPQPNFATKDDTSENSASSSALESPQAGGQGASTPDTEKDELPISSRLSEGTAANRSLPATGVSETVEAYNKFKEEQELKLREWLRDSEEAVNDKD

SEQ ID NO: 163823 - protein, 108 aa, Zea Mays
MECIYIYWSYFAAFNNNTLLLLDSSSSPMAKFFNYTIVQGLLMLSMVLLASCVIHAHIISDLGGEHLEDKPIINIIISIWRQTTSEYCPVRFFCMRMVLCHLPLHGQS

SEQ ID NO: 163824 - protein, 91 aa, Zea Mays
MIRVRGFGFFLATKRDLTTSFLLPRLIPATIPSYLDKGYSNKIKGNILGFESMASAPRNAKNLIDETEVSLPPLSYQNKNPYLSLGSSLAR

SEQ ID NO: 163825 - protein, 77 aa, Zea Mays
MGHGMEKIYPLLILKLLGISVYCMAGMLYCITEQEVPFSGLQRKWCTHKVRASITKVCHEAKEIFQETKKPSWSWNA

SEQ ID NO: 163826 - protein, 80 aa, Zea Mays
MLMALQNSWGHGMEKIYPLLILKLLGISVYCMAGMLYCITEQEVPFSGCTHKVRASITKVCHEAKEIFQETKKPSWSWNA

SEQ ID NO: 163827 - protein, 76 aa, Zea Mays
MKELYHSLTHNCCMFCIMSFWLMELGLWVIDASSQIVFTWGRIHGFCDEHKLTKAHVLTLNTSFCLMTSCEYQCLY

SEQ ID NO: 163828 - protein, 85 aa, Zea Mays
MLMALQNSWGHGMEKIYPLLILKLLGISVYCMAGMLYCITEQEVPFSGLQRKWCTHKVRASITKVCHEAKEIFQETKKPSWSWNA

SEQ ID NO: 163829 - protein, 83 aa, Zea Mays
MKELYHSLTHNCCMFCIMSFWLMELGLWVIDASSQIVFTWGRIHGFCDEHKLTKAHVLTLNTSFCLMTSSCFRDMEWRRSTPS

SEQ ID NO: 163830 - protein, 67 aa, Zea Mays
MATHCPTTTWVVWRWSCTSGGSCSRSGGNILHLRAAESSRTRTAHADALTRLGWGFMLLTEIFGGSV

SEQ ID NO: 163831 - protein, 65 aa, Zea Mays
MECLKFYCMTMMKRRQHCRELPKLNVRQNRLYKELFDCATRSNSHDKHRTRNIQIYHSSQDCRGC

SEQ ID NO: 163832 - protein, 164 aa, Zea Mays
MSGGPLPTQPPRSLSLSPLPTPTPRSHHHLLASRSAEAIYKKLPTTQTRKAWGSRAPSSAGRNERGELLPLTRSESTSAEGSMFAHAVAMAFTRADDVSPLPAACGCCCLFLRLVLTAFSVYAPVDGLLLHYHLDVIIALVGRRHGCPVSSPSRRLIRCAICAC

SEQ ID NO: 163833 - protein, 160 aa, Zea Mays
MVHGCVHRRRRSQSTGAWCYVHGDQCKSWVQRQAPIPQDRWIPSRTRRTFVRKAGRHGRHKPQTCQRFVGFRCSRAAGAEIRRLLLLRLRQFCVQRSYNSTATSTSTFNFTAGTSPFHSNPTSTGIPFHTANRWREKYSSGNQLIVEGKNIHQSGCHWMF

SEQ ID NO: 163834 - protein, 202 aa, Zea Mays
MEGDPACGLALADEEAECSSWDSDDEYQKFIQNMNPPRVTIDNTSCPSAIVIHESVHRRRRSQSTGAWCYVHGDQCKSWVQRQAPIPQDRWIPSRTRRTFVRKAGRHGRHKPQTCQRFVGFRCSRAAGAEIRRLLLLRLRQFCVQRSYNSTATSRTSPFHSNPTSTGIPFHTANRWREKYSSGNQLIVEGKNIHQSGCHWMF

SEQ ID NO: 163835 - protein, 130 aa, Zea Mays
MEGDPACGLALADEEAECSSWDSDDEYQKFIQNMNPPRVTIDNTSCPSAIVIHVLTNLKLIVTKAYISSDGGWFMDGRRAIGFFPFRQNGKCPPTKEKPKHRSMVLCSWRPVQKLGSTSSPYSARSLDPF

SEQ ID NO: 163836 - protein, 126 aa, Zea Mays
MVGEPLVSFLFVKMESVHRRRRSQSTGAWCYVHGDQCKSWVQRQAPIPQDRWIPSRTRRTFVRKAGRHGRHKPQTCQRFVGFRCSRAAGAEIRRLLLLRLRQFCVQRSYNSTATSNLFSKLSYARI

SEQ ID NO: 163837 - protein, 106 aa, Zea Mays
MDVRERFQLDGENFEVLLVVLEQVEAYFRFLALLAFKIFSAEQVDVAILEVGLGGKFDATNVVKAPVVCGISSLGYDHMEILGDQILFLVINLVSINGLILLAKLG

SEQ ID NO: 163838 - protein, 83 aa, Zea Mays
MQLMWLLVLVNVLLSRNTKLLFAPNRLKWKCLTHCLIRGEAEGGLIRSRKRKADQVIISRDDVSESQFNQVLIIGLQQIIGGD

SEQ ID NO: 163839 - protein, 143 aa, Zea Mays
MSPGCWSLDLRYREWQNLPSVNDILMAWLEYLFFTIYQGREYRVLHLSPGACSRVMNRRFQGQPLYKLRPSKFREAIEEAFLAERGFFDLQTDGEEAASNNEQECQSESQVVGKGKDHSLLNPSIVPAMPVSRNLIVCSPRNF

SEQ ID NO: 163840 - protein, 359 aa, Zea Mays
MDSTPAPEAAPGASSSATAAAEDLAGGVAAMTLDERFALLRGIGEECIQEDELRRLLENKPVPICYDGFEPSGRMHIAQGIVKTINVNKMVRAGCKVKIWIADWFAQLNNKMGGDLKKIQTVGRYMIEIWKAAGMNLDGVEFLWSSEEINRRAHEYWPIVMDIARKNNVKRITRCCQIMGRSDQDDLTAAQIFYPCMQCADIFFLKADICQLGMDQRKVNVLAREYCDYIKRKNKPIILSHHMLPGFKEGQEKMSKSDPSSAIFMEDDEAQVNVKIKQAFCPPKIVEGNPCLEYIKYIVFPWFGRFEVARKESNGGNKTFTSMDELISDYETGALHPADVKPALAKAINEILQKYRVTS

SEQ ID NO: 163841 - protein, 495 aa, Zea Mays
MDGSGRALDCRSFWKAGAYEAPTAPTREFQDALETGDFDRARVHPKFLHTNATSHKWAFGAIAELLDNAVDEISNGATFIKVDKSINLKDNSSMLVFQDDGGGMDPEGVRRCMSLGFSTKKSKTTIGQYGNGFKTSTMRLGADAIVFTRAIRGGNVTLSIGLLSYTFLRKTLKDDIVVPMLDFKIQDGDIVPLVYGSQGDWDSSLKIVLDWSPFSSKEELLQQFQDVGSHGTKVVVYNLWMNDDGLLELDFEDDDEDILLRDQGSASGGFSKSQKEIVKQHISHRLRFSLRAYTSILYLRKFDNFQIILRGKPVEQIFITDELKFKKVVTYRPQAAHDSQVASVKIDIGFAKEAPILGIFGMNVYHKDRLIMPFWKVLQEGSSRGRSVVGVLEANFIEPAHDKQDFERTPLFIRLETRLRQIIIDFWKERCHLIGYQPMDPHLRSQYKATLKESVGPAPVHHKASSVRRTGGLSSNLLPETYDDITTVGFSFAIV

SEQ ID NO: 163842 - protein, 586 aa, Zea Mays
MDGSGRALDCRSFWKAGAYEAPTAPTREFQDALETGDFDRARVHPKFLHTNATSHKWAFGAIAELLDNAVDEISNGATFIKVDKSINLKDNSSMLVFQDDGGGMDPEGVRRCMSLGFSTKKSKTTIGQYGNGFKTSTMRLGADAIVFTRAIRGGNVTLSIGLLSYTFLRKTLKDDIVVPMLDFKIQDGDIVPLVYGSQGDWDSSLKIVLDWSPFSSKEELLQQFQDVGSHGTKVVVYNLWMNDDGLLELDFEDDDEDILLRDQGSASGGFSKSQKEIVKQHISHRLRFSLRAYTSILYLRKFDNFQIILRGKPVEQIFITDELKFKKVVTYRPQAAHDSQVASVKIDIGFAKEAPILGIFGMNVYHKDRLIMPFWKVLQEGSSRGRSVVANFIEPAHDKQDFERTPLFIRLETRLRQIIIDFWKERCHLIGYQPMDPHLRSQYKATLKESVGPAPVHHKASSVRRTGGLSSNLLPETYDDITTVGLANNGSHLQSSDQAQENNMDSEVLDEDLVEIGSSGVLDPSFIEKLSEENIALFSRREELRQRDTQLKQTIGDLELELEETKKKCGQLAAQLKAWKNQQHLP

SEQ ID NO: 163843 - protein, 532 aa, Zea Mays
MEAIAELLDNAVDEISNGATFIKVDKSINLKDNSSMLVFQDDGGGMDPEGVRRCMSLGFSTKKSKTTIGQYGNGFKTSTMRLGADAIVFTRAIRGGNVTLSIGLLSYTFLRKTLKDDIVVPMLDFKIQDGDIVPLVYGSQGDWDSSLKIVLDWSPFSSKEELLQQFQDVGSHGTKVVVYNLWMNDDGLLELDFEDDDEDILLRDQGSASGGFSKSQKEIVKQHISHRLRFSLRAYTSILYLRKFDNFQIILRGKPVEQIFITDELKFKKVVTYRPQAAHDSQVASVKIDIGFAKEAPILGIFGMNVYHKDRLIMPFWKVLQEGSSRGRSVVGVLEANFIEPAHDKQDFERTPLFIRLETRLRQIIIDFWKERCHLIGYQPMDPHLRSQYKATLKESVGPAPVHHKASSVRRTGGLSSNLLPETYDDITTVGLANNGSHLQSSDQAQENNMDSEVLDEDLVEIGSSGVLDPSFIEKLSEENIALFSRREELRQRDTQLKQTIGDLELELEETKKKCGQLAAQLKAWKNQQHLP

SEQ ID NO: 163844 - protein, 345 aa, Zea Mays
MPRDLRPAGMRLFGVTIAPVPEANPPGRNPSPNPPVAAREDVMRKCKSMGNLAALGAGLDGGGGCADGGVAGDGYLSDGGLMQSCGKRRRAQERKKAVPWTEEEHRTFLAGLEKLGKGDWRGIAKKFVTTRTPTQVASHAQKYFLRQTNPNKKRRSSLFDMMPRELSPTPNCPVLPPSMAKVHDVVAMTKQLQNSNLEGASSSNAANVVSQVGRDLPPVPSFKATNIDSSFSKFSHMERYWRTPYPSRPIPRAPEGTSSSTPVAASTAVPASEANLTAYTSTFLSQRADTPSLPPKGDPPPSEDDDLELTVAPPSQQNMTNMSSQNALDHQPHVFLPPPNTQQLR

SEQ ID NO: 163845 - protein, 335 aa, Zea Mays
MPRDLRPAGMRLFGVTIAPVPEANPPGRNPSPNPPVAAREDVMRKCKSMGNLAALGAGLDGGGGCADGGVAGDGYLSDGGLMQSCGKRRRAQERKKAVPWTEEEHRTFLAGLEKLGKGDWRGIAKKFVTTRTPTQVASHAQKYFLRQTNPNKKRRSSLFDMMPRELSPTPNCPVLPPSMAKVHDVVAMTKQLQNSNLEGASSSNAANVVSQVGRDLPPVPSFKATNIDSSFSKFSHMERYWRTPYPSRPIPRAPEGTSSSTPVAASTAVPASEANLTAYTSTFLSQRADTPSLPPKGDPPPSEDDDLELTVAPPSQQNMTNMSSQNAQWDSFMLC

SEQ ID NO: 163846 - protein, 252 aa, Zea Mays
MHAALFDVIIWLCTVPWTEEEHRTFLAGLEKLGKGDWRGIAKKFVTTRTPTQVASHAQKYFLRQTNPNKKRRSSLFDMMPRELSPTPNCPVLPPSMAKVHDVVAMTKQLQNSNLEGASSSNAANVVSQVGRDLPPVPSFKATNIDSSFSKFSHMERYWRTPYPSRPIPRAPEGTSSSTPVAASTAVPASEANLTAYTSTFLSQRADTPSLPPKGDPPPSEDDDLELTVAPPSQQNMTNMSSQNAQWDSFMLC

SEQ ID NO: 163847 - protein, 168 aa, Zea Mays
MHAALFDVIIWLCTVPWTEEEHRTFLAGLEKLGKGDWRGIAKKFVTTRTPTQVASHAQKYFLRQTNPNKKRRSSLFDMMPRELSPTPNCPVLPPSMAKVHDVVAMTKQLQNSNLEGASSSNAANVVSQVGRDLPPVPSFKATNIDSSFSKFSHMVQKHQSSYKVEVLK

SEQ ID NO: 163848 - protein, 185 aa, Zea Mays
MMPRELSPTPNCPVLPPSMAKVHDVVAMTKQLQNSNLEGASSSNAANVVSQVGRDLPPVPSFKATNIDSSFSKFSHMERYWRTPYPSRPIPRAPEGTSSSTPVAASTAVPASEANLTAYTSTFLSQRADTPSLPPKGDPPPSEDDDLELTVAPPSQQNMTNMSSQNALDHQPHVFLPPPNTQQLR

SEQ ID NO: 163849 - protein, 347 aa, Zea Mays
MVQCNVLGRSESRMQQKLEKAKEILKKLKARVQELEKELEDKENGLLRDLRSSKKFKADHIKSGNVTANSAFTSSSPGYENQTNKLDEVMQDPCNDKTHFDRLKSEAGSVLNAQDNLDNKDVDVIDLEANDSVFGDEQKAQFSAKPFGTDDSTPNSENKSSLCQNDDRHSVASECTTAHAANGGPFLKHREATVKSTFMANIRAKLHIPRESPSVRTNATSSTLESETLTIDGISKQATRLASGTGPQQIHNFNSFSDDFQAPGIPGTDGARRSIGKWCKGPADPSSASGSRGNLIAVGPDGRGGKVKILRDLGRPQDSKSQALWPKAQKVAGRGGQSQIHQFFGKR

SEQ ID NO: 163850 - protein, 315 aa, Zea Mays
MTSALRRKAAQMASAATQCFSYSSLPATWALRQRGGGASVLRLSSRRTFSVSAAAGFDNQNREYVIVGGGNAAGYAARTFVEHGMADGRLCIVSKEPVPPYERPALTKGYLFPPDKKPARLPGFHTCVGSGGQRQTAEWYKENGIEVLYEDPVVAFDGKTQTLKTSSGKVLKYGSLIISTGCEASRLPEKIGGKLPGVHYIRDVADADALVSSLGSAKKVVVIGGGYIGMEVAAAACGWNLDTTIIFPEDHIMPRLFTPSLAKKYEELYQQNGVKFIKGALIEKLGAGSDGRVSSAVLKDGSVVEADTVMLFISF

SEQ ID NO: 163851 - protein, 140 aa, Zea Mays
MYNRIARVEHVDHARKSAHHCVETLLTSQTKAYDYLPYFYSRVFEYEGSSRKVWWQFYGDNVGEAVEVGNFDPKVATFWIDSDSRLKGVFLESGTSEEFSLLPQLAKSQPVVDKSKLQAATSVEDALEIARSSLRSSAMV

SEQ ID NO: 163852 - protein, 436 aa, Zea Mays
MTSALRRKAAQMASAATQCFSYSSLPATWALRQRGGGASVLRLSSRRTFSVSAAAGFDNQNREYVIVGGGNAAGYAARTFVEHGMADGRLCIVSKEPVPPYERPALTKGYLFPPDKKPARLPGFHTCVGSGGQRQTAEWYKENGIEVLYEDPVVAFDGKTQTLKTSSGKVLKYGSLIISTGCEASRLPEKIGGKLPGVHYIRDVADADALVSSLGSAKKVVVIGGGYIGMEVAAAACGWNLDTTIIFPEDHIMPRLFTPSLAKKYEELYQQNGVKFIKGALIEKLGAGSDGRVSSAVLKDGSVVEADTVIVGIGAKPVVSPFEAVGVNPKVGGIEVDSLFRTSVPGIFAIGDVAAFPLKMYNRIARVEHVDHARKSAHHCVETLLTSQTKAYDYLPYFYSRVFEYEGSSRKVWWQFYGDNVGEAVEVGNFDPKIAG

SEQ ID NO: 163853 - protein, 171 aa, Zea Mays
MILFAAANPVRVMASGAIDVNHKNEVYDGQVPDIIDNAYVIVEFDNGSRGMLDLCMFAEGSRNEQEICVVGDIGKGETFVPESIVRFGKRTEGRDGVVTIMAEDERIKYQGLHHGSSYLEHLNFLSAIRAQGASGPSVNLSDGLLSVAVGVAGQLSIEQGRFVTMEEVLGL

SEQ ID NO: 163854 - protein, 254 aa, Zea Mays
MTHYEILMDIIRHREPQHILVEKPLCTTVQDCKKVIEAAKQRPEIVVQVGLEYRYNLQVNNWNRFNCNSGGTLVEKCCHFFDLMILFAAANPVRVMASGAIDVNHKNEVYDGQVPDIIDNAYVIVEFDNGSRGMLDLCMFAEGSRNEQEICVVGDIGKGETFVPESIVRFGKRTEGRDGVVTIMAEDERIKYQGLHHGSSYLEHLNFLSAIRAQGASGPSVNLSDGLLSVAVGVAGQLSIEQGRFVTMEEVLGL

SEQ ID NO: 163855 - protein, 191 aa, Zea Mays
MEAAAAAVRYGIVGVGMMGREHLHNLAHLATEVEREQSVRVRVTGLADPHQESLRLGLQLAAELGLPPPQIFPGHRELLDSGLCDAIIVSSPNMTHYEILMDIIRHREPQHILVEKPLCTTVQDCKKVIEAAKQRPEIVVQVGLEYRYMPPVAKLIDIVKSGTLGQVRMVAIREHRFPFLVKVQLAGKQLE

SEQ ID NO: 163856 - protein, 108 aa, Zea Mays
MQEWLMHACAWSERRRELQLLQNCWPICVVASGHVKTLSSTRSSESIANGACLISGARPGCSRSAYSSCRTSDPATAKLVLWSLDRAWWGVISTRASGSCRPASLQNL

SEQ ID NO: 163857 - protein, 646 aa, Zea Mays
MMVMVLRIIGKILHWLLKAQSLTMLTRRRQMKRKIMERWRTSTATMTFGFMKIWAMYAVCVASRRRMNGYGGNSKDADEIDCGTVKLSEDFIVADIAIHPRHAQAMKPHQVEGFNFLVKNLIGDKPGGCILAHAPGSGKTFLLISFIQSFMARYPSARPLVVLPKGILVIWKKEIQRWQVQDIPVYDFYSVKAEKRVEQLQILKSWEDKMGILFLGYKQFSTIVTDDGGSKVTAACRDRLLKVPNLLILDEGHTPRNKETDVLESLSRVETPRKVVLSGTLFQNHVEEVFNILNLVRPKFLRMESSRPIARRIMSQVEIFGRSSKGLADGAFTEAVEGTLLNDENFKRKVHVIRGLRELTRDVLHYYKGAILDELPGLVDFSVFLKLTPKQKDIVHKLEMHDRFKRSAVGSALYIHPCLSGLSEVNAENRAHTLRDDSVDSLMDSINVRDGVKANFFMNILSLANSAGEKVLAFSQYILPMTFFERLLVKKKGWHVGREIFMISGDTSQEDREAAVDRFNSSADAKVLFGSIRACGEGISIVGASRVVILDVHLNPSVTRQAIGRAFRPGQQKKVFVYRLVAADSDEVKVHETAFKKEVIQKLWFEWSEQCTTENFKLGQVDIDDSGDELLDTRAIRQDIKALYRR

SEQ ID NO: 163858 - protein, 918 aa, Zea Mays
MYPSGHALPDANRNHSLVFGGTSKDWDNIRQFIASLERASENSSAIASKTGGGKSTNHSVEPAEQKGKGDIIVLDSDDEDGDGNSPEHNKLASEMNKELGTSVLASNIAERMATNGSQTFETVHAYGGSKNTQIVPYGQGSALVNQFPLQTSWQPSIQFERVVLTKRPEEQRMQDLVAATIAEKRAETQMFLSLPTERKRRRTDHSLLMLDSFVPKQRRRKGDTGLAPADLSLDLHQTATSQEPDIAIEEEEKRKNDGDGLEDYWKDFALAVESTKLDDVDEAAANEKEDNGKMEDIDCNHDIRIHEDLGHVCRVCGMIVRRADSIIDYQWKKASRRRMNGYGGNSKDADEIDCGTVKLSEDFIVADIAIHPRHAQAMKPHQVEGFNFLVKNLIGDKPGGCILAHAPGSGKTFLLISFIQSFMARYPSARPLVVLPKGILVIWKKEIQRWQVQDIPVYDFYSVKAEKRVEQLQILKSWEDKMGILFLGYKQFSTIVTDDGGSKVTAACRDRLLKVPNLLILDEGHTPRNKETDVLESLSRVETPRKVVLSGTLFQNHVEEVFNILNLVRPKFLRMESSRPIARRIMSQVEIFGRSSKGLADGAFTEAVEGTLLNDENFKRKVHVIRGLRELTRDVLHYYKGAILDELPGLVDFSVFLKLTPKQKDIVHKLEMHDRFKRSAVGSALYIHPCLSGLSEVNAENRAHTLRDDSVDSLMDSINVRDGVKANFFMNILSLANSAGEKVLAFSQYILPMTFFERLLVKKKGWHVGREIFMISGDTSQEDREAAVDRFNSSADAKVLFGSIRACGEGISIVGASRVVILDVHLNPSVTRQAIGRAFRPGQQKKVFVYRLVAADSDEVKVHETAFKKEVIQKLWFEWSEQCTTENFKLGQVDIDDSGDELLDTRAIRQDIKALYRR

SEQ ID NO: 163859 - protein, 311 aa, Zea Mays
MKGVSEGLIIGTTVGVVIGVLLALGTLLCLRRRRRSQTQIRSSSSRRASTVPIRTNGVNACAMLSNSTTGQESPTPRELEERGSSLWIQGPGQGAFGPVYKADMSSGEVLAVKVLSNNSRQGEKEFQNEVLLLGRLHHRNLVNLVGYCADKGQHMLLYAYMPNGSLASHLYGEDSAPLKWDLRVSIALDVARGLEYLHDGAVPPVVHRDIKSPNILLDQAMHARVADFGLSREEMVTRGDGAANNIRGTYGYLDPEYVSTRSFTKKSDVYSYGVLLFELIAGRNPQQGLMELPVRLEGTLADHTASYLSRA

SEQ ID NO: 163860 - protein, 316 aa, Zea Mays
MSSGEVLAVKVLSNNSRQGEKEFQNEVLLLGRLHHRNLVNLVGYCADKGQHMLLYAYMPNGSLASHLYGEDSAPLKWDLRVSIALDVARGLEYLHDGAVPPVVHRDIKSPNILLDQAMHARVADFGLSREEMVTRGDGAANNIRGTYGYLDPEYVSTRSFTKKSDVYSYGVLLFELIAGRNPQQGLMEYAELAAINADDGRRTGWEEIADARLGGAFDADELNDVAAVAYRCVSRASRKRPAMRDVVQALARVARRGRGRGRKQQHHPPQASSAAAGDESAVDLEAEEGSEAGRSSFSGLLQREESVGSVSDLPDV

SEQ ID NO: 163861 - protein, 142 aa, Zea Mays
MDMEEDPAGGEDLSSTAASGHSCSGDDGEESGWTSYIDYFMETQQRRRRKQGDVSRAAAGDGPSTDDDAGRRRSSTAECSSGAGVGASSSCLAPPVLVDPPVVVVSRRLSLREGWRRKKVLHDESLEDTATSPISSPKVRAS

SEQ ID NO: 163862 - protein, 196 aa, Zea Mays
MFAMTLWLGNSAYLYISVAFAQMLKAIMPVAVFLLGAAFGLEEMSYKMLSIMSVISVGVIVASVGEITISWVGVVYQMGGVVAEALRLIFIEIFLKKKGVKLNLISMMTSALTARVTGVVRDWSVVLLSAAIFADTQLTFINIIGYAIAIAGVVAYNNHKLKVKPQANPQQGDENKVISGSTQDVVLSVSSAKETS

SEQ ID NO: 163863 - protein, 264 aa, Zea Mays
MLADTLGTTGSLTGVDVAKHRLAACRTMLQKYSLGDRTRLFVADGTLFSLLPVNSRMQRMEGSIGVEENGSIFPEWTSRRSWKDRQKTRKANANGQQHLLAASEPELIYYGKHSGLVGQCKSDVFCPSVDDEACTSGYDKVLVDAECTHDGSIKHIQKFEFWGWKSLDRRVLDAERTENLLQLQLHLLTNGFKLLKTGGSLVYSTCSLTVAQNECVVQQFLSTHPSAEDQFGRQLALQKWRHPQNTAIRSCSFTNQWSFCCQVL

SEQ ID NO: 163864 - protein, 360 aa, Zea Mays
MAVPLPPPPPPSRRCALPRDACAFVPVMLAPTPASSAPATPRAQPPPRDARPSSQMPAPVSSTATPLALPRLPDAGPRILGPDAAAIPRCRPPYPRPRARSPELRRAPALAPDTMLCPTLNLATTPSTTPPSFLATTPSLDGRRDWWHLPDLGARLILAPNAAPPPIRAASSDGSRDNAPSPSPEPRRLTFQGCRSAILTSSSLAVARPPDRRLRPRDPPDSPTSPSTAASITHLHADEKARPPLSPRLPTTRLLNKDLSKHPVDGFSAGLVDDSNVFEWQVTIIGPPDTLYRTIQHIQIRVMDMFSVKSLYLYSDWLLDLFGVLHDGKKSYPTILACMLVVSLEVCFLSLLLSIRMDLV

SEQ ID NO: 163865 - protein, 431 aa, Zea Mays
MAVPLPPPPPPSRRCALPRDACAFVPVMLAPTPASSAPATPRAQPPPRDARPSSQMPAPVSSTATPLALPRLPDAGPRILGPDAAAIPRCRPPYPRPRARSPELRRAPALAPDTMLCPTLNLATTPSTTPPSFLATTPSLDGRRDWWHLPDLGARLILAPNAAPPPIRAASSDGSRDNAPSPSPEPRRLTFQGCRSAILTSSSLAVARPPDRRLRPRDPPDSPTSPSTAASITHLHADEKARPPLSPRLPTTRLLNKDLSKHPVDGFSAGLVDDSNVFEWQVTIIGPPDTLYRTIQHIQIRVMDMFSVKSLYLYSDWLLDLFGVLHDGKKSYPTILAFVNNVDDAEFILAHGTEVFGSPSSNPLPKSLEKLEQVLMLGLEKGLPMVLPNPEFQIMSLSKLEIFVSCLGLEARRQPDRKTARRKGIARSLVR

SEQ ID NO: 163866 - protein, 480 aa, Zea Mays
MAVPLPPPPPPSRRCALPRDACAFVPVMLAPTPASSAPATPRAQPPPRDARPSSQMPAPVSSTATPLALPRLPDAGPRILGPDAAAIPRCRPPYPRPRARSPELRRAPALAPDTMLCPTLNLATTPSTTPPSFLATTPSLDGRRDWWHLPDLGARLILAPNAAPPPIRAASSDGSRDNAPSPSPEPRRLTFQGCRSAILTSSSLAVARPPDRRLRPRDPPDSPTSPSTAASITHLHADEKARPPLSPRLPTTRLLNKDLSKHPVDGFSAGLVDDSNVFEWQVTIIGPPDTLYRTIQHIQIRVMDMFSVKSLYLYSDWLLDLFGVLHDGKKSYPTILAFVNNVDDAEFILAHGTEVFGSPSSNPLPKSLEKLEQVLMLGLEKGLPMVLPNPEFQIMSLSKLEIFVSCLELRVNVSELTVEELRVPEYLQFKEQLMEEGFKVEAGRTYHRTVLEILDQLEKVCMFLTFLFEYIYIYWVACWN

SEQ ID NO: 163867 - protein, 480 aa, Zea Mays
MAVPLPPPPPPSRRCALPRDACAFVPVMLAPTPASSAPATPRAQPPPRDARPSSQMPAPVSSTATPLALPRLPDAGPRILGPDAAAIPRCRPPYPRPRARSPELRRAPALAPDTMLCPTLNLATTPSTTPPSFLATTPSLDGRRDWWHLPDLGARLILAPNAAPPPIRAASSDGSRDNAPSPSPEPRRLTFQGCRSAILTSSSLAVARPPDRRLRPRDPPDSPTSPSTAASITHLHADEKARPPLSPRLPTTRLLNKDLSKHPVDGFSAGLVDDSNVFEWQVTIIGPPDTLYRTIQHIQIRVMDMFSVKSLYLYSDWLLDLFGVLHDGKKSYPTILAFVNNVDDAEFILAHGTEVFGSPSSNPLPKSLEKLEQVLMLGLEKGLPMVLPNPEFQIMSLSKLEIFVSCLELRVNVSELTVEELRVPEYLQFKEQLMEEGFKVEAGRTYHRTVLEILDQLEKCAKSCSPIDRSIYLDLAYIDG

SEQ ID NO: 163868 - protein, 60 aa, Zea Mays
MVVPSPPYAQNSYPAQNSDQEGTNPRRGDREAREGYLTEDSSVGSPGRGDLRSASSYRRR

SEQ ID NO: 163869 - protein, 181 aa, Zea Mays
MAPPLATRGLPLASRGPPSCAASCSSCLPSYLQLGRRPSRRFRCSSPQVDAAAVPPGKGGEYRPSFADDLLLAFFRSKMVKEVGWDSEKPGYAGLMEVANRLMVKGKSALETEQAAVRVLQSLFPPLLLVLYKALLAPIANGQLAAMMLARATAISCQWLMGSCSVNSVTLPDGKSWSSVR

SEQ ID NO: 163870 - protein, 110 aa, Zea Mays
MVKCSLRNASTWKRASALAFASTHANCQLRLSSKITWVLICTWSQILKTIAASSTSGCRLHLLILTKPSRNRAWTSAQTQGGVESSEEIAAQMSSVAPKFDMLPVKDCTS

SEQ ID NO: 163871 - protein, 117 aa, Zea Mays
MGSCSVNSVTLPDGKSWSSGVFVEKCKYLEESKCLGICINTCKLPTQTFFKDHMGVDLYMEPNFEDYSCQFNFGVPPPPLDTDKALKEPCLDICTNARRRRELGRNSSPDELSCPQV

SEQ ID NO: 163872 - protein, 152 aa, Zea Mays
MAPPLATRGLPLASRGPPSCAASCSSCLPSYLQLGRRPSRRFRCSSPQVDAAAVPPGKGGEYRPSFADDLLLAFFRSKMVKEVGWDSEKPGYAGLMEVANRLMVKGKSALETEQAAVRVLQSLFPPLLLVLYKALLAPIANGQLAAMMLGVR

SEQ ID NO: 163873 - protein, 131 aa, Zea Mays
MMLARATAISCQWLMGSCSVNSVTLPDGKSWSSGVFVEKCKYLEESKCLGICINTCKLPTQTFFKDHMGVDLYMEPNFEDYSCQFNFGVPPPPLDTDKALKEPCLDICTNARRRRELGRNSSPDELSCPQV

SEQ ID NO: 163874 - protein, 124 aa, Zea Mays
MGSCSVNSVTLPDGKSWCSLRNASTWKRASALAFASTHANCQLRLSSKITWVLICTWSQILKTIAASSTSGCRLHLLILTKPSRNRAWTSAQTQGGVESSEEIAAQMSSVAPKFDMLPVKDCTS

SEQ ID NO: 163875 - protein, 222 aa, Zea Mays
MESKCVNDQDTLIDLESGNGTAVINHSNDLESGCVCACANGCPRDDRNNQHMDCSSPASDAVARSGDDRKSEGEEKLGLGLLDSSGGDKAKKKRSKKKPPRPPRPLTPTPLDVSDQKLLNELSELAVLKRARVERMKALKKMKNAKQGFSGGNLCPLIVTVIFCVVILWQGFFSGHGPAVSFHGSPESSIRGTRSSLISIRFYKNHSNTRPPPFSETTAAPD

SEQ ID NO: 163876 - protein, 245 aa, Zea Mays
MESKCVNDQDTLIDLESGNGTAVINHSNDLESGCVCACANGCPRDDRNNQHMDCSSPASDAVARSGDDRKSEGEEKLGLGLLDSSGGDKAKKKRSKKKPPRPPRPLTPTPLDVSDQKLLNELSELAVLKRARVERMKALKKMKNAKQGFSGGNLCPLIVTVIFCVVILWQGFFSGHGPAVSFHGSPESSIRGTRSSLISIRFYKNHSNTRPPPFSETTAAPDHQIPLDVKRHRIQHYAFDVLEAS

SEQ ID NO: 163877 - protein, 243 aa, Zea Mays
MESKCVNDQDTLIDLESGNGTAVINHSNDLESGCVCACANGCPRDDRNNQHMDCSSPASDAVARSGDDRKSEGEEKLGLGLLDSSGGDKAKKKRSKKKPPRPPRPLTPTPLDVSDQKLLNELSELAVLKRARVERMKALKKMKNAKQGFSGGNLCPLIVTVIFCVVILWQGFFSGHGPAVSFHGSPESSIRGTRSSLISIRFYKNHSNTRPPPFSETTAAPEQAGGGVLARRRWVDGCPSPTG

SEQ ID NO: 163878 - protein, 227 aa, Zea Mays
MESKCVNDQDTLIDLESGNGTAVINHSNDLESGCVCACANGCPRDDRNNQHMDCSSPASDAVARSGDDRKSEGEEKLGLGLLDSSGGDKAKKKRSKKKPPRPPRPLTPTPLDVSDQKLLNELSELAVLKRARVERMKALKKMKNAKQGFSGGNLCPLIVTVIFCVVILWQGFFSGHGPAVSFHGSPESSIRGTRSSLISIRFYKNHSNTRPPPFSETTAAPEYVWIG

SEQ ID NO: 163879 - protein, 111 aa, Zea Mays
MRKGAASSEAMDFICDAEWQVDQCHDGQGAPCWQSVPHEGQATNGSKPWSDTQIAKFKRRYEQEEEESKDRSPFIPPQNLEQSMILVPPESPKTSLWICFAFRGQRNKESE

SEQ ID NO: 163880 - protein, 309 aa, Zea Mays
MTTPFRPSPPAPSAKGGCGGDRCASGRDAWPLHHFRHEGVFCLLCSSCVLLYSPSAFCSACLHLLSSCPAAAAAPPGDPAVAPPGPTAPCSACGVSFAHLSCVPAEHPAPFVCPPCAAAADGSAFSFAPAPGRRPLEERDARVLLVAARLAHDSVSRAAAAAREEAERRVAEAASARKRTREMLDAAFRALEAEARDAKMRPAAPAPTPAAAQPPAPKKKPEAAQPAPPKKKHEANRDRDKMLKLNAMQQPALAFAAAAAAAAAATSVPLPTPSSREEKKPVVKQEAQGSAPPPRDDQDRFPLFGTLQS

SEQ ID NO: 163881 - protein, 253 aa, Zea Mays
MTCAIRDGVLVRRLRGGAHLRAHDRGRPGRGAVHQHGGGVRAGRHVRHAQTRVGARRDPGPAQDAGAAAAPGPAGPALLHGGPEPGPHRQGEGAVPGVDGAALLGVRRVRGAHVAGPRARAAAPRPGRARARLLLRQHPPPASGGGHGRVLRQLLLHGEGDAGERGGGGGRRGGRGARHPRRQGEAGRRLRALGGGRLRPRPLRAHLHLRLALRLRLDAPRLPRGGLRLGHPDTRPALLLPPVHGRRRHRRPA

SEQ ID NO: 163882 - protein, 408 aa, Zea Mays
MELTGAALRRYALPSASPVAARVGRRRRPARVACVGGGGFAEEGHLRYYEAAPRRKAVEAVARDLGKLRAMGLVAGDAAKEKDATDLLLQELSQMKDAEYKINKVEKEQNAAMKALKKQEKRTKKTAIMMMKCEEDESSESSESDCEDEATMNVEQGLVISTAVPEVVASSISAVPAMECDKAAVKAMKKMEKEQMKAMKKMEKEQKKAAKKAMKMEKEAKKMAMATLNGCRDEDDSSCSSESSESECEGQVMRMSRCVTITAPEMPPPSTGLPIIVPQIPEPLAPQPSQSQPSEPATAVQATRVSSVAVTETSTTSRIEVCMGGKCKKSGAVALLQEFEKTVGTGGAVVGCKCLGKCGLGPNVRLRSGASAEGSAKGNPLCIGVGFEDVGTIVAGLFGGADLGMTPT

SEQ ID NO: 163883 - protein, 385 aa, Zea Mays
MELTGAALRRYALPSASPVAARVGRRRRPARVACVGGGGFAEEGHLRYYEAAPRRKAVEAVARDLGKLRAMGLVAGDAAKEKVLSDATDLLLQELSQMKDAEYKINKVEKEQNAAMKALKKQEKRTKKTAIMMMKCEEDESSESSESDCEDEATMNVEQGLVISTAVPEVVASSISAVPAMECDKAAVKAMKMEKEAKKMAMATLNGCRDEDDSSCSSESSESECEGQVMRMSRCVTITAPEMPPPSTGLPIIVPQIPEPLAPQPSQSQPSEPATAVQATRVSSVAVTETSTTSRIEVCMGGKCKKSGAVALLQEFEKTVGTGGAVVGCKCLGKCGLGPNVRLRSGASAEGSAKGNPLCIGVGFEDVGTIVAGLFGGADLGMTPT

SEQ ID NO: 163884 - protein, 135 aa, Zea Mays
MLHLAQTTVTTMDSQVPTTQMVTKEAIEGWIVLVTGVHEEAQEDDLQNAFQEFGQVKNLHLNLDRRTGFVKGYALIEYEKFEEAQAAIKELDGAELYEQKMSVDWAFSSGPAKRRFTRKRSPPRARSRTPPRRRH

SEQ ID NO: 163885 - protein, 505 aa, Zea Mays
MQHDQKKKAPSEMDFFTEYGEGSRYKIEEVIGKGSYGVVCSAVDTHTGEKVAIKKINDIFEHVSDATRILREIKLLRLLRHPDIVEIKHILLPPSRREFRDIYVVFELMESDLHQVIKANDDLTPEHYQFFLYQLLRGLKYIHTANVFHRDLKPKNILANADCKLKICDFGLARVAFNDTPTAIFWTDYVATRWYRAPELCGSFFSKYTPAIDIWSIGCIFAELLTGKPLFPGKNVVHQLDIITDLLGTPSPEAISRALADPYFKNIASVDREPSAQAVTKLEFEFERRRVTKEDIRELIYREILEYHPKMLREFLEGTESSGFMYPSAVDHFKKQFAYLEEHYAKGSTGTPPERQHNSLPRPSVVYSDNRSQTTANITEDLSKCMLRENTQKTHPYSASVASKFPPHVPQGDVARPGKAVGSVMQYSPCPAPAAERYEQRRIARHPAVAPNNIPSGSSYPRRSQTCKSETGDAESHMDANQARQPKPYAANKLPATVDSRGGHW

SEQ ID NO: 163886 - protein, 120 aa, Zea Mays
MLRENTQKTHPYSASVASKFPPHVPQGDVARPGKAVGSVMQYSPCPAPAAERYEQRRIARHPAVAPNNIPSGSSYPRRSQTCKSETGDAESHMDANQARQPKPYAANKLPATVDSRGGHW

SEQ ID NO: 163887 - protein, 262 aa, Zea Mays
MILLMSSKQGSHAKRSNRNFLRGLEVYGRGNWKNISKYFVPTRTPIQICSHAQKYFHRKEGTTRKQRFSINDIDLYDTDPRVQKNSSSLEALTFGHTAYNNKYYDFERQNVVLNKLTHTSQTSSGHVATWTRGQHIIASSSIDPTMVQSNSLGWEALTFTSDANNTNNYDFDWQHDSINNLRCANQASNNQVATWTRGQQTTSSSAAPTMVQNTSHSWDVLSFTGNAYNTNYYGFDEQQVALSNITRGNHGEQQPGSYLDKR

SEQ ID NO: 163888 - protein, 300 aa, Zea Mays
MQREATDMNNMDMFHGYILDDVEVMKMVEEPLHKQNIVPKKKRQHPVIVWTQDEHKNFLRGLEVYGRGNWKNISKYFVPTRTPIQICSHAQKYFHRKEGTTRKQRFSINDIDLYDTDPRVQKNSSSLEALTFGHTAYNNKYYDFERQNVVLNKLTHTSQTSSGHVATWTRGQHIIASSSIDPTMVQSNSLGWEALTFTSDANNTNNYDFDWQHDSINNLRCANQASNNQVATWTRGQQTTSSSAAPTMVQNTSHSWDVLSFTGNAYNTNYYGFDEQQVALSNITRGNHGEQQPGSYLDKR

SEQ ID NO: 163889 - protein, 168 aa, Zea Mays
MSSRQCSQGRISARNFLRGLRVYGRGNWKNISKDFVTTKTPVQVSSHAQKYFRRQESTTRKQRYSINDVGLYDAEPWEEQQQQQQNSSLPAFTSTNNNAYYNPYCYAFGGGQQQLASSPFQCHASQASSSSQTAVTWAAGGQQPPICSSAAPPMMEGGGAEMSWTTYY

SEQ ID NO: 163890 - protein, 1056 aa, Zea Mays
MEAAALARRTRAVEELRRLSTVAESDDTPEQRLSTVAKSDGMPAEEQECDHFSLRGYVAMLQKKDPKLCSPHIFHSQPQYDEHHGSSPLLVSKYRRWDCSKCLERVKVSGHRPTSGNVSIEQDGMNDGCSISIVRILPNRVDPRRMFYCKQQSSQGNDQLTLSKTAQECNSKCSSPGNKAITAMNIPVAEENVLEALVERSVPATEDLQASPNNIDVSANILNVVPKDASDLPDDVQTISTIEENGTKNPCSPKLRVMPNEDESNIVQDVPNFDPNESNVCKPLSCHKGKQISGHKSSQVCNKGPRRASLKRKVGSDGKKKRDKSTDLPDISGLKFCQRKPKKMRLLSELIDADQVGISANAVQVDRTDSVDLCEGGKRKRHLEVGKDNDTPNQKLDKIQSRAVKNKAKHTAVDKVDDGPSLMNWLKNTHKKIRTDRKDSEHKNLDSSAISRSYPDIVASDDMYHDFIPSVGDVDQVKLPSTTSAKHGKVNAQNDNLEQNMQKVDESRNLKQRFFSSEKSTILLKRKVQSTSVAHDENIENSIIKRDMLRPDDVPQMGHEGSVQRCLAKVSLDKQKIQNVPGLRKKNIPKNKKKVSQEVHEKQNVIDDIPMDIVELLARNQHERHLMTQTDTNSLENCHDQPKAGEVDCAESAAKDCPVNSSNANFEKPLALESKQKSLQDHASSSTQATNVNPQDLHTQKLPQCPAASSTKVPNGPPSESQTQNSLQEQPTRFHRDDEVTIACTSPIFSNYQHIAETPARSWRDSREKKLMWDSFKTASRNPPSPPPSYGFQFGNRLQEVDSAPIHAYGAHQPVIVAVDQPRSVPSTALAMEAGRLYDQRIPGQPGLYPKEPMPATHLLRLMDSSTAPGFTNYQRANRRQMELQTQALGSQYTQHEHYNASPSTSYGSQPLTLEDLSRRHFQQDLRRPLRPHPRVGVLGSLLQQEIANWSGNCGPQSGYRLGDCKGTRPPDANRAGNYETLSSAGWNTLQLGSVSSAANLEYRFPWYGTGQPSTSGNGRTIHPLDKLVRKDICVTNRNPADFTVISDKNEYMRTL

SEQ ID NO: 163891 - protein, 1027 aa, Zea Mays
MLQKKDPKLCSPHIFHSQPQYDEHHGSSPLLVSKYRRWDCSKCLERVKVSGHRPTSGNVSIEQDGMNDGCSISIVRILPNRVDPRRMFYCKQQSSQGNDQLTLSKTAQECNSKCSSPGNKAITAMNIPVAEENVLEALVERSVPATEDLQASPNNIDVSANILNVVPKDASDLPDDVQTISTIEENGTKNPCSPKLRVMPNEDESNIVQDVPNFDPNESNVCKPLSCHKGKQISGHKSSQVCNKGPRRASLKRKVGSDGKKKRDKSTDLPDISGLKFCQRKPKKMRLLSELIDADQVGISANAVQVDRTDSVDLCEGGKRKRHLEVGKDNDTPNQKLDKIQSRAVKNKAKHTAVDKVDDGPSLMNWLKNTHKKIRTDRKDSEHKNLDSSAISRSYPDIVASDDMYHDFIPSVGDVDQVKLPSTTSAKHGKVNAQNDNLEQNMQKVDESRNLKQRFFSSEKSTILLKRKVQSTSVAHDENIENSIIKRDMLRPDDVPQMGHEGSVQRCLAKVSLDKQKIQNVPGLRKKNIPKNKKKVSQEVHEKQNVIDDIPMDIVELLARNQHERHLMTQTDTNSLENCHDQPKAGEVDCAESAAKDCPVNSSNANFEKPLALESKQKSLQDHASSSTQATNVNPQDLHTQKLPQCPAASSTKVPNGPPSESQTQNSLQVHALPVPPIVQSFNAYPSKLPALDILECAQEQPTRFHRDDEVTIACTSPIFSNYQHIAETPARSWRDSREKKLMWDSFKTASRNPPSPPPSYGFQFGNRLQEVDSAPIHAYGAHQPVIVAVDQPRSVPSTALAMEAGRLYDQRIPGQPGLYPKEPMPATHLLRLMDSSTAPGFTNYQRANRRQMELQTQALGSQYTQHEHYNASPSTSYGSQPLTLEDLSRRHFQQDLRRPLRPHPRVGVLGSLLQQEIANWSGNCGPQSGYRLGDCKGTRPPDANRAGNYETLSSAGWNTLQLGSVSSAANLEYRFPWYGTGQPSTSGNGRTIHPLDKLVRKDICVTNRNPADFTVISDKNEYMRTL

SEQ ID NO: 163892 - protein, 1031 aa, Zea Mays
MRSLLPEKKDPKLCSPHIFHSQPQYDEHHGSSPLLVSKYRRWDCSKCLERVKVSGHRPTSGNVSIEQDGMNDGCSISIVRILPNRVDPRRMFYCKQQSSQGNDQLTLSKTAQECNSKCSSPGNKAITAMNIPVAEENVLEALVERSVPATEDLQASPNNIDVSANILNVVPKDASDLPDDVQTISTIEENGTKNPCSPKLRVMPNEDESNIVQDVPNFDPNESNVCKPLSCHKGKQISGHKSSQVCNKGPRRASLKRKVGSDGKKKRDKSTDLPDISGLKFCQRKPKKMRLLSELIDADQVGISANAVQVDRTDSVDLCEGGKRKRHLEVGKDNDTPNQKLDKIQSRAVKNKAKHTAVDKVDDGPSLMNWLKNTHKKIRTDRKDSEHKNLDSSAISRSYPDIVASDDMYHDFIPSVGDVDQVKLPSTTSAKHGKVNAQNDNLEQNMQKVDESRNLKQRFFSSEKSTILLKRKVQSTSVAHDENIENSIIKRDMLRPDDVPQMGHEGSVQRCLAKVSLDKQKIQNVPGLRKKNIPKNKKKVSQEVHEKQNVIDDIPMDIVELLARNQHERHLMTQTDTNSLENCHDQPKAGEVDCAESAAKDCPVNSSNANFEKPLALESKQKSLQDHASSSTQATNVNPQDLHTQKLPQCPAASSTKVPNGPPSESQTQNSLQVHALPVPPIVQSFNAYPSKLPALDILECAQEQPTRFHRDDEVTIACTSPIFSNYQHIAETPARSWRDSREKKLMWDSFKTASRNPPSPPPSYGFQFGNRLQEVDSAPIHAYGAHQPVIVAVDQPRSVPSTALAMEAGRLYDQRIPGQPGLYPKEPMPATHLLRLMDSSTAPGFTNYQRANRRQMELQTQALGSQYTQHEHYNASPSTSYGSQPLTLEDLSRRHFQQDLRRPLRPHPRVGVLGSLLQQEIANWSGNCGPQSGYRLGDCKGTRPPDANRAGNYETLSSAGWNTLQLGSVSSAANLEYRFPWYGTGQPSTSGNGRTIHPLDKLVRKDICVTNRNPADFTVISDKNEYMRTL

SEQ ID NO: 163893 - protein, 404 aa, Zea Mays
MGKASKGSRKGKKAWRANIGTDDIDDFFEKQTRDAHAGTAAIPSLPSDSLFFVDKPATSASTSAAGASDTTTKDIPVKRKIEKKREKVLYHESVLKRNPFVQPIPSSVPGKKDKKIKKKKLQETQGEKSVPMENDSVVKNFDIWAVDGKGDSKAKKRSTISVIPAVEVEPAGCSFNPPFEAHQDSLAQAVADEKRKEYMKELGPTPVPLIVPGEAIAEEDKFFLDAGEGDEDEDAAENGDQDADTSIGQRKNTTKRVTRVEMNRRARRKERLRAEAKAKKMENILKEIDSLPNIMDEIAKEDKEKEKRHKRRTVVKEERRKSGPPRLGRHKFEPAPVQVLLTEEISGSLRKLKGCCNLARDRYKSIEKRGILAPSKRIRFAFVFPSKELTQANVGREGKFQSEG

SEQ ID NO: 163894 - protein, 355 aa, Zea Mays
MGKASKGSRKGKKAWRANIGTDDIDDFFEKQTRDAHAGTAAIPSLPSDSLFFVDKPATSASTSAAGASDTTTKDIPVKRKIEKKREKVLYHESVLKRNPFVQPIPSSVPGKKDKKIKKKKLQETQGEKSVPMENDSVVKNFDIWAVDGKGDSKAKKRSTISVIPAVEVEPAGCSFNPPFEAHQDSLAQAVADEKRKEYMKELGPTPVPLIVPGEAIAEEDKFFLDAGEGDEDEDAAENGDQDADTSIGQRKNTTKRVTRVEMNRRARRKERLRAEAKAKKMENILKEIDSLPNIMDEIAKEDKEKEKRHKRRTVVKEERRKSGPPRLGRHKGVVILQGIATRALRNVEYLHQARE

SEQ ID NO: 163895 - protein, 320 aa, Zea Mays
MPTRAPPPSLLFLRTRSSLSTSPPPPHLLPPPAPRTQPPKPIPSSVPGKKDKKIKKKKLQETQGEKSVPMENDSVVKNFDIWAVDGKGDSKAKKRSTISVIPAVEVEPAGCSFNPPFEAHQDSLAQAVADEKRKEYMKELGPTPVPLIVPGEAIAEEDKFFLDAGEGDEDEDAAENGDQDADTSIGQRKNTTKRVTRVEMNRRARRKERLRAEAKAKKMENILKEIDSLPNIMDEIAKEDKEKEKRHKRRTVVKEERRKSGPPRLGRHKFEPAPVQVLLTEEISGSLRKLKGCCNLARDRYKSIEKRGILAPSKRISKRR

SEQ ID NO: 163896 - protein, 375 aa, Zea Mays
MWVLRSLLRAASPSLRHSSGRFTARGEALSAALGSAPAPAGLLAVRPRAEGGWRRAMSTKGRTMRTKVEKRMARETGRTQRELRRAVKLRKKLMTEDEKFIYNLRRAKKKVALLLQKLKKYELPDLQAPRHDPELLTAEQLQAYKKIGFRNRNYVPVGVRGVFGGVVQNMHMHWKFHETVQVCCDNFPKEKIKEMAAMLTRLSGGIVINIHNTKTIIMFRGRNYRQPKNLIPFNTLTKRKKLNIKKIETQLRRKGINPEDPVAMASIQRVASTFFRAIDEQQGTPYIFRGDAQASAGTPEIKEPRDEPSEDSDQEELDRFISEIETAAEKQWEEEEAAEKEESSRMRYWEREDVGDRRDFNRSYENSDYEDRGQE

SEQ ID NO: 163897 - protein, 503 aa, Zea Mays
MRFDLDGLPVHFPYAAIYPEQHAYMGELKRALDARGHALLEMPTGTGKTAALISLITSYSLANPARPLRLIYCTRTVHEMEKTLAELRLLFAHLPPAASRSLLALGLSSRKNLCIHPQASAAAARDSVDTACRRLTASWVREKASSDPDSTPLCEFYETFDRAAAAGDLASFMPPGVYTLADLRALGRERRVCPYFLARQMVKYANVVVYSYQYLLDPKVASIVSREMQKECVVVFDEAHNIDNVCIEALSVSIRKQTLEGAERNLRRISQEIDRFKATDANRLRAEYNRLVDGLAQRGNLPISDAWLANPSLPDDILKEAVPGNIRRAEHFLAVLRRLVRFLDGRLETENVENEMPVSFVASIHSQAGIDQKMLRFCYDRLHSLMMTLEITDTDEFMHIQTICDFATLIGTYTRGFSIIIEPYDDRMPDIRDPVIQLSCHDASLAIRPVFDRFETVVITSGTLSPIDLYPRLLNFNPVISRSFTMSLTRDCICPMVLTRGRI

SEQ ID NO: 163898 - protein, 597 aa, Zea Mays
MRFDLDGLPVHFPYAAIYPEQHAYMGELKRALDARGHALLEMPTGTGKTAALISLITSYSLANPARPLRLIYCTRTVHEMEKTLAELRLLFAHLPPAASRSLLALGLSSRKNLCIHPQASAAAARDSVDTACRRLTASWVREKASSDPDSTPLCEFYETFDRAAAAGDLASFMPPGVYTLADLRALGRERRVCPYFLARQMVKYANVVVYSYQYLLDPKVASIVSREMQKECVVVFDEAHNIDNVCIEALSVSIRKQTLEGAERNLRRISQEIDRFKATDANRLRAEYNRLVDGLAQRGNLPISDAWLANPSLPDDILKEAVPGNIRRAEHFLAVLRRLVRFLDGRLETENVENEMPVSFVASIHSQAGIDQKMLRFCYDRLHSLMMTLEITDTDEFMHIQTICDFATLIGTYTRGFSIIIEPYDDRMPDIRDPVIQLSCHDASLAIRPVFDRFETVVITSGTLSPIDLYPRLLNFNPVISRSFTMSLTRDCICPMVLTRGSDQLPVSTKFDMRSDPGVVRNYGRLLLEMASAVPDGIVCFFVSYSYMDGIVNSWHEMGILQVISFTCKFLSHINPTINIDMAMRDVSNRVTPMQLS

SEQ ID NO: 163899 - protein, 383 aa, Zea Mays
MRFDLDGLPVHFPYAAIYPEQHAYMGELKRALDARGHALLEMPTGTGKTAALISLITSYSLANPARPLRLIYCTRTVHEMEKTLAELRLLFAHLPPAASRSLLALGLSSRKNLCIHPQASAAAARDSVDTACRRLTASWVREKASSDPDSTPLCEFYETFDRAAAAGDLASFMPPGVYTLADLRALGRERRVCPYFLARQMVKYANVVVYSYQYLLDPKVASIVSREMQKECVVVFDEAHNIDNVCIEALSVSIRKQTLEGAERNLRRISQEIDRFKATDANRLRAEYNRLVDGLAQRGNLPISDAWLANPSLPDDILKEAVPGNIRRAEHFLAVLRRLVRFLDGRLETENVENEMPVSFVASIHSQAGIDQKMLRPYVTLPH

SEQ ID NO: 163900 - protein, 403 aa, Zea Mays
MPVSFVASIHSQAGIDQKMLRFCYDRLHSLMMTLEITDTDEFMHIQTICDFATLIGTYTRGFSIIIEPYDDRMPDIRDPVIQLSCHDASLAIRPVFDRFETVVITSGTLSPIDLYPRLLNFNPVISRSFTMSLTRDCICPMVLTRGSDQLPVSTKFDMRSDPGVVRNYGRLLLEMASAVPDGIVCFFVSYSYMDGIVNSWHEMGILQDIMQHKLVFIETPDVVETTLALDNYRKACDCGRGAIFFSVARGKVAEGIDFDRHYGRLVIMFGVPFQYTLSRILLARLEYLRETFQIKEGDFLTFDALRQAAQCVGRVIRSKADYGMMIFADKRYSRHDKRSKLPGWILSHLHDAHLNLSTDMALHIAREFLRRMAQPYDKAGSGGKKTLLTEEDLENLAQDGMAM

SEQ ID NO: 163901 - protein, 260 aa, Zea Mays
MWVLRSLLRAASPSLRHSSGRFTARGEALSAALGSAPAPAGLLAVRPRAEGGWRRAMSTKGRTMRTKVEKRMARETGRTQRELRRAVKLRKKLMTEDEKFIYNLRRAKKKVALLLQKLKKYELPDLQAPRHDPELLTAEQLQAYKKIGFRNRNYVPVGVRGVFGGVVQNMHMHWKFHETVQVCCDNFPKEKIKEMAAMLTRLSGGIVINIHNTKTIIMFRGRNYRQPKNLIPFNTLTKRKYSCCRLYSRLDLNKRLNRRN

SEQ ID NO: 163902 - protein, 251 aa, Zea Mays
MSDPAAGGAMVPAAGRGIAWANGGPRFGDMVWAKVKSHPWWPGHIYSVSLTDDEEVHRGHRDGLVLVAFFGDSSYGWFDPSELVPFEDHFTEKAAQGGSSRSSFAAAVAEAVDEVARRSALALLCPCDIPDAFRPHPSDGNFFLVDVPAFDTDADYQLDQIRAARQRFVPRKALNYLLDAAVTQRDAAEKAARTVPGMEMAALFLAYRRAVFSPIDNTYAQAFGVDPELALAAEQKAAAERAQRGPQEALR

SEQ ID NO: 163903 - protein, 541 aa, Zea Mays
MEKIVPGASAMKAKSSKKDQYLLKRRDAPAHRQRQLPDDGPPGFPSSGDPPTPPLPGSSVADEDFMLQRRAPLVEVPPAALAQPTEMPAAPKPRKRQPEEGADASPDAAGGDPKRNKKKKKLSDVDGAGAGKASVVQDPIWLDLTQSYENDPPEESKKGLGKPSAAAADGHWPKKKKPAPRPGAGKGNDPTIAGVKRGPSDRQGDLAVRKKAKLDKIKTLPSEKKAAGLEQKDTAVAAVAKDKAEVAAAKRKEPAPAPAPAPSVRTLSPTALQMKFPLKSTLPSVALLKARFARFGPLDVDGIRVYWKSHMCRVVYRFKSDAEAAFRYAQANAMFGQVDTQYHLREVEAPEAPPQQRSELRLMETAPFRPGSSGNGAPLPMSRAGAVPAAAARPPVGQLPKSILKKSTDEGNSGTAREVSRVTFMLDGGAPMVVKAAKSVGFASSQPPPRPLLQQPMRPNQPRPSGFPGGQQQVGYPPRSGDSPPQQFPPRPSGGAEIPAWKMGEREFKEEVWRLMTGIAKLVEPLTDKNGFFPYHLFRAQ

SEQ ID NO: 163904 - protein, 151 aa, Zea Mays
MTHNKFTTRTELKSLRMSIECAKMECGSLRMFRVCLVYSSMRLGVPFIAPRQLGAVENNPGRQFLPSVGWRTGQSGVPPDRHCTASGADCFPKLVQPTVEDLEPLAHRTLSGAHRTVRYPHQTVGSATRHARIARPTVGSPESPVHHRTVR

SEQ ID NO: 163905 - protein, 254 aa, Zea Mays
MSTASGDGADAGGDGAAASAPAGRRIPPASSMPWVRNLRRFVGTGAGLGSEALMELETKRILLEIFKERQRKSAEAGSIPSFYKKPEEGSISSRVQRLAKYRFLKKQSELLLNADDLDAMWVCLRENCVIDDATGAEKMNYEDFCHIATVCTEQIGQKCKRFFSPSNFMKFEKDDSGRIAILPFYLYVMRTVSLTQARIDMSELDEDSDGFLQPHEMEAYIRGLIPNLAQLRDMPHCICSDVLPHSCTQVLFLL

SEQ ID NO: 163906 - protein, 227 aa, Zea Mays
MSTASGDGADAGGDGAAASAPAGRRIPPASSMPWVRNLRRFVGTGAGLGSEALMELETKRILLEIFKERQRKSAEAGSIPSFYKKKPEEGSISSRVQRENCVIDDATGAEKMNYEDFCHIATVCTEQIGQKCKRFFSPSNFMKFEKDDSGRIAILPFYLYVMRTVSLTQARIDMSELDEDSDGFLQPHEMEAYIRGLIPNLAQLRDMPHCICSDVLPHSCTQVLFLL

SEQ ID NO: 163907 - protein, 397 aa, Zea Mays
MDAARESMAALLDAGLFGPAQTLGCFLVSSAGAGNDAGMSMKVESLVQHGDALYGEKEFRRALNAYKQAMQYSRSIPRQATSNTRSSVSVTGRSPSPNSSNLLSFNENEVKFKIALCHSALCEHREALHEMEGIPSKVRTLKMNMMLGKLYRISRNSRTAVVCYKECLRQCPYVFEAITALAEMGLSAKEFSLLFSQAPNRGGKLSGDFVDTQRWWSRYVEAQCCIASHDYKGGLDIYLELMQRFPNNVHILLEIAKVEAIIGRNDEAIMNFEKVRLIDPNIMTYMDEYAILLKSKSDYIRLNKLVHDMLHIDPARPETCVALAAMWERKDERKALTYAEKSLRVDDRHITGYIMKGNLHLSLNRPDLAVTDFRGAQELRADLRSYQVILQDWCVLI

SEQ ID NO: 163908 - protein, 215 aa, Zea Mays
MGNLHLSLNRPDLAVTDFRGAQELRADLRSYQGLVRAYLALSKCKDALFTAREAMKVMHQSAKALKLVGDVHAISSSGREKARKFYESAIRLEPGFLGAALALADLHVAEGRNKEAVMLLERYIQQWSDDSLHIKVAQVHAATNMLSDALSHYQSALRINPQNEAAKNGLERLEKQMKMLQKTMKRTRRRTSMLIEMTLFEAGSLQVSYTCGSWR

SEQ ID NO: 163909 - protein, 136 aa, Zea Mays
MARILAAVWPIVKGCITGGVFGITIADWSASYVTLHGASMHPTFDPQQAERALVDKRCLHRYHFSRGDVVVFRSPRDHRELVVKRLIALPGDWIQIPEKQEIQQIPQGRCWVEGSYGSVTGQGHTHNLATPQNWPS

SEQ ID NO: 163910 - protein, 182 aa, Zea Mays
MARILAAVWPIVKGCITGGVFGITIADWSASYVTLHGASMHPTFDPQQAERALVDKRCLHRYHFSRGDVVVFRSPRDHRELVVKRLIALPGDWIQIPEKQEIQQIPQGRCWVEGDNAATSFDSRSYGPRSVPLYNHGDPFLQKLDVQVRMLAPEEATWSHHTQAIQVCERRRDHGPVSLSCL

SEQ ID NO: 163911 - protein, 59 aa, Zea Mays
MQLSQAFSIIYKMKPNNSLSHLFQKKLLNQVVLFTKCNCLSIRFVFWIRFWLWVRVCFL

SEQ ID NO: 163912 - protein, 248 aa, Zea Mays
MPALQMAGMTMPTYATYIARLQSLAASASAYKMNFGMAANSPLQQQLLANANWPYGMAGRYGMQSSGWPFGNGNPNQFLGVPKDWRNGDWLCSCGFHNYSSRTQCKECGAPVPSGIPSTTMKATSDASSTLGTKRLASEDLANDWDNKRLNPGNDNYPLSTGAANNLFLGIEQGAGSSNGQSAFPKFDNGSSMALPSGQGMSGLMGKGAKWRDGDWLCNNCNNHNYASRAFCNRCKTQKESAVHPGVL

SEQ ID NO: 163913 - protein, 128 aa, Zea Mays
MKATSDASSTLGTKRLASEDLANDWDNKRLNPGNDNYPLSTGAANNLFLGIEQGAGSSNGQSAFPKFDNGSSMALPSGQGMSGLMGKGAKWRDGDWLCNNCNNHNYASRAFCNRCKTQKESAVHPGVL

SEQ ID NO: 163914 - protein, 119 aa, Zea Mays
MTIIHFQQELQIIYFWVLSKELEAAMASLPFPSLTTGAQWHYHLGRECLVLWEKGQNGVTGTGCATTATITTMHLVRFATGAKLRKNLQFTLVCYSLLLDYFVPGYVAACSSSFLKTAV

SEQ ID NO: 163915 - protein, 76 aa, Zea Mays
MSLPPERSRTPQYRRGRSPPRRPRTREVVVERVVERVVAPGTTTYPTLTKTNYNDWALLMKVKMQARGLWEAVEIG

SEQ ID NO: 163916 - protein, 216 aa, Zea Mays
MASQCAPPLPPRPRAAAPFLLGHTPPHARPPRCAALTPSVRAAARPCFLASTRVLLRPQSEEAPASCSWSASDPLLCASPASALLVAWRRRHSPAMGCKACDKPKPNYRKGLWSLEEDQKLRDYILLHGHGCWSALPMKAGTNVKIAAIPSSVVVLTSETFDSIVLDEFYAPWCGHCKHLAPIYEKLASVFKQDDSVVIANLDADKHTDLDEKYAF

SEQ ID NO: 163917 - protein, 439 aa, Zea Mays
MPPGREKVGVKRPHGPQLSEPPLHPYEQLRLRQCMRNNSRLQQLGIPALSSMLASTNSISQRNRPSHRNSEDSESDYDISQDETGDNNVKVGSKECNIRTTDNSLGAIKLWSKRVFAQQETTRITRSKKNIAQPDATLTPRHNIDYHTQGIVEANGHAHLDENTNMTNEGHVAPFDGKNPTGNEDNVDVLADNNMTIGGQVDDTNQMSNGDLELGQNDRWERGINMGHGLHRINRGLRGKLQVVIPEGKIRPMAPLVAAKFATECNIVVRNHVPVFKHWKDYKNHSGLFNLFTGKLSAKFDINTSDAPVQKACSQMMKSAVRQQRYRLKKKYFDPFPLHLVAKKSPIRSMTDEEWNELVEYWKSPKKWYETSQKNKENRSKVKFHQTTGSRSYMVHVENLGDKYIDQEPDALDLFKECHYSKIKKCYSSSVQQVIVRLL

SEQ ID NO: 163918 - protein, 391 aa, Zea Mays
MPPGREKVGVKRPHGPQLSEPPLHPYEQLRLRQCMRNNSRLQQLGIPALSSMLASTNSISQRNRPSHRNSEDSESDYDISQDETGDNNVKVGSKECNIRTTDNSLGAIKLWSKRVFAQQETTRITRSKKNIAQPDATLTPRHNIDYHTQANGHAHLDENTNMTNEGHVAPFDGKNPTGNEDNVDVLADNNMTIGGQVDDTNQMSNGDLELGQNDRWERGINMGHGLHRINRGLRGKLQVVIPEGKIRPMAPLVAAKFATECNIVVRNHVPVFKHWKDYKNHSGLFNLFTGKLSAKFDINTSDAPVQKACSQMMKSAVRQQRYRLKKKYFDPFPLHLVAKKSPIRSMTDEEWNELVEYWKSPKKWRHLKKTKRIDPKLNSIKQLALVATWFM

SEQ ID NO: 163919 - protein, 134 aa, Zea Mays
MIFRSDMEALRAEPVAEGEMPASSVQLVSKVLSQSSSHQFLKSVGIKTPASSKSSSSNQSELREQLAAEATAAVQGELNQLKKKYEEAEEQQARTQRELEEYKKITEKNSKEMEETNVLIKKLLSLHGNTSSST

SEQ ID NO: 163920 - protein, 552 aa, Zea Mays
MWFTRTDKDAVANHVQNSKLKNPIAVPLSHPDRRSAADISPPPYRHHLRRDRSNQINQLAGREERGKGNGRDGGGGPAGGGVGGARETRPSAVQLAAGAGVPAGPHLLLLPRHVQRAVGPRRRRPGRPHHRRQRQHRALRLLRGVRRAGRRRAQPAGPARDAAGRRAHVPALRRLLPLLQPPPGLAGVPRHGGRPARRRRGLPLGGAGRRHDVVPAAQPPGHLHLPLLVPLQPGRRPRRPPPFRPQLQPRGQERERQRRHVHRLHGIHARRRRAHRARAAARQDRPRRRHQGHQGHLLLPGHRGRRDPQALRQLEDAARAAGRLGQQLLLHLPVQQRQQRPLHAPHQGPQQRLLLGRADDRLRRHRLLPRLRLRQPPKEGAVRGRRRRRRRNGHLGRRSGQPAQLQCRAGARPHRFQGRPPLRRALPALLQLRTARCHVPEPYLLDHRRTRQRLPNPQQVRRVLQGGAECGSGGGMAGGQAPHAPHVPADRQLGAHDHQLPLACAAGVPGREGRELLGFVGGGRPGEGQQAVRADQLPLMKKKKDRPRCTSL

SEQ ID NO: 163921 - protein, 249 aa, Zea Mays
MWRRRVGALLRSPRTSSSASSACQSRRHHLLPSEEPLALNRLARLFTSQAGSDGGDTQKPFIAFVLGGPGSGKGTQCTKIASDFGFAHLSAGDILRHEIASGSEKGELILEIIKEGRIVPSEITVELIRKAMEMNNAKRVLIDGFPRCEENRIAFERIVGTEPDIVIFFDCPEDEMVKRLLGRNQGRVDDNIETIKKRLKVFESLNIPVVDYYSSRGKVHKINATGTADEIFEAVRRLFSSLSIDSAVF

SEQ ID NO: 163922 - protein, 260 aa, Zea Mays
MWRRRVGALLRSPRTSSSASSACQSRRHHLLPSEEPLALNRLARLFTSQAGSDGGDTQKPFIAFVLGGPGSGKGTQCTKIASDFGFAHLSAGDILRHEIASGSEKGELILEIIKEGRIVPSEITVELIRKAMEMNNAKRVLIDGFPRCEENRIAFERIVGTEPDIVIFFDCPEDEMVKRLLGRNQGRVDDNIETIKKRLKVFESLNIPVVDYYSSRGKVHKINATGTADEIFEAVRRLFSSLSASNCRVRSPLRSLPRNF

SEQ ID NO: 163923 - protein, 253 aa, Zea Mays
MWRRRVGALLRSPRTSSSASSACQSRRHHLLPSEEPLALNRLARLFTSQAGSDGGDTQKPFIAFVLGGPGSGKGTQCTKIASDFGFAHLSAGDILRHEIASGSEKGELILEIIKEGRIVPSEITVELIRKAMEMNNAKRVLIDGFPRCEENRIAFERIVGTEPDIVIFFDCPEDEMVKRLLGRNQGRVDDNIETIKKRLKVFESLNIPVVDYYSSRGKVHKINATGTADEIFEAVRRLFSSLSASSSIYYLTH

SEQ ID NO: 163924 - protein, 268 aa, Zea Mays
MWRRRVGALLRSPRTSSSASSACQSRRHHLLPSEEPLALNRLARLFTSQAGSDGGDTQKPFIAFVLGGPGSGKGTQCTKIASDFGFAHLSAGDILRHEIASGSEKGELILEIIKEGRIVPSEITVELIRKAMEMNNAKRVLIDGFPRCEENRIAFERIVGTEPDIVIFFDCPEDEMVKRLLGRNQGRVDDNIETIKKRLKVFESLNIPVVDYYSSRGKVHKINATGTADEIFEAVRRLFSSLRHASTMIDVGVSIPLHLGRLQQSVHM

SEQ ID NO: 163925 - protein, 245 aa, Zea Mays
MWRRRVGALLRSPRTSSSASSACQSRRHHLLPSEEPLALNRLARLFTSQAGSDGGDTQKPFIAFVLGGPGSGKGTQCTKIASDFGFAHLSAGDILRHEIASGSEKGELILEIIKEGRIVPSEITVELIRKAMEMNNAKRVLIDGFPRCEENRIAFERIVGTEPDIVIFFDCPEDEMVKRLLGRNQGRVDDNIETIKKRLKVFESLNIPVVDYYSSRGKVHKINATGTADEIFEAVRRLFSSLRLS

SEQ ID NO: 163926 - protein, 202 aa, Zea Mays
MLQGSDGGDTQKPFIAFVLGGPGSGKGTQCTKIASDFGFAHLSAGDILRHEIASGSEKGELILEIIKEGRIVPSEITVELIRKAMEMNNAKRVLIDGFPRCEENRIAFERIVGTEPDIVIFFDCPEDEMVKRLLGRNQGRVDDNIETIKKRLKVFESLNIPVVDYYSSRGKVHKINATGTADEIFEAVRRLFSSLSIDSAVF

SEQ ID NO: 163927 - protein, 77 aa, Zea Mays
MSLSCAVNLCGSEHVSHVMKCMCGWHPENTTPLHAGQVHGTSAHFSKLKRQGPVRFPPCLKLYFQTTERRIEFLCSY

SEQ ID NO: 163928 - protein, 116 aa, Zea Mays
MRRAQSTIRGPRNYSHVTISRAITHHYSCGLLPINAAWTAVIMTPADCSYVTKAEDPCVLSAFTIHIMYYYYYTSGPTCWGSTSLYVPPLNYKREGTQRYKDSLNHTVNTTYTQWR

SEQ ID NO: 163929 - protein, 983 aa, Zea Mays
MDLVAGAVGSIIRKLGELLQAEYKLQAGLLEQIESLKNELESAHAALRTVSEVPPEQLDPQVRLWAREVREASYDMEDILDTFLVDGAPADGLGKGRRLLKKMEKLFRKSKERHAIAGAIQKMKGRLQEVADRRDRYAVPVAAPAPVRTLDPRLVYMHREAAQLVGIDKTKAELMAMLLPLSSSRCPEDDVDVSASDGDKMKIVSVVGAGGLGKTTLAKAVYDELKPRYDHGAFVSVGRKPDLVQVFTSIFFHLDEQKYNAIREVKDLQLLAGELRRFLQDKRYLIVIDDVWDTKSWDTIKLAFDQKNKQSRVITTTRNRQVASSEEVYELHPLSHDSSKKLFYMRLFWGEDKCPANHPEEASQRILDKCGGVPLAIITMASLLVGKSREYWLEVCNSPGFYRGKDTNEQVDDTVWILSLSYYDLPSYLKTCLLYLSVYPEDYEIEKHRLIWKWVAEGFIEKNAGSSSLFEQGEEYFHELINRSMIEAMEFDEGFGIIIGCRVHDMVLDLIRDISNKENFVTVSYDDGRRGTTSSSSRNVVRRLAHQNRRMTEDNPVEGSMTHLRSLVACGCDMDGWVMHSSSTLLLRVLALEQCCTPPSMDIGHLGKLLHLRYLGLRGTLVDKLPDEIGSLKLLQALDLLGTGISRLPRTVCLLTQLKYLYGDACTIVPNGFLGKVTSLEELHIHPPSEGDEYNQQQFMQDLGTHQGEIRVLDLMRFRDEFDDLSMESGLVQALGSLHKLQTLLVSSDYTKQQVAQYSWDTAALPRCLRILVFVDLRFHHVPSSINPASLPNLSRLELSVGHLDEASLRALGGLPGLTYLTLTAADWLKSSCKASVVDVVVADGFFLKLRSLRLYGWMLQLVPSEDSTSVSFNIWKGDEDVVALGFCRTSVAAPMTSSIIMPDLIDLWFYVPVRALCKSRNGSICDSLGWECLPSLHKIDAVVDSKGAYIGDVKKVEAEMRQAAKLHPNQPIINILLLNQYI

SEQ ID NO: 163930 - protein, 282 aa, Zea Mays
MKSTLNPPSPARSEAMQDAALMPREKDGEEEKHRRFHGVLLAFHSYTRTRSPHSDLGWVVWGRGSQGRHRACRLAAATKITEGQSETASAPEGVSVLRRNSDDVGWEYGALVDLNNKDKVKCILCDKQKCGGVYQLKQHIAQKGKNVKKCQCMKTTKEKLLEAQEKCKKALDEAKRKREEKTVRELELREEVHVSRVGGSEEVTCVGSLEPHKLGPMDKWTKAIDPTATKSESLTQQRLNKELWKERLHEVHKYIARWAFDHAISFNACDNDEFKQMCEAIG

SEQ ID NO: 163931 - protein, 135 aa, Zea Mays
MFDLRGRLLEEEYARTKSLLQEREAEKMKNGCSIMTKVWSDKRRSIMNVCANCADGTSFISSKEMSDVSHTSEVIFELVDKAIEGIGPNDVVQVVTDNASNNMGAKKLLHVKRPHIFWTSCATHTINLMLQGIGC

SEQ ID NO: 163932 - protein, 213 aa, Zea Mays
MMESQPLQAPTATAPAPGSAEPAGAPPAVTPGKEFTRTCKGLVVVLIGGYVLLQLLPSSLNYLAIIPSKTIPYVWTVFTAGYIEQVLPGAIGSSLGLLFCGKDIEPAWGRKEFLKFIILINSICGILAFCFAIGLYYVTGKESFLPVTDPVANLFDRLLCARSRPLEVALPISDPTKASRRRERGERVLEERLAADNAGDTEASPRGHGTAED

SEQ ID NO: 163933 - protein, 109 aa, Zea Mays
MCFFWKIKAKWMPFFVVCFSSIMAFIVPDSINFLPTLVSGMYVSWLYLRYFQRNPLTGLKGDPSDDFSFPSLFPAAMRERGERVLEERLAADNAGDTEASPRGHGTAED

SEQ ID NO: 163934 - protein, 290 aa, Zea Mays
MLQQKGIPERPMYYPEFPLQDPEPEVVLVDEDRDPVERVHEALRCLPQYDPSVRWTTEENPPFLYWKIRDFAHAYSSGITTPSVVAEYVIAGIEEWNNKKPPMPMLIYFNAEDLKKQAEASTKRFQRGNPISILDGIFVAIKDDIDCFPYPTKGATTFFDQIHTVERDAVCVARLRKCGVIFIGKANMHELGLGVTGNNPNYGTARNPHSVDRYTGGSSSGPAALVSSGLCSIAIGTDGGGSVRIPSALCGIVGFKTTYGRTDMTGVLCDSGTVEVASPLTSSVDDAILV

SEQ ID NO: 163935 - protein, 188 aa, Zea Mays
MPMLIYFNAEDLKKQAEASTKRFQRGNPISILDGIFVAIKDDIDCFPYPTKGATTFFDQIHTVERDAVCVARLRKCGVIFIGKANMHELGLGVTGNNPNYGTARNPHSVDRYTGGSSSGPAALVSSGLCSIAIGTDGGGSVRIPSALCGIVGFKTTYGRTDMTGVLCDSGTVEVASPLTSSVDDAILV

SEQ ID NO: 163936 - protein, 266 aa, Zea Mays
MLQQKGIPERPMYYPEFPLQDPEPEVVLVDEDRDPVERVHEALRCLPQYDPSVRWTTEENPPFLYWKIRDFAHAYSSGITTPSVVAEYVIAGIEEWNNKKPPMPMLIYFNAEDLKKQAEASTKRFQRGNPISILDGIFVAIKDDIDCFPYPTKGATTFFDQIHTVERDAVCVARLRKCGVIFIGKANMHELGLGVTGNNPNYGTARNPHSVDRYTGGSSSGPAALVSSGLCSIAIGTDGGGSVRIPSALCGIVGFKTTYGRTDMTG

SEQ ID NO: 163937 - protein, 139 aa, Zea Mays
MHELGLGVTGNNPNYGTARNPHSVDRYTGGSSSGPAALVSSGLCSIAIGTDGGGSVRIPSALCGIVGFKTTYGRTDMTGVLCDSGTVEVASPLTSSVDDAILVYSAIAGSRPMDKLTLRPSPLCVPNLLSPENSMSWIS

SEQ ID NO: 163938 - protein, 54 aa, Zea Mays
MMLMSLELNVQIAYRRECCRDLSFYLLSRFFLKKKVNLKNADPDHINTEGHFRY

SEQ ID NO: 163939 - protein, 658 aa, Zea Mays
MMRSEVIEAGKLVNLWNEWGLQILVIASFGLQVFLLVFGGVRRHSNSTALTFFLWSAYLLADSTAIYTLGHLSVDSMSDEHQLVAFWAPFLLLHLGGPDNITAYALEDNALWLRHLQTLAVQVLGAAYVIYEYIASRGALLFLASLSMFFAGLLKYGERIWALKCGNISSIRSSISIRKIKTDPYQLLTLGTSEEDLLLGAHSQFDICKGVFADIIMLPNPLVRSQPKPRSVISYLGEDLYKLVEMELSLMYDFLYTKAAVIHTWYGFCIHFISLFGTATTFLLFQLSISNSGNRYSRVDVAISYVLLVGALVLEIISVCRAVLSTWTCSLLHRRGRGWEWSLHIVTSLGQRVHPASRRLWSGSIGQYNLFHLCTRNTNEIGSRLATKLGLEDWWNKMHFSGTFPHANSSLSIQDIKKLVLQALRSKEQALQHQDTDLNSRGSFILKRMEAYKDFARWSVNIDFDESILVWHIATEVFIRKSKARHAKELLEATEKDTVERDLVIRTTQWRHPLIPRREKLAEVAWSFSQFALGSVKAPNPHGDSIRDSANMYAILLANELLSIELQWQDQRDTLELILGVWVEMSLYAADHCSQESHARQLSNGCEFITIVSLLAHHFKYYSGAFRGADNLGEDKPASENKPVTVNNPMSENCGNLV

SEQ ID NO: 163940 - protein, 514 aa, Zea Mays
MMRSEVIEAGKLVNLWNEWGLQILVIASFGLQVFLLVFGGVRRHSNSTALTFFLWSAYLLADSTAIYTLGHLSVDSMSDEHQLVAFWAPFLLLHLGGPDNITAYALEDNALWLRHLQTLAVQVLGAAYVIYEYIASRGALLFLASLSMFFAGLLKYGERIWALKCGNISSIRSSISIRKIKTDPYQLLTLGTSEEDLLLGAHSQFDICKGVFADIIMLPNPLVRSQPKPRSVISYLGEDLYKLVEMELSLMYDFLYTKAAVIHTWYGFCIHFISLFGTATTFLLFQLSISNSGNRYSRVDVAISYVLLVGALVLEIISVCRAVLSTWTCSLLHRRGRGWEWSLHIVTSLGQRVHPASRRLWSGSIGQYNLFHLCTRNTNEIGSRLATKLGLEDWWNKMHFSGTFPHANSSLSIQDIKKLVLQALRSKEQALQHQDTDLNSRGSFILKRMEAYKDFARWSVNIDFDESILVWHIATEVFIRKSKARHAKELLEATEKDTVERDLVIRTTQWRHPL

SEQ ID NO: 163941 - protein, 589 aa, Zea Mays
MMRSEVIEAGKLVNLWNEWGLQILVIASFGLQVFLLVFGGVRRHSNSTALTFFLWSAYLLADSTAIYTLGHLSVDSMSDEHQLVAFWAPFLLLHLGGPDNITAYALEDNALWLRHLQTLAVQVLGAAYVIYEYIASRGALLFLASLSMFFAGLLKYGERIWALKCGNISSIRSSISIRKIKTDPYQLLTLGTSEEDLLLGAHSQFDICKGVFADIIMLPNPLVRSQPKPRSVISYLGEDLYKLVEMELSLMYDFLYTKAAVIHTWYGFCIHFISLFGTATTFLLFQLSISNSGNRYSRVDVAISYVLLVGALVLEIISVCRAVLSTWTCSLLHRRGRGWEWSLHIVTSLGQRVHPASRRLWSGSIGQYNLFHLCTRNTNEIGSRLATKLGLEDWWNKMHFSGTFPHANSSLSIQDIKKLVLQALRSKEQALQHQDTDLNSRGSFILKRMEAYKDFARWSVNIDFDESILVWHIATEVFIRKSKARHAKELLEATEVLSNYLMFLLVVKPNMLPGAARHNIHLTSCEQLEGHCRTRFGDKDNPVAPSPVSWNPYYILKELFHHDGPSCSRIPRREKLAEVAWSFSQFALV

SEQ ID NO: 163942 - protein, 657 aa, Zea Mays
MMRSEVIEAGKLVNLWNEWGLQILVIASFGLQVFLLVFGGVRRHSNSTALTFFLWSAYLLADSTAIYTLGHLSVDSMSDEHQLVAFWAPFLLLHLGGPDNITAYALEDNALWLRHLQTLAVQVLGAAYVIYEYIASRGALLFLASLSMFFAGLLKYGERIWALKCGNISSIRSSISIRKIKTDPYQLLTLGTSEEDLLLGAHSQFDICKGVFADIIMLPNPLVRSQPKPRSVISYLGEDLYKLVEMELSLMYDFLYTKAAVIHTWYGFCIHFISLFGTATTFLLFQLSISNSGNRYSRVDVAISYVLLVGALVLEIISVCRAVLSTWTCSLLHRRGRGWEWSLHIVTSLGQRVHPASRRLWSGSIGQYNLFHLCTRNTNEIGSRLATKLGLEDWWNKMHFSGTFPHANSSLSIQDIKKLVLQALRSKEQALQHQDTDLNSRGSFILKRMEAYKDFARWSVNIDFDESILVWHIATEVFIRKSKARHAKELLEATEDTVERDLVIRTTQWRHPLIPRREKLAEVAWSFSQFALGSVKAPNPHGDSIRDSANMYAILLANELLSIELQWQDQRDTLELILGVWVEMSLYAADHCSQESHARQLSNGCEFITIVSLLAHHFKYYSGAFRGADNLGEDKPASENKPVTVNNPMSENCGNLV

SEQ ID NO: 163943 - protein, 496 aa, Zea Mays
MMRSEVIEAGKLVNLWNEWGLQILVIASFGLQVFLLVFGGVRRHSNSTALTFFLWSAYLLADSTAIYTLGHLSVDSMSDEHQLVAFWAPFLLLHLGGPDNITAYALEDNALWLRHLQTLAVQVLGAAYVIYEYIASRGALLFLASLSMFFAGLLKYGERIWALKCGNISSIRSSISIRKIKTDPYQLLTLGTSEEDLLLGAHSQFDICKGVFADIIMLPNPLVRSQPKPRSVISYLGEDLYKLVEMELSLMYDFLYTKAAVIHTWYGFCIHFISLFGTATTFLLFQLSISNSGNRYSRVDVAISYVLLVGALVLEIISVCRAVLSTWTCSLLHRRGRGWEWSLHIVTSLGQRVHPASRRLWSGSIGQYNLFHLCTRNTNEIGSRLATKLGLEDWWNKMHFSGTFPHANSSLSIQDIKKLVLQALRSKEQALQHQDTDLNSRGSFILKRMEAYKDFARWSVNIDFDESILVWHIATEVFIRKSKARHAKELLEATEN

SEQ ID NO: 163944 - protein, 513 aa, Zea Mays
MMRSEVIEAGKLVNLWNEWGLQILVIASFGLQVFLLVFGGVRRHSNSTALTFFLWSAYLLADSTAIYTLGHLSVDSMSDEHQLVAFWAPFLLLHLGGPDNITAYALEDNALWLRHLQTLAVQVLGAAYVIYEYIASRGALLFLASLSMFFAGLLKYGERIWALKCGNISSIRSSISIRKIKTDPYQLLTLGTSEEDLLLGAHSQFDICKGVFADIIMLPNPLVRSQPKPRSVISYLGEDLYKLVEMELSLMYDFLYTKAAVIHTWYGFCIHFISLFGTATTFLLFQLSISNSGNRYSRVDVAISYVLLVGALVLEIISVCRAVLSTWTCSLLHRRGRGWEWSLHIVTSLGQRVHPASRRLWSGSIGQYNLFHLCTRNTNEIGSRLATKLGLEDWWNKMHFSGTFPHANSSLSIQDIKKLVLQALRSKEQALQHQDTDLNSRGSFILKRMEAYKDFARWSVNIDFDESILVWHIATEVFIRKSKARHAKELLEATEDTVERDLVIRTTQWRHPL

SEQ ID NO: 163945 - protein, 92 aa, Zea Mays
MGWQGVNPATDFRGCGFVSLENLLFFARTYPASFKRLMLKQQGMRTTWEYPFAVAGVNISYMLIQLLELNSGHIASIVSGFVFFLKMWNLWI

SEQ ID NO: 163946 - protein, 112 aa, Zea Mays
MGWQGVNPATDFRGCGFVSLENLLFFARTYPCAPKSLPGINFIKVLTEHEDAFDVLYCIAFEMMDAQWLAMRASYMQFKEVLEATRQQLERELSLEDLNGIHDLPACNLLYK

SEQ ID NO: 163947 - protein, 195 aa, Zea Mays
MVGNRAWFAGLFSGSGKRRQVSAEKIVLDLTPLQEQRLQSLKERLNVPYDETRTDHQESLRALWNASFPDTELTSLVSEQWKDMGWQGVNPATDFRGCGFVSLENLLFFARTYPCAPKSLPGINFIKVLTEHEDAFDVLYCIAFEMMDAQWLAMRASYMQFKEVLEATRQQLERELSLEDLNGIHDLPACNLLYK

SEQ ID NO: 163948 - protein, 97 aa, Zea Mays
MLVILIQAAAAECATGEGSSEDDGDAAWKAAIDSIVSVGFSVPSSNGMVKAASSGNDEVNNHVDLEEPRERKLKGPGLSCIRCVLNSNTFIIVALVA

SEQ ID NO: 163949 - protein, 234 aa, Zea Mays
MCIAREEGVAALWKGVIPGLHRQFLYGGLRIGLYEPVKAFFVGGAVVGDVSLLSKILAALTTGVIAIVVANPTDLVKVRLQADGKANTIKRSYSGALNAYATIIRQEGIGALWTGLGPNVARNAIINAAELASYDQFKQMFLKLPGFTDNVFTHLLAGLGAGFFAVCIGSPVDVVKSRMMGDSTYRSTLDCFTKTLKNDGPGAFYKGFIANFCRIGSWNVIMFLTLEQVKRFFL

SEQ ID NO: 163950 - protein, 218 aa, Zea Mays
MATASSFTAIFFSSAFAACFAEVCTIPLDTAKVRLQLQRKAPLPSPPVAAAAAAGGTLATIMCIAREEGVAALWKGVIPGLHRQFLYGGLRIGLYEPVKAFFVGGAVVGDVSLLSKILAALTTGVIAIVVANPTDLVKVRLQADGKANTIKRSYSGALNAYATIIRQEGIGALWTGLGPNVARNAIINAAELASYDQFKQLDLVLGFLLFALALRWMW

SEQ ID NO: 163951 - protein, 184 aa, Zea Mays
MATASSFTAIFFSSAFAACFAEVCTIPLDTAKVRLQLQRKAPLPSPPVAAAAAAGGTLATIMCIAREEGVAALWKGVIPGLHRQFLYGGLRIGLYEPVKAFFVGGAVVGDVSLLSKILAALTTGVIAIVVANPTDLVKVRLQADGKANTIKRSYSGALNAYATIIRQVLELCGLALVQMSHAMP

SEQ ID NO: 163952 - protein, 278 aa, Zea Mays
MATASSFTAIFFSSAFAACFAEVCTIPLDTAKVRLQLQRKAPLPSPPVAAAAAAGGTLATIMCIAREEGVAALWKGVIPGLHRQFLYGGLRIGLYEPVKAFFVGGAVVGDVSLLSKILAALTTGVIAIVVANPTDLVKVRLQADGKANTIKRSYSGALNAYATIIRQEGIGALWTGLGPNVARNAIINAAELASYDQFKQMFLKLPGFTDNVFTHLLAGLGAGFFAVCIGSPVDVVKSRMMGDSTYRSTLDCFTKTLKNDLQQSKQSALIRSVLCFDH

SEQ ID NO: 163953 - protein, 56 aa, Zea Mays
MMGDSTYRSTLDCFTKTLKNDGPGAFYKGFIANFCRIGSWNVIMFLTLEQVKRFFL

SEQ ID NO: 163954 - protein, 59 aa, Zea Mays
MCIYSGDRAWILARTKQPKIFMNEPNETTKSACDYSIKRCLDLLESILSDEERTQATMC

SEQ ID NO: 163955 - protein, 153 aa, Zea Mays
MWLVAHGRCWTADRLARRGLPHPQSCLLCDQEEETMNHLLVSCVFSREVWFNILKTVGLQHLSPSLDSSSFDDWWENVSMTLISPSNKKLRKGLNSLIILGAWAIWIHRNQCVFNGEQPRASKVINWVMTESHLWCRARARGLSDILLPRHII

SEQ ID NO: 163956 - protein, 236 aa, Zea Mays
MANERERMSKVPYASEIGSIMYAMISTSPDVSYAISATSRYQADPGEGHWTEVKDILKYFRRTKDMFLVYGGKEELVVTGYTDASFQTDPDKLKSQSSFVFTINGGAVSWKSSKQETVTDSTTEAEYIAASESTKEGVWIRKLLIDLGVFPNASSPLNLYCDNNGAIAQAKEPRNHQKSKHVLRKFHLIREFVRRGEIKICKIHTDLNVADPLIKPLPKPKHEAHMRSMGIRYLLD

SEQ ID NO: 163957 - protein, 59 aa, Zea Mays
MRMDGRTWWVLGAGDGPSEDLGEAAAVAQSTPRERESRSRARAERSGAALAPCPVAVGF

SEQ ID NO: 163958 - protein, 1795 aa, Zea Mays
MDLVTGPLAILPSKLQELLQIQDEYRLQKEVRGRVEMICRELQSMHAALRKVADVPRDQIDLQTKVWRRDVREASYDIEDAIDTFLMRIRDRAPSDPNRFRLAMKKMTKLSRKVKAIHEIGAAIGDIVRKIQELVDRRVRYKLDVAADRSISMVSVDPRLAALYKEATQLIGIDQSMSEIISMLLSDESGQQHIKKISIVGAGGLGKTTLAKETYERLRSEYEFATFVSVGQNPDLVRVFKNILVKLDIYQQVDTINRTDTRALIDEIRQRLSYVRCRYLIVIDDVWDLESWHTLELAFVENNNGSGIIITTRNFAVATIAGRVYKLRPLSYHHSKELFYRSLFGEGVCLDDQIINKASDKFLKKCDGIPLALITMASLFMGKPTQMWSELANNAFGHKGRNSHLEETTMRILSLSYSDLPLNLRTCFVYLSRYPDDYVINKSSLIWKWIAEGFIQEEQGKQLFELGEEFFNELVSRSIIQVVQSKFDNTVQGFRIHSMVLGLIRLLSSEENFVSVLDEEGQISISGKLRRLAIHNRKEEHNLGDNMDLLPWLRSFTAIECPIYMIPPVFIFKLLRVLDLESCGSMEGYDLKQLGNLHNLRFIGLCNTYVRTLPQELGHLKFLQTLELKGSGVEELPSSMGELAGLMCLNADWTTRVPKWIGMLTSLQQLVMYPCGGYSARWFVKGLGHLRELRMLRLLIKADDEKQLAQLLESVLKLPKIEALHLDYYGGVQLNRLVKLEPSDFACSGRLRSLELQLLEFSRLPVWLNAYYLPQIRDLSLLMFDVDKQDLKNLGDFKELRHLHLLIVNTERRDAITCASGGFRNLRFFSITKPFKFQQGDLPRLEILDFHFNVPLQSGANSGLDFDFGLENIPSLQQVIVQINCLDAFPLPEEVETALRHAIGVHPNRPIVDISLPRRKLDKADNDGAEGRSKLAHYSKSLSSAHDKPMDELIKRLYVVDNEAYDKKMKIVPIVRSEGLGKTTLAQKVFDKLSPHFDCAAFVLVGQNPDMRKVFTDILIGLDNQKYQDFPMTILDIIELIGLVRKSLINKRFFVVVDDVWDLKAWDIIKSALIENTNGSAVLTTTSRQIWEHENWRPSGDDKSDSDAEQLEPHLDVTTPADVLPASSPSKSKVVAHVELRHDDPDSSAFGIPQVAGDTQPELRLFPEADADLKGFFYENLFGSEDKCPDDLKDICKDLIQISAGVLSDAYETVEELRGYEISAERLVWAWIAQGFVKETQGQNDLEKVGKKYLIDLISRKMIEAVEVHADGMALSCRAYDLLHGLIVSLSTEEKFVEILNDSQSQERASNPNTEVHRLSIQIQRNNMLHPLPKAWMKQVQSLVVSSDTVPDLSDFQGLHAMDLGGCDSLQVDHLKGISKTTSLIYLAIGGKYIADVPKEVSWLKKLRTLDLTASGLSELPRCILTLTNLERLFVNSHMKIPGKISKMSGLQELGDINIVKPELLKRLRKLSKLRVLRIAMWSWDEGSKSSVKLWWETLHSLIGSCKKIESLCILTFCSLDFMDGSGDDNKWPPQTLKNLEISHSAFLDKLPSWFDSLSTISSLTIEVNKLSKNITDTLAKLSALRSLSLTSIEKPEPEVRFVIGSAGRFENLESLKFVCNEMVNLLERPESNATQQLTGLTIVFHASRTERSRNKDFRFGLDKLLSLQHVRVEINCSNATQRTVKNAEAAIGEEISKIRRDDGSQPILEIRRLQEESMIAGKDQTQDANKTPSSSSTMETTLRAQPIGESLMPSVETVSSKVFVSQNSSNDTFFNNVGILTSSTKIKTLKERAL

SEQ ID NO: 163959 - protein, 1054 aa, Zea Mays
MDLVTGPLAILPSKLQELLQIQDEYRLQKEVRGRVEMICRELQSMHAALRKVADVPRDQIDLQTKVWRRDVREASYDIEDAIDTFLMRIRDRAPSDPNRFRLAMKKMTKLSRKVKAIHEIGAAIGDIVRKIQELVDRRVRYKLDVAADRSISMVSVDPRLAALYKEATQLIGIDQSMSEIISMLLSDESGQQHIKKISIVGAGGLGKTTLAKETYERLRSEYEFATFVSVGQNPDLVRVFKNILVKLDIYQQVDTINRTDTRALIDEIRQRLSYVRYLIVIDDVWDLESWHTLELAFVENNNGSGIIITTRNFAVATIAGRVYKLRPLSYHHSKELFYRSLFGEGVCLDDQIINKASDKFLKKCDGIPLALITMASLFMGKPTQMWSELANNAFGHKGRNSHLEETTMRILSLSYSDLPLNLRTCFVYLSRYPDDYVINKSSLIWKWIAEGFIQEEQGKQLFELGEEFFNELVSRSIIQVVQSKFDNTVQGFRIHSMVLGLIRLLSSEENFVSVLDEEGQISISGKLRRLAIHNRKEEHNLGDNMDLLPWLRSFTAIECPIYMIPPVFIFKLLRVLDLESCGSMEGYDLKQLGNLHNLRFIGLCNTYVRTLPQELGHLKFLQTLELKGSGVEELPSSMGELAGLMCLNADWTTRVPKWIGMLTSLQQLVMYPCGGYSARWFVKGLGHLRELRMLRLLIKADDEKQLAQLLESVLKLPKIEALHLDYYGGVQLNRLVKLEPSDFACSGRLRSLELQLLEFSRLPVWLNAYYLPQIRDLSLLMFDVDKQDLKNLGDFKELRHLHLLIVNTERRDAITCASGGFRNLRFFSITKPFKFQQGDLPRLEILDFHFNVPLQSGANSGLDFDFGLENIPSLQQVIVQINCLDAFPLPEEVETALRHAIGVHPNRPIVDISLPRRKLDKADNDGAEGRSKLAHYSKSLSSAHDKPMDELIKRLYVVDNEAYDKKMKIVPIVRSEGLGKTTLAQKVFDKLSPHFDCAAFVLVGQNPDMRKVFTDILIGLDNQKYQDFPMTILDIIELIGLVRKSLINKSCASD

SEQ ID NO: 163960 - protein, 1056 aa, Zea Mays
MDLVTGPLAILPSKLQELLQIQDEYRLQKEVRGRVEMICRELQSMHAALRKVADVPRDQIDLQTKVWRRDVREASYDIEDAIDTFLMRIRDRAPSDPNRFRLAMKKMTKLSRKVKAIHEIGAAIGDIVRKIQELVDRRVRYKLDVAADRSISMVSVDPRLAALYKEATQLIGIDQSMSEIISMLLSDESGQQHIKKISIVGAGGLGKTTLAKETYERLRSEYEFATFVSVGQNPDLVRVFKNILVKLDIYQQVDTINRTDTRALIDEIRQRLSYVRCRYLIVIDDVWDLESWHTLELAFVENNNGSGIIITTRNFAVATIAGRVYKLRPLSYHHSKELFYRSLFGEGVCLDDQIINKASDKFLKKCDGIPLALITMASLFMGKPTQMWSELANNAFGHKGRNSHLEETTMRILSLSYSDLPLNLRTCFVYLSRYPDDYVINKSSLIWKWIAEGFIQEEQGKQLFELGEEFFNELVSRSIIQVVQSKFDNTVQGFRIHSMVLGLIRLLSSEENFVSVLDEEGQISISGKLRRLAIHNRKEEHNLGDNMDLLPWLRSFTAIECPIYMIPPVFIFKLLRVLDLESCGSMEGYDLKQLGNLHNLRFIGLCNTYVRTLPQELGHLKFLQTLELKGSGVEELPSSMGELAGLMCLNADWTTRVPKWIGMLTSLQQLVMYPCGGYSARWFVKGLGHLRELRMLRLLIKADDEKQLAQLLESVLKLPKIEALHLDYYGGVQLNRLVKLEPSDFACSGRLRSLELQLLEFSRLPVWLNAYYLPQIRDLSLLMFDVDKQDLKNLGDFKELRHLHLLIVNTERRDAITCASGGFRNLRFFSITKPFKFQQGDLPRLEILDFHFNVPLQSGANSGLDFDFGLENIPSLQQVIVQINCLDAFPLPEEVETALRHAIGVHPNRPIVDISLPRRKLDKADNDGAEGRSKLAHYSKSLSSAHDKPMDELIKRLYVVDNEAYDKKMKIVPIVRSEGLGKTTLAQKVFDKLSPHFDCAAFVLVGQNPDMRKVFTDILIGLDNQKYQDFPMTILDIIELIGLVRKSLINKSCASD

SEQ ID NO: 163961 - protein, 1254 aa, Zea Mays
MDLVTGPLAILPSKLQELLQIQDEYRLQKEVRGRVEMICRELQSMHAALRKVADVPRDQIDLQTKVWRRDVREASYDIEDAIDTFLMRIRDRAPSDPNRFRLAMKKMTKLSRKVKAIHEIGAAIGDIVRKIQELVDRRVRYKLDVAADRSISMVSVDPRLAALYKEATQLIGIDQSMSEIISMLLSDESGQQHIKKISIVGAGGLGKTTLAKETYERLRSEYEFATFVSVGQNPDLVRVFKNILVKLDIYQQVDTINRTDTRALIDEIRQRLSYVRCRYLIVIDDVWDLESWHTLELAFVENNNGSGIIITTRNFAVATIAGRVYKLRPLSYHHSKELFYRSLFGEGVCLDDQIINKASDKFLKKCDGIPLALITMASLFMGKPTQMWSELANNAFGHKGRNSHLEETTMRILSLSYSDLPLNLRTCFVYLSRYPDDYVINKSSLIWKWIAEGFIQEEQGKQLFELGEEFFNELVSRSIIQVVQSKFDNTVQGFRIHSMVLGLIRLLSSEENFVSVLDEEGQISISGKLRRLAIHNRKEEHNLGDNMDLLPWLRSFTAIECPIYMIPPVFIFKLLRVLDLESCGSMEGYDLKQLGNLHNLRFIGLCNTYVRTLPQELGHLKFLQTLELKGSGVEELPSSMGELAGLMCLNADWTTRVPKWIGMLTSLQQLVMYPCGGYSARWFVKGLGHLRELRMLRLLIKADDEKQLAQLLESVLKLPKIEALHLDYYGGVQLNRLVKLEPSDFACSGRLRSLELQLLEFSRLPVWLNAYYLPQIRDLSLLMFDVDKQDLKNLGDFKELRHLHLLIVNTERRDAITCASGGFRNLRFFSITKPFKFQQGDLPRLEILDFHFNVPLQSGANSGLDFDFGLENIPSLQQVIVQINCLDAFPLPEEVETALRHAIGVHPNRPIVDISLPRRKLDKADNDGAEGRSKLAHYSKSLSSAHDKPMDELIKRLYVVDNEAYDKKMKIVPIVRSEGLGKTTLAQKVFDKLSPHFDCAAFVLVGQNPDMRKVFTDILIGLDNQKYQDFPMTILDIIELIGLVRKSLINKRFFVVVDDVWDLKAWDIIKSALIENTNGSAVLTTTSRQIWEHENWRPSGDDKSDSDAEQLEPHLDVTTPADVLPASSPSKSKVVAHVELRHDDPDSSAFGIPQVAGDTQPELRLFPEADADLKGFFYENLFGSEDKCPDDLKDICKDLIQISAGVLSDAYETVEELRGITYDTGKLAACVSEKKIRALLSQTTWPSKGLLKIF

SEQ ID NO: 163962 - protein, 1793 aa, Zea Mays
MDLVTGPLAILPSKLQELLQIQDEYRLQKEVRGRVEMICRELQSMHAALRKVADVPRDQIDLQTKVWRRDVREASYDIEDAIDTFLMRIRDRAPSDPNRFRLAMKKMTKLSRKVKAIHEIGAAIGDIVRKIQELVDRRVRYKLDVAADRSISMVSVDPRLAALYKEATQLIGIDQSMSEIISMLLSDESGQQHIKKISIVGAGGLGKTTLAKETYERLRSEYEFATFVSVGQNPDLVRVFKNILVKLDIYQQVDTINRTDTRALIDEIRQRLSYVRYLIVIDDVWDLESWHTLELAFVENNNGSGIIITTRNFAVATIAGRVYKLRPLSYHHSKELFYRSLFGEGVCLDDQIINKASDKFLKKCDGIPLALITMASLFMGKPTQMWSELANNAFGHKGRNSHLEETTMRILSLSYSDLPLNLRTCFVYLSRYPDDYVINKSSLIWKWIAEGFIQEEQGKQLFELGEEFFNELVSRSIIQVVQSKFDNTVQGFRIHSMVLGLIRLLSSEENFVSVLDEEGQISISGKLRRLAIHNRKEEHNLGDNMDLLPWLRSFTAIECPIYMIPPVFIFKLLRVLDLESCGSMEGYDLKQLGNLHNLRFIGLCNTYVRTLPQELGHLKFLQTLELKGSGVEELPSSMGELAGLMCLNADWTTRVPKWIGMLTSLQQLVMYPCGGYSARWFVKGLGHLRELRMLRLLIKADDEKQLAQLLESVLKLPKIEALHLDYYGGVQLNRLVKLEPSDFACSGRLRSLELQLLEFSRLPVWLNAYYLPQIRDLSLLMFDVDKQDLKNLGDFKELRHLHLLIVNTERRDAITCASGGFRNLRFFSITKPFKFQQGDLPRLEILDFHFNVPLQSGANSGLDFDFGLENIPSLQQVIVQINCLDAFPLPEEVETALRHAIGVHPNRPIVDISLPRRKLDKADNDGAEGRSKLAHYSKSLSSAHDKPMDELIKRLYVVDNEAYDKKMKIVPIVRSEGLGKTTLAQKVFDKLSPHFDCAAFVLVGQNPDMRKVFTDILIGLDNQKYQDFPMTILDIIELIGLVRKSLINKRFFVVVDDVWDLKAWDIIKSALIENTNGSAVLTTTSRQIWEHENWRPSGDDKSDSDAEQLEPHLDVTTPADVLPASSPSKSKVVAHVELRHDDPDSSAFGIPQVAGDTQPELRLFPEADADLKGFFYENLFGSEDKCPDDLKDICKDLIQISAGVLSDAYETVEELRGYEISAERLVWAWIAQGFVKETQGQNDLEKVGKKYLIDLISRKMIEAVEVHADGMALSCRAYDLLHGLIVSLSTEEKFVEILNDSQSQERASNPNTEVHRLSIQIQRNNMLHPLPKAWMKQVQSLVVSSDTVPDLSDFQGLHAMDLGGCDSLQVDHLKGISKTTSLIYLAIGGKYIADVPKEVSWLKKLRTLDLTASGLSELPRCILTLTNLERLFVNSHMKIPGKISKMSGLQELGDINIVKPELLKRLRKLSKLRVLRIAMWSWDEGSKSSVKLWWETLHSLIGSCKKIESLCILTFCSLDFMDGSGDDNKWPPQTLKNLEISHSAFLDKLPSWFDSLSTISSLTIEVNKLSKNITDTLAKLSALRSLSLTSIEKPEPEVRFVIGSAGRFENLESLKFVCNEMVNLLERPESNATQQLTGLTIVFHASRTERSRNKDFRFGLDKLLSLQHVRVEINCSNATQRTVKNAEAAIGEEISKIRRDDGSQPILEIRRLQEESMIAGKDQTQDANKTPSSSSTMETTLRAQPIGESLMPSVETVSSKVFVSQNSSNDTFFNNVGILTSSTKIKTLKERAL

SEQ ID NO: 163963 - protein, 922 aa, Zea Mays
MDLVTGPLAILPSKLQELLQIQDEYRLQKEVRGRVEMICRELQSMHAALRKVADVPRDQIDLQTKVWRRDVREASYDIEDAIDTFLMRIRDRAPSDPNRFRLAMKKMTKLSRKVKAIHEIGAAIGDIVRKIQELVDRRVRYKLDVAADRSISMVSVDPRLAALYKEATQLIGIDQSMSEIISMLLSDESGQQHIKKISIVGAGGLGKTTLAKETYERLRSEYEFATFVSVGQNPDLVRVFKNILVKLDIYQQVDTINRTDTRALIDEIRQRLSYVRYLIVIDDVWDLESWHTLELAFVENNNGSGIIITTRNFAVATIAGRVYKLRPLSYHHSKELFYRSLFGEGVCLDDQIINKASDKFLKKCDGIPLALITMASLFMGKPTQMWSELANNAFGHKGRNSHLEETTMRILSLSYSDLPLNLRTCFVYLSRYPDDYVINKSSLIWKWIAEGFIQEEQGKQLFELGEEFFNELVSRSIIQVVQSKFDNTVQGFRIHSMVLGLIRLLSSEENFVSVLDEEGQISISGKLRRLAIHNRKEEHNLGDNMDLLPWLRSFTAIECPIYMIPPVFIFKLLRVLDLESCGSMEGYDLKQLGNLHNLRFIGLCNTYVRTLPQELGHLKFLQTLELKGSGVEELPSSMGELAGLMCLNADWTTRVPKWIGMLTSLQQLVMYPCGGYSARWFVKGLGHLRELRMLRLLIKADDEKQLAQLLESVLKLPKIEALHLDYYGGVQLNRLVKLEPSDFACSGRLRSLELQLLEFSRLPVWLNAYYLPQIRDLSLLMFDVDKQDLKNLGDFKELRHLHLLIVNTERRDAITCASGGFRNLRFFSITKPFKFQQGDLPRLEILDFHFNVPLQSGANSGLDFDFGLENIPSLQQVIVQINCLDAFPLPEEVETALRHAIGVHPNRPIVDISLPRRKLDKV

SEQ ID NO: 163964 - protein, 1075 aa, Zea Mays
MDLVTGPLAILPSKLQELLQIQDEYRLQKEVRGRVEMICRELQSMHAALRKVADVPRDQIDLQTKVWRRDVREASYDIEDAIDTFLMRIRDRAPSDPNRFRLAMKKMTKLSRKVKAIHEIGAAIGDIVRKIQELVDRRVRYKLDVAADRSISMVSVDPRLAALYKEATQLIGIDQSMSEIISMLLSDESGQQHIKKISIVGAGGLGKTTLAKETYERLRSEYEFATFVSVGQNPDLVRVFKNILVKLDIYQQVDTINRTDTRALIDEIRQRLSYVRCRYLIVIDDVWDLESWHTLELAFVENNNGSGIIITTRNFAVATIAGRVYKLRPLSYHHSKELFYRSLFGEGVCLDDQIINKASDKFLKKCDGIPLALITMASLFMGKPTQMWSELANNAFGHKGRNSHLEETTMRILSLSYSDLPLNLRTCFVYLSRYPDDYVINKSSLIWKWIAEGFIQEEQGKQLFELGEEFFNELVSRSIIQVVQSKFDNTVQGFRIHSMVLGLIRLLSSEENFVSVLDEEGQISISGKLRRLAIHNRKEEHNLGDNMDLLPWLRSFTAIECPIYMIPPVFIFKLLRVLDLESCGSMEGYDLKQLGNLHNLRFIGLCNTYVRTLPQELGHLKFLQTLELKGSGVEELPSSMGELAGLMCLNADWTTRVPKWIGMLTSLQQLVMYPCGGYSARWFVKGLGHLRELRMLRLLIKADDEKQLAQLLESVLKLPKIEALHLDYYGGVQLNRLVKLEPSDFACSGRLRSLELQLLEFSRLPVWLNAYYLPQIRDLSLLMFDVDKQDLKNLGDFKELRHLHLLIVNTERRDAITCASGGFRNLRFFSITKPFKFQQGDLPRLEILDFHFNVPLQSGANSGLDFDFGLENIPSLQQVIVQINCLDAFPLPEEVETALRHAIGVHPNRPIVDISLPRRKLDKADNDGAEGRSKLAHYSKSLSSAHDKPMDELIKRLYVVDNEAYDKKMKIVPIVRSEGLGKTTLAQKVFDKLSPHFDCAAFVLVGQNPDMRKVFTDILIGLDNQKYQDFPMTILDIIELIGLVRKSLINKRLRLGLKQSYLSSTLHSLLSSFVT

SEQ ID NO: 163965 - protein, 835 aa, Zea Mays
MNGGRHNACMHACSLCGGLHAATMQSLCALVRLACSSHAVDDVWDLKAWDIIKSALIENTNGSAVLTTTSRQIWEHENWRPSGDDKSDSDAEQLEPHLDVTTPADVLPASSPSKSKVVAHVELRHDDPDSSAFGIPQVAGDTQPELRLFPEADADLKGFFYENLFGSEDKCPDDLKDICKDLIQISAGVLSDAYETVEELRGYEISAERLVWAWIAQGFVKETQGQNDLEKVGKKYLIDLISRKMIEAVEVHADGMALSCRAYDLLHGLIVSLSTEEKFVEILNDSQSQERASNPNTEVHRLSIQIQRNNMLHPLPKAWMKQVQSLVVSSDTVPDLSDFQGLHAMDLGGCDSLQVDHLKGISKTTSLIYLAIGGKYIADVPKEVSWLKKLRTLDLTASGLSELPRCILTLTNLERLFVNSHMKIPGKISKMSGLQELGDINIVKPELLKRLRKLSKLRVLRIAMWSWDEGSKSSVKLWWETLHSLIGSCKKIESLCILTFCSLDFMDGSGDDNKWPPQTLKNLEISHSAFLDKLPSWFDSLSTISSLTIEVNKLSKNITDTLAKLSALRSLSLTSIEKPEPEVRFVIGSAGRFENLESLKFVCNEMVNLLERPESNATQQLTGLTIVFHASRTERSRNKDFRFGLDKLLSLQHVRVEINCSNATQRTVKNAEAAIGEEISKIRRDDGSQPILEIRRLQEESMIAGKDQTQDANKTPSSSSTMETTLRAQPIGESLMPSVETVSSKVFVSQNSSNDTFFNNVGILTSSTKIKTLKERALQELTAEKQGSTALHQEVDELNKKLAKTQREFEEFKKQQEENNLLLKHILHSNNAAAA

SEQ ID NO: 163966 - protein, 727 aa, Zea Mays
MNGGRHNACMHACSLCGGLHAATMQSLCALVRLACSSHAVDDVWDLKAWDIIKSALIENTNGSAVLTTTSRQIWEHENWRPSGDDKSDSDAEQLEPHLDVTTPADVLPASSPSKSKVVAHVELRHDDPDSSAFGIPQVAGDTQPELRLFPEADADLKGFFYENLFGSEDKCPDDLKDICKDLIQISAGVLSDAYETVEELRGYEISAERLVWAWIAQGFVKETQGQNDLEKVGKKYLIDLISRKMIEAVEVHADGMALSCRAYDLLHGLIVSLSTEEKFVEILNDSQSQERASNPNTEVHRLSIQIQRNNMLHPLPKAWMKQVQSLVVSSDTVPDLSDFQGLHAMDLGGCDSLQVDHLKGISKTTSLIYLAIGGKYIADVPKEVSWLKKLRTLDLTASGLSELPRCILTLTNLERLFVNSHMKIPGKISKMSGLQELGDINIVKPELLKRLRKLSKLRVLRIAMWSWDEGSKSSVKLWWETLHSLIGSCKKIESLCILTFCSLDFMDGSGDDNKWPPQTLKNLEISHSAFLDKLPSWFDSLSTISSLTIEVNKLSKNITDTLAKLSALRSLSLTSIEKPEPEVRFVIGSAGRFENLESLKFVCNEMVNLLERPESNATQQLTGLTIVFHASRTERSRNKDFRFGLDKLLSLQHVRVEINCSNATQRTVKNAEAAIGEEISKIRRDDGSQPILEIRRLQEESMIAGKDQTQDANKTPSSSVSSQAPRK

SEQ ID NO: 163967 - protein, 750 aa, Zea Mays
MNGGRHNACMHACSLCGGLHAATMQSLCALVRLACSSHAVDDVWDLKAWDIIKSALIENTNGSAVLTTTSRQIWEHENWRPSGDDKSDSDAEQLEPHLDVTTPADVLPASSPSKSKVVAHVELRHDDPDSSAFGIPQVAGDTQPELRLFPEADADLKGFFYENLFGSEDKCPDDLKDICKDLIQISAGVLSDAYETVEELRGYEISAERLVWAWIAQGFVKETQGQNDLEKVGKKYLIDLISRKMIEAVEVHADGMALSCRAYDLLHGLIVSLSTEEKFVEILNDSQSQERASNPNTEVHRLSIQIQRNNMLHPLPKAWMKQVQSLVVSSDTVPDLSDFQGLHAMDLGGCDSLQVDHLKGISKTTSLIYLAIGGKYIADVPKEVSWLKKLRTLDLTASGLSELPRCILTLTNLERLFVNSHMKIPGKISKMSGLQELGDINIVKPELLKRLRKLSKLRVLRIAMWSWDEGSKSSVKLWWETLHSLIGSCKKIESLCILTFCSLDFMDGSGDDNKWPPQTLKNLEISHSAFLDKLPSWFDSLSTISSLTIEVNKLSKNITDTLAKLSALRSLSLTSIEKPEPEVRFVIGSAGRFENLESLKFVCNEMVNLLERPESNATQQLTGLTIVFHASRTERSRNKDFRFGLDKLLSLQHVRVEINCSNATQRTVKNAEAAIGEEISKIRRDDGSQPILEIRRLQEESMIAGKDQTQDANKTPSSSVMMEGPLWTYNLSQPNENMRESAHIQNRSGP

SEQ ID NO: 163968 - protein, 98 aa, Zea Mays
MHHKFDSCRDHRIYFIIHPKDGTVLFLDSIVHKPSRYAKFMTILACHKQSTGSVLFDSICASLSERIDDTSRTLLSNISNSHVCSFVIRVANVLSSVN

SEQ ID NO: 163969 - protein, 430 aa, Zea Mays
MYPLAFGFFQSETVDSWIWFMSQLKKAVGELEALAICSDAQKGLMHAVTHCFPHAEKRECFRHLMGNYVKSYSGSEHMYPAARAYRKEVFEHHVSQVRSVPKIAEYLDLHHKFLWYRSGFDPSIKCDYITNNMAEVFNNWVKDHKDLPVCDLADKIREMTMELFHRRRSIGDRLQGLILPSVLDTLKSQTRGLGHLSIVKSDNYLAEVRDSTNCLTKHVVKAESRQCSCEEWQHTGKPCQHGLAVIIAQDVRNVGLEYFVDDYYSVEKFRKAYMRRIPPIGDRSFWPKVDIANEVFAPMAKRGVGRQRKNRIKSCLEGGTAKKRKGVENAQCTTKIKRQYTCPNCGQLGHRKTSYKCPLNGTKKRKRKPRKNTTKNWIPKELRTSTSQTSAPNEETTIVPQTAQTVDAETVEIDHGSHENVSADAALVCV

SEQ ID NO: 163970 - protein, 54 aa, Zea Mays
MWFWVWRYIIHEHFYYLFIITVHVKIIMLMGTWSDHPGKQCYHKGSMGCPWLIN

SEQ ID NO: 163971 - protein, 1604 aa, Zea Mays
MSQLGLAATASKALPLLPNRQRSPAGTTFPSSALPRPSNRRKSHTRSLRDGGNEVSDAKKHSQSVRQGLAGIIDIPSDAVSEVDISHGPKDPRGPTDSYQMNGIINETHNGRHASGSMVVEFCAALGGKTPIHSILVANNGMAATKFMRSVRTWANDTFGSEKAIHLIAMATPEDMRINAEHIRLADQFVEVPGGTNNNNYANVQLIVEIAERVGVSAVWPGWGHASENPELPDALTAKGIVFLGPPATSMNALGDKVGSALIAQAAGVPTLAWSGSHVEVPLECCLDAIPEEMYRKACVTTTEEAVASCQVVGYPAMIKASWGGGGKGIRKVHNDDEVRALFKQVQGEVPGSPIFIMRLASQSRHLEVQLLCDQYGNVAALHSRDCSVQRRHQKIIEEGPVTVAPRETVKALEQAARRLAKAVGYVGAATVEYLYSMETGEYYFLELNPRLQVEHPVTEWIAEVNLPAAQVAVGMGIPLWQIPEIRRFYGMDYGGGYDIWRKTAALAAPFNFDEVDSLWPKGHCVAVRITSEDPDDGFKPTGGKVKEISFKSKPNVWAYFSVKSGGGIHEFADSQFGHVFAYGLSRPAAITNMSLALKEIQIRGEIHSNVDYTVDLLNASDFRENKIHTGWLDTRIAMRVQAERPPWYISVVGGALYKTVTTNAATVSEYVSYLTKGQIPPKHISLVNSTVNLNIEGSKYTIETVRTGHGRYKLRMNDSTVEANVQSLCDGGLLMQLDGNSHVIYAEEEAGGTRLQINGKTCLLQNDHDPSKLLAETPCKLLRFLVADGAHVGADVPYAEVEVMKMCMPLLSPASGVIHCMMSEGQALQAGDLIARLDLDDPSAVKRAEPFDGMFPLMDLPVAASSQVHKRYAASLNAARMVLAGYEHNINEVVQDLVCCLDNPELPFLQWDELMSVLATRLPRNLKSELEDKYKEYKLNFYHGKNKDFPSKLLRDIVEENLAYGSEKEKATNERLVEPLMNLLKSYEGGRESHAHFVVKSLFEEYLTVEELFSDGIQSDVIETLRHQHSKDLQKVVDIVLSHQGVRNKAKLVTALMEKLVYPNPGAYRDLLVRFSSLNHKRYYKLALKASELLEQTKLSELCSSIARSLSDLGMHKGEMTIKDSMEDLVSAPLPVEDALISLFDYSDPTVQQKVIVTYISRLYQPHLVKDSIQMKFKESGAIVFWEFSEGHVDTRNGQGAILGGKRWGAMVVLRSLESASTAIMAALKDSVQYNNSEVNTMHIVLLNAETESNISGTSDDQAQHRMEKLTKILKDSSVASDLQAAGLKVISCIVQRDAGRMPMRHTFLWFDEKNCYEEEHILRHVEPPLSALLELGKLKVKGYNEMKYTPSRDRQWHIYTLRNTENPKMLHRVFFRTIVRQPNAGNKFTSAQVSDTGLGCPEESLSFTSNSILRSLMTAIEELELHAIRTGHSHMFLCILKEQKLLDLVPFSGSTIVDVGQDEATACSLLRSMALKIHELVGARMHHLSVCQWEVKLKLDCDGPASGTWRVVTTNVTSHTCTIDIYREVEDTESQKLLYHSATSSAGPMHGVALNNPYQPLSVIDLKRCSARNNRTTYCYDFPLMDPSQRVKFVQEVKKVLG

SEQ ID NO: 163972 - protein, 1150 aa, Zea Mays
MKFKESGAIVFWEFSEGHVDTRNGQGAILGGKRWGAMVVLRSLESASTAIMAALKDSVQYNNSEVNTMHIVLLNAETESNISGTSDDQAQHRMEKLTKILKDSSVASDLQAAGLKVISCIVQRDAGRMPMRHTFLWFDEKNCYEEEHILRHVEPPLSALLELGKLKVKGYNEMKYTPSRDRQWHIYTLRNTENPKMLHRVFFRTIVRQPNAGNKFTSAQVSDTGLGCPEESLSFTSNSILRSLMTAIEELELHAIRTGHSHMFLCILKEQKLLDLVPFSGSTIVDVGQDEATACSLLRSMALKIHELVGARMHHLSVCQWEVKLKLDCDGPASGTWRVVTTNVTSHTCTIDIYREVEDTESQKLLYHSATSSAGPMHGVALNNPYQPLSVIDLKRCSARNNRTTYCYDFPLAFETALQKSWQSNCSSVPEGSENSKSYVKSTELVFAEKHGSWGTPIIPMERPAGLNDIGMVAWILEMSTPEFPNGRQIIVVANDITFRAGSFGPREDAFFEAVTNLACERKLPLIYLAANSGARIGIADEVKSCFRVGWSDERSPERGFQYIYLTEEDYARISSSVIAHKLQLDNGEIRWIIDSVVGKEDGLGVENIHGSAAIASAYSRAYEETFTLTFVTGRTVGIGAYLARLGIRCIQRLDQPIILTGFSALNKLLGREVYSSHMQLGGPKIMATNGVVHLTVSDDLEGVSNILRWLSYVPANIGGPLPITKPLDPPDRPVAYIPENTCDPRAAIRGVDDSQGKWLGGMFDKDSFVETFEGWAKTVVTGRAKLGGIPVGVIAVETQTMMQLIPADPGQLDSHERSVPRAGQVWFPDSATKTAQALLDFNREGLPLFILANWRGFSGGQRDLFEGILQAGSAIVENLRTYNQPAFVYIPMAGELRGGAWVVIDSKINPDRIECYAERTAKGNVLEPQGLIEIKFRSEELQDCMGRLDPELINLKAKLQDAKHGNGSLPDIESLQKSIEARTKQLLPLYTQIAVRFAELHDTSLRMAAKGVIKKVVDWEESRSFFYKRLRRRISEDLLAKEIRRIIGDNFTHQSAMELINEWYLASQATTGSTAGWDDDDAFVAWKDSPENYKGYIQELRAQKVSQSLSDLADSSSDLQAFSQGLSTLLDKMDPSQRVKFVQEVKKVLG

SEQ ID NO: 163973 - protein, 84 aa, Zea Mays
MAWELIEVPGNLNISLQDSTVDVVAAKIDPKLANTLIRQLSQVCPLENLRHVKRVRRVLTAPCRQSLQAGAISVPISHIRTAIC

SEQ ID NO: 163974 - protein, 296 aa, Zea Mays
MVGEESGCGVEGGTGGGEVPAASAPNGDRSGNSRLAVPSSSADDRGFHRSSTMPGVIKNDEITNESTGPSNLERSRTERRRQNNPTIDPAKQLLDERIPIKKKLKMLNRIATVKDDGTVVVDVPSGLEPTIVGGTEDIYTEAVEEALDGTEILYRPPMQIVILIVGTRGDVQPFVAIGKCLQDYGHRVRLATHANFKEFVLTAGLEFFPLGGDPKILAEYMVKNKGFLPSGPSEIPIQRKQMKEIIFSLLPACKEPDPDTGIPFNVDAIIANPPAYGNHISIVRGKTSYLFHIHQS

SEQ ID NO: 163975 - protein, 510 aa, Zea Mays
MVGEESGCGVEGGTGGGEVPAASAPNGDRSGNSRLAVPSSSADDRGFHRSSTMPGVIKNDEITNESTGPSNLERSRTERRRQNNPTIDPAKQLLDERIPIKKKLKMLNRIATVKDDGTVVVDVPSGLEPTIVGGTEDIYTEAVEEALDGTEILYRPPMQIVILIVGTRGDVQPFVAIGKCLQDYGHRVRLATHANFKEFVLTAGLEFFPLGGDPKILAEYMVKNKGFLPSGPSEIPIQRKQMKEIIFSLLPACKEPDPDTGIPFNVDAIIANPPAYGHTHVAEALKVPIHIFFTMPWTPTNEFPHPLSRVKQPAGYRLSYQIVDSMIWLGIRDMINEFRKKKLKLRPVTYLSGSQGSGNDIPHGYIWSPHLVPKPKDWGPKIDVVGFCFLDLASNYVPPEPLVEWLEAGDKPIYVGFGSLPVQDPQKMTEIIVKALEITGQRGIINKGWGGLGTLSEPKDFVYLLDNCPHDWLFLHCKAVVHHGGAGTTAAGLKAASMIAVSHDYCTLLW

SEQ ID NO: 163976 - protein, 319 aa, Zea Mays
MVGEESGCGVEGGTGGGEVPAASAPNGDRSGNSRLAVPSSSADDRGFHRSSTMPGVIKNDEITNESTGPSNLERSRTERRRQNNPTIDPAKQLLDERIPIKKKLKMLNRIATVKDDGTVVVDVPSGLEPTIVGGTEDIYTEAVEEALDGTEILYRPPMQIVILIVGTRGDVQPFVAIGKCLQDYGHRVRLATHANFKEFVLTAGLEFFPLGGDPKILAEYMVKNKGFLPSGPSEIPIQRKQMKEIIFSLLPACKEPDPDTGIPFNVDAIIANPPAYGHTHVAEALKVPIHIFFTMPWTPTNEFPHPLSRVKQPAGYRKP

SEQ ID NO: 163977 - protein, 494 aa, Zea Mays
MVGEESGCGVEGGTGGGEVPAASAPNGDRSGNSRLAVPSSSADDRGFHRSSTMPGVIKNDEITNESTGPSNLERSRTERRRQNNPTIDPAKQLLDERIPIKKKLKMLNRIATVKDDGTVVVDVPSGLEPTIVGGTEDIYTEAVEEALDGTEILYRPPMQIVILIVGTRGDVQPFVAIGKCLQDYGHRVRLATHANFKEFVLTAGLEFFPLGGDPKILAEYMVKNKGFLPSGPSEIPIQRKQMKEIIFSLLPACKEPDPDTGIPFNVDAIIANPPAYGHTHVAEALKVPIHIFFTMPWTPTNEFPHPLSRVKQPAGYRLSYQIVDSMIWLGIRDMINEFRKKKLKLRPVTYLSGSQGSGNDIPHGYIWSPHLVPKPKDWGPKIDVVGFCFLDLASNYVPPEPLVEWLEAGDKPIYPVQDPQKMTEIIVKALEITGQRGIINKGWGGLGTLSEPKDFVYLLDNCPHDWLFLHCKAVVHHGGAGTTAAGLKAASMIA

SEQ ID NO: 163978 - protein, 335 aa, Zea Mays
MLNRIATVKDDGTVVVDVPSGLEPTIVGGTEDIYTEAVEEALDGTEILYRPPMQIVILIVGTRGDVQPFVAIGKCLQDYGHRVRLATHANFKEFVLTAGLEFFPLGGDPKILAEYMVKNKGFLPSGPSEIPIQRKQMKEIIFSLLPACKEPDPDTGIPFNVDAIIANPPAYGHTHVAEALKVPIHIFFTMPWTPTNEFPHPLSRVKQPAGYRLSYQIVDSMIWLGIRDMINEFRKKKLKLRPVTYLSGSQGSGNDIPHGYIWSPHLVPKPKDWGPKIDVVGFCFLDLASNYVPPEPLVEWLEAGDKPIYVGFGSLVRSVCPFFMSCLCISFFFVI

SEQ ID NO: 163979 - protein, 69 aa, Zea Mays
MSHGCPAPTSMMAELSLSPTVVSLPCSSMVSGRCSDFVRAELPSSRPCSLSHTRPCSSLIHGRYSPFPD

SEQ ID NO: 163980 - protein, 59 aa, Zea Mays
MMAELSLSPTVVSLPCSSMVSGRCSDFVRAELPSSRPCSLSHTRPCSSLIHGRSSPFPD

SEQ ID NO: 163981 - protein, 470 aa, Zea Mays
MALSCMRCPAGAGAASARRAAAQPLAAEAAVSFARCRGFGRSATAATAAWFWRNHAVASQGVKAPMDADVKNAVIPPTSPKVESGSPSEITLDEFEDLSALCKNDDSTVSITVVGASGDLAKKKIFPALFALYYEDCLPKHFTIFGYARSKMTDAELRNMVSKTLTCRIDKRENCSEKMEEFLKRCFYHSGQYDSEEHFIDLDKKLKQHEGSRVSNRLFYLSIPPNIFLDVVKCASKSASSVNGWTRVIVEKPFGRDSESSAALTSGLKQYLVEDQIFRIDHYLGKELVENLSVLRFSNLVFEPLWSRQYIRNVQLIFSEDFGTEGRGGYFDGYGIIRDIMQNHLIQILALFAMETPISLEAEDIRNEKVKVLRSMKPLQLEDVVVGQYKSHTKGGTTYPGYTDDKTVPKDSVTPTFAAAALFINNARWDGVPFLMKAGKALHTKRAEIRVQFRHVPGKVHNEKTAQLLP

SEQ ID NO: 163982 - protein, 531 aa, Zea Mays
MALSCMRCPAGAGAASARRAAAQPLAAEAAVSFARCRGFGRSATAATAAWFWRNHAVASQGVKAPMDADVKNAVIPPTSPKVESGSPSEITLDEFEDLSALCKNDDSTVSITVVGASGDLAKKKIFPALFALYYEDCLPKHFTIFGYARSKMTDAELRNMVSKTLTCRIDKRENCSEKMEEFLKRCFYHSGQYDSEEHFIDLDKKLKQHEGSRVSNRLFYLSIPPNIFLDVVKCASKSASSVNGWTRVIVEKPFGRDSESSAALTSGLKQYLVEDQIFRIDHYLGKELVENLSVLRFSNLVFEPLWSRQYIRNVQLIFSEDFGTEGRGGYFDGYGIIRDIMQNHLIQILALFAMETPISLEAEDIRNEKVKVLRSMKPLQLEDVVVGQYKSHTKGGTTYPGYTDDKTVPKDSVTPTFAAAALFINNARWDGVPFLMKAGKALHTKRYSKEIPDAYERLLLDAIEGERRLFIRSDELDAAWSLFTPLLKELEEKRIAPELYPYGSRGPVGAHYLAAKYNVRWGDLSAEHYKA

SEQ ID NO: 163983 - protein, 596 aa, Zea Mays
MALSCMRCPAGAGAASARRAAAQPLAAEAAVSFARCRGFGRSATAATAAWFWRNHAVASQGAPMDADVKNAVIPPTSPKVESGSPSEITLDEFEDLSALCKNDDSTVSITVVGASGDLAKKKIFPALFALYYEDCLPKHFTIFGYARSKMTDAELRNMVSKTLTCRIDKRENCSEKMEEFLKRCFYHSGQYDSEEHFIDLDKKLKQHEGSRVSNRLFYLSIPPNIFLDVVKCASKSASSVNGWTRVIVEKPFGRDSESSAALTSGLKQYLVEDQIFRIDHYLGKELVENLSVLRFSNLVFEPLWSRQYIRNVQLIFSEDFGTEGRGGYFDGYGIIRDIMQNHLIQILALFAMETPISLEAEDIRNEKVKVLRSMKPLQLEDVVVGQYKSHTKGGTTYPGYTDDKTVPKDSVTPTFAAAALFINNARWDGVPFLMKAGKALHTKRAEIRVQFRHVPGNLYKGSFGTDLDRATNELVIRVQPDEAIYLKINNKIPGLGMRLDRSNLNLHYAARYSKEIPDAYERLLLDAIEGERRLFIRSDELDAAWSLFTPLLKELEEKRIAPELYPYGSRGPVGAHYLAAKYNVRWGDLSAEHYKA

SEQ ID NO: 163984 - protein, 533 aa, Zea Mays
MDADVKNAVIPPTSPKVESGSPSEITLDEFEDLSALCKNDDSTVSITVVGASGDLAKKKIFPALFALYYEDCLPKHFTIFGYARSKMTDAELRNMVSKTLTCRIDKRENCSEKMEEFLKRCFYHSGQYDSEEHFIDLDKKLKQHEGSRVSNRLFYLSIPPNIFLDVVKCASKSASSVNGWTRVIVEKPFGRDSESSAALTSGLKQYLVEDQIFRIDHYLGKELVENLSVLRFSNLVFEPLWSRQYIRNVQLIFSEDFGTEGRGGYFDGYGIIRDIMQNHLIQILALFAMETPISLEAEDIRNEKVKVLRSMKPLQLEDVVVGQYKSHTKGGTTYPGYTDDKTVPKDSVTPTFAAAALFINNARWDGVPFLMKAGKALHTKRAEIRVQFRHVPGNLYKGSFGTDLDRATNELVIRVQPDEAIYLKINNKIPGLGMRLDRSNLNLHYAARYSKEIPDAYERLLLDAIEGERRLFIRSDELDAAWSLFTPLLKELEEKRIAPELYPYGSRGPVGAHYLAAKYNVRWGDLSAEHYKA

SEQ ID NO: 163985 - protein, 938 aa, Zea Mays
MPEAGTQGAHIPLMAKKRLFMFCHVKIACDKSFVLIFWTLPLPWACEQVGPGSLVQAPLDEAVPSNLDALSRCESKTCPSELITPPDDCHVNRSLSFTLQICRVEDITVSGIVRGSIIHIHRARTVTIAKDGTISASELGCKEGIGKGKFLKYGAGGGAGHGGRGGTGIYNGMRSEGGLEYGNADLPCELGSGSGGSALSADNTAGGGLIVIGSMKWPLSRLLVYGSLNSDGESHRGTSGNSNGTFKGGVGGGSGGSILLFLQWFLLEKNSSLSASGGNGGVYGGGGGGGGRIHFHWSYIATGDEYVHIASVNGTIVSSGGSGKNDGHCGEDGTVTGKKCPKGLYGTFCTECPVGTYKNVVGSNSSLCIPCSVDSLPNRAEFIYIRGGVTELPCPYRCISDKYKMPNCYTPLEELMYTFGGPWSFSIILSLTVILLALVLSALRIKIGESDITYRATNAIHNDGCSFPFLLSLAEVPGASRAEETQSHVHRMYFMGPNTFREPWHLPYSPPDAIIGIVYEDAFNRFIDEINLVAAYEWWEGSIHSILSVLAYPCAWSWKQWRRRKKNHRLQEYVKSEYDHSCLRSCRSRALYKGLKVGSTPDLMVAYIDFFLGGDEKRLDVASTIQKRFPMCLIFGGDGSYMSPYYLHSDTLLSNLLGQYVSTAIWNRLVAGLNAQLRTVRQGSVRSTLGPVVSWINSHGNPQLERHGVRVELGWFQSTASAYYQLGIIVAVNENFYKNLRHHEHATEFCERSRKNVAVPLQDFNQANLDQPCTSYAVSRKRLTGGVNGGIINEGTLKSLHYKRDYLFPFSLLLRNSRPLGYAETLQLLICIVLLGDFSITLLMLVQYYWISVGAFLAILLIPPLALLSPFLAGLNALFSRGLKRSSVTRIFALWNITSVVNIQSYTALCIFGSLLWRCPQFIKYTTQKVMFLLWIQK

SEQ ID NO: 163986 - protein, 533 aa, Zea Mays
MAQLVPQSCKEGIGKGKFLKYGAGGGAGHGGRGGTGIYNGMRSEGGLEYGNADLPCELGSGSGGSALSADNTAGGGLIVIGSMKWPLSRLLVYGSLNSDGESHRGTSGNSNGTFKGGVGGGSGGSILLFLQWFLLEKNSSLSASGGNGGVYGGGGGGGGRIHFHWSYIATGDEYVHIASVNGTIVSSGGSGKNDGHCGEDGTVTGKKCPKGLYGTFCTECPVGTYKNVVGSNSSLCIPCSVDSLPNRAEFIYIRGGVTELPCPYRCISDKYKMPNCYTPLEELMYTFGGPWSFSIILSLTVILLALVLSALRIKIGESDITYRATNAIHNDGCSFPFLLSLAEVPGASRAEETQSHVHRMYFMGPNTFREPWHLPYSPPDAIIGIVYEDAFNRFIDEINLVAAYEWWEGSIHSILSVLAYPCAWSWKQWRRRKKNHRLQEYVKSEYDHSCLRSCRSRALYKGLKVGSTPDLMVAYIDFFLGGDEKRLDVASTIQKRFPMCLIFGGDGSYMSPYYLHSDTLLSNLLGQSWESPT

SEQ ID NO: 163987 - protein, 974 aa, Zea Mays
MRCVAWWAVLLAAASLVGAWGNHTVSALTLVSETWYDDRLALVPVEFGGGDGEDAAGLRSELPCQTYSANSRSCEELNGSGSFNTTCVISSSSSLDGDLCVYGDGSVEIRPHVKIICPFRGCYITVNVSGSVRIGEHVEVIAGSVSLYAANVSLDHHSTINTTALAGEPPPQTSGTPHSLEGAGGGHGGRGASCKVSNDTNWGGDVYAWSTLDWPWSYGSMGGSMSAGQFGGYGGGRVMLRTSGFLNVDGQVLAEGGVGSLKGGGGSGGSIIIHAFKLSGNGTISAAGGNGWGGGGGGRISLDCYSIQQDLEITVHGGQSFGCAQNAGAAGTIYDSSLQTLKVSNGNFTTRTETPLLGFPMTRLWSNVLVERYAKVLVPLLWSRVQVTGQIRLLTKGSICFGLSENPISEFELVAEELLMSDSVIKVYGAFRMYVKVLLMWDSNIQIDGGAKDVVLASMLEARNLVVLRHGSVISSNTDLMVYGQGLLNLSGPGDGIKAKRLFLSLFYNIEVGPGSLVQAPLDEAVPSNLDALSRCESKTCPSELITPPDDCHVNRSLSFTLQICRVEDITVSGIVRGSIIHIHRARTVTIAKDGTISASELGCKEGIGKGKFLKYGAGGGAGHGGRGGTGIYNGMRSEGGLEYGNADLPCELGSGSGGSALSADNTAGGGLIVIGSMKWPLSRLLVYGSLNSDGESHRGTSGNSNGTFKGGVGGGSGGSILLFLQWFLLEKNSSLSASGGNGGVYGGGGGGGGRIHFHWSYIATGDEYVHIASVNGTIVSSGGSGKNDGHCGEDGTVTGKKCPKGLYGTFCTECPVGTYKNVVGSNSSLCIPCSVDSLPNRAEFIYIRGGVTELPCPYRCISDKYKMPNCYTPLEELMYTFGGPWSFSIILSLTVILLALVLSALRIKIGESDITYRATNAIHNDGCSFPFLLSLAEGQAGQKKLRAMSTECTSWDLILSESPGISPTHLLMR

SEQ ID NO: 163988 - protein, 989 aa, Zea Mays
MLEARNLVVLRHGSVISSNTDLMVYGQGLLNLSGPGDGIKAKRLFLSLFYNIEVGPGSLVQAPLDEAVPSNLDALSRCESKTCPSELITPPDDCHVNRSLSFTLQICRVEDITVSGIVRGSIIHIHRARTVTIAKDGTISASELGCKEGIGKGKFLKYGAGGGAGHGGRGGTGIYNGMRSEGGLEYGNADLPCELGSGSGGSALSADNTAGGGLIVIGSMKWPLSRLLVYGSLNSDGESHRGTSGNSNGTFKGGVGGGSGGSILLFLQWFLLEKNSSLSASGGNGGVYGGGGGGGGRIHFHWSYIATGDEYVHIASVNGTIVSSGGSGKNDGHCGEDGTVTGKKCPKGLYGTFCTECPVGTYKNVVGSNSSLCIPCSVDSLPNRAEFIYIRGGVTELPCPYRCISDKYKMPNCYTPLEELMYTFGGPWSFSIILSLTVILLALVLSALRIKIGESDITYRATNAIHNDGCSFPFLLSLAEVPGASRAEETQSHVHRMYFMGPNTFREPWHLPYSPPDAIIGIVYEDAFNRFIDEINLVAAYEWWEGSIHSILSVLAYPCAWSWKQWRRRKKNHRLQEYVKSEYDHSCLRSCRSRALYKGLKVGSTPDLMVAYIDFFLGGDEKRLDVASTIQKRFPMCLIFGGDGSYMSPYYLHSDTLLSNLLGQYVSTAIWNRLVAGLNAQLRTVRQGSVRSTLGPVVSWINSHGNPQLERHGVRVELGWFQSTASAYYQLGIIVAVNENFYKNLRHHEHATEFCERSRKNVAVPLQDFNQANLDQPCTSYAVSRKRLTGGVNGGIINEGTLKSLHYKRDYLFPFSLLLRNSRPLGYAETLQLLICIVLLGDFSITLLMLVQYYWISVGAFLAILLIPPLALLSPFLAGLNALFSRGLKRSSVTRIFALWNITSVVNIIVAIIYGSLYFWLSSLAVSSVHQVYNTKSFKSREDNEWWILPTILFLIKSLQAGLVNWHVANLEIQDYSLFSPDPDRFWAM

SEQ ID NO: 163989 - protein, 1028 aa, Zea Mays
MSDSVIKVYGAFRMYVKVLLMWDSNIQIDGGAKDVVLASMLEARNLVVLRHGSVISSNTDLMVYGQGLLNLSGPGDGIKAKRLFLSLFYNIEVGPGSLVQAPLDEAVPSNLDALSRCESKTCPSELITPPDDCHVNRSLSFTLQICRVEDITVSGIVRGSIIHIHRARTVTIAKDGTISASELGCKEGIGKGKFLKYGAGGGAGHGGRGGTGIYNGMRSEGGLEYGNADLPCELGSGSGGSALSADNTAGGGLIVIGSMKWPLSRLLVYGSLNSDGESHRGTSGNSNGTFKGGVGGGSGGSILLFLQWFLLEKNSSLSASGGNGGVYGGGGGGGGRIHFHWSYIATGDEYVHIASVNGTIVSSGGSGKNDGHCGEDGTVTGKKCPKGLYGTFCTECPVGTYKNVVGSNSSLCIPCSVDSLPNRAEFIYIRGGVTELPCPYRCISDKYKMPNCYTPLEELMYTFGGPWSFSIILSLTVILLALVLSALRIKIGESDITYRATNAIHNDGCSFPFLLSLAEVPGASRAEETQSHVHRMYFMGPNTFREPWHLPYSPPDAIIGIVYEDAFNRFIDEINLVAAYEWWEGSIHSILSVLAYPCAWSWKQWRRRKKNHRLQEYVKSEYDHSCLRSCRSRALYKGLKVGSTPDLMVAYIDFFLGGDEKRLDVASTIQKRFPMCLIFGGDGSYMSPYYLHSDTLLSNLLGQYVSTAIWNRLVAGLNAQLRTVRQGSVRSTLGPVVSWINSHGNPQLERHGVRVELGWFQSTASAYYQLGIIVAVNENFYKNLRHHEHATEFCERSRKNVAVPLQDFNQANLDQPCTSYAVSRKRLTGGVNGGIINEGTLKSLHYKRDYLFPFSLLLRNSRPLGYAETLQLLICIVLLGDFSITLLMLVQYYWISVGAFLAILLIPPLALLSPFLAGLNALFSRGLKRSSVTRIFALWNITSVVNIIVAIIYGSLYFWLSSLAVSSVHQVYNTKSFKSREDNEWWILPTILFLIKSLQAGLVNWHVANLEIQDYSLFSPDPDRFWAM

SEQ ID NO: 163990 - protein, 947 aa, Zea Mays
MPEAGTQGAHIPLMAKKRLFMFCHVKIACDKSFVLIFWTLPLPWACEQVGPGSLVQAPLDEAVPSNLDALSRCESKTCPSELITPPDDCHVNRSLSFTLQICRVEDITVSGIVRGSIIHIHRARTVTIAKDGTISASELGCKEGIGKGKFLKYGAGGGAGHGGRGGTGIYNGMRSEGGLEYGNADLPCELGSGSGGSALSADNTAGGGLIVIGSMKWPLSRLLVYGSLNSDGESHRGTSGNSNGTFKGGVGGGGRIHFHWSYIATGDEYVHIASVNGTIVSSGGSGKNDGHCGEDGTVTGKKCPKGLYGTFCTECPVGTYKNVVGSNSSLCIPCSVDSLPNRAEFIYIRGGVTELPCPYRCISDKYKMPNCYTPLEELMYTFGGPWSFSIILSLTVILLALVLSALRIKIGESDITYRATNAIHNDGCSFPFLLSLAEVPGASRAEETQSHVHRMYFMGPNTFREPWHLPYSPPDAIIGIVYEDAFNRFIDEINLVAAYEWWEGSIHSILSVLAYPCAWSWKQWRRRKKNHRLQEYVKSEYDHSCLRSCRSRALYKGLKVGSTPDLMVAYIDFFLGGDEKRLDVASTIQKRFPMCLIFGGDGSYMSPYYLHSDTLLSNLLGQYVSTAIWNRLVAGLNAQLRTVRQGSVRSTLGPVVSWINSHGNPQLERHGVRVELGWFQSTASAYYQLGIIVAVNENFYKNLRHHEHATEFCERSRKNVAVPLQDFNQANLDQPCTSYAVSRKRLTGGVNGGIINEGTLKSLHYKRDYLFPFSLLLRNSRPLGYAETLQLLICIVLLGDFSITLLMLVQYYWISVGAFLAILLIPPLALLSPFLAGLNALFSRGLKRSSVTRIFALWNITSVVNIIVAIIYGSLYFWLSSLAVSSVHQVYNTKSFKSREDNEWWILPTILFLIKSLQAGLVNWHVANLEIQDYSLFSPDPDRFWAM

SEQ ID NO: 163991 - protein, 1439 aa, Zea Mays
MRCVAWWAVLLAAASLVGAWGNHTVSALTLVSETWYDDRLALVPVEFGGGDGEDAAGLRSELPCQTYSANSRSCEELNGSGSFNTTCVISSSSSLDGDLCVYGDGSVEIRPHVKIICPFRGCYITVNVSGSVRIGEHVEVIAGSVSLYAANVSLDHHSTINTTALAGEPPPQTSGTPHSLEGAGGGHGGRGASCKVSNDTNWGGDVYAWSTLDWPWSYGSMGGSMSAGQFGGYGGGRVMLRTSGFLNVDGQVLAEGGVGSLKGGGGSGGSIIIHAFKLSGNGTISAAGGNGWGGGGGGRISLDCYSIQQDLEITVHGGQSFGCAQNAGAAGTIYDSSLQTLKVSNGNFTTRTETPLLGFPMTRLWSNVLVERYAKVLVPLLWSRVQVTGQIRLLTKGSICFGLSENPISEFELVAEELLMSDSVIKVYGAFRMYVKVLLMWDSNIQIDGGAKDVVLASMLEHGSVISSNTDLMVYGQGLLNLSGPGDGIKAKRLFLSLFYNIEVGPGSLVQAPLDEAVPSNLDALSRCESKTCPSELITPPDDCHVNRSLSFTLQICRVEDITVSGIVRGSIIHIHRARTVTIAKDGTISASELGCKEGIGKGKFLKYGAGGGAGHGGRGGTGIYNGMRSEGGLEYGNADLPCELGSGSGGSALSADNTAGGGLIVIGSMKWPLSRLLVYGSLNSDGESHRGTSGNSNGTFKGGVGGGSGGSILLFLQWFLLEKNSSLSASGGNGGVYGGGGGGGGRIHFHWSYIATGDEYVHIASVNGTIVSSGGSGKNDGHCGEDGTVTGKKCPKGLYGTFCTECPVGTYKNVVGSNSSLCIPCSVDSLPNRAEFIYIRGGVTELPCPYRCISDKYKMPNCYTPLEELMYTFGGPWSFSIILSLTVILLALVLSALRIKIGESDITYRATNAIHNDGCSFPFLLSLAEVPGASRAEETQSHVHRMYFMGPNTFREPWHLPYSPPDAIIGIVYEDAFNRFIDEINLVAAYEWWEGSIHSILSVLAYPCAWSWKQWRRRKKNHRLQEYVKSEYDHSCLRSCRSRALYKGLKVGSTPDLMVAYIDFFLGGDEKRLDVASTIQKRFPMCLIFGGDGSYMSPYYLHSDTLLSNLLGQYVSTAIWNRLVAGLNAQLRTVRQGSVRSTLGPVVSWINSHGNPQLERHGVRVELGWFQSTASAYYQLGIIVAVNENFYKNLRHHEHATEFCERSRKNVAVPLQDFNQANLDQPCTSYAVSRKRLTGGVNGGIINEGTLKSLHYKRDYLFPFSLLLRNSRPLGYAETLQLLICIVLLGDFSITLLMLVQYYWISVGAFLAILLIPPLALLSPFLAGLNALFSRGLKRSSVTRIFALWNITSVVNIIVAIIYGSLYFWLSSLAVSSVHQVYNTKSFKSREDNEWWILPTILFLIKSLQAGLVNWHVANLEIQDYSLFSPDPDRFWAM

SEQ ID NO: 163992 - protein, 609 aa, Zea Mays
MPQGPIWNILHCGVTELPCPYRCISDKYKMPNCYTPLEELMYTFGGPWSFSIILSLTVILLALVLSALRIKIGESDITYRATNAIHNDGCSFPFLLSLAEVPGASRAEETQSHVHRMYFMGPNTFREPWHLPYSPPDAIIGIVYEDAFNRFIDEINLVAAYEWWEGSIHSILSVLAYPCAWSWKQWRRRKKNHRLQEYVKSEYDHSCLRSCRSRALYKGLKVGSTPDLMVAYIDFFLGGDEKRLDVASTIQKRFPMCLIFGGDGSYMSPYYLHSDTLLSNLLGQYVSTAIWNRLVAGLNAQLRTVRQGSVRSTLGPVVSWINSHGNPQLERHGVRVELGWFQSTASAYYQLGIIVAVNENFYKNLRHHEHATEFCERSRKNVAVPLQDFNQANLDQPCTSYAVSRKRLTGGVNGGIINEGTLKSLHYKRDYLFPFSLLLRNSRPLGYAETLQLLICIVLLGDFSITLLMLVQYYWISVGAFLAILLIPPLALLSPFLAGLNALFSRGLKRSSVTRIFALWNITSVVNIIVAIIYGSLYFWLSSLAVSSVHQVYNTKSFKSREDNEWWILPTILFLIKSLQAGLVNWHVANLEIQDYSLFSPDPDRFWAM

SEQ ID NO: 163993 - protein, 484 aa, Zea Mays
MDHQNLLPNNSNVDEQILLPNALEHEDCPHYLLNGHDVGVPNGSLIGQQNTSLSLWEPAGSSSMSCLVDHDNFFQAKREHLASSLSIGGPLNIDRRRHEGTSSLPLHNLNIDLNINQADQFGSDDVDLVHGNGQSSANTVTAHRGSFITDHIMHHGVSSDATGSSSWNAECFNGAASQHSRHPAFKRKYLDGCQCHAESSANGSSHNCHQNDSTLLPLRTTCESLTMPTTTNFSVPHPPVEQLNQSTNISANSTLIDHYSSYSGPHANEFMRNTRMRINPSDYDQSLPSLLPEGSFRCPAYQHTQQQSSFRPVQPRQVSSSGSHSRPHLPVVTQFSQNLHRPSANISFGSRIGSSSSSGSTVLIPASQDPSTSLIGSDFPEPLLLAQQVPGFNVSQPSTTLRGSADVSRRSLTAAGVSHFRSSSMALQHRGTSSTPHEIRSHQPGSSSRAHQQSLRPGHSSIDRQSSGYLDLQSFMQSIASREG

SEQ ID NO: 163994 - protein, 470 aa, Zea Mays
MGGKKIPSTTSCSPLPSTDSDHRGISDGHVLLLPYPGAQGHTNPLLQFGRRLAYHGLHPTLVTTRYVLSTTPPPGEPFRVANISDGFDDCGAAACPDLSEYWRQLQAIGSVTLAELIRSEASEGRPVRVLVYDPFLPWSRRVAQEAGVAAVAFLSQSCAVDVVYGEVLSGRLPLPVVNGKELFARGLLGVELGPDDVPPFVAKPDWCPLFLRASLQQFEGLEDADDVLVNSFHDIEPKEADYMALTWRAKTIGPTLPSFYLDDDRFPLNKTYGFNLFNSSEPCLAWLDKQLPRSVILVSYGTVSNYDEAQLEELGNGLYNSGKPFIWVVRSNEEHKLSDELRDKCKERGLIVSWCPQLEVLAHKATAIVNGVPMVAIPHWADQPTISKYMESMWGLGVRVRKDEKGLVTRDEVERCIKDVMDGDSKDKYRKSATMWMQKAKAAMQNGGSSDKNITEFAAKYSSGQKNIVA

SEQ ID NO: 163995 - protein, 434 aa, Zea Mays
MPLLSDPGPGARAMAKQLKVLLPPSFHKMRISDELSGCFEAGDGAPEPTALVVSPFGKVWRVAVGRDGDGAFLGRGWAEFLAAHGIGLGFFVVLRHEGGGTLTVKVFDTSLCIKGFSAPAAVMTSRGSKGVICKPQFIRIFHPYLSEKMILPARFVKYYITDEWLNSQTAIILSPLGKFWRIELKNDQSGIFFTGGWSQFLEFHGICNGDVLHLRYEGNMVFKFKAFGLGGCQKDFKNQNAGIRSSKEKRQETPSIRKRKSNDEKSRSEENKRPKGPKNSRLLEPYRIGTSSWIRKSINTYALEHLLPLSKEFCGRIGFQMACKITLKTKMDSARSWLVHGAAYKNYCCLVGVAWKSFCQENRIKPGDLCTFNIIETTLWHVTITHCTNRKQEGSPCSSRREDRTKKGGSRSKGTKERKSPMASLTKQAPSYTR

SEQ ID NO: 163996 - protein, 467 aa, Zea Mays
MILSTVKRKASSPLNGTDHEGNIDEEESFILRDRLLPLIICLLRTDKFPAVLRIYRDTLITVMKASIKATVAELLPVLTARPIDSDSVTGGRATDADAGGQSLANKLRSLSSEGFVQLLSAIFRIVQVHLQQAAEVKRIVEWIMGNLDETLSIDASNPTLQHGGSVIYDTQENDSSRGSNTLARSTSKIPFVQGKINDFSIISSIKNVRADVLRENTEAVFAACDAAHGRWAKLLGVRAGLHPRLRLEEFLIIYSITEEFIAATEKIGGRLGYNIRGILQQQSKQFVDYQHNVRMTKIKAVLDQETWVAVDVPEEFQAIVLSLSSTYSSVNGMEMPSTDDNSKFSDHQPTSQELTYSAENNADNGKVTSGTGENQVESTSQSANNVAGNLKSTLQTIVHGGVGYHMVNCGLILLKMLSEYVDISKCLPSLSLEVVQRVVEILKLFNTRTCQLVLGAGAMQISDECFS

SEQ ID NO: 163997 - protein, 317 aa, Zea Mays
MASRPPLRTTSVASVFSSTDSSTSTGPPGGVPQSITALLNNPLPSSAASSYSWLSWPPTTITLPDAAPPPPSHPCEITRADFAPYLAAVSDPFARFADIRLHAHAELAASSDAEGAPAASSGLAACLREVPALFFKEDFALEDGPTFQAACPLDDDALQERLGQHLDVVEAHLVREIALRSESFYEAQGRLRGLDGEIVTAVGRIRELREVVQVLTGDLVGAARQVQELNATRGNLVALQQKLTVILYVSQALTALKLLVAAADCAGALDVIDNLQNLLDTDELAGLYCFRHIRDQLGTSLDSVNRLLLMWKHRCEF

SEQ ID NO: 163998 - protein, 172 aa, Zea Mays
MTKIKAVLDQETWVAVDVPEEFQAIVLSLSSTYSSVNGMEMPSTDDNSKFSDHQPTSQELTYSAENNADNGKVTSGTGENQVESTSQSANNVAGNLKSTLQTIVHGGVGYHMVNCGLILLKMLSEYVDISKCLPSLSLEVVQRVVEILKLFNTRTCQLVLGAGAMQNLSCIH

SEQ ID NO: 163999 - protein, 121 aa, Zea Mays
MTKIKAVLDQETWVAVDVPEEFQAIVLSLSSTYSSVNGMEMPSTDDNSKFSDHQPTSQELTYSAENNADNGKVTSGTGENQVESTSQSANNVAGNLKSTLQTIVHGGVGYHMRFDTVEDVI

SEQ ID NO: 164000 - protein, 187 aa, Zea Mays
MAGALPFIKRGKEMYNRREFDKLPRPCQGFESSVQSYQSQRSLSARPNFSRSRTPSSPKSLGLLTVVQLTSFYKFFFETADIRRVLFLKIPEARKQLLMSELDRVAQDYKIHRDEIHSKLVQIMRERLLANLRKLPQIVEGWNAPQDNDVQPSQFAKAVTKASGSNISFTYYRSIYKIGSQYSSGKG

SEQ ID NO: 164001 - protein, 190 aa, Zea Mays
MAGALPFIKRGKEMYNRREFDKLPRPCQGFESSVQSYQSQRSLSARPNFSRSRTPSSPKSLGLLTVVQLTSFYKFFFETADIRRVLFLKIPEARKQLLMSELDRVAQDYKIHRDEIHSKLVQIMRERLLANLRKLPQIVEGWNAPQDNDVQPSQFAKAVTKEVTYLHRILSQTLLEVEVQTIFRYCCAGL

SEQ ID NO: 164002 - protein, 349 aa, Zea Mays
MVMASAGVNVPGGDEVRNPTAASASTPECRMRRRHRLEPQGSGDAAAAAAPGPSWVRRLRPAASRFSPSPSPSLSPSSSQSSADRPNDEEQEELDHEVEVELAPAGPQLEPGEAEGEPEAEAVAVAPQVWPVAFGSLSMAGRMRMMEDAVSLHPDLCTWAADGSPMHFFGVFDGHGGSHVSALCRDRMHEVVAEELAREGATFLRRRQESAASGSAAWSERAEEERAWRAALQRGFRRVDDMAALACACGRVARPSCSCPLAGTSSGIVGSTAVVALLVRGRLVVANCGDSRAVLCRGPAGTPPVPLSSDHKPNRADEKARIEAAGGRVVFNNGHRVRGILAMSRALGC

SEQ ID NO: 164003 - protein, 240 aa, Zea Mays
MAGVSASIPCVVLNTGHAMPVLGFGTGSSSTPEDLPATILHAVRLGYRHIDTASMYGTEGAVGAAVSDAVAAGAVTSRADLFITSKLVMKDAHPDRVLPAIRESLARLGLDYLDLFLVHWPVAADENNKPVPFDMEGVWHAMEECHRIGLARSVGVSNFSAAKMSRLLAFAAVPPAVNQVEVNVGWRQEKVREACAKNGVVVTAFSPLGAIGTAWGSNAVMESGALEDIAARRGKTIAQR

SEQ ID NO: 164004 - protein, 678 aa, Zea Mays
MAATTPATDPPDALLAVTADAPTPARPTPAELVARAVAPVKPAFLCPPPVREAPKEEGKAAGGGAVVKVEKKSKRQLKRERQQEQKSTSHLCIEVGKSGNVDSCKYGTSCHFSHDINAYLSQKPADLEGTCPFTALGHLCPYGLTCRFLSTHKDNLAPQNHPEGNCERNPLSKEIQKLLWKSKYKFPKASAQIKLLGLKDGNKNKAEAVNDDNPDETCNLNGDDKTLLSSIPENVEPDPTLCKEIDNSGGEPLVVDSVESVEPRASKKSKVEVDETRDNEIKGPTTGIHDNEAESEVNSISGVKVSSNNQSSCKVDLITIPHLREKKIIDFREKLYLAPLTTVGNLPFRRLCKTLGADVTCGEMAMCTNLLQGQASEWALLRRHPSEDLFGVQICGPYPDTVARTVELVDNECSVDFIDINMGCPIDIVVNKGAGSSLLTKPMRIRSIVQAASTVTEKPLTVKVRTAFFEGRNRADSLVSDIYNWGASAITIHGRSRQQRYSKLADWDYIYQCAQKAPDYLHVIGNGDVFSFTDWNKHVSDCSKISTCMIARGALIKPWLFTEIKEQRHWDITSGERLNILKDFVRFGLEHWGSDFKGVETTRHFLLEWLSYTCRYIPVGLLDVIPQRLNWRPPSYYGRDDLETLMVSDSAADWDLRDVAWQSSRRVYLRTEAQVQCL

SEQ ID NO: 164005 - protein, 682 aa, Zea Mays
MAATTPATDPPDALLAVTADAPTPARPTPAELVARAVAPVKPAFLCPPPVREAPKEEGKAAGGGAVVKVEKKSKRQLKRERQQEQKSTSHLCIEVGKSGNVDSCKYGTSCHFSHDINAYLSQKPADLEGTCPFTALGHLCPYGLTCRFLSTHKDNLAPQNHPEGNCERNPLSKEIQKLLWKSKYKFPKASAQIKLLGLKDGNKNKAEAVNDDNPDETCNLNGDDKTLLSSIPENVEPDPTLCKEIDNSGGEPLVVDSVESVEPRASKKSKVEVDETRDNEIKGIHDNEAESEVNSISGVKVSSNNQSSCKVDLITIPHLREKKIIDFREKLYLAPLTTVGNLPFRRLCKTLGADVTCGEMAMCTNLLQGQASEWALLRRHPSEDLFGVQICGPYPDTVARTVELVDNECSVDFIDINMGCPIDIVVNKGAGSSLLTKPMRIRSIVQAASTVTEKPLTVKVRTAFFEGRNRADSLVSDIYNWGASAITIHGRSRQQRYSKLADWDYIYQCAQKAPDYLHVIGNGDVFSFTDWNKHVSDCSKISTCMIARGALIKPWLFTEIKEQRHWDITSGERLNILKDFVRFGLEHWGSDFKGVETTRHFLLEWLSYTCRYIPVGLLDVIPQRLNWRPPSYYGRDDLETLMVSDSAADWIRISEMLLGKVPEGFTFAPKHKSNAYDRAENG

SEQ ID NO: 164006 - protein, 522 aa, Zea Mays
MDFCDYPLACGDYGVCSDGQCSCPSSSYFRLRSERHPDAGCVPLASSASCDHRLIPLDNVSYFSYTTFQSSATPGISQALCLRSCLLDCSCRVVLFQRSLSFGEDGMSFGGDAGNCLLLSEQKLIMFAEGSANNVSALFSIQDGHSAERRNIVIITSTVAGISVASVLGFAVLWKKWREEEEPLFDGIPGTPSRFTFHELKAATGNFSTKLGAGGFGSVFRGTIGKQTVAVKRLEGVNQGMEEFLAEVKTIGRIHQLNLVRLVGFCAEKSHRLLVYEYLSNGSLDTWIFGASLVFSLSWKTRRGIMLAIARGLSYLHEECEEKIAHLDIKPQNILLDSKFNAKLSDFGLSKMIDRDQSKVVTRMRGTRGYLAPEWLGSTITEKADVYSFGIVMVEMICGRRNLDESLPEQSIHLVSLLQERAKSGQLLDLVDSGSDDMKSNNVEEVMRTMKLAMWCLQVDSSSRPSMSTVAKVLEGAVAMEATPGCIFVPSFASGDDAAAAVAGSNSNSSYVPSESHLSGPR

SEQ ID NO: 164007 - protein, 309 aa, Zea Mays
MKPWACNTSNMWVAFLLVIGFPFLLTTVVGQLSTTAPPNSWELTNLEAIPMDGAVASMRPVLENSANLYRTLFGFYTTDGHSFVLSVVFLGPKAPVIWSANPDSPVSSSAVLNFTREGDLLLHEAGGGTVIWSTGTSGMSVAVAGMKLDDLGNLVLFDRKNSSAWQSFDNPTDTLVLGQSLCRGNSSLSAKPSITKWPGARVYLSAELDGLQYSFKPAAYTQLFKATAASTNATPNCYAFVNGSFGFPDKVFSLPLAGSMQLMRLESDGHLRLYEMGIPQLELRMVLDVFFEGSGGGKPLLRILLEIEK

SEQ ID NO: 164008 - protein, 134 aa, Zea Mays
MRDCGRQACTGRKEARRSKVKEAPHTGRITESSSGTPRLQAPPRWPGLTSGKKGIRIALGLFSRENQMILDGSGGRLCDPNDKTKVKCLICGHESSGGIHQFKQHLAHKVTGVKYCAKVSPYVKEKCKEDLEGT

SEQ ID NO: 164009 - protein, 80 aa, Zea Mays
MILDGSGGRLCDPNDKTKVKCLICGHESSGGIHQFKQHLAHKVTGVKYCAKLQELLIALKLFHPSSARLALRAFLNLVLS

SEQ ID NO: 164010 - protein, 117 aa, Zea Mays
MISSNRYTMISPGLRIYSQDYIDECSNSSHTIPIRWFRSHARDIYLGSYPTVPMRIHDHRWMERGVMPRINPDRSYTNRRCPPSSSLAPQHSGARAPHGNQLTVSSSIPCHQALNLA

SEQ ID NO: 164011 - protein, 101 aa, Zea Mays
MEAAAATTAAALLPPARKVFILPLLLLLAASSLVPRASSDGAQYDYRAYTECKPHPEPALYNGGVLRWASKITDFRTEDEGNYSPAFVLYNMSAATAYSFS

SEQ ID NO: 164012 - protein, 108 aa, Zea Mays
MEAAAATTAAALLPPARKVFILPLLLLLAASSLVPRASSDGAQYDYRAYTECKPHPEPALYNGGVLRWASKITDFRTEDEGNYSPAFVLYNMSAATAYSFSSSLLHCL

SEQ ID NO: 164013 - protein, 520 aa, Zea Mays
MEAAAATTAAALLPPARKVFILPLLLLLAASSLVPRASSDGAQYDYRAYTECKPHPEPALYNGGVLRWASKITDFRTEDEGNYSPAFVLYNMSAATALGENRRARKRTREGEDTDRGERSVAVRRHRYRAQRLLVFSQGWLYSQLHVSNLGALFADCEPKCFYDLNQKPLLAAILTRSVESAQGGAYPTDSEAFREPACLRRQRQPRGRGGRGRAPDHQRLPLRLRHQQEHPRERAVPGLVQRAVQRGGVRERAQVVRDGAVAGEGGVRGGGPAAAVRAVQRRDGARAQHLLGGPQVHAGVGEEPDGPGAARRGGRPRPEPAVAVQGRLRALGREQRDAALRLLRGPAGRQRHGRLLQHGQARRPAGHALPQRLQRGGGVRRPQLQRRLLRVQAAPARRRRRGHLRGHRAGGPLRQAQRPLRARRARQAGHAPPARLAHRGRRQRRLRPRHAGRVPRGRPPRRLRAPGRRRHRAVDGHGRQRHLLPDVPHGRRLHQPPGRRRRRQAAGGVADQGGAGRHR

SEQ ID NO: 164014 - protein, 308 aa, Zea Mays
MTSLSITVMTLNLHEGEQPSESPNSWEKRRDICVSVITSYSPTILCTQQGLRWQLDYLQQCLPGYEQFGISRKGSQDNTDEYCTIFYEKEKVELTEGGTFWLSESPSVPGSISWGANAPCIATWATFQLKRLEPPGFSFQIVNTNLDEVSPRARRRSALLTWQHIASLAPNLPVIYCGGFNTQKESMTGRFLLGRSREHGVVGDMRDAWPNARVRKNVSIIHTYHGFKGEKKGALEFLKLIFRALCLCWDRQTQDLHVDWILFRGRPLVPALCEVINDNIDGVYPSSHFPIFAEFLLPRSVRLAETPS

SEQ ID NO: 164015 - protein, 294 aa, Zea Mays
MTSLSITVMTLNLHEGEQPSESPNSWEKRRDICVSVITSYSPTILCTQQGYEQFGISRKGSQDNTDEYCTIFYEKEKVELTEGGTFWLSESPSVPGSISWGANAPCIATWATFQLKRLEPPGFSFQIVNTNLDEVSPRARRRSALLTWQHIASLAPNLPVIYCGGFNTQKESMTGRFLLGRSREHGVVGDMRDAWPNARVRKNVSIIHTYHGFKGEKKGALEFLKLIFRALCLCWDRQTQDLHVDWILFRGRPLVPALCEVINDNIDGVYPSSHFPIFAEFLLPRSVRLAETPS

SEQ ID NO: 164016 - protein, 261 aa, Zea Mays
MTSLSITVMTLNLHEGEQPSESPNSWEKRRDICVSVITSYSPTILCTQQGLRWQLDYLQQCLPGYEQFGISRKGSQDNTDEYCTIFYEKEKVELTEGGTFWLSESPSVPGSISWGANAPCIATWATFQLKRLEPPGFSFQIVNTNLDEVSPRARRRSALLTWQHIASLAPNLPVIYCGGFNTQKESMTGRFLLGRSREHGVVGDMRDAWPNARVRKNVSIIHTYHGFKGAPDTSFRSYFPVSVVKTAREFLRLLCQSKTWN

SEQ ID NO: 164017 - protein, 243 aa, Zea Mays
MNSLESQEKAHRTTLMNTAQYSMKRKRWSLLKVALFGCRNHHLFQEAFHGEQMHPALQHGQFQLKRLEPPGFSFQIVNTNLDEVSPRARRRSALLTWQHIASLAPNLPVIYCGGFNTQKESMTGRFLLGRSREHGVVGDMRDAWPNARVRKNVSIIHTYHGFKGEKKGALEFLKLIFRALCLCWDRQTQDLHVDWILFRGRPLVPALCEVINDNIDGVYPSSHFPIFAEFLLPRSVRLAETPS

SEQ ID NO: 164018 - protein, 205 aa, Zea Mays
MLLWSYFSVVFTDPGSVPPNWNLDFDVEMGETAPLASSELCSQMNSQQSVALGNMTNPRVRYCRKCNQLKPPRCHHCSVCGRCVLKMDHHCVWVVNCVGALNYKYFLLFLFYTFLETTLVTLSLLPHFIAFFSDAEIPGSPAALATTFLTFVLNLAFSLSVLGFMIMHISLVSANTTTIEAYEKKTTPHWIYDLGRKRNFAQKRI

SEQ ID NO: 164019 - protein, 99 aa, Zea Mays
MCKKLVIDKNLGLEFQTLQKYHGNCQAMVSKTYFFYKVVKHLLAKNTMVFSNTMVLSQNSKNTLLPNTPLSVCAFLLVIIFWKHIWLRLNAQLQSQKKL

SEQ ID NO: 164020 - protein, 196 aa, Zea Mays
MFTPLPRHWRHIRSRLTPLAQHPLLLPNPSTSVLRPPQLRRWPPPRTLRRSSASRETSRCSSRHRRSTRARGPSSLRPRRALAPRTPLNHHRRRQPLRPRLFTQYPRRSLSRWSPRRFPPRSSPDPRWSRCRHCSSGRLRQDQMDRCLRSSGTRLHACKKHTRAWTSTSRDGSGWTSPSTSGRSTTIMRGPGRLEI

SEQ ID NO: 164021 - protein, 205 aa, Zea Mays
MFTPLPRHWRHIRSRLTPLAQHPLLLPNPSTSVLRPPQLRRWPPPRTLRRSSASRETSRCSSRHRRSTRARGPSSLRPRRALAPRTPLNHHRRRQPLRPRLFTQYPRRSLSRWSPRRFPPRSSPDPRWSRCRHCSSGRLRQDQMDRCLRSSGTRLHACKKHTRAWTSTSRDGSGWTSPSTSGRSTTIMRGPGRFEQRWHSLAAQL

SEQ ID NO: 164022 - protein, 104 aa, Zea Mays
MISCSCSVQAANFPRRFCHVQTSLLPLGLPWMPLCRCLPLHRCSKLHSRSPPCVPHRRHFHVSNLMRSLHRRRALLLCATVRDHVAPSGSSLISSPERILLLAT

SEQ ID NO: 164023 - protein, 870 aa, Zea Mays
MDANVVQRCLEAGGRDFLFHHTSSPPSPTSASAAASSSILQSLPLHVSFDRGYYLLVKAIQELRARKDGHVVTVGIGGPTGSGKTSLAEKVASVLGCVVIVSMEDYRTAPGVDDGISDVNAVDFDALARNLQDLVKGKDTMVPLVDFQEKKRTGWRELRISSSGVVIVDGAYALHSTLRSLLDIRVAVVGGVHFSLLSKVQHDIGDSCSLDYLIDSIFPLFRKHIEPDLHHAQIRIDNSFVCSFREPYYKLKCKNESSDGKKLYSFEQNKVETENFIEMYLRPPFASEEMKIDDWIKVRQCGIRYYLSLGDQRIVDKYFIIRPKAEFEVGRTTLGGLLALGYNVVVSFKRTCTSVNIDQLLIAAETIDTLNETFLVLKGPSRKIVAAEASKLGIKGPWITKSYLEMILESKGVPRLNTPPPVSSKLLTESQEKKIAAPKPIRVSAENITNLDDLMQPWTRSPPKKLEQEHVLAKWQFISDSSSRSNIQLAPLPDSYDLDRGLLLSVQAIQALLENRGYPIIVGIGGPSGSGKTSLAQKMANIIGCEVVSLESYYKPEQVRDYKYDDYSSLDIALLTENIMDIKKRHKAEVPCFDFENFSRKGFKELQVSEESGVVIFEGVYTLHPAIRKFLDLWIAVVGGVHSHLIARIQRDKNRAGFSISQTEIMTTVFPLFQQYIEPHLVHAHLKIQNDFDPVLSPESSLFVLKSKKQVSCQDILKVLDASKVCSSVQNFTDVYLRLPGIPSNAQLTEGECIRVRICEGRFALLIREPIREGNFIIQPKVDFDISASTVAGLLKLGYQAVAYIEASAVIYQDGKVIMFLNQCSSFFYLEKRMHTCLPLNGQSLFYFCKSLPTPVLLCHYCLLVQRFIL

SEQ ID NO: 164024 - protein, 687 aa, Zea Mays
MDANVVQRCLEAGGRDFLFHHTSSPPSPTSASAAASSSILQSLPLHVSFDRGYYLLVKAIQELRARKDGHVVTVGIGGPTGSGKTSLAEKVASVLGCVVIVSMEDYRTAPGVDDGISDVNAVDFDALARNLQDLVKGKDTMVPLVDFQEKKRTGWRELRISSSGVVIVDGAYALHSTLRSLLDIRVAVVGGVHFSLLSKVQHDIGDSCSLDYLIDSIFPLFRKHIEPDLHHAQIRIDNSFVCSFREPYYKLKCKNESSDGKKLYSFEQNKVETENFIEMYLRPPFASEEMKIDDWIKVRQCGIRYYLSLGDQRIVDKYFIIRPKAEFEVGRTTLGGLLALGYNVVVSFKRTCTSVNIDQLLIAAETIDTLNETFLVLKGPSRKIVAAEASKLGIKGPWITKSYLEMILESKGVPRLNTPPPVSSKLLTESQEKKIAAPKPIRVSAENITNLDDLMQPWTRSPPKKLEQEHVLAKWQFISDSSSRSNIQLAPLPDSYDLDRGLLLSVQAIQALLENRGYPIIVGIGGPSGSGKTSLAQKMANIIGCEVVSLESYYKPEQVRDYKYDDYSSLDIALLTENIMDIKKRHKAEVPCFDFENFSRKGFKELQVSEESGVVIFEGVYTLHPAIRKFLDLWIAVVGGVHSHLIARIQRDKNRAGFSISQTEIMTTVFPLFQQYIEPHLVHAHVA

SEQ ID NO: 164025 - protein, 588 aa, Zea Mays
MDANVVQRCLEAGGRDFLFHHTSSPPSPTSASAAASSSILQSLPLHVSFDRGYYLLVKAIQELRARKDGHVVTVGIGGPTGSGKTSLAEKVASVLGCVVIVSMEDYRTAPGVDDGISDVNAVDFDALARNLQDLVKGKDTMVPLVDFQEKKRTGWRELRISSSGVVIVDGAYALHSTLRSLLDIRVAVVGGVHFSLLSKVQHDIGDSCSLDYLIDSIFPLFRKHIEPDLHHAQIRIDNSFVCSFREPYYKLKCKNESSDGKKLYSFEQNKVETENFIEMYLRPPFASEEMKIDDWIKVRQCGIRYYLSLGDQRIVDKYFIIRPKAEFEVGRTTLGGLLALGYNVVVSFKRTCTSVNIDQLLIAAETIDTLNETFLVLKGPSRKIVAAEASKLGIKGPWITKSYLEMILESKGVPRLNTPPPVSSKLLTESQEKKIAAPKPIRVSAENITNLDDLMQPWTRSPPKKLEQEHVLAKWQFISDSSSRSNIQLAPLPDSYDLDRGLLLSVQAIQALLENRGYPIIVGIGGPSGSGKTSLAQKMANIIGCEVVSLESYYKPEQVRDYKYDDYSSLDIALLTEENRIGGNRMDH

SEQ ID NO: 164026 - protein, 257 aa, Zea Mays
MDANVVQRCLEAGGRDFLFHHTSSPPSPTSASAAASSSILQSLPLHVSFDRGYYLLVKAIQELRARKDGHVVTVGIGGPTGSGKTSLAEKVASVLGCVVIVSMEDYRTAPGVDDGISDVNAVDFDALARNLQDLVKGKDTMVPLVDFQEKKRTGWRELRISSSGVVIVDGAYALHSTLRSLLDIRVAVVGGVHFSLLSKVQHDIGDSCSLDYLIDSIFPLFRKHIEPDLHHAQIRIDNSFVCSFREPYYKLKCKNEY

SEQ ID NO: 164027 - protein, 304 aa, Zea Mays
MSFIEMYLRPPFASEEMKIDDWIKVRQCGIRYYLSLGDQRIVDKYFIIRPKAEFEVGRTTLGGLLALGYNVVVSFKRTCTSVNIDQLLIAAETIDTLNETFLVLKGPSRKIVAAEASKLGIKGPWITKSYLEMILESKGVPRLNTPPPVSSKLLTESQEKKIAAPKPIRVSAENITNLDDLMQPWTRSPPKKLEQEHVLAKWQFISDSSSRSNIQLAPLPDSYDLDRGLLLSVQAIQALLENRGYPIIVGIGGPSGSGKTSLAQKMANIIGCEVVSLESYYKPEQVRDYKYDDYSSLDIALLTE

SEQ ID NO: 164028 - protein, 389 aa, Zea Mays
MDANVVQRCLEAGGRDFLFHHTSSPPSPTSASAAASSSILQSLPLHVSFDRGYYLLVKAIQELRARKDGHVVTVGIGGPTGSGKTSLAEKVASVLGCVVIVSMEDYRTAPGVDDGISDVNAVDFDALARNLQDLVKGKDTMVPLVDFQEKKRTGWRELRISSSGVVIVDGAYALHSTLRSLLDIRVAVVGGVHFSLLSKVQHDIGDSCSLDYLIDSIFPLFRKHIEPDLHHAQIRIDNSFVCSFREPYYKLKCKNESSDGKKLYSFEQNKVETENFIEMYLRPPFASEEMKIDDWIKVRQCGIRYYLSLGDQRIVDKYFIIRPKAEFEVGRTTLGGLLALGYNVVVSFKRTCTSVNIDQLLIAAETIDTLNETFLVLKGPSRKRLQSLV

SEQ ID NO: 164029 - protein, 917 aa, Zea Mays
MDANVVQRCLEAGGRDFLFHHTSSPPSPTSASAAASSSILQSLPLHVSFDRGYYLLVKAIQELRARKDGHVVTVGIGGPTGSGKTSLAEKVASVLGCVVIVSMEDYRTAPGVDDGISDVNAVDFDALARNLQDLVKGKDTMVPLVDFQEKKRTGWRELRISSSGVVIVDGAYALHSTLRSLLDIRVAVVGGVHFSLLSKVQHDIGDSCSLDYLIDSIFPLFRKHIEPDLHHAQIRIDNSFVCSFREPYYKLKCKNESSDGKKLYSFEQNKVETENFIEMYLRPPFASEEMKIDDWIKVRQCGIRYYLSLGDQRIVDKYFIIRPKAEFEVGRTTLGGLLALGYNVVVSFKRTCTSVNIDQLLIAAETIDTLNETFLVLKGPSRKIVAAEASKLGIKGPWITKSYLEMILESKGVPRLNTPPPVSSKLLTESQEKKIAAPKPIRVSAENITNLDDLMQPWTRSPPKKLEQEHVLAKWQFISDSSSRSNIQLAPLPDSYDLDRGLLLSVQAIQALLENRGYPIIVGIGGPSGSGKTSLAQKMANIIGCEVVSLESYYKPEQVRDYKYDDYSSLDIALLTENIMDIKKRHKAEVPCFDFENFSRKGFKELQVSEESGVVIFEGVYTLHPAIRKFLDLWIAVVGGVHSHLIARIQRDKNRAGFSISQTEIMTTVFPLFQQYIEPHLVHAHLKIQNDFDPVLSPESSLFVLKSKKQVSCQDILKVLDASKVCSSVQNFTDVYLRLPGIPSNAQLTEGECIRVRICEGRFALLIREPIREGNFIIQPKVDFDISASTVAGLLKLGYQAVAYIEASAVIYQDGKILIEVDHLQGVSTPYLQIKGTNKEIVTSAGSALCLDGSYTTKSYLQIILESLPADGNVSIGIHNQQAARLQELVEFIQSQVLWTILLSALVGYSLYQKKRH

SEQ ID NO: 164030 - protein, 915 aa, Zea Mays
MDANVVQRCLEAGGRDFLFHHTSSPPSPTSASAAASSSILQSLPLHVSFDRGYYLLVKAIQELRARKDGHVVTVGIGGPTGSGKTSLAEKVASVLGCVVIVSMEDYRTAPGVDDGISDVNAVDFDALARNLQDLVKGKDTMVPLVDFQEKKRTGWRELRISSSGVVIVDGAYALHSTLRSLLDIRVAVVGGVHFSLLSKVQHDIGDSCSLDYLIDSIFPLFRKHIEPDLHHAQIRIDNSFVCSFREPYYKLKCKNESSDGKKLYSFEQNKVETENFIEMYLRPPFASEEMKIDDWIKVRQCGIRYYLSLGDQRIVDKYFIIRPKAEFEVGRTTLGGLLALGYNVVVSFKRTCTSVNIDQLLIAAETIDTLNETFLVLKGPSRKIVAAEASKLGIKGPWITKSYLEMILESKGVPRLNTPPPVSSKLLTESQEKKIAAPKPIRVSAENITNLDDLMQPWTRSPPKKLEQEHVLAKWQFISDSSSRSNIQLAPLPDSYDLDRGLLLSVQAIQALLENRGYPIIVGIGGPSGSGKTSLAQKMANIIGCEVVSLESYYKPEQVRDYKYDDYSSLDIALLTENIMDIKKRHKAEVPCFDFENFSRKGFKELQVSEESGVVIFEGVYTLHPAIRKFLDLWIAVVGGVHSHLIARIQRDKNRAGFSISQTEIMTTVFPLFQQYIEPHLVHAHLKIQNDFDPVLSPESSLFVLKSKKQVSCQDILKVLDASKVCSSVQNFTDVYLRLPGIPSNAQLTEGECIRVRICEGRFALLIREPIREGNFIIQPKVDFDISASTVAGLLKLGYQAVAYIEASAVIYQDGKILIEVDHLQGVSTPYLQIKGTNKEIVTSAGSALCLDGSYTTKSYLQIILESLPADGNVSIGIHNQQAARLQELVEFIQSQVYCCRFVCKIFVHHTRKLP

SEQ ID NO: 164031 - protein, 510 aa, Zea Mays
MILESKGVPRLNTPPPVSSKLLTESQEKKIAAPKPIRVSAENITNLDDLMQPWTRSPPKKLEQEHVLAKWQFISDSSSRSNIQLAPLPDSYDLDRGLLLSVQAIQALLENRGYPIIVGIGGPSGSGKTSLAQKMANIIGCEVVSLESYYKPEQVRDYKYDDYSSLDIALLTENIMDIKKRHKAEVPCFDFENFSRKGFKELQVSEESGVVIFEGVYTLHPAIRKFLDLWIAVVGGVHSHLIARIQRDKNRAGFSISQTEIMTTVFPLFQQYIEPHLVHAHLKIQNDFDPVLSPESSLFVLKSKKQVSCQDILKVLDASKVCSSVQNFTDVYLRLPGIPSNAQLTEGECIRVRICEGRFALLIREPIREGNFIIQPKVDFDISASTVAGLLKLGYQAVAYIEASAVIYQDGKILIEVDHLQGVSTPYLQIKGTNKEIVTSAGSALCLDGSYTTKSYLQIILESLPADGNVSIGIHNQQAARLQELVEFIQSQVYCCRFVCKIFVHHTRKLP

SEQ ID NO: 164032 - protein, 552 aa, Zea Mays
MILESKGVPRLNTPPPVSSKLLTESQEKKIAAPKPIRVSAENITNLDDLMQPWTRSPPKKLEQEHVLAKWQFISDSSSRSNIQLAPLPDSYDLDRGLLLSVQAIQALLENRGYPIIVGIGGPSGSGKTSLAQKMANIIGCEVVSLESYYKPEQVRDYKYDDYSSLDIALLTENIMDIKKRHKAEVPCFDFENFSRKGFKELQVSEESGVVIFEGVYTLHPAIRKFLDLWIAVVGGVHSHLIARIQRDKNRAGFSISQTEIMTTVFPLFQQYIEPHLVHAHLKIQNDFDPVLSPESSLFVLKSKKQVSCQDILKVLDASKVCSSVQNFTDVYLRLPGIPSNAQLTEGECIRVRICEGRFALLIREPIREGNFIIQPKVDFDISASTVAGLLKLGYQAVAYIEASAVIYQDGKILIEVDHLQGVSTPYLQIKGTNKEIVTSAGSALCLDGSYTTKSYLQIILESLPADGNVSIGIHNQQAARLQELVEFIQSQGGSFNSDLSSPIRETSSTDSVIDDMQSRIRKLERWNTINMVLWTILLSALVGYSLYQKKRH

SEQ ID NO: 164033 - protein, 507 aa, Zea Mays
MYLRPPFASEEMKIDDWIKVRQCGIRYYLSLGDQRIVDKYFIIRPKAEFEVGRTTLGGLLALGYNVVVSFKRTCTSVNIDQLLIAAETIDTLNETFLVLKGPSRKIVAAEASKLGIKGPWITKSYLEMILESKGVPRLNTPPPVSSKLLTESQEKKIAAPKPIRVSAENITNLDDLMQPWTRSPPKKLEQEHVLAKWQFISDSSSRSNIQLAPLPDSYDLDRGLLLSVQAIQALLENRGYPIIVGIGGPSGSGKTSLAQKMANIIGCEVVSLESYYKPEQVRDYKYDDYSSLDIALLTENIMDIKKRHKAEVPCFDFENFSRKGFKELQVSEESGVVIFEGVYTLHPAIRKFLDLWIAVVGGVHSHLIARIQRDKNRAGFSISQTEIMTTVFPLFQQYIEPHLVHAHLKIQNDFDPVLSPESSLFVLKSKKQVSCQDILKVLDASKVCSSVQNFTDVYLRLPGIPSNAQLTEGECIRVRICEGRFALLIREVCTLILFSLCFFHSLT

SEQ ID NO: 164034 - protein, 104 aa, Zea Mays
MLMLLKIQNDFDPVLSPESSLFVLKSKKQVSCQDILKVLDASKVCSSVQNFTDVYLRLPGIPSNAQLTEGECIRVRICEGRFALLIREVCTLILFSLCFFHSLT

SEQ ID NO: 164035 - protein, 292 aa, Zea Mays
MTTVFPLFQQYIEPHLVHAHLKIQNDFDPVLSPESSLFVLKSKKQVSCQDILKVLDASKVCSSVQNFTDVYLRLPGIPSNAQLTEGECIRVRICEGRFALLIREPIREGNFIIQPKVDFDISASTVAGLLKLGYQAVAYIEASAVIYQDGKILIEVDHLQGVSTPYLQIKGTNKEIVTSAGSALCLDGSYTTKSYLQIILESLPADGNVSIGIHNQQAARLQELVEFIQSQGGSFNSDLSSPIRETSSTDSVIDDMQSRIRKLERWNTINMVLWTILLSALVGYSLYQKKRH

SEQ ID NO: 164036 - protein, 162 aa, Zea Mays
MKITAMESGIEGRVVIVASDSYKHTYREGIRFDKLNDASGYKGILAYGQSKLANILRSNELSCRLKEEDAKVVVNSLHPGVVATNITRHLGIIKDILSPIAKLVLRGVEQGAATVCYLALHPQVAGVTGKYFVDFNAVELKPPATDKELSKKLWDFSVSLLQ

SEQ ID NO: 164037 - protein, 505 aa, Zea Mays
MIYGDQHDALFFEYFMEKQIMGEFARVLRISKLSRVSLQLLQTMSIMIQNLRNEHSIYYIFSNEHINFLVTYPFDFRIDEMLSYYISFLRAISGKLNKNTISLLVKTKNDEVTSFPLYVEALKFAFHEDSMIRVAIRTLTLNVYHVGDESVNRFVSRTPLSDYFSDMVQHFQKQCIDLDKLVARSSRKGNSSVPISSIEDAIVQIEDTLYYFSDVMSSGIPDLERFITENILRVLVFRFLLPSLQRQSTDLDLSVTTSMYLLCCILHIFKNKDMASTVAAALFHQPDGPDDRKQRTPNGYTSEHDSCKSENHCTTASGIEQSSEEPNSLSSVSWKHLPNNSSRSDCCQGNTPREHLLSYITEGDDSQALGSLCLFATLLQTKELDESMLDALGILPQRKQHKKLLLQALVGEDLAETQLFSSSSSLTDDSICSDFDIYVRKLQDKYGLQCHHPRQMTSKAHRYQVKGFCRCSFGWWLAFPATAAPWRGRVHCFSSKTTKGFTQGL

SEQ ID NO: 164038 - protein, 732 aa, Zea Mays
MRCAPPPAAAAWWPAHVREGPSATRPGYCGSESEFAPRARAIAAGRSGSPNMWLFWRTRNRFSLEELRYLTDQLQKVHVVNEANKEFVIEALRSIAELMIYGDQHDALFFEYFMEKQIMGEFARVLRISKLSRVSLQLLQTMSIMIQNLRNEHSIYYIFSNEHINFLVTYPFDFRIDEMLSYYISFLRAISGKLNKNTISLLVKTKNDEVTSFPLYVEALKFAFHEDSMIRVAIRTLTLNVYHVGDESVNRFVSRTPLSDYFSDMVQHFQKQCIDLDKLVARSSRKGNSSVPISSIEDAIVQIEDTLYYFSDVMSSGIPDLERFITENILRVLVFRFLLPSLQRQSTDLDLSVTTSMYLLCCILHIFKNKDMASTVAAALFHQPDGPDDRKQRTPNGYTSEHDSCKSENHCTTASGIEQSSEEPNSLSSVSWKHLPNNSSRSDCCQGNTPREHLLSYITEGDDSQALGSLCLFATLLQTKELDESMLDALGILPQRKQHKKLLLQALVGEDLAETQLFSSSSSLTDDSICSDFDIYVRKLQDKYGLQCHHPRQMTSKAHRYQVLDALVDLFCRSKVSADVRLVGGWLFRQLLPHGEEEFTAFHLRRLKQMQGENYDSIPIYYYQISLIHTRIVAQSFLRNLEDAGVTCFFLLLKKLGGTARKQLRHLRHQKDPNLLLYPWICVHLKVILLLPSQRHSMRWLRVLCCSIKLYSSVLEKLSQSYLLFTLWLICL

SEQ ID NO: 164039 - protein, 109 aa, Zea Mays
MAPLAGSDPRIDTKHGKWLHLRIRPSSVPFLDTEKHKAKTKKYLVDGRWTLAFRDEQSCKVAESMVIEEMKLQRGAVAEQLKPLVEFDMPEDGMQHPQTSHETPSDDGS

SEQ ID NO: 164040 - protein, 520 aa, Zea Mays
MSRGSEDVNSSELSDHCPLALHLNEDVKGKRRFHFESFWTKIPDFLETVATSWEQPVMFSYPLERMALKLKRLAKALQSWSHKRIGNIKSQLSLAREILHRLEIAQHNRLLCGDEIWLKGRLKHHCLGLASLERTIARLRSRIKYLKEGDANTSFFHLQACYWKKRNFISELVHGDQIATSQEQKQEVLFDFFSNLLGVAKQREFTLDLEACHSADVDLGALDLPITEEVRATIASLPSDKAPGPDGYTGRFYKTCWHIIKADLMAAVITLHQGNTRKLWMMNSAYLTLIPKKVDAKTAGDYRPISLIHSFAKLVSKVLANRLAPHLHNLVATNQSAFVKGRSIHDNYMLVQHSINAFHRKKIASLFLKLDITKAFDSVSWVFLLEVLSHLGFGPRWCGLVFNLLSTSSTQVLINGTPGDYIRHRRGLRQGDPLSPMLFIIVMDVLSSLFKHAEERGLLHDLAIRNMKSRLSIYADDVVLFVKPAVEDLICVKMILDCFGEASGLVVNLQKKKLCYPSQL

SEQ ID NO: 164041 - protein, 127 aa, Zea Mays
MMAPPVDVAGPRPRLGDVEAPSRSRSRSSLSSVAVVESEPLGRARRRPSAEARAESEPWGRAKRSSPSFGAEPKSEPWVGRSGVRRLPGLSPSPSPGSGGAEFAVFRGLARVRALGQAERSSPFSGA

SEQ ID NO: 164042 - protein, 132 aa, Zea Mays
MARIKVHELRGKSKTDLQAQLKELKSELSLLRVAKVTGGAPNKLSKIKIVRTSIARVLTVISQKQKSALREAYKKKKLLPLDLRPKKTRAIRRRLTKYQVYTYVPCVYFNAFSFIAEALILLFYQCCEASWV

SEQ ID NO: 164043 - protein, 405 aa, Zea Mays
MFIPNVFIKLCIEHWRAENKIACVTTAATNPPHISNELQVLIGQATLMPHSPGSSKEVRKSLFLLHKVLADKESAVVHLIGCRPGTIAKLVTVLPETCLDPDPELEDVILRILEKAASYGPNKAVFGDDQYALPVLIARTLLGPAPMRARCARILGLLADDHYNKIKIGELGGFAPLVELLYVGDKGAKKTAAKVIGSLCEAQENQSKFLKEGVVDAAISALRSDGLVEEAQDILLRISGSSVAFGEAYLKLESIKDDDLCQKTSVLLWKTFVLMNGEDKHDAGCSMTASKSAWGESSSTSSDAAMSSTSSDSSADERALRKQNWEDAKIIASWLQKRCSFPNTYRSAEGVFGWLQADTVAAVWIAAAAIHREKNTVEAAAAAGLQPQQAAANKLLDSNAVAEMM

SEQ ID NO: 164044 - protein, 764 aa, Zea Mays
MQVWNNCLCTGVHVLLPVLLLSMLHVTSHPPPESVYIDLLLYFTGRILPLPVLDERMDPFLGRLARPVTIDQSWFTAQGDLSLLNRPASSDTKTSAELNNGLIEFNDATAPSPGLSCHNCSSVASNFKPFATVVSGLHQHFLDANVEVTYAEYLDLMKVEVDQQLNKLIEDIRVLKSYNVAHKCDLNDPCSTLGHVGKLTEIDEGFNSLKLLLVVVFRQIREMLTLVNSSIHDFQWEHELQLEITGFIIGDCVRGLKDELERKLYEQSSIVNSLRKNSQETVAQCASIREDLIAISNMLLPSEEEHHIPLCRHESLGNWSDRWKFSFFRKIPQKDHSLSSSEENQKSATQKSISPSEVISEKSDFRHLKGMTGQEILNYFRSEISKLKMLHELDLQEKTEELFKFKREKWSLALKYDVEFEPLRKRFPEVISRFDQIMSNGMEAPTISTSDAVDERSRLNSRIDSLYCENQHLRNLLAEKTKNVQELSCQISDASKKMSSQYYLEKEHLRQVKNIKEEYEDLYVESTIRDEIYQTVTSKLVDSHRDILEETTQILHAKVSSLEAAHSEKDMALCLSNEENRKLKEKLSILEKVHFIKDNQHDQLLMKQESEEMILRDIEMEPHVPPQRSCQISDQDMQYEELIKLNQTLEMASTTLKEVETKKLDYSDITSERKQEKQLDSILISIMDLSKEFVEMEHKMSEEIKGNEKKTENLNDRCNHMVQQAIVLTKKGLWYKQMLEIRRSELQKAESEVDVLGGKVNALL

SEQ ID NO: 164045 - protein, 708 aa, Zea Mays
MDPFLGRLARPVTIDQSWFTAQGDLSLLNRPASSDTKTSAELNNGLIEFNDATAPSPGLSCHNCSSVASNFKPFATVVSGLHQHFLDANVEVTYAEYLDLMKVEVDQQLNKLIEDIRVLKSYNVAHKCDLNDPCSTLGHVGKLTEIDEGFNSLKLLLVVVFRQIREMLTLVNSSIHDFQWEHELQLEITGFIIGDCVRGLKDELERKLYEQSSIVNSLRKNSQETVAQCASIREDLIAISNMLLPSEEEHHIPLCRHESLGNWSDRWKFSFFRKIPQKDHSLSSSEENQKSATQKSISPSEVISEKSDFRHLKGMTGQEILNYFRSEISKLKMLHELDLQEKTEELFKFKREKWSLALKYDVEFEPLRKRFPEVISRFDQIMSNGMEAPTISTSDAVDERSRLNSRIDSLYCENQHLRNLLAEKTKNVQELSCQISDASKKMSSQYYLEKEHLRQVKNIKEEYEDLYVESTIRDEIYQTVTSKLVDSHRDILEETTQILHAKVSSLEAAHSEKDMALCLSNEENRKLKEKLSILEKVHFIKDNQHDQLLMKQESEEMILRDIEMEPHVPPQRSCQISDQDMQYEELIKLNQTLEMASTTLKEVETKKLDYSDITSERKQEKQLDSILISIMDLSKEFVEMEHKMSEEIKGNEKKTENLNDRCNHMVQQAIVLTKKGLWYKQMLEIRRSELQKAESEVDVLGGKVNALL

SEQ ID NO: 164046 - protein, 113 aa, Zea Mays
MTAAARHPLLALRAPRFVRGRSSWPRLDLGGRGGAVRRRGHLMGRFVLCGEASPVGVPEFWPDRLCWELLGESLATVTPWARFSLIRASHGESPIHLGHAMMASSMSLPRRRF

SEQ ID NO: 164047 - protein, 345 aa, Zea Mays
MALRASPVSHGTAAAPLPPFARRRMARGVVVAMASTINRVKTVKEPYTPPREVHRQITHSLPPQKREIFDSLQPWAKDNLLNLLKPVEKSWQPQDFLPEPSSDGFYDEVKELRERANEIPDEYFVCLVGDMVTEEALPTYQTMLNTLDGVRDETGASPTTWAVWTRAWTAEENRHGDLLNKYMYLTGRVDMKQIEKTIQYLIGSGMDPGTENNPYLGFLYTSFQERATFVSHGNTARHAKEYGDLKLAQICGTIAADEKRHETAYTKIVEKLFEMDPDYTVLAFADMMRKKITMPAHLMYDGKDDNLFEHFSAVAQRRLDDRAQARAKQAPVIPFSWVYDRKVQL

SEQ ID NO: 164048 - protein, 224 aa, Zea Mays
MDPSYDGSAPAAGGSADDHGQTLWDWTVEHCEPNDSSHADATKFVWDCLNQDDDELMGLLGNQTPLRDCRDFFADLGDFTCKETLDLEESRESKRRRTLEYPSESSQSEVGTHDAASPFVTSEAAEISLLCTDKPQSLNWDMHHTSNNLDEAPYRQEDILSEHCSYGTPVYLEPDQTPCSQESIACINDQSGISGTSETGPMTESFIMQETRKLCTLKVSKAQH

SEQ ID NO: 164049 - protein, 311 aa, Zea Mays
MEGLAVLKIIKHCEEFAPALVTGQLLGLDVGSVLEVTNCFPFPMREEDDEADADGANYQLEMMRCLREVNVDNNTIGWYQSCLLGSFQTVELIETFMNYQESIRRCVCIVYDPSRSSQGVLALKALKLTDSFMDLYRNNGLTGEKLREKKLSWVDIFEEIPIKVSNSALVSAFMKELEPESPVTQCDLDRLKLSTAPFMERNLEFLIGCMDDLSSEQNKFQYYNRNLSRQQSQQQAWLQKRRQENMARKAAGEEPLPEEDPSNPIFKPIPEPSRLEGYLVTNQISSYCNHINGVAGQNFDRLYLMKALHED

SEQ ID NO: 164050 - protein, 400 aa, Zea Mays
MMHSQSQAPTPTLRCCRTLAELPARISMASLFLLLLVVVAALLWPPAVAAPEEHLVTGLPGFHGAFPSKHYSGYVTVDERSERSLFYYLVLSERDPAGDPVVVWLNGGPGCSSFDGFVYGNGPFNFEPGSSPGSLPKLQLNPYSWSKVSNIMYLDSPAGVGMSYSLNRSDYVTGDLKTAADAHKFLSKWFELYPEFQLNPFYISGESYAGVYIPTITDEVVKGIERGVKPRINFKGYLIGNPLTDVDYDFNSFVPFAHGMGLISTDMYEDVKASCRGTFFGAVDDLCQEKIDRVRWELKDLNKYNILAPCYHHPEIQEVEFSNSSLPRSFRRLGETDRPFPVRKRMSGRSWPLRLALKDGHVPMWPGLSGRSLPCTVMKSLRRGWTTKMLELRFMPNQKA

SEQ ID NO: 164051 - protein, 383 aa, Zea Mays
MLQFRRLRLRERTLQFRAWELAWKPAQAAAQPLQLVKGDLKTAADAHKFLSKWFELYPEFQLNPFYISGESYAGVYIPTITDEVVKGIERGVKPRINFKGYLIGNPLTDVDYDFNSFVPFAHGMGLISTDMYEDVKASCRGTFFGAVDDLCQEKIDRVRWELKDLNKYNILAPCYHHPEIQEVEFSNSSLPRSFRRLGETDRPFPVRKRMSGRSWPLRLALKDGHVPMWPGLSGRSLPCTSDEVATAWLDDEDVRAAIHAKPKSLIGSWELYTARIDFTHDTGTMVSYHKKFTALGYRVLIYSGDHDLCIPYPGTEAWVKSIGYQVTDRWRPWYFGDQVAGYTEGYGHNITFLTIKGAGHAVPEYKPKEALAFYSRWLAGEKF

SEQ ID NO: 164052 - protein, 229 aa, Zea Mays
MATAAATAAAAAVSSPAARGAAGAAAASRRGFVTFGGGAARFSPTLRSGRGFSGVQTHVAAVEQAVVKDATKLEAPVVVVTGASRGIGKATALALGKAGCKVLVNYARSSKEAEEVSKEIEASGGEAITFGGDVSKEADVESMMKAALDKWGTIDVLVNNAGITRDTLLMRMKKSQWQDVIDLNLTGVFLCTQAATKVMMKKRKDLKVQTKPRIRSMYELWEKLSTLHL

SEQ ID NO: 164053 - protein, 151 aa, Zea Mays
MATAAATAAAAAVSSPAARGAAGAAAASRRGFVTFGGGAARFSPTLRSGRGFSGVQTHVAAVEQAVVKDATKLEAPVVVVTGASRGIGKATALALGKAGCKVLVNYARSSKEAEEVSKEIEASGGEAITFGGDVSKEADVESMMKAINGEQ

SEQ ID NO: 164054 - protein, 149 aa, Zea Mays
MRMKKSQWQDVIDLNLTGVFLCTQAATKVMMKKRKGKIINIASVVGLTGNVGQANYSAAKAGVIGFTKTVAREYASRNINVNAIAPGFIASDMTAELGEELEKKILSTIPLGRYGQPEEVAGLVEFLALNPAASYMTGQVLTIDGGMVM

SEQ ID NO: 164055 - protein, 227 aa, Zea Mays
MLEGQTTVVVGPSGVGKSSLINALRCNQDISEEDPIHKLVEQNSKWFGEQRVGTVSKKSGKGKHTTRHVSLLPIASGGFLADTPGFNQPSLMKVTKKSLAETFPEIRKALKENEPKKCLFNDCVHLGEHGCAVKGDWERYPYYLQMLDEIKIREEIQLRTFGTKREGDVRYKTGVMGVKQAEPRLELKKHRRVSRKKINQSILDEIEDDVDDLDDDYQFDVKQRSRK

SEQ ID NO: 164056 - protein, 174 aa, Zea Mays
MLEGQTTVVVGPSGVGKSSLINALRCNQDISEEDPIHKLVEQNSKWFGEQRVGTVSKKSGKGKHTTRHVSLLPIASGGFLADTPGFNQPSLMKVTKKSLAETFPEIRKALKENEPKKCLFNDCVHLGEHGCAVKGDWERYPYYLQMLDEIKIREEIQLRTFGTKREGTKQVSWG

SEQ ID NO: 164057 - protein, 381 aa, Zea Mays
MDMEEQLLHLEHFMPSSPGFFDVGSGHDPAHFPNGGLFVEQVGATDDGGWVEELMQLGEELFGGPGDGGIMGDADDHYQQWQCDDDVDGGSPDGGPPPSVSLDGDDASPGEQGAGELASEPHREDGDDVSGATRKRRDRSKTIVSERKRRVRMKEKLYELRSLVPNITKVRLAPVWTSEFGRLFAGELGHSIHVVPLHACARHVQMDKASIIADAVVYVKNLQAHARKLKDEVATLEARPRSPTRQDQPQLQHGRSAGPGRRRQQQQQVERRDAGSAGAGARVTHVGAAQVGDGRFFVTVECERRDGVAAPLCAAAESLLCFRVESSSIGRSGPDRVVSTLTLKVSEQVGDAAIGEASVKHWMMAALIREGFRPEATVQIS

SEQ ID NO: 164058 - protein, 176 aa, Zea Mays
MERVSSALEMDEAASTDQSSRLTKRRAKVWDYVDTEVVDGKEKAVCKYCKVHLSSAVGKGTTHLNRHIFVYCHAIPQEERQMFLATQKTKPGDDHVFDPVVFHGLIAKYFLSAEISFRKCEDPSWKEMIIYYQPSFRLVGRQTVRSDCVLLYEEEKLQLIEQFTKLKSHVSLTADL

SEQ ID NO: 164059 - protein, 66 aa, Zea Mays
MSATKHDEMLQNQTEAILLKRTKNMIHIILLSKVGGHEPNIETQCWKTAQQCQSKCTWVQKETAGK

SEQ ID NO: 164060 - protein, 89 aa, Zea Mays
MSDGSCLCPSSLFLCQPSSSSPLPLHLISTVQLASMAVPCSFFLARVLFPCARRRSSLAHAAALQLASNPCAHAFPQAKHVWVLTAPVS

SEQ ID NO: 164061 - protein, 174 aa, Zea Mays
MACRALALRFLLLPDPLHRLPATPPSVGRASGSRGGRRPHLRCSSGGGGGEPGQPPQEAVLEAISKIARSKGRVALTTNVVMGGTVMDDASDEWLALDQKVNSYPTDRGFTAIGIGGDDFVQSMVVAVESVLQESIPKGRVSQKLSSGGKYVSVKIGPIRVVSSPSCISCHEKR

SEQ ID NO: 164062 - protein, 383 aa, Zea Mays
MQQEKIVALEEIKVRQDEERAHLRILIKDLEKRSVQKLLDKNVVPVAAVVIMACNRPDYLERTVESILKYQTSVASKFPLFISQDGANGAVKNKALEYKQITYMQHVDLEPVQTERPGELTAYYKIAKHYKWALDNLFIKHNFARVIILEDDMEIAPDFFDYFEAAAKLLDNDKTIMAVSSWNDNGQKQFVNDPKALYRSDFFPGLGWMLTKSTWIELSPKWPKAYWDDWVRLKEVHGHRQFIRPEICRTYNFGKHGSSLGQFFEQYLEPIKLNDVHIDWNSEDLSYLGEDKFSTKFGKEVASATPLRGSDAVLKAHNMAEDVRIQYDDQEGFEQIARQFGIFEEWKDGIPRTAYKGVVVFRYNSSQRRIFLVSPDSLRQLGV

SEQ ID NO: 164063 - protein, 280 aa, Zea Mays
MQHVDLEPVQTERPGELTAYYKIAKHYKWALDNLFIKHNFARVIILEDDMEIAPDFFDYFEAAAKLLDNDKTIMAVSSWNDNGQKQFVNDPKALYRSDFFPGLGWMLTKSTWIELSPKWPKAYWDDWVRLKEVHGHRQFIRPEICRTYNFGKHGSSLGQFFEQYLEPIKLNDVHIDWNSEDLSYLGEDKFSTKFGKEVASATPLRGSDAVLKAHNMAEDVRIQYDDQEGFEQIARQFGIFEEWKDGIPRTAYKGVVVFRYNSSQRRIFLVSPDSLRQLGV

SEQ ID NO: 164064 - protein, 791 aa, Zea Mays
MMRFMLVLKFYCGPMGFNRILTNGAPIGLFFGGSLFLYNRRVNRYFRRDGHTWRRKKDGRTVGEAHERLKVGNVDALSCYYAHGEQNPSFQRRCFWMLEPAYEHIVLVQYREVDVVRNYSSQLSNGLPEPLSSLGYPNAICGNQYHSSSSGASECSESHQSYSNLSSVTEVSSYSGNKEYTKNDGGLLSIPEVGHTCLQQNRTDNGNSKNKSGLNIALKKIAEQLSLGEDDDDYIFSNQAHSVGGDNQVKHIQQEGTQKGLSRNIAPSWEDVLQSSSGLPISSIYQQSDVEYQKNSEYHPPERLDSSDLRIQLAAAKKFLLGPEATVDSPSLNSVLRNRANCVTDTISAYDSRFGSSLNPDWQTKTALTFQSNSQGSEITELFDHGHFEHYSREDTTFSLGQTNKFNIREISPEWAFSYEITKVIITGDFLCNPSNLGWAVMFGDSEVPAKVVQPGVLLCHTPLHCSGNLRICITSGNREVCSEFKDFEFRSKPSSSFTDIAPSSRHLKSSEELLILAKFARMLLSGNGNPEVPDGDPQSGQCPKLKMDEGLWDRLIEELKVGCESPLSSVDWILEELLKSKLQKWLSVKLRGFNGTDSISKHDQGIIHLISALGYEWALSSVLSVGVGLNFRDSNGWTALHWAAYFGSCSFRRNTKVAKVATFLNMRRNAVKIQAHVRGHQVRKKYRTIVSTVSVLEKVILRWRRKGHGLRGFRAEQQSMVEAIEEDDEEDDDFDDDEAVKIFRRQKVDQAVKEAVSRVLSMVDSTEARMQYRRMLEEFRQATNWKDQMK

SEQ ID NO: 164065 - protein, 732 aa, Zea Mays
MYRTPDSRPIEVGNVDALSCYYAHGEQNPSFQRRCFWMLEPAYEHIVLVQYREVDVVRNYSSQLSNGLPEPLSSLGYPNAICGNQYHSSSSGASECSESHQSYSNLSSVTEVSSYSGNKEYTKNDGGLLSIPEVGHTCLQQNRTDNGNSKNKSGLNIALKKIAEQLSLGEDDDDYIFSNQAHSVGGDNQVKHIQQEGTQKGLSRNIAPSWEDVLQSSSGLPISSIYQQSDVEYQKNSEYHPPERLDSSDLRIQLAAAKKFLLGPEATVDSPSLNSVLRNRANCVTDTISAYDSRFGSSLNPDWQTKTALTFQSNSQGSEITELFDHGHFEHYSREDTTFSLGQTNKFNIREISPEWAFSYEITKVIITGDFLCNPSNLGWAVMFGDSEVPAKVVQPGVLLCHTPLHCSGNLRICITSGNREVCSEFKDFEFRSKPSSSFTDIAPSSRHLKSSEELLILAKFARMLLSGNGNPEVPDGDPQSGQCPKLKMDEGLWDRLIEELKVGCESPLSSVDWILEELLKSKLQKWLSVKLRGFNGTDSISKHDQGIIHLISALGYEWALSSVLSVGVGLNFRDSNGWTALHWAAYFGSCSFRRNTKVAKVATFLNMRRNAVKIQAHVRGHQVRKKYRTIVSTVSVLEKVILRWRRKGHGLRGFRAEQQSMVEAIEEDDEEDDDFDDDEAVKIFRRQKVDQAVKEAVSRVLSMVDSTEARMQYRRMLEEFRQATNWKDQMK

SEQ ID NO: 164066 - protein, 520 aa, Zea Mays
MMMTIFSQIKLILWEQSDVEYQKNSEYHPPERLDSSDLRIQLAAAKKFLLGPEATVDSPSLNSVLRNRANCVTDTISAYDSRFGSSLNPDWQTKTALTFQSNSQGSEITELFDHGHFEHYSREDTTFSLGQTNKFNIREISPEWAFSYEITKVIITGDFLCNPSNLGWAVMFGDSEVPAKVVQPGVLLCHTPLHCSGNLRICITSGNREVCSEFKDFEFRSKPSSSFTDIAPSSRHLKSSEELLILAKFARMLLSGNGNPEVPDGDPQSGQCPKLKMDEGLWDRLIEELKVGCESPLSSVDWILEELLKSKLQKWLSVKLRGFNGTDSISKHDQGIIHLISALGYEWALSSVLSVGVGLNFRDSNGWTALHWAAYFGSCSFRRNTKVAKVATFLNMRRNAVKIQAHVRGHQVRKKYRTIVSTVSVLEKVILRWRRKGHGLRGFRAEQQSMVEAIEEDDEEDDDFDDDEAVKIFRRQKVDQAVKEAVSRVLSMVDSTEARMQYRRMLEEFRQATNWKDQMK

SEQ ID NO: 164067 - protein, 238 aa, Zea Mays
MQALVKADFWLIWCSLLLGSGSGLTVIDNLGQMSQAVGFKDVHIFVSLTSIWNFLGRVGGGYFSEIIIREHAYPRHIALVIAQILMAVGHFLFAMAWPRTMYIGTFLVGLGYGAHWAIVPAAVSELFGVKHFGAMYNFLTVANPTGSLIFSGLIASNLYDYEAEKQAQGHQITALTSPRLLHNMGFLADGPLKCEGAVCFFVSSLIMSAFCVVGAGLSLMVVYRTKRVYTQLYRSNRT

SEQ ID NO: 164068 - protein, 271 aa, Zea Mays
MKVVERVQKKTGRKVELLSPMPPPPEVEEKKEDEAEKKKDDEKKAEPEPPKPEEKKEPPVIAVVLKVHMHCEACAEGIKKRILKMKGVQSVEPDLKASEVTVKGVFEESKLAEYVYKRTGKHAAVVKSEPAPAPEGGGGDKAAKEEEENKKDAGGAGGEEKKDGKEEEEKKDGGEKNEEKKDGGDGDGDKKDEAGDKDKDPAASLYMHYPRFPFAGGYYQPPAYPPPPGYPYAYQPAYPPPFYAPPHHLHQQQPMAPQIFSDENPNACSVM

SEQ ID NO: 164069 - protein, 346 aa, Zea Mays
MGEEAAKKEEEEKKKEDAPPPPPPEEVEMRVYMHCEGCARKVKKILRRFDGVEDVIADSKAHKVLVKGKKAAADPMKVVERVQKKTGRKVELLSPMPPPPEVEEKKEDEAEKKKDDEKKAEPEPPKPEEKKEPPVIAVVLKVHMHCEACAEGIKKRILKMKGVQSVEPDLKASEVTVKGVFEESKLAEYVYKRTGKHAAVVKSEPAPAPEGGGGDKAAKEEEENKKDAGGAGGEEKKDGKEEEEKKDGGEKNEEKKDGGDGDGDKKDEAGDKDKDPAASLYMHYPRFPFAGGYYQPPAYPPPPGYPYAYQPAYPPPFYAPPHHLHQQQPMAPQIFSDENPNACSVM

SEQ ID NO: 164070 - protein, 265 aa, Zea Mays
MALSSSSPVVAPCRFLCPRATTASRDILSFATTATRRRLLLSTATTTIAAAMAASSSCKVIDSHLHVWATPQQAKEEYPYFPGQEPTLRGDADFLLECMSEAGVDGAVIVQPINHMFDHSLVTSVLKKYPSKFVGCCLANPADDGTGIKQLEHLIVQEKYRAVRFNPNLWPSGQKMTNEVGRSLFSKAGELGVPLGIMTMKGVGPYIQEIEELCRDYPATTVILDHMAFCKPPTNDEEEKAFSSFLSLSRFPQCSFPHNKRSISI

SEQ ID NO: 164071 - protein, 439 aa, Zea Mays
MADRFYCNWVGGCLHQPRTHHVHMVPAAKTATVSERTCHRFIILNRQPDAVPEDTMRDLEKNHLDSEEEEDEDGGRTSYQLYNYLVLEAATCRFSSRNKLGSGGFGTVYKGTLENGKEVAVKRLRDSKRTIQELEREISIVASLRHKNIVRFLGYCFQEEGRFFIYEYVPNNSLDKFWYKASSQWHQRLEWATWFNVILGVARGLKFLHDKGIIHRDLKPHNVLLDHNFNPKIADFDLLRMYDQQKTHESTEKAAGTFGYMAPECTSGRKLLLSIKSDVYSYGVLVLEIITGHKIYTFEGQNSEGLVEYVWQHWTEKRASDVVDCDLGMEGQEHGPWQALRCVHVALLCVQSDRSRRPTMGQVIAMLSSGDDGTEELPEPSRPAWVRRPSNDGVKFSAVLRVQVAPLDDVPPSTKWMGFLHGLDLIDYELNIFIFMILI

SEQ ID NO: 164072 - protein, 384 aa, Zea Mays
MRDLEKNHLDSEEEEDEDGGRTSYQLYNYLVLEAATCRFSSRNKLGSGGFGTVYKGTLENGKEVAVKRLRDSKRTIQELEREISIVASLRHKNIVRFLGYCFQEEGRFFIYEYVPNNSLDKFWYKASSQWHQRLEWATWFNVILGVARGLKFLHDKGIIHRDLKPHNVLLDHNFNPKIADFDLLRMYDQQKTHESTEKAAGTFGYMAPECTSGRKLLLSIKSDVYSYGVLVLEIITGHKIYTFEGQNSEGLVEYVWQHWTEKRASDVVDCDLGMEGQEHGPWQALRCVHVALLCVQSDRSRRPTMGQVIAMLSSGDDGTEELPEPSRPAWVRRPSNDGVKFSAVLRVQVAPLDDVPPSTKWMGFLHGLDLIDYELNIFIFMILI

SEQ ID NO: 164073 - protein, 131 aa, Zea Mays
MTLITSVRVGPISTGRITHGPPPVVREREVRRLRQGLRLVTQERRGSNRPPSDWRPRPVLAGSVDPAYVCARRGRNRRAKGGVFAFAPTVGKPPNLEIKIIVSTCLPIGLQFYNTRLYLLIHIIVLALLLL

SEQ ID NO: 164074 - protein, 363 aa, Zea Mays
MHMSEATTVNFQLWFLLHLNAQICRGDKFEAVVPFMGESVTDGTLANFLKKPGDRVEADEPIAQIETDKVTIDVASPEAGVIEKLIASEGDTVTPGTKVAIISKSAQPAETHVAPSEEATSKESSPPKVEDKPKVEEKAPKVDPPKMQAPKPTAPSKTSPSEPQLPPKERERRVPMPRLRKRIANRLKDSQNTFAMLSTFNEVDMTNLMKLRSDYKDEFVTKHGVKLGLMSCFVKAAVSALQNQPIVNAVIDGDDIIYRDYVDISVAVGTSKGLVVPVIRDADTMNFADIEKGINNLAKKATEGALSIDDMAGGTFTISNGGVYGSLLSTPIINPPQVDRWQRGCLLPAAHQGCCRGPQEVAA

SEQ ID NO: 164075 - protein, 433 aa, Zea Mays
MVQRTLGLLRSYAHVRSYNSQLSALVSATSECSNLPRCYYLPNPSPYQVWSRSFASDNGDKFEAVVPFMGESVTDGTLANFLKKPGDRVEADEPIAQIETDKVTIDVASPEAGVIEKLIASEGDTVTPGTKVAIISKSAQPAETHVAPSEEATSKESSPPKVEDKPKVEEKAPKVDPPKMQAPKPTAPSKTSPSEPQLPPKERERRVPMPRLRKRIANRLKDSQNTFAMLSTFNEVDMTNLMKLRSDYKDEFVTKHGVKLGLMSCFVKAAVSALQNQPIVNAVIDGDDIIYRDYVDISVAVGTSKGLVVPVIRDADTMNFADIEKGINNLAKKATEGALSIDDMAGGTFTISNGGVYGSLLSTPIINPPQSSILGMHSIVQRPVVVNGDILARPMMYLALTYDHRLIDGREAVFFLRRIKDVVEDPRRLLLDI

SEQ ID NO: 164076 - protein, 67 aa, Zea Mays
MKLFFCGGGGGGVIPVEHHFERADGPALRLDGPRSEQSAPVGRTVRTCAEQFRVPSFVLFCWLDLRN

SEQ ID NO: 164077 - protein, 569 aa, Zea Mays
MQQMSRALEHEQFGACKLGSPNSPSTCFGSVNMAPIRSTSTESGTVQVLCSRVQTPINQFREGRNFLDLPSTTISRSSPVGITPAGLQSGHHALDEHIHSLGKMNVQNKGRMDCGFQESTAFHPHSLPDFNDRLRNGISYNCSIPPIGVKSNARAAEAMDVRHIYKGGCGHLSNQSSAHTEALGFSRTGSCPLYGHQLAWSNSNNLHQQPSSPMIWPSMGPFTNNMPSRQLMQVHGISRAPLRMLENNIPMNHQHVGSAPAVNPSIWDRRHGYAGEMMETPGFHPGSAGSMGFPGSTHLHQLETNGMFPHNGGTFMDPAMSPVHMSARSPQQRGHIFHRRSNVAPIPSSFDSAGERMRSRRNDSNVNQSDNKRLFELDIERIVRGEDSRTTLMIKNIPNKYTSKMLLAAIDESHRGTYDFIYLPIDFKNKCNVGYAFINMINPDNIVPFYKTFHGKRWEKFNSEKVASLAYARIQGKSALVAHFQNSSLMNEDKRCRPILFHSDGPNAGDQEPFPVGSNVRSRPGRSRILSWEQNHQDIVSDHTKGGTPSRAGGTPGYIATDTDHTAVD

SEQ ID NO: 164078 - protein, 550 aa, Zea Mays
MELEADGNSKLLNFNGGASQTRSIVQLNGERSSRILFVGNIDSNVEDSELKFMFEQYGDMQTLNASCKHHGFVMVSYYDIRSAENAMRALQSKPLRCRKLDIRYSSPKDYPLDKDINLSMVIVNLEASITNDDLHQIFGVFGEIKEIHPTSDNDHYKSIEFFDVRAAEAAQYALNRSEISGNKNKLEPSCLGGTERLMQQMSRALEHEQFGACKLGSPNSPSTCFGLQSGHHALDEHIHSLGKMNVQNKGRMDCGFQESTAFHPHSLPDFNDRLRNGISYNCSIPPIGVKSNARAAEAMDVRHIYKGGCGHLSNQSSAHTEALGFSRTGSCPLYGHQLAWSNSNNLHQQPSSPMIWPSMGPFTNNMPSRQLMQVHGISRAPLRMLENNIPMNHQHVGSAPAVNPSIWDRRHGYAGEMMETPGFHPGSAGSMGFPGSTHLHQLETNGMFPHNGGTFMDPAMSPVHMSARSPQQRGHIFHRRSNVAPIPSSFDSAGERMRSRRNDSNVNQSDNKRLFELDIERIVRGEDSRTTLMIKNIPNKYISEIYSSFL

SEQ ID NO: 164079 - protein, 606 aa, Zea Mays
MMTCTRYLVSLVKSRRSEISGNKNKLEPSCLGGTERLMQQMSRALEHEQFGACKLGSPNSPSTCFGSVNMAPIRSTSTESGTVQVLCSRVQTPINQFREGRNFLDLPSTTISRSSPVGITPAGLQSGHHALDEHIHSLGKMNVQNKGRMDCGFQESTAFHPHSLPDFNDRLRNGISYNCSIPPIGVKSNARAAEAMDVRHIYKGGCGHLSNQSSAHTEALGFSRTGSCPLYGHQLAWSNSNNLHQQPSSPMIWPSMGPFTNNMPSRQLMQVHGISRAPLRMLENNIPMNHQHVGSAPAVNPSIWDRRHGYAGEMMETPGFHPGSAGSMGFPGSTHLHQLETNGMFPHNGGTFMDPAMSPVHMSARSPQQRGHIFHRRSNVAPIPSSFDSAGERMRSRRNDSNVNQSDNKRLFELDIERIVRGEDSRTTLMIKNIPNKYTSKMLLAAIDESHRGTYDFIYLPIDFKNKCNVGYAFINMINPDNIVPFYKTFHGKRWEKFNSEKVASLAYARIQGKSALVAHFQNSSLMNEDKRCRPILFHSDGPNAGDQEPFPVGSNVRSRPGRSRILSWEQNHQDIVSDHTKGGTPSRAGGTPGYIATDTDHTAVD

SEQ ID NO: 164080 - protein, 520 aa, Zea Mays
MQGSVNMAPIRSTSTESGTVQVLCSRVQTPINQFREGRNFLDLPSTTISRSSPVGITPAGLQSGHHALDEHIHSLGKMNVQNKGRMDCGFQESTAFHPHSLPDFNDRLRNGISYNCSIPPIGVKSNARAAEAMDVRHIYKGGCGHLSNQSSAHTEALGFSRTGSCPLYGHQLAWSNSNNLHQQPSSPMIWPSMGPFTNNMPSRQLMQVHGISRAPLRMLENNIPMNHQHVGSAPAVNPSIWDRRHGYAGEMMETPGFHPGSAGSMGFPGSTHLHQLETNGMFPHNGGTFMDPAMSPVHMSARSPQQRGHIFHRRSNVAPIPSSFDSAGERMRSRRNDSNVNQSDNKRLFELDIERIVRGEDSRTTLMIKNIPNKYTSKMLLAAIDESHRGTYDFIYLPIDFKTFHGKRWEKFNSEKVASLAYARIQGKSALVAHFQNSSLMNEDKRCRPILFHSDGPNAGDQEPFPVGSNVRSRPGRSRILSWEQNHQDIVSDHTKGGTPSRAGGTPGYIATDTDHTAVD

SEQ ID NO: 164081 - protein, 369 aa, Zea Mays
MELEADGNSKLLNFNGGASQTRSIVQLNGERSSRILFVGNIDSNVEDSELKFMFEQYGDMQTLNASCKHHGFVMVSYYDIRSAENAMRALQSKPLRCRKLDIRYSSPKDYPLDKDINLSMVIVNLEASITNDDLHQIFGVFGEIKEIHPTSDNDHYKSIEFFDVRAAEAAQYALNRSEISGNKNKLEPSCLGGTERLMQQMSRALEHEQFGACKLGSPNSPSTCFGSVNMAPIRSTSTESGTVQVLCSRVQTPINQFREGRNFLDLPSTTISRSSPVGITPAGLQSGHHALDEHIHSLGKMNVQNKGRMDCGFQESTAFHPHSLPDFNDRLRNGTFTKEVVGISAINLLLILKHLGFQELVAALSMVTN

SEQ ID NO: 164082 - protein, 686 aa, Zea Mays
MELEADGNSKLLNFNGGASQTRSIVQLNGERSSRILFVGNIDSNVEDSELKFMFEQYGDMQTLNASCKHHGFVMVSYYDIRSAENAMRALQSKPLRCRKLDIRYSSPKDYPLDKDINLSMVIVNLEASITNDDLHQIFGVFGEIKEIHPTSDNDHYKSIEFFDVRAAEAAQYALNRSEISGNKNKLEPSCLGGTERLMQQMSRALEHEQFGACKLGSPNSPSTCFGLQSGHHALDEHIHSLGKMNVQNKGRMDCGFQESTAFHPHSLPDFNDRLRNGISYNCSIPPIGVKSNARAAEAMDVRHIYKGGCGHLSNQSSAHTEALGFSRTGSCPLYGHQLAWSNSNNLHQQPSSPMIWPSMGPFTNNMPSRQLMQVHGISRAPLRMLENNIPMNHQHVGSAPAVNPSIWDRRHGYAGEMMETPGFHPGSAGSMGFPGSTHLHQLETNGMFPHNGGTFMDPAMSPVHMSARSPQQRGHIFHRRSNVAPIPSSFDSAGERMRSRRNDSNVNQSDNKRLFELDIERIVRGEDSRTTLMIKNIPNKYTSKMLLAAIDESHRGTYDFIYLPIDFKTFHGKRWEKFNSEKVASLAYARIQGKSALVAHFQNSSLMNEDKRCRPILFHSDGPNAGDQEPFPVGSNVRSRPGRSRILSWEQNHQDIVSDHTKGGTPSRAGGTPGYIATDTDHTAVD

SEQ ID NO: 164083 - protein, 411 aa, Zea Mays
MDVRHIYKGGCGHLSNQSSAHTEALGFSRTGSCPLYGHQLAWSNSNNLHQQPSSPMIWPSMGPFTNNMPSRQLMQVHGISRAPLRMLENNIPMNHQHVGSAPAVNPSIWDRRHGYAGEMMETPGFHPGSAGSMGFPGSTHLHQLETNGMFPHNGGTFMDPAMSPVHMSARSPQQRGHIFHRRSNVAPIPSSFDSAGERMRSRRNDSNVNQSDNKRLFELDIERIVRGEDSRTTLMIKNIPNKYTSKMLLAAIDESHRGTYDFIYLPIDFKNKCNVGYAFINMINPDNIVPFYKTFHGKRWEKFNSEKVASLAYARIQGKSALVAHFQNSSLMNEDKRCRPILFHSDGPNAGDQEPFPVGSNVRSRPGRSRILSWEQNHQDIVSDHTKGGTPSRAGGTPGYIATDTDHTAVD

SEQ ID NO: 164084 - protein, 239 aa, Zea Mays
MPTAGRRRHYRGVRQRPWGKWAAEIRDPKKAARVWLGTFDTAEDAAIAYDEAALRFKGTKAKLNFPERVQGRTDLGFLVTRGIPDHRHPSAAVTLAAMPPPHHQHGHQTVVPYPDLMQYAQLLQGGRGGGGHAEAAVQQAHRQQQQQQLMTMMGGRPGVNLPSTFSPSSSASAPQILDFSTQQLIRPGPPSPSPPRAAAMPSSSAAAAPSTPSSTTTASSPSGGAWPYGGERHRNKKDA

SEQ ID NO: 164085 - protein, 98 aa, Zea Mays
MRPQSFPSCHRSLVTSRVATTIADEREGTRDLCRMRILRFTIAELSEPGRGGSPVGNESFCGTIGREGRSWQVEFLIDDWESPSSTANHGWESMLQGY

SEQ ID NO: 164086 - protein, 352 aa, Zea Mays
MACLSHQAIKMDHMFIFQASKQMRKNLIHRMRLSQLWFGLVTFALNQQGTFQWSATMSKKKGQKWGMNSSNKKNADIGYHAGIAGCSTEVNNHVMDIKVTENGFCAVNNRRNNEGSNIEMSSVQNIANEEKSSEPFNFESLYPLTRLPKEGDLIAYRLVELSSMLCPELSSYRVGKVLVYDPVSLRIILVPVQEYPITTEEKENKDESDMLVDLSPYKEDGSLEIEYSSLVDVRLLKGIETCNEVGSAPAGRPVTLHKNEGNIESQKSPLVSNNTKGEERALGKSESTVWEKNGEPSDKVDLLQNGWATWKQNASTSAWSYRALRSSALGPTMAILRGKNSQSKPPNRKNSK

SEQ ID NO: 164087 - protein, 328 aa, Zea Mays
MACLSHQAIKMDHMFIFQASKQMRKNLIHRMRLSQLWFGLVTFALNQQGTFQWSATMSKKKGQKWGMNSSNKKNADIGYHAGIAGCSTEVNNHVMDIKVTENGFCAVNNRRNNEGSNIEMSSVQNIANEEKSSEPFNFESLYPLTRLPKVGKVLVYDPVSLRIILVPVQEYPITTEEKENKDESDMLVDLSPYKEDGSLEIEYSSLVDVRLLKGIETCNEVGSAPAGRPVTLHKNEGNIESQKSPLVSNNTKGEERALGKSESTVWEKNGEPSDKVDLLQNGWATWKQNASTSAWSYRALRSSALGPTMAILRGKNSQSKPPNRKNSK

SEQ ID NO: 164088 - protein, 296 aa, Zea Mays
MSKKKGQKWGMNSSNKKNADIGYHAGIAGCSTEVNNHVMDIKVTENGFCAVNNRRNNEGSNIEMSSVQNIANEEKSSEPFNFESLYPLTRLPKEGDLIAYRLVELSSMLCPELSSYRVGKVLVYDPVSLRIILVPVQEYPITTEEKENKDESDMLVDLSPYKEDGSLEIEYSSLVDVRLLKGIETCNEVGSAPAGRPVTLHKNEGNIESQKSPLVSNNTKGEERALGKSESTVWEKNGEPSDKVDLLQNGWATWKQNASTSAWSYRALRSSALGPTMAILRGKNSQSKPPNRKNSK

SEQ ID NO: 164089 - protein, 313 aa, Zea Mays
MHVWSTMGLGTFQWSATMSKKKGQKWGMNSSNKKNADIGYHAGIAGCSTEVNNHVMDIKVTENGFCAVNNRRNNEGSNIEMSSVQNIANEEKSSEPFNFESLYPLTRLPKEGDLIAYRLVELSSMLCPELSSYRVGKVLVYDPVSLRIILVPVQEYPITTEEKENKDESDMLVDLSPYKEDGSLEIEYSSLVDVRLLKGIETCNEVGSAPAGRPVTLHKNEGNIESQKSPLVSNNTKGEERALGKSESTVWEKNGEPSDKVDLLQNGWATWKQNASTSAWSYRALRSSALGPTMAILRGKNSQSKPPNRKNSK

SEQ ID NO: 164090 - protein, 209 aa, Zea Mays
MQFVSKEGDLIAYRLVELSSMLCPELSSYRVGKVLVYDPVSLRIILVPVQEYPITTEEKENKDESDMLVDLSPYKEDGSLEIEYSSLVDVRLLKGIETCNEVGSAPAGRPVTLHKNEGNIESQKSPLVSNNTKGEERALGKSESTVWEKNGEPSDKVDLLQNGWATWKQNASTSAWSYRALRSSALGPTMAILRGKNSQSKPPNRKNSK

SEQ ID NO: 164091 - protein, 118 aa, Zea Mays
MGRSALGMWVFRSKSSPVSSDSPRGACKGYIFALEVAEELEQWPEQDTHGRQWVSPADAYRLCRYDWMREALSALLDRLTEEPEPPKSPAADGLGEHAGVCMMVKATTAAADRAVALC

SEQ ID NO: 164092 - protein, 798 aa, Zea Mays
MSASCFPTSPPPLPPTAETTRTSYPLTDVCAAVFPGTHCCWFGSRTFVDSAFLNRMSLEVEKPPETTKQLKRQDSLYGDAEKVSGFKHHGSEGGWPRLLQLAFQSIGIIYGDVGTSPLYAISSTFPDGIKDQDDLLGVLSLILYTLILIPMVKYVFIVLYADDNGDGGTFALYSLISRHSKVRLIPNQQAEDAMVSNYGIEAPSPELRVAQWLKQKLESSKAAKISLFIITILGTSMVMGDGTLTPSISVLSAVSGIREKVPSLTETQVVWISVPILFALFSVQRYGTDKVGYSFAPIITLWFFLIAGIGMYNLIVHEIGVLRAFNPMYIVDYFRRNGKDGWVSLGGVILCVTGTEGMYADLSHFNIKAIQISFSTVLLPSVALCYIGQTAYLRKFPESVADTFFRSIPELMFWPTFIIAILSAIIASQAMLSGAFAILSKALSLGCFPSVQVIHTSKSYEGQVYIPEVNFLMGLASIIVTITFRTTTEIGNAYGICVVTVFSITTHLTTIVMLLVWRKNFIIVLLFYVVFSSIELVYLSSILTKFIQGGYLPFCFSLVLMALMITWHYVHVMKYWYELDHVVPANEVTTLLEKHEVRRIPGVGLLYSDLVQGITPVFPRLVQRIPSVHAVFLFMSIKHLPIPHVAPVERFLFRQVGPREHRMFRCVARYGYCDKLEESGLFKGFLMESLKTFIQDEAAFKTNSTAGDTKELTDPKVSGHDLARWVEKEKQMIDKEMERGVVYLMGEANVIAGPESSAAKKIVVDYVYAFLRKNLTEGEKVLSIPKDQLLKVGITYEI

SEQ ID NO: 164093 - protein, 313 aa, Zea Mays
MSFDSGWCAGICVVTVFSITTHLTTIVMLLVWRKNFIIVLLFYVVFSSIELVYLSSILTKFIQGGYLPFCFSLVLMALMITWHYVHVMKYWYELDHVVPANEVTTLLEKHEVRRIPGVGLLYSDLVQGITPVFPRLVQRIPSVHAVFLFMSIKHLPIPHVAPVERFLFRQVGPREHRMFRCVARYGYCDKLEESGLFKGFLMESLKTFIQDEAAFKTNSTAGDTKELTDPKVSGHDLARWVEKEKQMIDKEMERGVVYLMGEANVIAGPESSAAKKIVVDYVYAFLRKNLTEGEKVLSIPKDQLLKVGITYEI

SEQ ID NO: 164094 - protein, 488 aa, Zea Mays
MYNLIVHEIGVLRAFNPMYIVDYFRRNGKDGWVSLGGVILCVTGTEGMYADLSHFNIKAIQISFSTVLLPSVALCYIGQTAYLRKFPESVADTFFRSIPELMFWPTFIIAILSAIIASQAMLSGAFAILSKALSLGCFPSVQVIHTSKSYEGQVYIPEVNFLMGLASIIVTITFRTTTEIGNAYGICVVTVFSITTHLTTIVMLLVWRKNFIIVLLFYVVFSSIELVYLSSILTKFIQGGYLPFCFSLVLMALMITWHYVHVMKYWYELDHVVPANEVTTLLEKHEVRRIPGVGLLYSDLVQGITPVFPRLVQRIPSVHAVFLFMSIKHLPIPHVAPVERFLFRQVGPREHRMFRCVARYGYCDKLEESGLFKGFLMESLKTFIQDEAAFKTNSTAGDTKELTDPKVSGHDLARWVEKEKQMIDKEMERGVVYLMGEANVIAGPESSAAKKIVVDYVYAFLRKNLTEGEKVLSIPKDQLLKVGITYEI

SEQ ID NO: 164095 - protein, 109 aa, Zea Mays
MPPWFSVAHRRPRAGVLFPGLHAPPQIKGRRPHIVVPSRSGQAAPSISLDLMRPLFFFVSVLILLLLLLDPKTIQRSCIVSHVCSSLDRGAKTGSSSVPQWPRLYTLQC

SEQ ID NO: 164096 - protein, 71 aa, Zea Mays
MQTPRSTVVSWRCSIDRAGWMRHAAVVLGGPSPSPGRGIVSRLARTTSNQRTATTHRRTFKSLLLVLVAEC

SEQ ID NO: 164097 - protein, 382 aa, Zea Mays
MAVGTVMGNPSGTDMVDFRIRGYGYGYYIVSRVINFADCEFVMSTPNENSNTQFQPPSSQASVEGGSGLPENVINVEQDGDEDDDEVEENGRKRKLKSVVWSEFKRVNVGDIWKAKCNYCSKKLSGVTKNGTSHLKAHLETYIYRKRNPTDKVQSSLWFTSSSEQGQVSVKEYVFDQDVARKARPEMVVLHEYPLSIVDHVGFRSRAMLEIENVRKLFDELIKEYNNKCIKPVTSGGQNASSSCVSNASTYTDELFSAMEEELDDMCSDEEKAKSELDLYVDEGRIPKSKEFDILGYWKIYGIRYPTIRMIARDIFDIPVTTVASESAFSTSGRVLSDHRSRLTPKTLEVLMCAQNWLRVGQAKGTNNTSLKLLYVVVTCMF

SEQ ID NO: 164098 - protein, 314 aa, Zea Mays
MAVGTVMGNPSGTDMVDFRIRGYGYGYYIVSRVINFADCEFVMSTPNENSNTQFQPPSSQASVEGGSGLPENVINVEQDGDEDDDEVEENGRKRKLKSVVWSEFKRVNVGDIWKAKCNYCSKKLSGVTKNGTSHLKAHLETYIYRKRNPTDKVQSSLWFTSSSEQGQVSVKEYVFDQDVARKARPEMVVLHEYPLSIVDHVGFRSRAMLEIENVRKLFDELIKEYNNKCIKPVTSGGQNASSSCVSNASTYTDELFSAMEEELDDMCSDEEKAKSELDLYVDEGRIPKSKEFDILGYWKIYGIRYSHLLYSHLL

SEQ ID NO: 164099 - protein, 376 aa, Zea Mays
MIIVDDAGAFIPAMNHSPWDGVTVADFVMPFFLFIVGVALALAYKRVPDKLDASRKALLRALKLFCLGLVLQGGFFHGVRSLSFGVDLQEIRLMGVLQRIAIAYLLTALCEIWIRGDEDVDYGYDLLKRYRYQLFVGAVVAITYMSLLYGTYVPDWEYQTSAPGSTEKHLFVKCGVRGDTSPGCNAVGMIDRKILGIQHLYGRPVYARSKQCSIDSPQNGPLPSDAPSWCQAPFDPEGLLSSVMAIVTCLIGLQYGHVIVHFQKHRERMMNWLIPSFSMLVLAFAMDFFGLHMNKPLYTLSYTLGTAGAAGLLFSGIYTLVDIYGYRRPTVAMEWMGMHALMIYVLIACNVLPIFIHGFYWKEPKNNLLKFIGIGA

SEQ ID NO: 164100 - protein, 88 aa, Zea Mays
MFHNQFVILAIHKFCYFNLVISPLHCNHQYHADFDICYDLYGLIIGEHEHVPHMPGKIPSYIVSHQTRTTICSCLNKKVSVYVFAKRN

SEQ ID NO: 164101 - protein, 101 aa, Zea Mays
MNQAQAAADQLAKRGLLIQQPVLFVVRKKNQSSACAFQCLCSTGLVYNFPVAGPHCHAITPQSSTGIFSNWWCKVMKVVPKGRERAYYFTSWMPVRCNGNI

SEQ ID NO: 164102 - protein, 740 aa, Zea Mays
MAVRASLACFPSDPALHAACGMPWGVAITPFSATDERGFPPATGTEGHLLPRCQSCFAYFNLLCPLDRWSWNCAICGAENDLSADAAARYARDGGHDPPEMRSAFVDLLLPVEEGEAAAAAAPTPVYVAAIDLSSSEEFLELVKSALQAALEALLPGSLFGLLTFSSKIGLYDVQGPIPIVKNVFIPPDSDGALQVDLEDIMPLCSFLASIDSCKDRITEALETIKPMSSWEVAANAHDGQDHVLHHIRGFGVALDVLINYLSSEYGNAFELARIFAFLSGPPNYGAGQLDINEDQNSGKARGADHILLQEQTSFYRNLATSAVQAGVCVDLFAITNEYTDLTSLKVLSVESGGSLFLYSSTDESTLPQDIYKMLSRPYAFGCVMRLRTSSQFKIVDSYGHFFPDPQYMHVQHINCCDSFATYSYDFEFEKDSQFSRKSSPPIIQIAFKYTVLVHNGDISDLPNSGCRFKYLLERRLRVRTIQYNTTANIWDLYDFVDPDVVLTILVHQVILASLSDALETRLWLQDWLVVVIAQYNKAYKNVTSGGGTEIYNIDVNFSHCSQLQPLSRFVFAILLSPLLQVSSEGIHPDYVTYLQCLLSALEPASLRQAIWPTLISYSSPDVEAEVHQSLSRTVFTSERPIYILDAYKDLLVYYSPTASSEIPFPPPRNCLLRSTVDRLKQERNITPKLVFIHGAHDDTTEFEKYLVEDQTLDGSPLSSSTGFSSFLDEVRSKVAEHGI

SEQ ID NO: 164103 - protein, 337 aa, Zea Mays
MAVRASLACFPSDPALHAACGMPWGVAITPFSATDERGFPPATGTEGHLLPRCQSCFAYFNLLCPLDRWSWNCAICGAENDLSADAAARYARDGGHDPPEMRSAFVDLLLPVEEGEAAAAAAPTPVYVAAIDLSSSEEFLELVKSALQAALEALLPGSLFGLLTFSSKIGLYDVQGPIPIVKNVFIPPDSDGALQVDLEDIMPLCSFLASIDSCKDRITEALETIKPMSSWEVAANAHDGQDHVLHHIRGFGVALDVLINYLSSEYGNAFELARIFAFLSGPPNYGAGQLDINEDQNSGKARGADHILLQEQTSFYRNLVYAWTFLQLQMNTLILLL

SEQ ID NO: 164104 - protein, 473 aa, Zea Mays
MAVRASLACFPSDPALHAACGMPWGVAITPFSATDERGFPPATGTEGHLLPRCQSCFAYFNLLCPLDRWSWNCAICGAENDLSADAAARYARDGGHDPPEMRSAFVDLLLPVEEGEAAAAAAPTPVYVAAIDLSSSEEFLELVKSALQAALEALLPGSLFGLLTFSSKIGLYDVQGPIPIVKNVFIPPDSDGALQVDLEDIMPLCSFLASIDSCKDRITEALETIKPMSSWEVAANAHDGQDHVLHHIRGFGVALDVLINYLSSEYGNAFELARIFAFLSGPPNYGAGQLDINEDQNSGKARGADHILLQEQTSFYRNLATSAVQAGVCVDLFAITNEYTDLTSLKVLSVESGGSLFLYSSTDESTLPQDIYKMLSRPYAFGCVMRLRTSSQFKIVDSYGHFFPDPQYMHVQHINCCDSFATYSYDFEFEKDSQFSRKSSPPIIQIAFKYTVLVHNGDISDLPNSGCRLFWLL

SEQ ID NO: 164105 - protein, 334 aa, Zea Mays
MAVRASLACFPSDPALHAACGMPWGVAITPFSATDERGFPPATGTEGHLLPRCQSCFAYFNLLCPLDRWSWNCAICGAENDLSADAAARYARDGGHDPPEMRSAFVDLLLPVEEGEAAAAAAPTPVYVAAIDLSSSEEFLELVKSALQAALEALLPGSLFGLLTFSSKIGLYDVQGPIPIVKNVFIPPDSDGALQVDLEDIMPLCSFLASIDSCKDRITEALETIKPMSSWEVAANAHDGQDHVLHHIRGFGVALDVLINYLSSEYGNAFELARIFAFLSGPPNYGAGQLDINEDQNSGKARGADHILLQEQTSFYRNLCCSSRCMRGPFCNYK

SEQ ID NO: 164106 - protein, 445 aa, Zea Mays
MRTKILVKQGVLIIYCFKSRQVSTEICAVQAGVCVDLFAITNEYTDLTSLKVLSVESGGSLFLYSSTDESTLPQDIYKMLSRPYAFGCVMRLRTSSQFKIVDSYGHFFPDPQYMHVQHINCCDSFATYSYDFEFEKDSQFSRKSSPPIIQIAFKYTVLVHNGDISDLPNSGCRFKYLLERRLRVRTIQYNTTANIWDLYDFVDPDVVLTILVHQVILASLSDALETRLWLQDWLVVVIAQYNKAYKNVTSGGGTEIYNIDVNFSHCSQLQPLSRFVFAILLSPLLQVSSEGIHPDYVTYLQCLLSALEPASLRQAIWPTLISYSSPDVEAEVHQSLSRTVFTSERPIYILDAYKDLLVYYSPTASSEIPFPPPRNCLLRSTVDRLKQERNITPKLVFIHGAHDDTTEFEKYLVEDQTLDGSPLSSSTGFSSFLDEVRSKVAEHGI

SEQ ID NO: 164107 - protein, 163 aa, Zea Mays
MGLGLAVFDWFQQSCRIILVLLVMFDEIAGVLISKIPMYYELKLAFLVYLWYPKTRGTDIVYETFLQPLVMQYQPNIEARLQYLRANAGDILVFYLKNFTERGYELFLRVLDYVRSQASRGSRTRSFFSFRGERSERPSFTDDYVTGGDRRDGGRHRRPRSGY

SEQ ID NO: 164108 - protein, 140 aa, Zea Mays
MFDEIAGVLISKIPMYYELKLAFLVYLWYPKTRGTDIVYETFLQPLVMQYQPNIEARLQYLRANAGDILVFYLKNFTERGYELFLRVLDYVRSQASRGSRTRSFFSFRGERSERPSFTDDYVTGGDRRDGGRHRRPRSGY

SEQ ID NO: 164109 - protein, 850 aa, Zea Mays
MRAGGCTVQQSLTAEAAAVVKQAVSLARRRGNAQVTPLHVASAMLAAPTGLLRAACLRSHSHPLQCKALELCFNVALNRLPASAAVASSPLLGGHGHHHHHHYYPPSLSNALVAAFKRAQAHQRRGSVESQQQPVLAVKIELEQLVVSILDDPSVSRVMREAGFSSTQVKANVEQAVCSSTTTTSTAAAATAPSKNPNPSSSAATASPPQEAAKGNKLPLHQARDEDVAAVLDCLASRSKRRVVVIAESAAAAEATAHAAMDKIKSAEAKHDALRGAQVVSVRVSSFREMAREETERRLGELRCLVRGRRGQVVVLVVEDLKWAAEFWAGHVVQSGRRGYYYCSVEHVVTELRALASGGGGSLCWLLGFGTYQAYTRCRVGQPSLESLWELQTLTVPAGSLALSLNCAFDDSALGLGTVNQSMKAGSSDTDGNGPASCWPLLAGSKLISRCCGGDCSAARIETTKAALPRTPFVSSSSLPSWLQHCRDHQTWSSICSSSRPSQRTTTLHFSAPVSPASSISSYEHGGGQSQQPRHSWLLAGLDAAHHPWRPKREASIRSHDSGASNGSVEVECRARFKELNAENLKLLCGALEKEVPWQKEIVPEVASAVLQCRSGIAKRRDKSRSADAKEETWMLFLGGDADGKERVARELARLVFGLRSSFLSIRPGGVVSASSPPPASSGSSEGHRSSKRPRMPEEEPAAYYLERLHEAVSENPHRVIFMEDVERADRDCQLRIKEAIESGVVRNHAGQEVGVGDAIVILSCESFGDSRSSRACSPPSKKVKVEMEEAKEERAGDHEHNQDGVSKPSPSCIDLNVDMESDQADEPSLGDQCLLTAVDRALFFRRQDN

SEQ ID NO: 164110 - protein, 72 aa, Zea Mays
MVFKLSYYGLRRVCVEDAKFIMVRTGRPYIISSMACATDTIYDQTHNKSYKRPREGGGTLRSLIGVEVELRS

SEQ ID NO: 164111 - protein, 341 aa, Zea Mays
MTAKSTVTWTALISGYAQDNQVEPCLHLFALMRQSVCKPNDITFATILSVCTNHAFLVLGKSVQALQMRMGFGSYVHVSNALISMYAKCGSIGEARAVFESITCKDLVSWNSLIFGYSQHGLAEHCLYLLREMEGHIIPDAISFLGVLSSCRHACLVAEGRRCFRAMIEHGVIPEIDHYSCMVDLFGRAGLLDEAWDLIQTMPMPPNGVIWGSLLASCRLHGSISIGIQAAEHRLKLEPSCAATHVQLANLYGSIGCWDDVARVRKVMKERGLKTNIGCSWIEVGNKVYTFTAENRSKNQVNNVLVVLDCLQSHMDHKYDILIEGLDWDDPEHIKLSLNNI

SEQ ID NO: 164112 - protein, 517 aa, Zea Mays
MHRHLFYLCQFKGHAVIPAVAATIQLVVANFGTSPTLEISRKQRCANLQNALRILDLVPSKHHHDQEEVPSHHRLINGCMGDISGVQSRLHTMRRGKESFANSNSNQAQPKHGNIVSNNTSVCPSITRLTKEDMFMQIVELHRRGQISSDASILASALSYCADEKTLTTGVQFHAQLVKVGYVSSIPIGSSLISFYSRCSQLEIAHRIFQNMTAKSTVTWTALISGYAQDNQVEPCLHLFALMRQSVCKPNDITFATILSVCTNHAFLVLGKSVQALQMRMGFGSYVHVSNALISMYAKCGSIGEARAVFESITCKDLVSWNSLIFGYSQHGLAEHCLYLLREMEGHIIPDAISFLGVLSSCRHACLVAEGRRCFRAMIEHGVIPEIDHYSCMVDLFGRAGLLDEAWDLIQTMPMPPNGVIWGSLLASCRLHGSISIGIQAAEHRLKLEPSCAATHVQLANLYGSIGCWDDVARVRKVMKERGLKTNIGCSWIEVGNKVYTFTAENRSKNQLSLNNI

SEQ ID NO: 164113 - protein, 517 aa, Zea Mays
MHRHLFYLCQFKGHAVIPAVAATIQLVVANFGTSPTLEISRKQRCANLQNALRILDLVPSKHHHDQEEVPSHHRLINGCMGDISGVQSRLHTMRRGKESFANSNSNQAQPKHGNIVSNNTSVCPSITRLTKEDMFMQIVELHRRGQISSDASILASALSYCADEKTLTTGVQFHAQLVKVGYVSSIPIGSSLISFYSRCSQLEIAHRIFQNMTAKSTVTWTALISGYAQDNQVEPCLHLFALMRQSVCKPNDITFATILSVCTNHAFLVLGKSVQALQMRMGFGSYVHVSNALISMYAKCGSIGEARAVFESITCKDLVSWNSLIFGYSQHGLAEHCLYLLREMEGHIIPDAISFLGVLSSCRHACLVAEGRRCFRAMIEHGVIPEIDHYSCMVDLFGRAGLLDEAWDLIQTMPMPPNGVIWGSLLASCRLHGSISIGIQAAEHRLKLEPSCAATHVQLANLYGSIGCWDDVARVRKVMKERGLKTNIGCSWIEVGNKVYTFTAENRSKNQLGVLFA

SEQ ID NO: 164114 - protein, 544 aa, Zea Mays
MHRHLFYLCQFKGHAVIPAVAATIQLVVANFGTSPTLEISRKQRCANLQNALRILDLVPSKHHHDQEEVPSHHRLINGCMGDISGVQSRLHTMRRGKESFANSNSNQAQPKHGNIVSNNTSVCPSITRLTKEDMFMQIVELHRRGQISSDASILASALSYCADEKTLTTGVQFHAQLVKVGYVSSIPIGSSLISFYSRCSQLEIAHRIFQNMTAKSTVTWTALISGYAQDNQVEPCLHLFALMRQSVCKPNDITFATILSVCTNHAFLVLGKSVQALQMRMGFGSYVHVSNALISMYAKCGSIGEARAVFESITCKDLVSWNSLIFGYSQHGLAEHCLYLLREMEGHIIPDAISFLGVLSSCRHACLVAEGRRCFRAMIEHGVIPEIDHYSCMVDLFGRAGLLDEAWDLIQTMPMPPNGVIWGSLLASCRLHGSISIGIQAAEHRLKLEPSCAATHVQLANLYGSIGCWDDVARVRKVMKERGLKTNIGCSWIEVGNKVYTFTAENRSKNQIIARHVQLHLKRHSIGIDMCHSHLKYLQSRCNI

SEQ ID NO: 164115 - protein, 208 aa, Zea Mays
MHKDMEYPRRTLLHTPFSGHPSGPSQPIDGATATDGSNFDANVVMILAVLLCALICALGLNSIVRCALRCSSRVVVGPEPNQVTRLVQSGLRRKALRAMPVLVYSPGLRINAANPTCAICLSDFEAGEHVRVLPKCNHGFHVRCIDRWLLARSTCPTCRQSLFGVPQKASGCSEASRAAEPEPAPAPAPARSVLVPLRPEGLVTHYDF

SEQ ID NO: 164116 - protein, 399 aa, Zea Mays
MASDSDVDEDELLQIALQEQAARDLSHQRPPAANKPVVNLVRPPAPNARGGNARAGGAAAKARQPSRGGDEDDDSEVELLSISSGDEDDNPRARGPPPPRGGGGGRAGARRAASRDDGDFDDEEPRSWKRVDEAELARRVREMREAKVAPNIQELDQKAAAAAAAAARKALTSVQTLPKGVEVLDPLGLGVIDNKSLRLITDASVSSPISREKSQGLDPNMRDKVIYSSPNFDPKVFLSWVHKDTSAADLEAGALTLKTDLKGRTQQKKQLVKENFDCFVSCKTTIDDIESKLRQIEEDPEGAGTAHLYSVTQKISGVANRAFEPLFERPKLKRSDLFRECFKDSEHYLTYQVQSVGTLEKENMILLSESTKKQSQLFFLLMYGNFLFCFICLCYPIGW

SEQ ID NO: 164117 - protein, 693 aa, Zea Mays
MASDSDVDEDELLQIALQEQAARDLSHQRPPAANKPVVNLVRPPAPNARGGNARAGGAAAKARQPSRGGDEDDDSEVELLSISSGDEDDNPRARGPPPPRGGGGGRAGARRAASRDDGDFDDEEPRSWKRVDEAELARRVREMREAKVAPNIQELDQKAAAAAAAAARKALTSVQTLPKGVEVLDPLGLGVIDNKSLRLITDASVSSPISREKSQGLDPNMRDTSAADLEAGALTLKTDLKGRTQQKKQLVKENFDCFVSCKTTIDDIESKLRQIEEDPEGAGTAHLYSVTQKISGVANRAFEPLFERQAQAEKIRSVQGMLQRFRTLFNLPSAIRGNIRKGEYDLAVREYQKAKSIVLPSHVGILKRVLEEVEKVMQEFRGMLYKSMEDPHLDLAEIENIVRLLLELEPETDPVWHYLNIQNSRIHGLFEKCTQDHDSRMEVLQNKIREKVLSDSKWRQLQQDSNKSLEVDSTIGDSPRVDQLSTNFMAEEADSLRATYIRRLTSVLIQHVPAFWRLALSVFSGKFAKAASGNVVSDFDVNAKPTANKNDEKGGEVKYTNHTLDEVGSMVQATISAFDTKVQSTFRDFEECNILCPYMSDTIKEIAKACQTLEGKDSSPTAVKMLRTLHFEMTKLYILRLCSWMRATTKEISKDETWVTLSTLERNKSQYAISCLPLEFRDITVSAMDRIDT

SEQ ID NO: 164118 - protein, 723 aa, Zea Mays
MNERMVGILKRVLEEVEKVMQEFRGMLYKSMEDPHLDLAEIENIVRLLLELEPETDPVWHYLNIQNSRIHGLFEKCTQDHDSRMEVLQNKIREKVLSDSKWRQLQQDSNKSLEVDSTIGDSPRVDQLSTNFMAEEADSLRATYIRRLTSVLIQHVPAFWRLALSVFSGKFAKAASGNVVSDFDVNAKPTANKNDEKGGEVKYTNHTLDEVGSMVQATISAFDTKVQSTFRDFEECNILCPYMSDTIKEIAKACQTLEGKDSSPTAVKMLRTLHFEMTKLYILRLCSWMRATTKEISKDETWVTLSTLERNKSQYAISCLPLEFRDITVSAMDRIDTMILNLMSETAKSYDISQPLQEINESVRLAFLNSFLDFAGYLERFGGELTENRPNKENNYVSNGYINGTRETFVNTDGDLHKKLLVVLSNIGYCKAELSEELYSKYRHIWSPVRNNEERSSDMRDLRTSFSALEEKVLDQYTFAKSNLIRSAAQSYLLDSGIYWGAAPMVKGIRDATLDLLHILVAVHAEVYSGARPLLEKTMKILVEGLVDIFLSVFHENKTKDIRLLDANGFCQLMLELEYFETVLHTYFSPEAQQAMKSLQENLLEKACESVAEAMENPGHQRRPTRGSEDTASDDRQPSVSPDDLLVLAQQCSSDLLQGELERTRLNIACFMESTLQPTAAPAGPKPAAHSSYQAQHAPVQTSSPSFRRQQTGTSSPVVSRRRR

SEQ ID NO: 164119 - protein, 702 aa, Zea Mays
MQEFRGMLYKSMEDPHLDLAEIENIVRLLLELEPETDPVWHYLNIQNSRIHGLFEKCTQDHDSRMEVLQNKIREKVLSDSKWRQLQQDSNKSLEVDSTIGDSPRVDQLSTNFMAEEADSLRATYIRRLTSVLIQHVPAFWRLALSVFSGKFAKAASGNVVSDFDVNAKPTANKNDEKGGEVKYTNHTLDEVGSMVQATISAFDTKSTFRDFEECNILCPYMSDTIKEIAKACQTLEGKDSSPTAVKMLRTLHFEMTKLYILRLCSWMRATTKEISKDETWVTLSTLERNKSQYAISCLPLEFRDITVSAMDRIDTMILNLMSETAKSYDISQPLQEINESVRLAFLNSFLDFAGYLERFGGELTENRPNKENNYVSNGYINGTRETFVNTDGDLHKKLLVVLSNIGYCKAELSEELYSKYRHIWSPVRNNEERSSDMRDLRTSFSALEEKVLDQYTFAKSNLIRSAAQSYLLDSGIYWGAAPMVKGIRDATLDLLHILVAVHAEVYSGARPLLEKTMKILVEGLVDIFLSVFHENKTKDIRLLDANGFCQLMLELEYFETVLHTYFSPEAQQAMKSLQENLLEKACESVAEAMENPGHQRRPTRGSEDTASDDRQPSVSPDDLLVLAQQCSSDLLQGELERTRLNIACFMESTLQPTAAPAGPKPAAHSSYQAQHAPVQTSSPSFRRQQTGTSSPVVSRRRR

SEQ ID NO: 164120 - protein, 679 aa, Zea Mays
MQEFRGMLYKSMEDPHLDLAENSRIHGLFEKCTQDHDSRMEVLQNKIREKVLSDSKWRQLQQDSNKSLEVDSTIGDSPRVDQLSTNFMAEEADSLRATYIRRLTSVLIQHVPAFWRLALSVFSGKFAKAASGNVVSDFDVNAKPTANKNDEKGGEVKYTNHTLDEVGSMVQATISAFDTKVQSTFRDFEECNILCPYMSDTIKEIAKACQTLEGKDSSPTAVKMLRTLHFEMTKLYILRLCSWMRATTKEISKDETWVTLSTLERNKSQYAISCLPLEFRDITVSAMDRIDTMILNLMSETAKSYDISQPLQEINESVRLAFLNSFLDFAGYLERFGGELTENRPNKENNYVSNGYINGTRETFVNTDGDLHKKLLVVLSNIGYCKAELSEELYSKYRHIWSPVRNNEERSSDMRDLRTSFSALEEKVLDQYTFAKSNLIRSAAQSYLLDSGIYWGAAPMVKGIRDATLDLLHILVAVHAEVYSGARPLLEKTMKILVEGLVDIFLSVFHENKTKDIRLLDANGFCQLMLELEYFETVLHTYFSPEAQQAMKSLQENLLEKACESVAEAMENPGHQRRPTRGSEDTASDDRQPSVSPDDLLVLAQQCSSDLLQGELERTRLNIACFMESTLQPTAAPAGPKPAAHSSYQAQHAPVQTSSPSFRRQQTGTSSPVVSRRRR

SEQ ID NO: 164121 - protein, 80 aa, Zea Mays
MAQGGNKGKKAVSLREKKDGANNAALAALSKEAGEYNSMMNRVETMAGPELREYVSQNKHTLGSKLKATIKKEMRKGTDG

SEQ ID NO: 164122 - protein, 206 aa, Zea Mays
MVPISDTDIYWFLVNNTVAAEKEAAGDPVKTLLEVTDNLARHMPAEYLDVVRHSDHGNLSWAPLLYRNPVSVLLGPAARGPVTVAGDAFHPMTPDMAQGGCSALEDAVVLARALSREATPAEGVSAYVAQRRWRAAWLVAGAYLSGWIQQGGTNVGGVRGRLVKVFRDWIFYRFVFPRLADTMWFDCGDLTPPPPTAAVGKSHHIE

SEQ ID NO: 164123 - protein, 52 aa, Zea Mays
MWRSQLVAASSLHGSSPSRRLPHASMKPLSRHPPRPKLARPCRDCAAISSCS

SEQ ID NO: 164124 - protein, 467 aa, Zea Mays
MAATSAPPASAHANGNGSLVGVAAPVGAPTNPMATALLTDQYQFSMAYAYWKAGKHADRAVFDLYFRKNPFGGEFTVFAGLEECIKFIANFKFTEHDISFLQSVMPMCEGAFFNYLREVDCSDVEVYSIPEGSVVFPKVPLMRVEGPVAVVQLLETPFVNLINYASLVTTNAARHRHVAGKSKVLLEFGLRRAQGPDGAISASKYCFMGGFDATSNVLAGNLFGIPLRGTHSHAFVSSYMSLDEIPDKALKSKDGSRLCQDFVSLVQEWLQKIQAANSLGGVFGDTNKSELAAFASYALAFPSNFLALVDTYDVMRSGIPNFCAVALALHDLGYKASGIRLDSGDLAYLSIEARKVFSAVEKEYNVPGFAKMLITASNDLNEETIDALNKQGHEVDAFGIGTYLVTCYSQAALGCVFKLVEINNKPRIKLSEDVAKYVSGFHSMQKEMLQTVWERRLPTGRYHDSRK

SEQ ID NO: 164125 - protein, 111 aa, Zea Mays
MRSASTSSRFDVFAAAEGVLYAKKDYNLAKHPQIDVPNLQVIKLMQSFKSKEYVRETFSWQYYYWYLTNDGIEHLRNYLNLPSEIVPATLKKSAKPPGRPFGSGPPGDRPR

SEQ ID NO: 164126 - protein, 90 aa, Zea Mays
MLGCCFVRMLCRLAVSVWTQEVLICQVTVADIISENWLCSDISHDVLMVRAFLGLSFIFADDCMYNMLVQDWFVFFLLFFPACLPLCSSN

SEQ ID NO: 164127 - protein, 587 aa, Zea Mays
MQPQQPRPGRQKLRASAPHRTDQPPAQRAPSCTYTYVHMAASTRRRHGAAAPGEWAAVSGAGAWRVEEVGKHQLMRRTGLPARDLRALDPALQFYYHPCSIVGRDRAVVVNLERARAVITATEVLVPAPRDPAVAPLFRSLRARLVASSAPAASPASAPPPEAFEEDEAAEDGGGALPPSPGGVGGGKDGQASARDKLPPFEFRALEVCLEFSCKSLEHETCTLEEEAYPALDELSSNISTLTLERVRQIKSRLLAISGRVQKVRDELEHLLDADVDMAAMHLSDKLAADGQSSRCNTNSEPNEFDEERDREAEAGDASSEGANGSGTGTSVGFTPKIDELENLLEAYFVQADGTLNKLSTLREYVDDTEDYINVMLDDKQNQLLQVGILLSTATLVMSVAIAITGVFGMNITIPLYNAPTGVFWQVTGGLVVATAAVYVVALICYKRSAAVFLILSTAPHAHSSAGRGRPWARRRPCPRRRTPAGVRDERAHGRVPQHGGLRRPRHDEPGVGGGLGSHLEHLEHARTLGPKGSDCHKAAVIGDTIGDPLKDTSGPSLNILIKLMAVESLVFAPFFATQGGLLFKYL

SEQ ID NO: 164128 - protein, 686 aa, Zea Mays
MQYQHAGSRSRMPPFARGGGAYSRGRKQFYPPSPLPSAALSLPLQNKYEVLMEAGRLAAEYLLAKGVLPPGSLQQRSGTVVPGGWGQLPPPPPLSVTLEAQAYHGARNGRRQVDDECGIRNASSRRNRGGDYSSSNSSNYNRRGKRKFGADNRYSDWAKDRGRNRRYSDIRSYDDDDDNGAPGFKRERRSSGGIDEVGSRVSGVAGEGPSSKVEAMGESELEDTGSKASSNSNVQQKADASQEAKDENEASKMQENSVVSNSDVVEQALNGEDNSNNDSSDGVQELETKHLPVSSGEKVSDGRPEDSGVLNGKVEDGSTSHEKAEDDTTSEEVSIMENNLPNDVGNLLNYCNFARVPTRPRSVLANRNVEPAQKEIDVSELVNPVTPEEMSQMAIDREANTNSITNIEENSKDELVGQDQERAEEINICNQVAESMAFHEKETQGETEEMEEQKNIPRHYEVEDNNETNELSPTFASCQNNFSLQVEKGIQIYNLDTPPQDEVLIDPPDKGKTVDSELSPNIKAEDAVTIEEEKLGQSSSFKIRDLNLVGSPEVADMRGDPRLGQSFTARCSVDLQDNQQIDLGTALGNNPNNTDTCTPFLLANKAVQVIDIEDDSPIEAGACDTSKSKGEMVYSSMEGSMNPPANNDALHGIPDGYSLAISDYLGADMSCYQSIQTELQGHNCYG

SEQ ID NO: 164129 - protein, 633 aa, Zea Mays
MQYQHAGSRSRMPPFARGGGAYSRGRKQFYPPSPLPSAALSLPLQNKYEVLMEAGRLAAEYLLAKGVLPPGSLQQRSGTVVPGGWGQLPPPPPLSVTLEAQAYHGARNGRRQVDDECGIRNASSRRNRGGDYSSSNSSNYNRRGKRKFGADNRYSDWAKDRGRNRRYSDIRSYDDDDDNGAPGFKRERRSSGGIDEVGSRVSGVAGEGPSSKVEAMGESELEDTGSKASSNSNVQQKADASQEAKDENEASKMQENSVVSNSDVVEQALNGEDNSNNDSSDGVQELETKHLPVSSGEKVSDGRPEDSGVLNGKVEDGSTSHEKAEDDTTSEEVSIMENNLPNDVGNLLNYCNFARVPTRPRSVLANRNVEPAQKEIDVSELVNPVTPEEMSQMAIDREANTNSITNIEENSKDELVGQDQERAEEINICNQVAESMAFHEKETQGETEEMEEQKNIPRHYEVEDNNETNELSPTFASCQNNFSLQVEKGIQIYNLDTPPQDEVLIDPPDKGKTVDSELSPNIKAEDAVTIEEEKLGQSSSFKIRDLNLVGSPEVADMRGDPRLGQSFTARCSVDLQDNQQIDLGTALGNNPNNTDTCTPFLLANKAVQVIDIEDDSPIEAGACDTSKSKLPWC

SEQ ID NO: 164130 - protein, 162 aa, Zea Mays
MKIQQRTWAFSNDISVDIRPDINSFDHFLSMRYIATDRPWLKLYGIRVQPVPPFSSLSYKPDPALIHHCLPDELMLEIFTRMSPYTLGRAACVCRKWKYTARNPTLWRAACLKTWQRSGMEANYMMVRSLYDSSWRRMWLQRPRIRIDGKYSRSLISYNVSM

SEQ ID NO: 164131 - protein, 182 aa, Zea Mays
MNTYIHTGVTEWQFKKTVNVVCYYRYLRFFPSGKFLYKISPDKVKDAVKCMHFRASKADCVFKGDYVLSEDGQIEMALLYPGHRYTLVRMHLRLRGTTVGANNRLDVLKILTTGVNATELQNWKGSILELVEGWEEDETHDPDVPAVSHSRGLSPFVFVPFEEADTSVLNLPVEKMDYYVPG

SEQ ID NO: 164132 - protein, 102 aa, Zea Mays
MGPNLCCCSEHELDPVSFTTTPSFFSGSPRTKRCRGARRTARRIFKAASHHGQGIPLLRSRRRTGGSGGATYRGVQFNLGGVSQLTLVPTILSSCYIYLLFL

SEQ ID NO: 164133 - protein, 466 aa, Zea Mays
MPAHQMRHRHAAAMMNVVAIGLILSTLAAAGVWSPAPQPTAAPHHGDRIVREGRRVVIVEYERELPLSTDGGGSVKVKETRVLPPDALDGVEGDGGTFDEARGVVSDAAGKVAGAAEEGKERVKSAKDKVCETASKAKERASGIQHGAAEAAKAAKERVSAAAKSAKDTVQSARDSVSDIAQRAEECAEDTAERAADRAAEAEEEAKARAAEVGKNLTDIARRARGVASDAAAYLLGAPREAARTATAVMHLLGFATAYGACVWVTFVSSHVLAAALPRQQLGVVQSKLFPVYFRALAYGVGLALAAHLLGRERGSLASRAQSLNLLAALGLVLANMLLLEPKATRVMFERMKVEKEEGRGRDMADIVDPPVVTVATPTAGTTTVPTAAAAARTAPGDGAGTGIGKQSKPATATADAEMSKSRAVRLSRRLKQLNGYSSLCNVLCLMSLTWHLVHLARRLHAGTAC

SEQ ID NO: 164134 - protein, 60 aa, Zea Mays
MPENNKNKILTTSIKLEAISASNLISFLHSPTPYMPTSQYSTLTNIQSSKYIAEKIPDVL

SEQ ID NO: 164135 - protein, 179 aa, Zea Mays
MQTAIILQLLRSVGVEDPKVKTICRDFTRGKCSRSANECRFLHHSSVEDVAIVCQDFLRGQCNRIACRYSHVVAHPMPPMNHVPMPYPEMLYMPPPPPPPLGVPMMGPLPSPPIPFADNTNRVEVCRDFLKNMCNRESCRFVHPETHTTAVNANVEVCRDFKRGECNRSACRFFHPHTS

SEQ ID NO: 164136 - protein, 362 aa, Zea Mays
MHRQKNPNSGWAAFDRKQRSADGSGYEGDADPFPSLSNSGASNIASSSITEKNGLKRKPFASVVRPSVDSGAVSTGCGNKNSANHVDSGNHGAISAPLNKVKILKDAHSWADIHLIEDVLAAVNNDVGQASDLLKVMDSPALQTGEGRTSGQLADVMNKTHGSPSESAAAGKANPDSSQLLLPLMNFPSIPLQPEFEDIDDEYFSYRKDALKMMRAATKHSQSASNAFLRDDHAAAKELSLRAQEERAAAEKLNNKAAEEIFRLRNSNNDIWKIDMHGLHASEAVAVLERHLHMIEFQQPGNKSASSEDLAKLESAYSESTTGSNIELAAEKVVLRRPKQSILHVITGNLLFLYACFPITHS

SEQ ID NO: 164137 - protein, 249 aa, Zea Mays
MDIPAADWDACACDLDDPGNFNPFLTYAFLSSLEESGSAVKETGWLPFHIVARDENGHIIGVVPLYLKSHSRGEFVFDQSWAEAYYNYGLEYYPKLQSCVPFTPVTGQRILLRNTSYRDQVFDALVKGLMSLTTKMNVSSLHITFPSEGEFSKLKDSGLLQRIGLQYHWRNRNYKSFDEFLMDLKQPKRKNIRQERKKIPAQNLQMKRLRGDEIKSRHWDTFYKFYRNTTDNQFGFAFFLPCIFYLFYT

SEQ ID NO: 164138 - protein, 185 aa, Zea Mays
MKRLRGDEIKSRHWDTFYKFYRNTTDNHWGRPYLTRDFFHLLGEKMGDNVMLIVAEKDDKLVAGALNLIGGDTLFGRLWGCLPDAYFPNLHFEACYYQAIEAAIELNLSKVEAGAQGEHKIQRGYLPVTTYSCHYFSNPGFAAAIGNYLTHETAQVKHAIKVLRDSGPYKEDILKEFAAQQDDDL

SEQ ID NO: 164139 - protein, 76 aa, Zea Mays
MTISCTALLATSVKRCHATCVTLIQPSFVLSLTLSVLFLMLHAVHTIVCKKHVARKTINFTLVYAEFIMFFYSIHG

SEQ ID NO: 164140 - protein, 119 aa, Zea Mays
MMCISHKVSKTPPRNGHQMASTLLTQQSAYHVQFSVFFTKFRRDLIWRALVENKCKVFSWIPIKGKLLMEDNMEKRVGCTRNTMFSATGLWRPGCTHAFATHLIRQLGIKSLLESTLTE

SEQ ID NO: 164141 - protein, 112 aa, Zea Mays
MNSMHYKARWKKNCRKRSSFAKMLHDELDDLESQRLSIKERKDAVKKKKKDTQKAERTLSMCLSVTNIIPNLEDQDKVSGYIVDQNRKKIEKFEFENTTPPVEICDELWKKI

SEQ ID NO: 164142 - protein, 194 aa, Zea Mays
MDKSVPVVSKIFCSGAPTMLMIRRRPAVVNGGGFVVTDLSHSIVFIVDGCGTLGSKGELMVKDGEGEPILSISKKALSTRNRWNGYSMDYQGKNKLVFSLTDPKSCTAQGAPVRVHVEPKRQCKKWDFEIGGSFADRDCTIVDCTRKIVAQMGKKGLMGGKDFYHVEVQSGYDQAFIIGVMAILDSIHGESTRC

SEQ ID NO: 164143 - protein, 472 aa, Zea Mays
MSSFWGVEVKPGKPYTLTHGDFAGRLRLTQATLGVEVGKGEKATGVKRCVLQCSAENRDPVFLCVLMPEQSETCHLELEFEEEVTFSVIGPRSIHLAGYYMTDVCGEDRGDSDSGSDSLQSSDEDGFLEEDDDGNMTVKMMIQSLMMKRWHTIRVGAKVQKGLKKQSRENGDESQLQLAARNPPTESLESEDEDGFPVSFSESKKSSEIVSNKNGGKDKETSNKDLKRKSGAISDRGDSSGGVKAEIDGASKKKKKGKDKSTVMDTGKVNNEEKEVKLHDSPADPVSTKQKKKKNKNKSASEGDTSEQSAKNNNIDKDNEEASAQEANKKIKKKKAHDISRSESQAGTGLGESDSKEPLQTRTFANGMMIQEVEMGKPDGKKASRGKKVSVRYIGKLKNGTIFDSNVSGRPFEFRLGVGQVISGWDVGVNGMRVGDKRRLTIPPSMGYGSKRVGQIPQNSTLIFDVELVNVK

SEQ ID NO: 164144 - protein, 341 aa, Zea Mays
MAYNQGRGKSSVVIEEIEEDDKAAVAEVQKGLKKQSRENGDESQLQLAARNPPTESLESEDEDGFPVSFSESKKSSEIVSNKNGGKDKETSNKDLKRKSGAISDRGDSSGGVKAEIDGASKKKKKGKDKSTVMDTGKVNNEEKEVKLHDSPADPVSTKQKKKKNKNKSASEGDTSEQSAKNNNIDKDNEEASAQEANKKIKKKKAHDISRSESQAGTGLGESDSKEPLQTRTFANGMMIQEVEMGKPDGKKASRGKKVSVRYIGKLKNGTIFDSNVSGRPFEFRLGVGQVISGWDVGVNGMRVGDKRRLTIPPSMGYGSKRVGQIPQNSTLIFDVELVNVK

SEQ ID NO: 164145 - protein, 640 aa, Zea Mays
MRTGRPKTFTGKPPLFPPPPPPPPAHYDRAESRVEYPEPIYVSRDEEFEEGKNEMLSEGALKALLHNFMPLLVSSVSPDFRDFAGFHDVDNLFKEGLRLKQALQDQLFQKIPFVRKVQENSEGLLRYDTPDIIKRDKFAWLRDDEFARQALAGINPVNIERLQAFPPMSKLDPAVYGPPESAITEEHIIGRLDGMSVQQALEDNRLYMLDYHDIFLPFLDRINAQDGRKAYGTRTLFFLTGAGTLKPIAIELRLPPMTDGCARAKRVLTPPADATSNWLWQLAKAHVCSNDAGVHQLINHWLRTHACMEPFIIAAHRQMSAMHPIFKLLKPHMRYTLKINALARQILINGDGVIESGFTPGRYCMEMSSFAYRELWRLDQEGLPADLIRRGMAVEDPTKPHGLRLLIEDYPYATDGLLLWSAITRWCGAYVATYYPSDESVQADTELQSWYTEAVQTGHADKRGAPWWPRLTTPGDLASLLTTLLWLTSAQHAALNFGQYPLGGYIPNRPPLMRRLVPAEGDPEHAHLVADPHRFFLSALPGLTQATTFMTVIDTLSTHSADEQYLGERPDEAWTADPAALAAEREFADEVRRAEEEIGRRNTDAGRRNRCGAGVLPYELMAPTSGPGITCRGVPNSVTI

SEQ ID NO: 164146 - protein, 206 aa, Zea Mays
MASPPRNVGTRTTSNPEIPEFLVGPAGRPVPAVGLGTASFPFVEENVRTAVLAALELGYRHLDTASLYRSERAVGDAVAEAARRGIVASREEVFVTTKMWCSQCHPDLVLPSLKESLQNLQMDYVDLYLVHWPIAAKPGKPQFPFKREDIMPMDLIGVWRAMEECHRLGLARMIGVSNFTTKKLQELLAIAKIPPSVNQVCADHMS

SEQ ID NO: 164147 - protein, 54 aa, Zea Mays
MKTGVRLVRYLSTRGSQCWGSSAQTASPAWILLSLILLKCSRNLHLSGCKDKKW

SEQ ID NO: 164148 - protein, 169 aa, Zea Mays
MASTGTTAAAVPEVTLRSGNGKPMPMVGMGTASFPVVHEAVRDAVLAAIEVGFRHFDTAFLYGTEKPLGDAVAEALRRGLLRSREELFVTSKLWCSQTHADLVLPSLRETLENLQMEYVDLYLIHWPVCLRPAGGPPKFPNRKEDAVPLDVAGVWRAMEECQRLVLAGG

SEQ ID NO: 164149 - protein, 174 aa, Zea Mays
MSPSRPPLPNATPSFPQAQKALPHAVQLQARPNSPNPCSPRAFSPQIRPSLPCRGVPRAAPPGHHPPQPNPFSMAANRPTPFPWCARRLVLRSRRLPLRATPLLGSLSLQRAPLSAPAHSSREPPMVFVSPTLAPSIAVDLAQQQRRPPLRRARQVGPHAVALRSVSACRQNPW

SEQ ID NO: 164150 - protein, 298 aa, Zea Mays
MERSEPSLKPEWLLRPTVPATTYKPATLPHTDDHGRGASSRNRSSGRDRDRSSQHSSSRRGSSSSGPRRNDRDGIGKSRGYGNFGKHNKERIQEKDLDFRDRESRLVQSDDPLRDGFESFSSCRSEKDRLNRTRSKVAISNRAVGVSLDNGNVSKKDNGVISFEREFPHLDSEDKNGKQDIGRVPSPGISTPIQNIPLVVSDGWNSVLAMLGDPNINSVSSSSTHAGSSKQTEVSNSGSALSMAETVMQSPLKISTTPQLSIDAQKIEERTMRQCILRPLTPSSNKIPAWHSGEKPSH

SEQ ID NO: 164151 - protein, 66 aa, Zea Mays
MPPIQVTPATLELQILCRLISIRLGTGYFWATNSTSSLRMSVPVKCNGMLFTRKRLVALTLRTVSA

SEQ ID NO: 164152 - protein, 244 aa, Zea Mays
MDIVSSLRRYEKERRVRVAVIHGLARMAAIMATTYRPYLGVGLGPLSFLTKLRIPHPGRVGGRFFIKYGMPAMLSWVLGGNSSKLEGRPLSCRLSDKAHDELYRWFDDDDALEQAMGGEWYLFATSEANNNSLQQPIRLIRDEQRSLSVGSRSDANDSASSLSLPFPQISERHATITCKNKAFYLTDLGSEHGTWITDNEGRRYRVPPNFPAMFRVKVLNTLPYESARSGKQQGLQQEQVLQAA

SEQ ID NO: 164153 - protein, 127 aa, Zea Mays
MVYVGGLDPNVSEDELRKAFAKYDLASVKIPLGKQCGFVQFVSRTDAEEALQGLNGSLIGKQAVRLSWVRSPSHKQSRGDSVNRRNNMYYGTPFYGGYGYASPVPHPNMYAAAYGTYPLYGNQQLVS

SEQ ID NO: 164154 - protein, 51 aa, Zea Mays
MERKGVTPSTGGTTCTMAHHSTADMAMPPRCHTQTCTLQRMARTRYMATSS

SEQ ID NO: 164155 - protein, 98 aa, Zea Mays
MPIYSVCSTAEFRKAFLPCSRALVPVHYKGAGVLVFLLVCILSFSHQFCFTPELNANLLFVVTKPNRSSPPRGQGFPQVFLTVYYLFHARQRIPRRRR

SEQ ID NO: 164156 - protein, 59 aa, Zea Mays
MGQGKLEPDYSIHEKTIAHCEWRDGKSGTYPPGKVPPKSGGVLSGGADLFTLWRICGNG

SEQ ID NO: 164157 - protein, 98 aa, Zea Mays
MAICDRSSGRQAILPAGADLPCSLSGRSSMAQRVIFSAKVRESSSILIFYDLFTELDDYCTQVILAPRLLVIQMVILLTERFVVYVGGLDPNVSEDEL

SEQ ID NO: 164158 - protein, 72 aa, Zea Mays
MKVVLDELTELGHPRAATDEDDLVDHVLATLVAGLGQPPTPRPHHRPVHKSHDPVQQVLVELLQLGPCEGRR

SEQ ID NO: 164159 - protein, 76 aa, Zea Mays
MTTAYCRTAPTVPRVPPRVHRPLAAVAGHVPALPRQGTGAGAAGGASAVLAFAAAGGRGGTGVGRRVGGGQRQGGR

SEQ ID NO: 164160 - protein, 84 aa, Zea Mays
MPSLLSKELHASFMKLRRLHKPGFVYESLICFWGSQNSCGWSWPCKSARRKPTDTQQHASVGQVGGRGRHTCDTYLQEVQNFRR

SEQ ID NO: 164161 - protein, 157 aa, Zea Mays
MAALGSSVTSRGLALHTSVCVVFLHRRHGNPVIPAAPSRPQRSLASGLTTSSSGMNNAFPIIKGTTRIPAVGPGPANPPGGNLPIPSSMPPWAKWVAGAVILAIPIYRRFRTLEDREDGRGGHRGGRHGGGGGGEGRRRGRRRVSRQRRSQGSGLED

SEQ ID NO: 164162 - protein, 125 aa, Zea Mays
MPSLLSKELHASFMKLRRLHKPGFVYESLICFWGSQNSCGWSWPCKSARRKPTDTQQHASVGQVGGRGRHTCDTYLQEVQNFRREDGRGGHRGGRHGGGGGGEGRRRGRRRVSRQRRSQGSGLED

SEQ ID NO: 164163 - protein, 292 aa, Zea Mays
MTRCDSTSLVLSRRARPASSSAARTQSRSTRSLSPHAAAHSSASSLDRSRSADAAARAARSRRTSALAASTSACASESQAFTCLASMVTSASATETSSSALRLLSSPCVAARSSPRRALISSSAPPNMRSLTLRGCSAPPPPPPRREDADADSRVLLACCSVAISSLASSSEILVCSSCLVWYISDSSILRSDSLDLSTSRSRSCTFSATPLAAPSSLCCLSSSSSLTARAFSSRSRRSSSSSCATRCCMARGRLAVSGNGRGGGGTPEPGLEGAGSARRIPELMKPYRRTK

SEQ ID NO: 164164 - protein, 92 aa, Zea Mays
MALQSFFFDCVYLFHVESIKNPCISSRERSQTDKMVDGMDFEELCSDFECISSPYVESIMRQVARDIFELREDNRAFSCYAVPVKLLPDDNL

SEQ ID NO: 164165 - protein, 106 aa, Zea Mays
MLRRQRRQSWGRSRAITEILVSSRERSQTDKMVDGMDFEELCSDFECISSPYVESIMRQVARDIFELREDNRAFSCYAVPVKYEVFLCYVKSFTFCTLIGSFRLLV

SEQ ID NO: 164166 - protein, 58 aa, Zea Mays
MVDGMDFEELCSDFECISSPYVESIMRQVARDIFELREDNRAFSCYAVPVKLLPDDNL

SEQ ID NO: 164167 - protein, 76 aa, Zea Mays
METFPPRWPRIWPGLTAFGSLPRLPHPPSASSGSSQDKPCSGDRGGRAGAGAEPSQKFLSPDNQNTSASIVPLPQL

SEQ ID NO: 164168 - protein, 132 aa, Zea Mays
MKGDYYRYLAEFKTGAERKDAAENTMVAYKAAQDIALAELAPTHPIRLGLALNFSVFYYEILNSPDRACSLAKQAFDEAISELDTLSEESYKDSTLIMQLLRDNLTLWTSDISEDPAEEIREAPKHDSSEGQ

SEQ ID NO: 164169 - protein, 167 aa, Zea Mays
MANRARWMMKYEKGLVDILHENNTSHYRTQNGWRTEGWRKIVRDFNVRYPEAKFSKMQIQEHETQLKKDYKLIKSILQRDGVSWDQSASMVRTTDEIWDDIIEDMPKARKYQSKSFPLLDSLELLFDGPIPEGGQKSPSSVPQNVGENVDDGGNNTSTVPAYSSKQH

SEQ ID NO: 164170 - protein, 265 aa, Zea Mays
MANRARWMMKYEKGLVDILHENNTSHYRTQNGWRTEGWRKIVRDFNSASMVRTTDEIWDDIIEDMPKARKYQSKSFPLLDSLELLFDGPIPEGGQKSPSSVPQNVGENVDDGGNNTSTVPALGPQGIDDLDTLQKRGEEVLERLQHGADRRLPRADDQAQSSSCVELQRDRRKKRKAPDVQQMMETYLNFRMKQAHVKEQRAKDAGQFTISGCIKALHTMADVSDEVKVLASDVFKDAENREIFLSYEPRLRSLWLKREVGKLLS

SEQ ID NO: 164171 - protein, 263 aa, Zea Mays
MDLLIGLALSGMLVQDPTRRNDVDAIFEQARQAGIKGMPPPLGGESSSSRSFTGTGRLLTGETISSAAPQEPVPIRVRHNIHLWNNGFSVDDGPLRYYDDPENAEFLESLKMSKCPKELVPTDGEHVDASVIRRMEDYREPVRPRSAFQGVGRTLGGGPSPDESATAAPASAAPAASRSAGVVVDDSQPFTSIQLRLADGTRMVARFNMHHTVGDIRSFIDAARPGAARPYQLQTGFPPKQLADPTQTVEQAGLANSVIMQKM

SEQ ID NO: 164172 - protein, 75 aa, Zea Mays
MCNWFDYKTVHGQLWLDNVSVAGDVEEDIQTGESEDSQTKGEDLCAGQATEVTGSQRDKRLRRRNMKVFGLAWVN

SEQ ID NO: 164173 - protein, 342 aa, Zea Mays
MASSSASSRHQVTITLGRSGQVVKRRTISDDINGDEMPLSGKKRSVRDRLGSNVSDSDFYGSQQRNKRQQTEINSSHGDDGSDRLVGKDDLRLKLMRKGSFQRSNGGAEQNTMDLREKLSRNHKKLPRYDSRGHAAESRASYDMRDEPPELRSRYFSREDVLGSRNSSVVSRVPYSRTADDLLKSNPSRKSYPSWTDDGLRHRSPERILSVRSDVSPPVGYDQIRSMPPLRSAGSSRPQSFITRGAPDTPRSQPYAGKATISVDTVQRTNGITPSSAPLPKVPVMAEAPLTVTGLLNSLGLEKYIVLFQAEEVDMAALRQMGESDLKDMGVPMGRSRSQKKV

SEQ ID NO: 164174 - protein, 226 aa, Zea Mays
MASSSASSRHQVTITLGRSGQVVKRRTISDDINGDEMPLSGKKRSVRDRLGSNVSDSDFYGSQQRNKRQQTEINSSHGDDGSDRLVGKDDLRLKLMRKGSFQRSNGGAEQNTMDLREKLSRNHKKLPRYDSRGHAAESRASYDMRDEPPELRSRYFSREDVLGSRNSSVAEAPLTVTGLLNSLGLEKYIVLFQAEEVDMAALRQMGESDLKDMGVPMGRSRSQKKV

SEQ ID NO: 164175 - protein, 338 aa, Zea Mays
MASSSASSRHQVTITLGRSGQVVKRRTISDDINGDEMPLSGKKRSVRDRLGSNVSDSDFYGSQQRNKRQQTEINSSHGDDGSDRLVGKDDLRLKLMRKGSFQRSNGGAEQNTMDLREKLSRNHKKLPRYDSRGHAAESRASYDMRDEPPELRSRYFSREDVLGSRNSSVVSRVPYSRTADDLLKSNPSRKSYPSWTDDGLRHRSPERILSVRSDVSPPVGYDQIRSMPPLRSAGSSRPQSFITRGAPDTPRSQPYAGKATISVDTVQRTNGITPSSAPLPKAEAPLTVTGLLNSLGLEKYIVLFQAEEVDMAALRQMGESDLKDMGVPMGRSRSQKKV

SEQ ID NO: 164176 - protein, 348 aa, Zea Mays
MASSSASSRHQVTITLGRSGQVVKRRTISDDINGDEMPLSGKKRSVRDRLGSNVSDSDFYGSQQRNKRQQTEINSSHGDDGSDRLVGKDDLRLKLMRKGSFQRSNGGAEQNTMDLREKLSRNHKKLPRYDSRGHAAESRASYDMRDEPPELRSRYFSREDVLGSRNSSVVSRVPYSRTADDLLKSNPSRKSYPSWTDDGLRHRSPERILSVRSDVSPPVGYDQIRSMPPLRSAGSSRPQSFITRGAPDTPRSQPYAGKATISVDTVQRTNGITPSSAPLPKAEAPLTVTGLLNSLGLEKYIVLFQAEEVDMAALRQMGESDLKDMGVPMGPRKKILLAVGPQSKQRQI

SEQ ID NO: 164177 - protein, 281 aa, Zea Mays
MAADLVEVVKRRTISDDINGDEMPLSGKKRSVRDRLGSNVSDSDFYGSQQRNKRQQTEINSSHGDDGSDRLVGKDDLRLKLMRKGSFQRSNGGAEQNTMDLREKLSRNHKKLPRYDSRGHAAESRASYDMRDEPPELRSRYFSREDVLGSRNSSVVSRVPYSRTADDLLKSNPSRKSYPSWTDDGLRHRSPERILSVRSDVSPPVGYDQIRSMPPLRSAGSSRPQSFITRGAPDTPRSQPYAGKATISVDTVQRTNGITPSSAPLPKVPVMVCICTSSHIP

SEQ ID NO: 164178 - protein, 222 aa, Zea Mays
MAADLVEVVKRRTISDDINGDEMPLSGKKRSVRDRLGSNVSDSDFYGSQQRNKRQQTEINSSHGDDGSDRLVGKDDLRLKLMRKGSFQRSNGGAEQNTMDLREKLSRNHKKLPRYDSRGHAAESRASYDMRDEPPELRSRYFSREDVLGSRNSSVAEAPLTVTGLLNSLGLEKYIVLFQAEEVDMAALRQMGESDLKDMGVPMGPRKKILLAVGPQSKQRQI

SEQ ID NO: 164179 - protein, 363 aa, Zea Mays
MCRLVLAVATYRSDGQPGLWALERPDNWRENAGPAQEVFARTAIAISKFEPVTLCASAKQYPKVHELMEHQTNIRVVEMSMNDSWFRDMGPTFVTCKGDSGIAEQTIAGIDWQFNAWGGIYDDWSLDSDVAKKIVEIERIPRFPQKIILEGGSIHVDGEGTCITTEECLLNPNRNPNMTKLEIENELKDFLGVSKVIWIPRGLYGDEDTNGHVDNMCCFIKPGVILLSWTDDEKDYQYERSVEALSVLSQSVDAKGRQLQVVKIHVPGPLYMTEEEAQGVVSSGHSVPRPAGTRLAASYVNFYIANGGIIAPSFGDRWDEEAYAVLQKAFPDHEVVMVEGGREIALGGGNIHCITQQQPVRPS

SEQ ID NO: 164180 - protein, 338 aa, Zea Mays
MEHQTNIRVVEMSMNDSWFRDMGPTFVTCKGDSGIAEQTIAGIDWQFNAWGGIYDDWSLDSDVAKKIVEIERIPRFPQKIILEGGSIHVDGEGTCITTEECLLNPNRNPNMTKLEIENELKDFLGVSKVIWIPRGLYGDEDTNGHVDNMCCFIKPGVILLSWTDDEKDYQYERSVEALSVLSQSVDAKGRQLQVVKIHVPGPLYMTEEEAQGVVSSGHSVPRPAGTRLAASYVNFYIANGGIIAPSFGDRWDEEAYAVLQKAFPDHEVVYLCFLFHLRTLRLLTIALCAVEHLLEVRRWCDECCGWHAQVVMVEGGREIALGGGNIHCITQQQPVRPS

SEQ ID NO: 164181 - protein, 105 aa, Zea Mays
MMPCVPSLNLAFELLDNLLSPICRNSMDRSSMCRWAILSLVFMLEDRCHVVCTSASVSGRRCAHMPDCIVIAPVVYMYFAPVLGLCSGGRLSSGMTILQQVVYTK

SEQ ID NO: 164182 - protein, 157 aa, Zea Mays
MSSEATIFWAGQESFRSITRSYYRGAAGALLVYDITRRETFNHLASWLEDARQHANANMTIMLVGNKCDLSHRRAVSYEEGEQFAKEHGLIFMEASAKTAQNVEEAFVKTAGAIYKKIQDGVFDVSNESYGIKVGYAIPGQSGGAGSSSSQGGGCCS

SEQ ID NO: 164183 - protein, 51 aa, Zea Mays
MCYYAQLSDLMYAPRCKHVDHQFYIVFVVLCFYDNLNWSFSEQCTLVPSTL

SEQ ID NO: 164184 - protein, 80 aa, Zea Mays
MLAWGLRSADALRAAAQYHSMREELRLWLSTQQQRPRRGSIITQGRELVNEVRGGLTIPSSSISYTNSSKFFSLLLYHTM

SEQ ID NO: 164185 - protein, 692 aa, Zea Mays
MPSVECGSIADGARLSGFCGIAFRIAHLEYVVVLLRNGRRKDEAAKELQVFLGDDNDAFVSWLWDHLSSNLHLYVHAKSASSKDDVKSTHSAARGLPVHSVTSSMQVNHEPEAETQKTVVTHKKRDWGHQKRDWGTIDRGQSEAVPLRSVVANVSHVDEKDFHKSHADEKAFHKSHSLRRTRSPDMHNHRKRSREADVQSTKRSSHPVVSAPRRLLQFAVRDAVRTVQPVTSSSESDSKRIRSVVSTLASDSTLDITHIRLQKTNSDLRVPGATAALRAAAEAAGDALKDSFSRSVFSRLGRMPTINSTEQSPYHREQDLKGKEYGNIDNIQAENQVEFDERNQHGGSDVYMRDQRTEEATGFIPNIDEYDQNSAVRSNGLGSRQSALPASGGKESLVLGYVRGASEIRSRRLIAQGPHAGSGPRPSEKTQNVSGNTNMQKLPIHVTGDAVAFDHQVPMEKVADARKSHVKTAQANDVSMMTDKSKDLIQPSSMLQAQKASGAAGSNTTGQPEGGPDSRTVFVSNVHFGSSKDALSRHFNKFGAVLKTHIVTDGVTGQSTGSAYIEFLHKESAEQALTLNGTSFMSRILKVVRKSSTEVTQLPVLPRASWGSPFASRLIRTAYPRPNYPGAIRGRLSLRGAARSLQWKRGVADSGDVGKPSPTAPGNQLVTPATRNFTYTRTEPKTNAGAMA

SEQ ID NO: 164186 - protein, 440 aa, Zea Mays
MQVNHEPEAETQKTVVTHKKRDWGHQKRDWGTIDRDEKAFHKSHSLRRTRSPDMHNHRKRSREADVQSTKRSSHPVVSAPRRLLQFAVRDAVRTVQPVTSSSESDSKRIRSVVSTLASDSTLDITHIRLQKTNSDLRVPGATAALRAAAEAAGDALKDSFSRSVFSRLGRMPTINSTEQSPYHREQDLKGKEYGNIDNIQAENQVEFDERNQHGGSDVYMRDQRTEEATGFIPNIDEYDQNSAVRSNGLGSRQSALPASGGKESLVLGYVRGASEIRSRRLIAQGPHAGSGPRPSEKTQNVSGNTNMQKLPIHVTGDAVAFDHQVPMEKVADARKSHVKTAQANDVSMMTDKSKDLIQPSSMLQAQKASGAAGSNTTGQPEGGPDSRTVFVSNVHFGSSKDALSRHFNKFGAVLKTHIVTDGVTAQHILSFCTKNQQNRH

SEQ ID NO: 164187 - protein, 523 aa, Zea Mays
MGDARMRLQRSYRLWDHLSSNLHLYVHAKSASSKDDVKSTHSAARGLPVHSVTSSMQVNHEPEAETQKTVVTHKKRDWGHQKRDWGTIDRGQSEAVPLRSVVANVSHVDEKDFHKSHADEKAFHKSHSLRRTRSPDMHNHRKRSREADVQSTKRSSHPVVSAPRRLLQFAVRDAVRTVQPVTSSSESDSKRIRSVVSTLASDSTLDITHIRLQKTNSDLRVPGATAALRAAAEAAGDALKDSFSRSVFSRLGRMPTINSTEQSPYHREQDLKGKEYGNIDNIQAENQVEFDERNQHGGSDVYMRDQRTEEATGFIPNIDEYDQNSAVRSNGLGSRQSALPASGGKESLVLGYVRGASEIRSRRLIAQGPHAGSGPRPSEKTQNVSGNTNMQKLPIHVTGDAVAFDHQVPMEKVADARKSHVKTAQANDVSMMTDKSKDLIQPSSMLQAQKASGAAGSNTTGQPEGGPDSRTVFVSNVHFGSSKDALSRHFNKFGAVLKTHIVTDGVTAQHILSFCTKNQQNRH

SEQ ID NO: 164188 - protein, 368 aa, Zea Mays
MVRKRLGYSSRGHRIPTMPRVPNSARGKRSTRRKKDENDDMCAMDLLATVAGKLLADQDNSSSVPNTSAAKAKKRKSVKEEHFDEIPPLKNVAMEKDVGSGSVSAFPRQAKNCLAENSSTRNGADTVLESLTVKSNMLAKIPECGSYGIHHAGSSSSAEPEQVHQAEPKVSRRQADGHPVAYGIFNSVDVDGKPPALVSSDSSSCVPLSSHDKEHQTSSLYRGVVQYTADREDDENSSGCTHPSTIESKGCKPQYLGNHRIRKLLASKVRKAARNKICGGIPSKKICGGLSKKASGTSFAMEGQNKSCEAENYHVKLRIKSFNIPELFIKVPENATIGSLKLIHPRPRKLLDGFIHQHLQAMLVLNTT

SEQ ID NO: 164189 - protein, 596 aa, Zea Mays
MVRKRLGYSSRGHRIPTMPRVPNSARGKRSTRRKKDENDDMCAMDLLATVAGKLLADQDNSSSVPNTSAAKAKKRKSVKEEHFDEIPPLKNVAMEKDVGSGSVSAFPRQAKNCLAENSSTRNGADTVLESLTVKSNMLAKIPECGSYGIHHAGSSSSAEPEQVHQAEPKVSRRQADGHPVAYGIFNSVDVDGKPPALVSSDSSSCVPLSSHDKEHQTSSLYRGVVQYTADREDDENSSGCTHPSTIESKGCKPQYLGNHRIRKLLASKVRKAARNKICGGIPSKKICGGLSKKASGTSFAMEGQNKSCEAENYHVKLRIKSFNIPELFIKVPENATIGSLKRAVMDVVNSIMEGGLRVGVLLQGKDIQDDNKTLCQAGICHDKKLNNIDFTLECEREREPPSGVIIQEQMDFLTTDMVEPLARMKCEEPFPEADVGDDSQQPRAPYRSRSLSDLYSVHCPVQMASQDTTASSQAIVPVSPAPSDVGALAIVPLCKSKGSEVGQRRMRRPFTVGEVEALVGAVEQLGTGRWRAVKTLAFDSIDHRTYVDLKDKWKTLVHTASISPQQRRGQPVPQELLDRVLLAQAYWSQQQQQARL

SEQ ID NO: 164190 - protein, 577 aa, Zea Mays
MVRKRLGYSSRGHRIPTMPRVPNSARGKRSTRRKKDENDDMCAMDLLATVAGKLLADQDNSSSVPNTSAAKAKKRKSVKEEHFDEIPPLKNVAMEKDVGSGSVSAFPRQAKNCLAENSSTRNGADTVLESLTVKSNMLAKIPECGSYGIHHAGSSSSAEPEQVHQAEPKVSRRQADGHPVAYGIFNSVDVDGKPPALVSSDSSSCVPLSSHDKEHQTSSLYRGVVQYTADREDDENSSGCTHPSTIESKGCKPQYLGNHRIRKLLASKVRKAARNKICGGIPSKKICGGLSKKASGTSFAMEGQNKSCEAENYHVKLRIKSFNIPELFIKVPENATIGSLKRAVMDVVNSIMEGGLRVGVLLQGKDIQDDNKTLCQAGICHDKKLNNIDFTLECEREREPPSGVIIQEQMDFLTTDMVEPLARMKCEEPFPEADVGDDSQQPRAPYRSRSLSDLYSVHCPVQMASQDTTASSQAIVPVSPAPSDVGALAIVPLCKSKGSEVGQRRMRRPFTVGEVEALVGAVEQLGTGRWRAVKTLAFDSIDHRTYVDLKLIHPRPRKLLDGFIHQHLQAMLVLNTT

SEQ ID NO: 164191 - protein, 315 aa, Zea Mays
MSTTHQKVQRMIFKKKKLTHRTSFAKEMLTEASGTSFAMEGQNKSCEAENYHVKLRIKSFNIPELFIKVPENATIGSLKRAVMDVVNSIMEGGLRVGVLLQGKDIQDDNKTLCQAGICHDKKLNNIDFTLECEREREPPSGVIIQEQMDFLTTDMVEPLARMKCEEPFPEADVGDDSQQPRAPYRSRSLSDLYSVHCPVQMASQDTTASSQAIVPVSPAPSDVGALAIVPLCKSKGSEVGQRRMRRPFTVGEVEALVGAVEQLGTGRWRAVKTLAFDSIDHRTYVDLKLIHPRPRKLLDGFIHQHLQAMLVLNTT

SEQ ID NO: 164192 - protein, 420 aa, Zea Mays
MAAPLLPSSVSVLLSLHIALLLVLCSSQVGDSCSSVRDCGTGLYCGNCPAAGRTKLSCIRDLAIQPTSIVKGLPFNRYSWLVTHNSFSILGEPSRTGVERVTFYNQEDSVTNQLRNGVRGLMLDMYDFNDDVWLCHSLQGQCYNFTAFVPAVDTLKEVEAFLSENPTEIITIFIEDYVHSPMGLSKVFTAADLMKYWYPISEMPTSGKDWPSVTDMVAKNRRLLVFTSDASKEASEGIAYQWSYLLENEPGDPGIVPGSCPNRKESQPLNSRPASLFLQNYFPTIPVQNEACKENSGLPQMAQACYAAAGNRIPNFIAVNFYMRSDGGGVFDVQDRINGRTLCGCDTIAACQAGAPMGACKDTGAPNQTTSPSVNGNVYSGTIEFKTHSTSAASNNNIRSRSVFLLRLQLTLLLFFSFRL

SEQ ID NO: 164193 - protein, 502 aa, Zea Mays
MDPAPQTHPILSYVLSRIPNLSMTKTPTAEFDIEQPPVHTPSPRTPSSAGEFELVERMPGLRHPSVLRAMTRAVADVSAARSALQVLGPRPDHELVDSSRAIVAAAEAGDSRIPAGDVEACRAVVRLDETHDAYEALLHEAESRLERVYRSAMEGTDLDDEAAESVKDQGPVAGPEGGDAAVGEEVVAVLKQAEEGKPVDSVRLVDRQLRHLPEAFGRILGLRVLDVSRNQLEVIPDAIGGLGHLEELFLTANDLVSLPDTIGLLSNLKILNVSSNRLRALPDSISKCRSLVELNVSYNGLTYLPTNIGYDLVNLRKLWIHMNKLRSLPSSVCEMRSLYLLDAHFNELCGLPSLFGKLSGLEILNLSSNFSDLKELPPSFGDLLNLRELDLSNNQIHALPDTFGRLDKLEKLNLEQNPLVMPPEDIVNKGVDAVKEYMSKRWLDILLEEEQRRIAAETPEMSSTPKAWLTRSVSWVTDVSESLAGYLGGNKSEKDAYLDQQF

SEQ ID NO: 164194 - protein, 1000 aa, Zea Mays
MAAPLLPSSVSVLLSLHIALLLVLCSSQVGDSCSSVRDCGTGLYCGNCPAAGRTKLSCIRDLAIQPTSIVKGLPFNRYSWLVTHNSFSILGEPSRTGVERVTFYNQEDSVTNQLRNGVRGLMLDMYDFNDDVWLCHSLQGQCYNFTAFVPAVDTLKEVEAFLSENPTEIITIFIEDYVHSPMGLSKVFTAADLMKYWYPISEMPTSGKDWPSVTDMVAKNRRLLVFTSDASKEASEGIAYQWSYLLENEPGDPGIVPGSCPNRKESQPLNSRPASLFLQNYFPTIPVQNEACKENSGLPQMAQACYAAAGNRIPNFIAVNFYMRSDGGGVFDVQDRINGRTLCGCDTIAACQALVFIYLDLFPTYCIAESNISFCCELAFSIGMTIYACVLHLDRNFVHINGNRVFSVPSTDGWVTTGPGLGWTQGPALQQPAVQAPGSSSVRVLVDFAFPIPNPAGRRLASPSIFRVSSETSSKSIFRYSALRLPRLLRNPIRRPAAMDPAPQTHPILSYVLSRIPNLSMTKTPTAEFDIEQPPVHTPSPRTPSSAGEFELVERMPGLRHPSVLRAMTRAVADVSAARSALQVLGPRPDHELVDSSRAIVAAAEAGDSRIPAGDVEACRAVVRLDETHDAYEALLHEAESRLERVYRSAMEGTDLDDEAAESVKDQGPVAGPEGGDAAVGEEVVAVLKQAEEGKPVDSVRLVDRQLRHLPEAFGRILGLRVLDVSRNQLEVIPDAIGGLGHLEELFLTANDLVSLPDTIGLLSNLKILNVSSNRLRALPDSISKCRSLVELNVSYNGLTYLPTNIGYDLVNLRKLWIHMNKLRSLPSSVCEMRSLYLLDAHFNELCGLPSLFGKLSGLEILNLSSNFSDLKELPPSFGDLLNLRELDLSNNQIHALPDTFGRLDKLEKLNLEQNPLVMPPEDIVNKGVDAVKEYMSKRWLDILLEEEQRRIAAETPEMSSTPKAWLTRSVSWVTDVSESLAGYLGGNKSEKDAYLDQQF

SEQ ID NO: 164195 - protein, 421 aa, Zea Mays
MSAPMEISFSAPPPPPDAASTAAASPLLEPAAAQMLPPVAAVSSSQPMQQTAAAAAVVAPSPADDKVLVSVEVLLHATSVARHEDVQVAVERMLEARSLSYVDGPVPIPADNSFLLENVKRIRISDTDEWVENHKVLLFWQVKPVVHVFQLSEDGPGEEPSEDDTLSSFNEWALPAKEFDGLWESLLYEVGLKQRLLRYAASALLFTERGVDTCLVSWNRIVLLHGPPGTGKTSLCKALAQKLSIRFKSRYSMCQLIEVNAHSLFSKWFSESGKLVAKLFQKIQEMVEEESNLVFVLIDEVESLAAARQAAISGSEPSDSIRVVNALLTQMDKLKSWPNVIILTTSNITTAIDIAFVDRADIKAYVGPPTLQARYEILRSCIQELLRVGILTYPQNPMVRFIYPIYSMKPQNCVRDLVAGH

SEQ ID NO: 164196 - protein, 433 aa, Zea Mays
MSAPMEISFSAPPPPPDAASTAAASPLLEPAAAQMLPPVAAVSSSQPMQQTAAAAAVVAPSPADDKVLVSVEVLLHATSVARHEDVQVAVERMLEARSLSYVDGPVPIPADNSFLLENVKRIRISDTDEWVENHKVLLFWQVKPVVHVFQLSEDGPGEEPSEDDTLSSFNEWALPAKEFDGLWESLLYEVGLKQRLLRYAASALLFTERGVDTCLVSWNRIVLLHGPPGTGKTSLCKALAQKLSIRFKSRYSMCQLIEVNAHSLFSKWFSESGKLVAKLFQKIQEMVEEESNLVFVLIDEVESLAAARQAAISGSEPSDSIRVVNALLTQMDKLKSWPNVIILTTSNITTAIDIAFVDRADIKAYVGPPTLQARYEILRSCIQELLRVGILTYPQVCPALPASCSTCQLFHTVLLSLYQPTRAHDGCFDHAAL

SEQ ID NO: 164197 - protein, 395 aa, Zea Mays
MSAPMEISFSAPPPPPDAASTAAASPLLEPAAAQMLPPVAAVSSSQPMQQTAAAAAVVAPSPADDKVLVSVEVLLHATSVARHEDVQVAVERMLEARSLSYVDGPVPIPADNSFLLENVKRIRISDTDEWVENHKVLLFWQVKPVVHVFQLSEDGPGEEPSEDDTLSSFNEWALPAKEFDGLWESLLYEVGLKQRLLRYAASALLFTERGVDTCLVSWNRIVLLHGPPGTGKTSLCKALAQKLSIRFKSRYSMCQLIEVNAHSLFSKWFSESGKLVAKLFQKIQEMVEEESNLVFVLIDEVESLAAARQAAISGSEPSDSIRVVNALLTQMDKLKSWPNVIILTTSNITTAIDIAFVDRADIKAYVGPPTLQARYEILRSCIQELLRVGILTYPQ

SEQ ID NO: 164198 - protein, 393 aa, Zea Mays
MSKPWGSVGAGAWALDAERAEEEEREQALTFPAPEPPLPAGGAASFPSLREAAAAGGGGKSKKKNKGTTLSLSEFTTYGAAAAQRRAAPVEPKGLTHDEMLLLPTGPRERSAEELDRSRGFRSYGGGSGFGGPGGERRGGFDDEDRRGPGRSSDLDMPSRADEADDWGATKKFTPAPTDSGRRDRFGGPSPLGRADDIDDWSRGKKPLPARYPSLGSGGGFRDSPAFRDSPAASDSDRWVRGATPLPHNGEGAGERPRIVLNPPKRDPLVASTPPAEVARNRPSPFGAARPREDVLAEKGVDWRKFENEIEHKTSRPTSSHSSRPNSAHSSRPGSPGSQVSAVGSEGAPRARPKVNPFGEAKPREVVLQEKGKDWRKIDIELEHRQSLMKKEI

SEQ ID NO: 164199 - protein, 165 aa, Zea Mays
MEALANGTPFICCVIQVLFAKTDLYPWPESDEERNLKEEINLLKVDLKEIERNMSNGSDQTSVDAKGLSEKISQLESQLEQLSRELDDKIRFGQRPRSGAGRVTALAPTSLGEEPHATVVDRPRSRGGMEPPPRQEERWGFQGSRERGSFGASRNSDRPMARQRW

SEQ ID NO: 164200 - protein, 231 aa, Zea Mays
MAKKKGSAAAAAAMADETDVSSPQGSAPGSEGGGEKEGAFLLGEPTWEDAGGGRWRCAETGHELPEREKEAYARSRACRLALIDHAVAQKKPPLNAFKPHPEHKSKLVCKITGDTINKLEDHIWKHINGKRFLNKLERVEDRMASGEMPDGEPVKSNEVAKKSKSSKKDKKKANVASTSLPREPKPEMADSDDPDFWVPPVGSRWDDDDGKDRWESLPGKPNLAKNEGGSV

SEQ ID NO: 164201 - protein, 399 aa, Zea Mays
MSISGHTQMGDVLILSLQCGNLSVTICVRVSRFWDFSDPQDAARLLHCDMVLLDEEGNSIHATIYPPFIEKFRPLIKEGSVYNMTYFRVRASNNLYKPVPNDIMITFTNWTKLEQVIEIPPAFPTLTYSLTHIEQIHSRIDHKDYYTDAIGIVNSVSDVSPHRSKGQQASSLKRNISICSARGASVNVVLWGAQATLFPGERIYEDGQNSPQIVLFVGTLVKKYADVLCLTGSSPCKWYINPSIPEVETLTSSARGDHKPVKWNATVTSSQLISPVAEEQKVSYIKYLHPFENKGKEFLVTVTIRKIDSKWWYNSCRKCACTAVTHGDSYKCTNHDCANIVMPVQRYKILVTAGDETADTDFILFGHMAQRIVKRPCDMLIANTPSGFIPDAITKLLER

SEQ ID NO: 164202 - protein, 420 aa, Zea Mays
MCNTYTSLIYFPAAVFSNVYAIFGSTLQMGDVLILSLQCGNLSVTICVRVSRFWDFSDPQDAARLLHCDMVLLDEEGNSIHATIYPPFIEKFRPLIKEGSVYNMTYFRVRASNNLYKPVPNDIMITFTNWTKLEQVIEIPPAFPTLTYSLTHIEQIHSRIDHKDYYTDAIGIVNSVSDVSPHRSKGQQASSLKRNISICSASRGASVNVVLWGAQATLFPGERIYEDGQNSPQIVLFVGTLVKKYADVLCLTGSSPCKWYINPSIPEVETLTSSARGDHKPVKWNATVTSSQLISPVAEEQKVSYIKYLHPFENKGKEFLVTVTIRKIDSKWWYNSCRKCACTAVTHGDSYKCTNHDCANIVMPVQRYKILVTAGDETADTDFILFGHMAQRIVKRPCDMLIANTPSGFIPDAITKLLER

SEQ ID NO: 164203 - protein, 449 aa, Zea Mays
MCNTYTSLIYFPAAVFSNVYAIFGSTLQMGDVLILSLQCGNLSVTICVRVSRFWDFSDPQDAARLLHCDMVLLDEEGNSIHATIYPPFIEKFRPLIKEGSVYNMTYFRVRASNNLYKPVPNDIMITFTNWTKLEQVIEIPPAFPTLTYSLTHIEQIHSRIDHKDYYTVNSVSDVSPHRSKGQQASSLKRNISICSARGASVNVVLWGAQATLFPGERIYEDGQNSPQIVLFVGTLVKKYADVLCLTGSSPCKWYINPSIPEVETLTSSARGDHKPVKWNATVTSSQLISPVAEEQKVSYIKYLHPFENKGKEFLVTVTIRKIDSKWWYNSCRKCACTAVTHGDSYKCTNHDCANIVMPVQRYKILVTAGDETADTDFILFGHMAQRIVKRPCDMLIANTPSGFIPDAITKLLERTFIWNGHTSLRLCSHKVQAAAWKTLLTRQTPCLHL

SEQ ID NO: 164204 - protein, 254 aa, Zea Mays
MCNTYTSLIYFPAAVFSNVYAIFGSTLQMGDVLILSLQCGNLSVTICVRVSRFWDFSDPQDAARLLHCDMVLLDEEGNSIHATIYPPFIEKFRPLIKEGSVYNMTYFRVRASNNLYKPVPNDIMITFTNWTKLEQVIEIPPAFPTLTYSLTHIEQIHSRIDHKDYYTDAIGIVNSVSDVSPHRSKGQQASSLKRNISICSARGASVNVVLWGAQATLFPGERIYEDGQNSPQIVLFVGTLVKKYAGQCYCKGTR

SEQ ID NO: 164205 - protein, 237 aa, Zea Mays
MGDVLILSLQCGNLSVTICVRVSRFWDFSDPQDAARLLHCDMVLLDEEGNSIHATIYPPFIEKFRPLIKEGSVYNMTYFRVRASNNLYKPVPNDIMITFTNWTKLEQVIEIPPAFPTLTYSLTHIEQIHSRIDHKDYYTVNSVSDVSPHRSKGQQASSLKRNISICSASRGASVNVVLWGAQATLFPGERIYEDGQNSPQIVLFVGTLVKKYADVLCLTGSSPCKWYINPSIPERTR

SEQ ID NO: 164206 - protein, 58 aa, Zea Mays
MPVQRYKILVTAGDETADTDFILFGHMAQRIVKRPCDMLIANTPSGFIPDAITKLLER

SEQ ID NO: 164207 - protein, 1000 aa, Zea Mays
MSSSSGPHFQVKIEDTIFHYSTFMSKLKMTDMRRHSVDVPLSRTLVQLKRLRSLRDPATNSMGKFASPADHMVWETASSNGVALELGRSAHNHQVEEDEDVGAEPTMGSERSFRGPNARTASYRRSSAVRIRGLNPPRNKQVHRVRRDGHRKSVDSSHSNHSSIRQLANNLVNNVDAEEEVNSYERPKFAMPGKSDEDEVKMPGHSKFRSKPSAAMSRVGSPCMSASEARSGHGTEDTRLRSNDVVGSNFSGCGISYCWSGASKCRELYSDSDGPDQPLLSTDGTEAAFQGNVPYTETPRCLSQKFRPRSFSELVGLNVVAQSLLYSCCKGKVAPMYLFHGPRGTGKTSTARIFAAALNCVSLEEQRPCGFCKECVILFSGKGRDVKELDVAKMGRLGRVKALLKSASLVPYSSRFKVFIIDECHLLQEDAWSAILKSLDEPYRHTVYIMITSDIESLPRASITRCQKFHFPKIKVADIVYRLEKICIGEGLEFDHDGLYFIAAKSSGSLRDSEVMLDQLSLLGKKITISLVHELVGSVSDDELIELLDLALSSDTTNTVRRARELMGSAIDPLQLVSQLANLIMDILSGRCQSAVSEVSKSFLGRYALSEVGIKKLRHALKILSETEKQLRTSRNQATWVTVALLQFGTNEPNLIAEPNDMHSHSVTGYTGTCTNYDWVSKVHSNTNFCQACNSSKSNCSERHCRRLKLENIWRRAIGKCRSRSAKSFLRKEGFLSSVHVTEELAIAEVGFGHPDHLSRAEKMQSLIECSLQHVLGCNVEIRFKLVPCPVRKDARLKRHSFSFLSCSGRKQELSDSVVTDEDEAVRPGARETPLKGYTSSQQESPYTMQRVDSKPTAYGCEDDGRSTLTSNRSMTDDMTRTCRSETNYSKGGVSDQGRFGSIQEPDLQPSCFSRTLRLQKKLLSSGAAHTICLRIQPHNKMEFLPKKEFDTYFCAYEPYEQCPRSVSRATYSSRDDDLWSKNSRFGSNLLCWKAPKQPM

SEQ ID NO: 164208 - protein, 406 aa, Zea Mays
MIKQILGRLPRKPGKAGDSREAAAAGNGTEPSNSYSVARSMDPGNKRAGNGDYPVPSGVIPNPVMNGAVVYHSNEPLPAFKDVPMSEKQNLFVKKVSLCCAVYDFVDPTKNLKEKEVKRQTLMELVDYVASANGKFSEVVMLEITKMVSINLFRSSSPTPRENKAIEGVDLEEDEPLMDPAWSHLQIVYEVFLRFVASQETDAKLAKRYIDHSFILRLLDLFDSEDPRERDYLKTILHRIYGKFMVHRPFIRKAINNIFYRFIFETEKHNGVAELLEILGSIINGFALPLKEEHKLFLVRALIPLHKPKCVSMYHQQLSYCITQFVEKDCKLADTVIRGLLKYWPVTNSSKEVMFLGELEEVLEATQLAEFQRCMVPLFRQISRSMNSFHFQSGLCFSGTMTILKP

SEQ ID NO: 164209 - protein, 521 aa, Zea Mays
MEMWPDPFRPGRWGGFLSRLPRKPGKAGDSREAAAAGNGTEPSNSYSVARSMDPGNKRAGNGDYPVPSGVIPNPVMNGAVVYHSNEPLPAFKDVPMSEKQNLFVKKVSLCCAVYDFVDPTKNLKEKEVKRQTLMELVDYVASANGKFSEVVMLEITKMVSINLFRSSSPTPRENKAIEGVDLEEDEPLMDPAWSHLQIVYEVFLRFVASQETDAKLAKRYIDHSFILRLLDLFDSEDPRERDYLKTILHRIYGKFMVHRPFIRKAINNIFYRFIFETEKHNGVAELLEILGSIINGFALPLKEEHKLFLVRALIPLHKPKCVSMYHQQLSYCITQFVEKDCKLADTVIRGLLKYWPVTNSSKEVMFLGELEEVLEATQLAEFQRCMVPLFRQISRSMNSFHFQVAERALFLWNNDHIETLIKQNYKVLLPIIYPALERNSRDHWNQAVRSLTLNVRKIFSDHDSTFFGECVQRFSDEELKQAESDSKRDAMWKRLEEMGASKPGGNHPLGAPNGKPSHAAG

SEQ ID NO: 164210 - protein, 132 aa, Zea Mays
MEYPHQQAGPSSTTITLICPYATRRRKRAAGDDLSSAVDMDVDADAQRATDKLKAVSEALGHEIRVFSSENFASQTSKLPSADHEEDDDFYELQPADYYNLISNRMGEHFKMLKTRKMREAELAAQRAKRTK

SEQ ID NO: 164211 - protein, 270 aa, Zea Mays
MEYPHQQAGPSSTTITLICPYATRRRKRAAGDDLSSAVDMDVDADAQRATDKLKAVSEALGHEIRVFSSENFASQTSKLPSADHEEDDDFYELQPADYYNLISNRMGEHFKMLKTRKMREAELAAQRAKRTKTVMRVRFPDGYILEADFIPSERIHSLVDLLLKVLARPDLPFYLYTVPPKKRILDTSQDFYTAGFVPGANVHFSYDLPEGPFLREEILSLDGLSLLLKPASQPDDSRMNSSSLQSDASQSVPVPTTTNKKPGRPKWLKR

SEQ ID NO: 164212 - protein, 176 aa, Zea Mays
MGEHFKMLKTRKMREAELAAQRAKRTKTVMRVRFPDGYILEADFIPSERIHSLVDLLLKVLARPDLPFYLYTVPPKKRILDTSQDFYTAGFVPGANVHFSYDLPEVSLLNADDLKAGPFLREEILSLDGLSLLLKPASQPDDSRMNSSSLQSDASQSVPVPTTTNKKPGRPKWLKR

SEQ ID NO: 164213 - protein, 326 aa, Zea Mays
MKHTICDALRILGALLQIPTAYSSISRVRLAPAAFLPARYNFEGYIPRSCSSSLQIYSRSSMLNLPPSSALTVSSQLTSSDVAQRSEEWFALRKDKLTTSTFSTALGFWAGNRRAELWNEKVFGATETKLADTARSAMDWGTHHESVAIEQYTNITGRHVGTFGFAVHAEASSGWLGASPDGVLGCGLDGGILEVKCPFNKGKPELALPWRAMPYYYMPQVQGLMEIMGRDWAELYCWTPSGSSLFRVPRDRAYWELLHEALRDFWWGDVVPARELALLGKHDEARSFEPRPKHRLTNLVLYRSRKLASEAKLLWMDVGGRVEFFQ

SEQ ID NO: 164214 - protein, 197 aa, Zea Mays
MLLSGPPPVPTPPLLLPESSGEDGGHDSSSRAAAAVGSAPKRRAETWVREETLCLIALRREMDAHFNTSKSNKHLWEAISARMRDQGFDRSPTMCTDKWRNLLKEFKKARSHSRNSGGGSGSGGNGNAKMAYYKEIDDLLKRRGKATGSGTAGCVGSSAGKSPKSNCKIDSYLQFTTDNGFEDANIPFGPVEGISFP

SEQ ID NO: 164215 - protein, 1077 aa, Zea Mays
MGNLCWSTNRERWRRTAPSPSVPACSDLPAAVSSFADAFVDFAVSDIFFPTFPSSSSLPPRPKTPTTFLPSPSRLVAIGDLHGDLPKSLSVLRLAGLVPPSCTPTPPPPPASSWPAGPTLAVQLGDILNRSDDELRLLYLLHRLSLSAETRGGAFLPILGNHEVMNVSGDFRFATPQGFHDRAVCGGVLACAGFAAWAAEAGVAGAAGCWRTGVAGAGAVYTASLIVSRDCLKLNSTLGLWTCFCPIRSKPNPLPSYIDIGSWAGLVNPRRRKKYMLPSANWQEMKKLSSGKKSGKGDGLGRPGESLDSQARQIAVRSPLPWREAYQSSPQIPRYSPLRLRSRLRRRAPPSPPAPHRATPMYSQLVDGDSDSEGSLISDISASPPRGRSPSPPPPPPPPPEHRPNPKHTATVKPKPPKSKAKPKLAASACTAAVSPPPLPSAALSDPHGLVSRIAAAPALVTATSTVSSSSFRRLVQSRNPSFDPAAAFSAPTPAPTLAPTEIATAATAQCPAPDAPPQTRPKRVHPNSVSEVVPPAAEAEQPKRPRGGAEGNFVRLNINGYGRRRTFRNAQARRPTKYRSWRRQRHGGAKPQGRGDEEGDFVAEAMIEREKKRAGGDGGVLEAVEAAREDPSEQNLENLLRIIYGYNSFREGQLEAIQKVVAGESTMLVLPTGAGKSLCYQVPAMILPGLTLVVSPLLSLMVDQLMKLPAFLPGGFLASNQTSDEFHETLQRLRGGEIKVLFVSPERFLNEEFLLIFRDGLQISLVAIDEAHCISEWSHNFRPSYLRLRASLLRRKLNVQSILAMTATATTQTLEEIVTVLEIPSDNLIKTSQIRDNLQLFISMSNNRLKDLLLLLKASPFVDMKSIIVYCKFQGETDYVSKYLCDNNITAKSYHSGLLMKNRNRVQELFCSNKIRVVVATVAFGMGLDKSDVEGVIHYSLPESLEEYIQETGRAGRDGRLSYCHLFLDSTTFYKSRSLLHSDGVDEYAMSKFLFQVFSCENSVGCICSLVKESTSRKFDIKEEVLFTVLTQLEIGGQQYLRLLPQFSVTCTLYFHKTSPQLLADKDVLVRSVLDK

SEQ ID NO: 164216 - protein, 106 aa, Zea Mays
MPSSHSATVTALAVAVAIQEGFHSATFATALVFACVVMHDAFGVRLHAGKQAEVLNQIVYELPEEHPLSETKPLREILGHTVPQVVAGCILGVLMAAVMHLSLGSS

SEQ ID NO: 164217 - protein, 55 aa, Zea Mays
MMLLEFGYMPESRQRLWPVASLEFSWLPLCTCLSGVLSQLLFMDVMTDDHLMSRW

SEQ ID NO: 164218 - protein, 67 aa, Zea Mays
MAKPGSPIFKCVRRSEVVYSNVYMLDDGTTWKELPPMPKPDSHIKRTDMTKPFFVFFFLRTTVSIPP

SEQ ID NO: 164219 - protein, 55 aa, Zea Mays
MVRPAAKHLVALAVVAILGIGLVADYLWASSFSASYASSAALTPPVAKKGLCCCK

SEQ ID NO: 164220 - protein, 51 aa, Zea Mays
MYEINKRRNIEHNRFLYHIYRTMLYRSGLYISHLFMKFRTVPKPTFCSSTK

SEQ ID NO: 164221 - protein, 53 aa, Zea Mays
MCGDGSFNITFLFCSNGSFRYFIFFLSWCSTGGVSYLSRPRWFIFGTLLWFSV

SEQ ID NO: 164222 - protein, 846 aa, Zea Mays
MSRKPLLPTCGSSTPPPLLLLRRFLPRRRATSSPPPPSTRRRTAAMPPRAGDSAAAAAAAASFRLGMVRVVSFLVGGLNLAVLLLGLYIIDAVLPSGCGGGLAFASAPALAGVRVLSMIGAARAQHATADAIAKRHLHESDASVAADAVARHEIRVRYKRWLWWTRFGMAVGALQLVAAIYLMFVIVRDLSNERRSTSCFFGQDKADRVSVRALIALFLILSWVVIIVQCFTGSDILRWRSFYATHDMAWKAHYREVFDHGIREALCCLGRAKYLTVLEEDEVYSVARLLGDLVAYRASGTGHLELLAGLALLQKHGNLSELQTDLVEASHELMQEAAFLHPFAEACYTGPLLDFGRNPILFPCAWVYRQGVLTPWARRRRPALDGDNWWRGHAAAFLRFVNIPPKALLKGRVCQSKREAAYFVVVLHDKRTVVIGVRGTETPEDLITDGLCRECAFTMEDLDGLVNSEQLPATTRERVISTFPHYGHGGIVESARELFMQLNGENTSSGRLGFLSTLLGEGSECHGYKVRLVGHSLGGAVATVLGMMLYGKYPSVHVYAYGPLPCVDFVIAEACSHFVTTIICNDEFSSRLSINSILRLRSAAISALSDNSPADTAMIQKLARRILHVNRYHDNGPDDGIIQGYADHTRTADTTVPNERQISHQIPLCNTELDLHNTQNGFFRYNGSSASIDEHLSYEGISSGHDMQIIPLDGADSGFEGHQTSYREIPVEPPEMFLAGLIVHIVRQRRSLFPLWKCWSIQETEPPYKAVLAKRENFRDIVVTPYMFTDHLPWRCHFAMQKIVEAQTPMRRAHSDPPVQQHLAGPLEAYFSPSGSQNMSVTDPKS

SEQ ID NO: 164223 - protein, 650 aa, Zea Mays
MVYNLGQDKADRVSVRALIALFLILSWVVIIVQCFTGSDILRWRSFYATHDMAWKAHYREVFDHGIREALCCLGRAKYLTVLEEDEVYSVARLLGDLVAYRASGTGHLELLAGLALLQKHGNLSELQTDLVEASHELMQEAAFLHPFAEACYTGPLLDFGRNPILFPCAWVYRQGVLTPWARRRRPALDGDNWWRGHAAAFLRFVNIPPKALLKGRVCQSKREAAYFVVVLHDKRTVVIGVRGTETPEDLITDGLCRECAFTMEDLDGLVNSEQLPATTRERVISTFPHYGHGGIVESARELFMQLNGENTSSGRLGFLSTLLGEGSECHGYKVRLVGHSLGGAVATVLGMMLYGKYPSVHVYAYGPLPCVDFVIAEACSHFVTTIICNDEFSSRLSINSILRLRSAAISALSDNSPADTAMIQKLARRILHVNRYHDNGPDDGIIQGYADHTRTADTTVPNERQISHQIPLCNTELDLHNTQNGFFRYNGSSASIDEHLSYEGISSGHDMQIIPLDGADSGFEGHQTSYREIPVEPPEMFLAGLIVHIVRQRRSLFPLWKCWSIQETEPPYKAVLAKRENFRDIVVTPYMFTDHLPWRCHFAMQKIVEAQTPMRRAHSDPPVQQHLAGPLEAYFSPSGSQNMSVTDPKS

SEQ ID NO: 164224 - protein, 823 aa, Zea Mays
MSRKPLLPTCGSSTPPPLLLLRRFLPRRRATSSPPPPSTRRRTAAMPPRAGDSAAAAAAAASFRLGMVRVVSFLVGGLNLAVLLLGLYIIDAVLPSGCGGGLAFASAPALAGVRVLSMIGAARAQHATADAIAKRHLHESDASVAADAVARHEIRVRYKRWLWWTRFGMAVGALQLVAAIYLMFVIVRDLSNERRSTSCFFGQDKADRVSVRALIALFLILSWVVIIVQCFTGSDILRWRSFYATHDMAWKAHYREVFDHGIREALCCLGRAKYLTVLEEDEVYSVARLLGDLVAYRASGTGHLELLAGLALLQKHGNLSELQTDLVEASHELMQEAAFLHPFAEACYTGPLLDFGRNPILFPCAWVYRQGVLTPWARRRRPALDGDNWWRGHAAAFLRFVNIPPKALLKGRVCQSKREAAYFVVVLHDKRTVVIGVRGTETPEDLITDGLCRECAFTMEDLDGLVNEQLPATTRERVISTFPHYGHGGIVESARELFMQLNGENTSSGRLGFLSTLLGEGSECHGYKVRLVGHSLGGAVATVLGMMLYGKYPSVHVYAYGPLPCVDFVIAEACSHFVTTIICNDEFSSRLSINSILRLRSAAISALSDNSPADTAMIQKLARRILHVNRYHDNGPDDGIIQGYADHTRTADTTVPNERQISHQIPLCNTELDLHNTQNGFFRYNGSSASIDEHLSYEGISSGHDMQIIPLDGADSGFEGHQTSYREIPVEPPEMFLAGLIVHIVRQRRSLFPLWKCWSIQETEPPYKAVLAKRENFRDIVVTPYMFTDHLPWRCHFAMQKIVEAQTPMRRAHSDPPVQQHLV

SEQ ID NO: 164225 - protein, 614 aa, Zea Mays
MKEDPLPASLDKADRVSVRALIALFLILSWVVIIVQCFTGSDILRWRSFYATHDMAWKAHYREVFDHGIREALCCLGRAKYLTVLEEDEVYSVARLLGDLVAYRASGTGHLELLAGLALLQKHGNLSELQTDLVEASHELMQEAAFLHPFAEACYTGPLLDFGRNPILFPCAWVYRQGVLTPWARRRRPALDGDNWWRGHAAAFLRFVNIPPKALLKGRVCQSKREAAYFVVVLHDKRTVVIGVRGTETPEDLITDGLCRECAFTMEDLDGLVNSEQLPATTRERVISTFPHYGHGGIVESARELFMQLNGENTSSGRLGFLSTLLGEGSECHGYKVRLVGHSLGGAVATVLGMMLYGKYPSVHVYAYGPLPCVDFVIAEACSHFVTTIICNDEFSSRLSINSILRLRSAAISALSDNSPADTAMIQKLARRILHVNRYHDNGPDDGIIQGYADHTRTADTTVPNERQISHQIPLCNTELDLHNTQNGFFRYNGSSASIDEHLSYEGISSGHDMQIIPLDGADSGFEGHQTSYREIPVEPPEMFLAGLIVHIVRQRRSLFPLWKCWSIQETEPPYKAVLAKRENFRDIVVTPYMFTDHLPWRCSCFYYTCLTIR

SEQ ID NO: 164226 - protein, 627 aa, Zea Mays
MKEDPLPASLDKADRVSVRALIALFLILSWVVIIVQCFTGSDILRWRSFYATHDMAWKAHYREVFDHGIREALCCLGRAKYLTVLEEDEVYSVARLLGDLVAYRASGTGHLELLAGLALLQKHGNLSELQTDLVEASHELMQEAAFLHPFAEACYTGPLLDFGRNPILFPCAWVYRQGVLTPWARRRRPALDGDNWWRGHAAAFLRFVNIPPKALLKGRVCQSKREAAYFVVVLHDKRTVVIGVRGTETPEDLITDGLCRECAFTMEDLDGLVNSEQLPATTRERVISTFPHYGHGGIVESARELFMQLNGENTSSGRLGFLSTLLGEGSECHGYKVRLVGHSLGGAVATVLGMMLYGKYPSVHVYAYGPLPCVDFVIAEACSHFVTTIICNDEFSSRLSINSILRLRSAAISALSDNSPADTAMIQKLARRILHVNRYHDNGPDDGIIQGYADHTRTADTTVPNERQISHQIPLCNTELDLHNTQNGFFRYNGSSASIDEHLSYEGISSGHDMQIIPLDGADSGFEGHQTSYREIPVEPPEMFLAGLIVHIVRQRRSLFPLWKCWSIQETEPPYKAVLAKRENFRDIVVTPYMFTDHLPWRNGSMQWTRRLLLLSVSICGNLLLSI

SEQ ID NO: 164227 - protein, 491 aa, Zea Mays
MQEAAFLHPFAEACYTGPLLDFGRNPILFPCAWVYRQGVLTPWARRRRPALDGDNWWRGHAAAFLRFVNIPPKALLKGRVCQSKREAAYFVVVLHDKRTVVIGVRGTETPEDLITDGLCRECAFTMEDLDGLVNSEQLPATTRERVISTFPHYGHGGIVESARELFMQLNGENTSSGRLGFLSTLLGEGSECHGYKVRLVGHSLGGAVATVLGMMLYGKYPSVHVYAYGPLPCVDFVIAEACSHFVTTIICNDEFSSRLSINSILRLRSAAISALSDNSPADTAMIQKLARRILHVNRYHDNGPDDGIIQGYADHTRTADTTVPNERQISHQIPLCNTELDLHNTQNGFFRYNGSSASIDEHLSYEGISSGHDMQIIPLDGADSGFEGHQTSYREIPVEPPEMFLAGLIVHIVRQRRSLFPLWKCWSIQETEPPYKAVLAKRENFRDIVVTPYMFTDHLPWRCHFAMQKIVEAQTPMRRAHSDPPVQQHLV

SEQ ID NO: 164228 - protein, 387 aa, Zea Mays
MVYNLGQDKADRVSVRALIALFLILSWVVIIVQCFTGSDILRWRSFYATHDMAWKAHYREVFDHGIREALCCLGRAKYLTVLEEDEVYSVARLLGDLVAYRASGTGHLELLAGLALLQKHGNLSELQTDLVEASHELMQEAAFLHPFAEACYTGPLLDFGRNPILFPCAWVYRQGVLTPWARRRRPALDGDNWWRGHAAAFLRFVNIPPKALLKGRVCQSKREAAYFVVVLHDKRTVVIGVRGTETPEDLITDGLCRECAFTMEDLDGLVNSEQLPATTRERVISTFPHYGHGGIVESARELFMQLNGENTSSGRLGFLSTLLGEGSECHGYKVRLVGHSLGGAVATVLGMMLYGKYPSVHVYAYGPLPCVDFVIAEACSHFVTTYE

SEQ ID NO: 164229 - protein, 655 aa, Zea Mays
MVYNLGQDKADRVSVRALIALFLILSWVVIIVQCFTGSDILRWRSFYATHDMAWKAHYREVFDHGIREALCCLGRAKYLTVLEEDEVYSVARLLGDLVAYRASGTGHLELLAGLALLQKHGNLSELQTDLVEASHELMQEAAFLHPFAEACYTGPLLDFGRNPILFPCAWVYRQGVLTPWARRRRPALDGDNWWRGHAAAFLRFVNIPPKALLKGRVCQSKREAAYFVVVLHDKRTVVIGVRGTETPEDLITDGLCRECAFTMEDLDGLVNSEQLPATTRERVISTFPHYGHGGIVESARELFMQLNGENTSSGRLGFLSTLLGEGSECHGYKVRLVGHSLGGAVATVLGMMLYGKYPSVHVYAYGPLPCVDFVIAEACSHFVTTIICNDEFSSRLSINSILRLRSAAISALSDNSPADTAMIQKLARRILHVNRYHDNGPDDGIIQGYADHTRTADTTVPNERQISHQIPLCNTELDLHNTQNGFFRYNGSSASIDEHLSYEGISSGHDMQIIPLDGADSGFEGHQTSYREIPVEPPEMFLAGLIVHIVRQRRSLFPLWKCWSIQETEPPYKAVLAKRENFRDIVVTPYMFTDHLPWRCHFAMQKIVEAQTPMRRAHSDPPVQQHLHGLLQAGPLEAYFSPSGSQNMSVTDPKS

SEQ ID NO: 164230 - protein, 355 aa, Zea Mays
MVYNLGQDKADRVSVRALIALFLILSWVVIIVQCFTGSDILRWRSFYATHDMAWKAHYREVFDHGIREALCCLGRAKYLTVLEEDEVYSVARLLGDLVAYRASGTGHLELLAGLALLQKHGNLSELQTDLVEASHELMQEAAFLHPFAEACYTGPLLDFGRNPILFPCAWVYRQGVLTPWARRRRPALDGDNWWRGHAAAFLRFVNIPPKALLKGRVCQSKREAAYFVVVLHDKRTVVIGVRGTETPEDLITDGLCRECAFTMEDLDGLVNEQLPATTRERVISTFPHYGHGGIVESARELFMQLNGENTSSGRLGFLSTLLGEGSECHGYKVRLVGHSLGGAVATVLGMMHYLQ

SEQ ID NO: 164231 - protein, 390 aa, Zea Mays
MKEDPLPASLDKADRVSVRALIALFLILSWVVIIVQCFTGSDILRWRSFYATHDMAWKAHYREVFDHGIREALCCLGRAKYLTVLEEDEVYSVARLLGDLVAYRASGTGHLELLAGLALLQKHGNLSELQTDLVEASHELMQEAAFLHPFAEACYTGPLLDFGRNPILFPCAWVYRQGVLTPWARRRRPALDGDNWWRGHAAAFLRFVNIPPKALLKGRVCQSKREAAYFVVVLHDKRTVVIGVRGTETPEDLITDGLCRECAFTMEDLDGLVNSEQLPATTRERVISTFPHYGHGGIVESARELFMQLNGENTSSGRLGFLSTLLGEGSECHGYKVRLVGHSLGGAVATVLGMMLYGKYPSVHVYAYGPLPCVDFVIAEACSHFVTTYE

SEQ ID NO: 164232 - protein, 262 aa, Zea Mays
MARPRAKKRTTPQAAATDSVEPDATVGASSKLEEAAAEPATRERGKRVKAPPKPKPETEYFDEKGNFEDLWLSAFPVGTEWENIDKIKEFNWSFENVEEALEEGGELHGKTLYMFGSTEPQLLYVNGESKIVLIPIVVAVDCPFPPSDKIGINSVQRENEEIVPMKAMKMAWVPYVPLEDRLSRIDIFKTKIFTLGCTQRRSALKHLKIERVKKFDYCMPYYMPLQPLEDEENTTINFLYPLEPPVRLIVYFNEGHYLIGPK

SEQ ID NO: 164233 - protein, 249 aa, Zea Mays
MGRPFICLEAPSVDCPFPPSDKIGINSVQRENEEIVPMKAMKMAWVPYVPLEDRLSRIDIFKTKIFTLGCTQRRSALKHLKIERVKKFDYCMPFNSLELQLNNVAMNSADLEFHDRDYMPLQPLEDEENTTINFLYPLEPPIVDEFDWEMDDYEDFADQKVQEGSLPEGEKEKFKEFLKEKVRERKRELRQAKEARKKAIDDMDPAMKEAFENIKFYKFYPVKTPDTPDVNNVKARYINRYYRNAHYLK

SEQ ID NO: 164234 - protein, 262 aa, Zea Mays
MALLLRRGVALAARSFRAAAASSASTTVHRLPAGASLAGAGELAPAQLFFFENRRGFAKGKKSKDDRGDTVQAVPDIGPTVKSAATAQMDAAVIALSRELSKLRTGRATPGMLDHIMVENADVKVALNRIAVVSVLDAHTLSVMPYDPTSMKSIEHAIISSPLGINPTPDGNRIIAAIPPLTKENIQALCKVVTKSAEDFKQSIRRARQKVTQALDTIKKSASSMPKDDVKRIEKEIEELTKKFIKSSDDMCKAKEKEISGN

SEQ ID NO: 164235 - protein, 239 aa, Zea Mays
MALLLRRGVALAARSFRAAAASSASTTVHRLPAGASLAGAGELAPAQLFFFENRRGFAKGKKSTATAQMDAAVIALSRELSKLRTGRATPGMLDHIMVENADVKVALNRIAVVSVLDAHTLSVMPYDPTSMKSIEHAIISSPLGINPTPDGNRIIAAIPPLTKENIQALCKVVTKSAEDFKQSIRRARQKALDTIKKSASSMPKDDVKRIEKEIEELTKKFIKSSDDMCKAKEKEISGN

SEQ ID NO: 164236 - protein, 464 aa, Zea Mays
MPNDREVTCGICFESCPLGSMSAAACGHPFCGTCWRGYISTAISDGPGCLMLRCPDPSCAAAVGQDMINSLADVEDTEKYGRYLRRSYIEDNRKTKWCPAPGCEYAAEFVMGSGSYDVNCNCSYGFCWNCTEEAHRPVDCATVSKWILKNSAESENMNWILANSKPCPKCKRPIEKNQGCMHITCTPPCKFEFCWLCLGPWSEHGERTGGFYACNRYESARQEGVYDESERRREMAKNSLERYTHYYERWAANQSSRQKALGDLQSLQNDKLERLSDIQSQPESQLKFIIEAWLQIVECRRVLKWTYAYGFYLPEHEHAKRQFFEYLQGEAESGLERLHQCAEKELQIYLDAESPSKDFNDFRTKLAGLTSVTRNYFENLVRALETGLNDVGPSTSHGTCSKSATSKSLGGKSKSGKNRASSTSSKSGGSSRGVDDSNIWTCDQCTYANPKSARACQACDHQHR

SEQ ID NO: 164237 - protein, 391 aa, Zea Mays
MTSTAAGRLVSPPATTETQTTTSRTTTPTTPRSSSPTDSSILSEVDIKRRQEDDINRVSTVLSISKPEACVLLRNYNWSVSKVHDEWFADEERVRKVVGLPEKHIEMPNDREVTCGICFESCPLGSMSAAACERTGGFYACNRYESARQEGVYDESERRREMAKNSLERYTHYYERWAANQSSRQKALGDLQSLQNDKLERLSDIQSQPESQLKFIIEAWLQIVECRRVLKWTYAYGFYLPEHEHAKRQFFEYLQGEAESGLERLHQCAEKELQIYLDAESPSKDFNDFRTKLAGLTSVTRNYFENLVRALETGLNDVGPSTSHGTCSKSATSKSLGGKSKSGKNRASSTSSKSGGSSRGVDDSNIWTCDQCTYANPKSARACQACDHQHR

SEQ ID NO: 164238 - protein, 499 aa, Zea Mays
MESEDDMHDANDSAEDDFYSGGEAGLAASDDGDADYDFADHDSDDSAELLSHRQQQNYSILSEVDIKRRQEDDINRVSTVLSISKPEACVLLRNYNWSVSKVHDEWFADEERVRKVVGLPEKHIEMPNDREVTCGICFESCPLGSMSAAACGHPFCGTCWRGYISTAISDGPGCLMLRCPDPSCAAAVGQDMINSLADVEDTEKYGRYLRRSYIEDNRKTKWCPAPGCEYAAEFVMGSGSYDVNCNCSYGFCWNCTEEAHRPVDCATVSKWILKNSAESENMNWILANSKPCPKCKRPIEKNQGCMHITCTPPCKFEFCWLCLGPWSEHGERTGGFYACNRYESARQEGVYDESERRREMAKNSLERYTHYYERWAANQSSRQKALGDLQSLQNDKLERLSDIQSQPESQLKFIIEAWLQIVECRRVLKWTYAYGFYLPEHEHAKRQFFEYLQGEAESGLERLHQCAEKELQIYLDAESPSKDFNDFRTKLAGLTRSFH

SEQ ID NO: 164239 - protein, 570 aa, Zea Mays
MTSTAAGRLVSPPATTETQTTTSRTTTPTTPRSSSPTDSSILSEVDIKRRQEDDINRVSTVLSISKPEACVLLRNYNWSVSKVHDEWFADEERVRKVVGLPEKHIEMPNDREVTCGICFESCPLGSMSAAACGHPFCGTCWRGYISTAISDGPGCLMLRCPDPSCAAAVGQDMINSLADVEDTEKYGRYLRRSYIEDNRKTKWCPAPGCEYAAEFVMGSGSYDVNCNCSYGFCWNCTEEAHRPVDCATVSKWILKNSAESENMNWILANSKPCPKCKRPIEKNQGCMHITCTPPCKFEFCWLCLGPWSEHGERTGGFYACNRYESARQEGVYDESERRREMAKNSLERYTHYYERWAANQSSRQKALGDLQSLQNDKLERLSDIQSQPESQLKFIIEAWLQIVECRRVLKWTYAYGFYLPEHEHAKRQFFEYLQGEAESGLERLHQCAEKELQIYLDAESPSKDFNDFRTKLAGLTSVTRNYFENLVRALETGLNDVGPSTSHGTCSKSATSKSLGGKSKSGKNRASSTSSKSGGSSRGVDDSNIWTCDQCTYANPKSARACQACDHQHR

SEQ ID NO: 164240 - protein, 280 aa, Zea Mays
MISFSPSEVASSKYDGALKSWENSITLVNIIRNEIRDGQLSFRGKRVLELGCGSGVSGIFSCLKGASTVHFQDMNAETIRCRTIPNVLANLEQARDRQNRPSEESPVTPSRQLLDPNVHFYAGEWDELPTVLSAVPPPAAPADLSFSEDDFMDGGSSSHDGSSVVVGQDYCPRRSRKLSGSRRAWERANNETDQADGGYDVILVSDVPYAANSLKKLHALISKCLRPPYGVMYYVASKKSSVGSNGGARQLRALMEEGGVLGGHLLTEVCDREIWKFFFK

SEQ ID NO: 164241 - protein, 349 aa, Zea Mays
MKAPSLLVRCFPGLLPSKDTSCVPIVSEKDLQLPSLAVEIIPSKSAHPYKYAGEKVDVQGFDIFKGKVSVADMISFSPSEVASSKYDGALKSWENSITLVNIIRNEIRDGQLSFRGKRVLELGCGSGVSGIFSCLKGASTVHFQDMNAETIRCRTIPNVLANLEQARDRQNRPSEESPVTPSRQLLDPNVHFYAGEWDELPTVLSAVPPPAAPADLSFSEDDFMDGGSSSHDGSSVVVGQDYCPRRSRKLSGSRRAWERANNETDQADGGYDVILVSDVPYAANSLKKLHALISKCLRPPYGVMYYVASKKSSVGSNGGARQLRALMEEGGVLGGHLLTERCTYIPRGV

SEQ ID NO: 164242 - protein, 297 aa, Zea Mays
MKAPSLLVRCFPGLLPSKDTSCVPIVSEKDLQLPSLAVEIIPSKSAHPYKYAGEKVDVQGFDIFKGKVSVADMISFSPSEVASSKYDGALKSWENSITLVNIIRNEIRDGQLSFRGKRVLELGCGSGVSGIFSCLKGASTVHFQDMNAETIRCRTIPNVLANLEQARDRQNRPSEESPVTPSRQLLDPNVHFYAGEWDELPTVLSAVPPPAAPADLSFSEDDFMDGGSSSHDGSSVVVGQDYCPRRSRKLSGSRRAWERANNETDQADGGYDVILVSDVPYAANSLKKLHALISKLK

SEQ ID NO: 164243 - protein, 551 aa, Zea Mays
MDVPTPPNRAGCNSNIGSPMQSFDDPFGVAAMTSFDGYSELCSPSVADHIFSLLNDPSAAQQMVAMWSSLGSSPRASAVREDMSFDTFPGPVDGTSSLAQRFNSAAASSPTGVDRGLKESDGLVLPSNGSQQGSSIIPRSVGNALADRMLMALSLFRKSLSDGVLAQVWMPVEHNGRVVLSTSEQPYLLDQDLAGYREVSRNFLFSVKEEPGLHLGLPGRVFISGVPEWTSSVIYYSKPEYLRMEHALLHEIQGSLAMPVYDPSKGSCCAVLELVTNKEKPNFDAEMDIAVNLQTTTDRSNQKVYSENQKSAFTEILDVLRAICHAHMLPLALTWVPTSNGIANGFCVGKNIGIDPQPGKAALRIHESACYVNDAKMQGFLHACADRHLEKGQGIAGRALKSNLPFFSPDIREYSIEDYPLAHHARKFGLHAAVAIRLRSTYTSYDDYILEFFLPVNCKGCGEQQMLLNNLSSTMQRICKSLRTVSEAEIENVSATAAMFEKTSGTCLPTGNSESSSHDDQPITESALQDLSLGDKQGDREPDKVLRYHSI

SEQ ID NO: 164244 - protein, 937 aa, Zea Mays
MDVPTPPNRAGCNSNIGSPMQSFDDPFGVAAMTSFDGYSELCSPSVADHIFSLLNDPSAAQQMVAMWSSLGSSPRASAVREDMSFDTFPGPVDGTSSLAQRFNSAAASSPTGVDRGLKESDGLVLPSNGSQQGSSIIPRSVGNALADRMLMALSLFRKSLSDGVLAQVWMPVEHNGRVVLSTSEQPYLLDQDLAGYREVSRNFLFSVKEEPGLHLGLPGRVFISGVPEWTSSVIYYSKPEYLRMEHALLHEIQGSLAMPVYDPSKGSCCAVLELVTNKEKPNFDAEMDIAVNLQTTTDRSNQKVYSENQKSAFTEILDVLRAICHAHMLPLALTWVPTSNGIANGFCVGKNIGIDPQPGKAALRIHESACYVNDAKMQGFLHACADRHLEKGQGIAGRALKSNLPFFSPDIREYSIEDYPLAHHARKFGLHAAVAIRLRSTYTSYDDYILEFFLPVNCKGCGEQQMLLNNLSSTMQRICKSLRTVSEAEIENVSATAAMFEKTSGTCLPTGNSESSSHDDQPITESALQDLSLGDKQGDREPDKRSSMRVADKKRSASEKNFSLDVLRKYFSGSLRDAAMSLGVCPTTLKRICRQHGISRWPSRKINKVNRSLKKIEKVIKSVHGVDRSLQYDPATGSLVPATSLPEKMPFSACDTLPTSSLGRAVEETCSPKSEQDFSSPDGWQRETSQFHVSGIPKRGGDEVRTLANNNKGRRNYVSGIANITQHSNSEGTHGPSYPNPIGAVNSLHTGETGNIDSLTSLHPSMDGIEGQTTVRNSPFVQQADVTMVDGHDTKEQTLPSTSGMTDSSSGSASSEPTFKGNPGRALKDRSSPALTVKATYNGDTVRFKFVPARGWYHLLEEIAKRFKLTAGAFQLKYKDDEDEWVILANDADLQECMDVLDSISSRNMKLQVRDLSCHVGSSGSSSSCLQVEAHSS

SEQ ID NO: 164245 - protein, 911 aa, Zea Mays
MDVPTPPNRAGCNSNIGSPMQSFDDPFGVAAMTSFDGYSELCSPSVADHIFSLLNDPSAAQQMVAMWSSLGSSPRASAVREDMSFDTFPGPVDGTSSLAQRFNSAAASSPTGVDRGLKESDGLVLPSNGSQQGSSIIPRSVGNALADRMLMALSLFRKSLSDGVLAQVWMPVEHNGRVVLSTSEQPYLLDQDLAGYREVSRNFLFSVKEEPGLHLGLPGRVFISGVPEWTSSVIYYILELVTNKEKPNFDAEMDIVCDALQAVNLQTTTDRSNQKVYSENQKSAFTEILDVLRAICHAHMLPLALTWVPTSNGIANGFCVGKNIGIDPQPGKAALRIHESACYVNDAKMQGFLHACADRHLEKGQGIAGRALKSNLPFFSPDIREYSIEDYPLAHHARKFGLHAAVAIRLRSTYTSYDDYILEFFLPVNCKGCGEQQMLLNNLSSTMQRICKSLRTVSEAEIENVSATAAMFEKTSGTCLPTGNSESSSHDDQPITESALQDLSLGDKQGDREPDKPQRSSMRVADKKRSASEKNFSLDVLRKYFSGSLRDAAMSLGVCPTTLKRICRQHGISRWPSRKINKVNRSLKKIEKVIKSVHGVDRSLQYDPATGSLVPATSLPEKMPFSACDTLPTSSLGRAVEETCSPKSEQDFSSPDGWQRETSQFHVSGIPKRGGDEVRTLANNNKGRRNYVSGIANITQHSNSEGTHGPSYPNPIGAVNSLHTGETGNIDSLTSLHPSMDGIEGQTTVRNSPFVQQADVTMVDGHDTKEQTLPSTSGMTDSSSGSASSEPTFKGNPGRALKDRSSPALTVKATYNGDTVRFKFVPARGWYHLLEEIAKRFKLTAGAFQLKYKDDEDEWVILANDADLQECMDVLDSISSRNMKLQVRDLSCHVGSSGSSSSCLQVEAHSS

SEQ ID NO: 164246 - protein, 405 aa, Zea Mays
MLHQGVIQKSTSAFASPVLLVKKKDNTWRFCVDYRYLNALTIKSKYPVPVFDQLMDELAHARWFSKLDLKAGYHQILLQAGEEYKTAFQTHIGHYEFRVMAFGLTGAPNTFLGAMNDTLKSVLRKCVLVFFDDILIYSQTFEDHVRHLQQVLQLLLRDQWKVKLSKCELAQNQIAYLGHIISANGVATDPAKITAIEHWKTPTSAKELRSFLGLAGFYRKFVRHFGMISRPLFDLLKKHTLFVWTPEHQKAFELLKQTLMSAPVLALPDFTKPFCIYTDACQTGVGAVLMQQGHPLAFLSRALGPKNQGLSTYKKEYMAILLAVTQWRSYLQLAEFIIYTDHRSLTQLNEQRLNTMWQQKVYTKLAGLQYKVIYKKGTENGAADALSRQCSDELQCCVVSHCTPA

SEQ ID NO: 164247 - protein, 156 aa, Zea Mays
MDPLDVQGRKASAAPSFVLDAAGMQELLDAAAARKQTGDAAPSVAKRTGMGKAAAAGSTRLQRAMEADFQGAGTAEGRQRPGTALGLKRKVAAMAAAPSVVAPPVHDFTTFCSTASSIAGSQAFSSIPNFTSGHAISSPTTPPWVRSEATDPAACS

SEQ ID NO: 164248 - protein, 287 aa, Zea Mays
MDGNKKASKMLPHIVVVASTNRIDAVDPALRRAGRFDSEVEVAVPTVEERLLILKLYTKNLHLDEKVDLQTVAAFCNGYVGADLEALCREAAKLAYHRMLNLCEGDKVLKLLMEDWECARSMVGPSITRGVTKEISIVSWDDIGGLKDLKKELQKVVEWPIKHAAAFSRLGIPPVRGVLLHGPPGCSKTTLAKAAAHAAQASFFSLSGADLYSKYVGEGEALLRRTFQKARLASPSIIFFDEADAIAPKRTGPGGNSSGNATVGERLLSTLLTEMDGLELATVLLAC

SEQ ID NO: 164249 - protein, 218 aa, Zea Mays
MDGNKKASKMLPHIVVVASTNRIDAVDPALRRAGRFDSEVEVAVPTVEERLLILKLYTKNLHLDEKVDLQTVAAFCNGYVGADLEALCREAAKLAYHRMLNLCEGDKVLKLLMEDWECARSMVGPSITRGVTKEISIVSWDDIGGLKDLKKELQKVVEWPIKHAAAFSRLGIPPVRGVLLHGPPGCSKTTLAKAAAHAAQASFFSLRFIRKQHFILRK

SEQ ID NO: 164250 - protein, 71 aa, Zea Mays
MTCEISAYLPFFYLAPSFPSYLYIVFYNYSSSSPSIYGRQKLIQKLGALWPWIRPRVRMWHCNSMCDTTWA

SEQ ID NO: 164251 - protein, 96 aa, Zea Mays
MRLLALPWHLISGTRRRCLWIRSPQTSTVTLKGKEEKQTRRGRSDLVNRSGQKHHGGAGLRIRIHPGRFLTMPLPYTRFQRFINGTVNKSAAPGRE

SEQ ID NO: 164252 - protein, 668 aa, Zea Mays
MDPAPATPRWNLERPYLTGRFHQEAKAAAAAQGLGSKPFSLDSFSRGAGAGSVIGSYAVSVQELLVIDDLLSALVGIEGRYVSIKRVRGKEGYVVFQIDSSMDLALQELTRRIFPLCEDYVLVSQFVESRSHFKNGLVNHALAAALRAFLLDYQAMVAQLEHQFRLGRLSVQGLWFFCQRMMSSLNALAVLVEKATSNNTNGSATLNLLQSQAKAMGGDSAVRSLLEKMTEYASAAYLRMLERWVYEGVIDDPYGEFFIAENKSLQKESLTQDYDAKYWQQRYSLKEGIPSFLTNVAATILTTGKYLNVMRECGHNVQVSLSDNSKLMSFGSNHQYLECIKSAYDFASGELLTLMKDKYDLIGKLRSLKRYLLLDQGDFLVHFMDIAREELTKKPEEISAEKLQSLLDIALRSTAAASDPSHEELICCVERSSLLKKLATLKDLDPADKLAAADVDRSMQLSITGLETFCLSNKVQWPLSLVISRKALTKYQLIFRLLFHCKHVSRQLCAAWQIQQVLEPNWHLMHDRLQTARSIDEVIQIHDFFLQKCLKECLLLSPELLVKVEKLKGLCLQYATSIQILMPSIDVANSENTSKSRKSRSRIDKSQDRDQQLKLASENVVMSESILKFEAAFNSELQSLAPTLSNSSQAEPYVTHLAQCILGVRIGQ

SEQ ID NO: 164253 - protein, 520 aa, Zea Mays
MVLLSILVEKATSNNTNGSATLNLLQSQAKAMGGDSAVRSLLEKMTEYASAAYLRMLERWVYEGVIDDPYGEFFIAENKSLQKESLTQDYDAKYWQQRYSLKEGIPSFLTNVAATILTTGKYLNVMRECGHNVQVSLSDNSKLMSFGSNHQYLECIKSAYDFASGELLTLMKDKYDLIGKLRSLKRYLLLDQGDFLVHFMDIAREELTKKPEEISAEKLQSLLDIALRSTAAASDPSHEELICCVERSSLLKKLATLKDLDPADKLAAADVDRSMQLSITGLETFCLSNKVQWPLSLVISRKALTKYQLIFRLLFHCKHVSRQLCAAWQIQQAFRSVKILGTPILRSSILCRSMLKFVNSLLHYLTFEVLEPNWHLMHDRLQTARSIDEVIQIHDFFLQKCLKECLLLSPELLVKVEKLKGLCLQYATSIQILMPSIDVANSENTSKSRKSRSRIDKSQDRDQQLKLASENVVMSESILKFEAAFNSELQSLAPTLSNSSQAEPYVTHLAQCILGVRIGQ

SEQ ID NO: 164254 - protein, 494 aa, Zea Mays
MDPAPATPRWNLERPYLTGRFHQEAKAAAAAQGLGSKPFSLDSFSRGAGAGSVIGSYAVSVQELLVIDDLLSALVGIEGRYVSIKRVRGKEGYVVFQIDSSMDLALQELTRRIFPLCEDYVLVSQFVESRSHFKNGLVNHALAAALRAFLLDYQAMVAQLEHQFRLGRLSVQGLWFFCQRMMSSLNALAVLVEKATSNNTNGSATLNLLQSQAKAMGGDSAVRSLLEKMTEYASAAYLRMLERWVYEGVIDDPYGEFFIAENKSLQKESLTQDYDAKYWQQRYSLKEGIPSFLTNVAATILTTGKYLNVMRECGHNVQVSLSDNSKLMSFGSNHQYLECIKSAYDFASGELLTLMKDKYDLIGKLRSLKRYLLLDQGDFLVHFMDIAREELTKKPEEISAEKLQSLLDIALRSTAAASDPSHEELICCVERSSLLKKLATLKDLDPADKLAAADVDRSMQLSITGPVAVISCNFKEGFDKIPIDLSPIVPLQAC

SEQ ID NO: 164255 - protein, 312 aa, Zea Mays
MDLALQELTRRIFPLCEDYVLVSQFVESRSHFKNGLVNHALAAALRAFLLDYQAMVAQLEHQFRLGRLSVQGLWFFCQRMMSSLNALAVLVEKATSNNTNGSATLNLLQSQAKAMGGDSAVRSLLEKMTEYASAAYLRMLERWVYEGVIDDPYGEFFIAENKSLQKESLTQDYDAKYWQQRYSLKEGIPSFLTNVAATILTTGKYLNVMRECGHNVQVSLSDNSKLMSFGSNHQYLECIKSAYDFASGELLTLMKDKYDLIGKLRSLKRYLLLDQGDFLVHFMDIAREELTKKPEEISAEKLQLLQIQAMRN

SEQ ID NO: 164256 - protein, 181 aa, Zea Mays
MVGGGGRRAALGRWCLVILAVASALGVSGPAFYWRYKKGFSSSSPSSTAAAVASSPSCPPCSCDCPAPLSLKSIAPDCGKNNPELAKEMEKQFVDLLNEELKLQQVVAEEHSHHMNATLVEAKRQATQYQREAEKCNAATETCEEAREQSEVAISKEKKLTAMWEQRARQLGWHDSRATSM

SEQ ID NO: 164257 - protein, 516 aa, Zea Mays
MSSEISAISASSNTIKGIMAMRILKLVNTLMRKWILTRNMRVFVIQSKNYVMRTKQLKLEYIEMAIMWCVGRWKLVNMHQRLRLLKHQMKMLRPTSAKPPVMSRAMEVGQHAPEVEAAEASDEDVEAYIGKATGKKRDTIIMFPPSDQQSLELHMLTMIQDLAASLLMEFEKWVLRAESTGTILKTPLDSQSSLGSEEVIKAKKRRLGRAQKIIGDYCLLPGSPVDANAHYTTAIELARLTGDVFWHAGALEGSVCALVVDRMGESDPVLEDEVKYRYYTIIQLYRRATLQDNAQRVSPVSFELEAALKLARYLCRQELAKEVSDLLMGAADGAKALIDASDRLILYIEIARLFGTLGYKRKAAFFSRQVAQLYLQQDNAYAAMSAMQVLTMTTNAYHVQSRKAVKMNHDLSKSIVSLFESQWSTLQMVVLRDILMSSIRATDPLSSWSAAARLLRSFYPLITPAGQSGLASSLANSAGKLPTGTRCADPCLPGFYQVAFFPASPFSKGYSKAEST

SEQ ID NO: 164258 - protein, 118 aa, Zea Mays
MLGVGNDVGENVGLVPGVLANRLPPWLILVIGSACAFFGFGTLWLVVTKTVAMPYWVWWVALCIGTNSSAWLGTAALVTNMRNFPLSRGTVAGLIKGYVAVSAAVYTETFTLRLDHWN

SEQ ID NO: 164259 - protein, 188 aa, Zea Mays
MVAATIAGMFLVCFESLCTCFGTKRKDESEDHVLAEHSNSLSSYQMRSVSDRISASSLRAPASPSRFSLSSPPSRNEPLNISLEHVVKLTHNFAPTLMIGEGYFGKVYRATLRDGRVVAIKRAKKVTYFGPGNYSSNCPSMVPVFVSCIQTYLNCDLIFYSFLYIYTQLLICTRAHLYALHCGEARLS

SEQ ID NO: 164260 - protein, 322 aa, Zea Mays
MVAATIAGMFLVCFESLCTCFGTKRKDESEDHVLAEHSNSCYFGKVYRATLRDGRVVAIKRAKKENFVSLRTEFSNEVALLKSIEHKNLVRLLGYIDKPNERILITEYVPNGNLREHLDGQHGLVLGFNQRLEIAIDVAHGLTYLHLYAEKPIIHRDVKSSNILLTEGFMAKVADFGFARTGPTEPGQSQIETDVRGTAGYLDPEYLRSNHLTIKSDVFSYGVLLLEILSGRRPIEARRGPTERITVRWAFYKYNRGNVRDILDPMLTEAVNENILNRIFDLAFQCVAPTREDRPSMKEVVERLWKIRRDHTKIQRIAELTL

SEQ ID NO: 164261 - protein, 173 aa, Zea Mays
MQPIIHRDVKSSNILLTEGFMAKVADFGFARTGPTEPGQSQIETDVRGTAGYLDPEYLRSNHLTIKSDVFSYGVLLLEILSGRRPIEARRGPTERITVRWAFYKYNRGNVRDILDPMLTEAVNENILNRIFDLAFQCVAPTREDRPSMKEVVERLWKIRRDHTKIQRIAELTL

SEQ ID NO: 164262 - protein, 248 aa, Zea Mays
MVAATIAGMFLVCFESLCTCFGTKRKDESEDHVLAEHSNSLSSYQMRSVSDRISASSLRAPASPSRFSLSSPPSRNEPLNISLEHVVKLTHNFAPTLMIGEGYFGKVYRATLRDGRVVAIKRAKKENFVSLRTEFSNEVALLKSIEHKNLVRLLGYIDKPNERILITEYVPNGNLREHLDGQHGLVLGFNQRLEIAIDVAHGLTYLHLYAGTLCVLSSASGNLVFLNPNHVHALVLLQNCSKEVNQYA

SEQ ID NO: 164263 - protein, 305 aa, Zea Mays
MVAATIAGMFLVCFESLCTCFGTKRKDESEDHVLAEHSNSCYFGKVYRATLRDGRVVAIKRAKKENFVSLRTEFSNEVALLKSIEHKNLVRLLGYIDKPNERILITEYVPNGNLREHLDGQHGLVLGFNQRLEIAIDVAHGLTYLHLYAEGFMAKVADFGFARTGPTEPGQSQIETDVRGTAGYLDPEYLRSNHLTIKSDVFSYGVLLLEILSGRRPIEARRGPTERITVRWAFYKYNRGNVRDILDPMLTEAVNENILNRIFDLAFQCVAPTREDRPSMKEVVERLWKIRRDHTKIQRIAELTL

SEQ ID NO: 164264 - protein, 70 aa, Zea Mays
MFGVMLFLYIPCLSVCIATSRGEVTSNPKPTFGSASRQHVITSIRQVVPLITLLYPIMFLLIIMICLGES

SEQ ID NO: 164265 - protein, 724 aa, Zea Mays
MASISAPAVACRVAPARATTSVLPAHSRRPGCRSVVWRCWAATRGRRRRWAGLRARCRISCDVSQPSAVQPDSESSGEGLVAQDDGPRRPPFDINLAVVLAGFAFEAYTSPPADVGWRETDAADCQTVFLSDVFLREVYDGRLVVRLKKGINLPAMDPWGTSDPYVILQLNGQTAKSQIKWATKEPTWNEDFTFNIRKSRENLLQVAAWDANLVTPHKRMGNAGLYLESFCDGNNHGVTVELEGLGGGGTIEIEVKYKSYDDIEREKQWWRIPFVSDFLVKSSLGSALRMVLGSESINASQFVKSAFGQLSSFTYTYLPKPSSLESGVDVSKSDEESSDGPTNSNELQQQNIDSEIISDSHSHSEVQSPTAVVNSEGNSSSDMKKSDEYFWRALNNVLNQNVLQNFGFSLPEVKQLGGFDLLSSLGLKSRNIAEQEYLESGLAMADTSTNGGSETTSENTVGVENENRTLTTKEEVQSSFPDINKVSRDVLSQTENILGALMILSKNLSPHDQSVPTTGTNGKYDMIREEQGASAADSVQKADTVSSALLSIDAQEAEDMRRLFASAETAMEAWAMLATSLGRNSFIKSDFEKICFLDNISTDTQVAIWCDSSRRRLVVAFRGTEQSRWKDLRTDLMLVPAGLNPERLGGDFKQEVQVHSGFLGAYDSVRNRIMTLIKYAIGYDDEEDAENIPRWHVYVTGHSLGGALATLLALELSSSQMAKK

SEQ ID NO: 164266 - protein, 855 aa, Zea Mays
MASISAPAVACRVAPARATTSVLPAHSRRPGCRSVVWRCWAATRGRRRRWAGLRARCRISCDVSQPSAVQPDSESSGEGLVAQDDGPRRPPFDINLAVVLAGFAFEAYTSPPADVGWRETDAADCQTVFLSDVFLREVYDGRLVVRLKKGINLPAMDPWGTSDPYVILQLNGQTAKSQIKWATKEPTWNEDFTFNIRKSRENLLQVAAWDANLVTPHKRMGNAGLYLESFCDGNNHGVTVELEGLGGGGTIEIEVKYKSYDDIEREKQWWRIPFVSDFLVKSSLGSALRMVLGSESINASQFVKSAFGQLSSFTYTYLPKPSSLESGVDVSKSDEESSDGPTNSNELQQQNIDSEIISDSHSHSEVQSPTAVVNSEGNSSSDMKKSDEYFWRALNNVLNQNVLQNFGFSLPEVKQLGGFDLLSSLGLKSRNIAEQEYLESGLAMADTSTNGGSETTSENTVGVENENRTLTTKEEVQSSFPDINKVSRDVLSQTENILGALMILSKNLSPHDQSVPTTGTNGKYDMIREEQGASAADSVQKADTVSSALLSIDAQEAEDMRRLFASAETAMEAWAMLATSLGRNSFIKSDFEKICFLDNISTDTQVAIWCDSSRRRLNPERLGGDFKQEVQVHSGFLGAYDSVRNRIMTLIKYAIGYDDEEDAENIPRWHVYVTGHSLGGALATLLALELSSSQMAKNGAIFVTMYNFGSPRVGNRRFAEVYNAKVKDSWRIVNHRDIIPTVPRLMGYCHVEAPVYLKFGDAKDAPVNNSILDDEDQGDVIGEYTPDVLVTEFMKGEKQLVEKLLQTEINLLRSIRDGSALMQHMEDFYYVTLLENVRSSYQVADTANDEYQLTA

SEQ ID NO: 164267 - protein, 698 aa, Zea Mays
MASISAPAVACRVAPARATTSVLPAHSRRPGCRSVVWRCWAATRGRRRRWAGLRARCRISCDVSQPSAVQPDSESSGEGLVAQDDGPRRPPFDINLAVVLAGFAFEAYTSPPADVGWRETDAADCQTVFLSDVFLREVYDGRLVVRLKKGINLPAMDPWGTSDPYVILQLNGQTAKSQIKWATKEPTWNEDFTFNIRKSRENLLQVAAWDANLVTPHKRMGNAGLYLESFCDGNNHGVTVELEGLGGGGTIEIEVKYKSYDDIEREKQWWRIPFVSDFLVKSSLGSALRMVLGSESINASQFVKSAFGQLSSFTYTYLPKPSSLESGVDVSKSDEESSDGPTNSNELQQQNIDSEIISDSHSHSEVQSPTAVVNSEGNSSSDMKKSDEYFWRALNNVLNQNVLQNFGFSLPEVKQLGGFDLLSSLGLKSRNIAEQEYLESGLAMADTSTNGGSETTSENTVGVENENRTLTTKEEVQSSFPDINKVSRDVLSQTENILGALMILSKNLSPHDQSVPTTGTNGKYDMIREEQGASAADSVQKADTVSSALLSIDAQEAEDMRRLFASAETAMEAWAMLATSLGRNSFIKSDFEKICFLDNISTDTQVAIWCDSSRRRLNPERLGGDFKQEVQVHSGFLGAYDSVRNRIMTLIKYAIGYDDEEDAENIPRWHVYVTGHSLGGALATLLALELSSSQMAKK

SEQ ID NO: 164268 - protein, 840 aa, Zea Mays
MASISAPAVACRVAPARATTSVLPAHSRRPGCRSVVWRCWAATRGRRRRWAGLRARCRISCDVSQPSAVQPDSESSGEGLVAQDDGPRRPPFDINLAVVLAGFAFEAYTSPPADVGWRETDAADCQTVFLSDVFLREVYDGRLVVRLKKGINLPAMDPWGTSDPYVILQLNGQTAKSQIKWATKEPTWNEDFTFNIRKSRENLLQVAAWDANLVTPHKRMGNAGLYLESFCDGNNHGVTVELEGLGGGGTIEIEVKYKSYDDIEREKQWWRIPFVSDFLVKSSLGSALRMVLGSESINASQFVKSAFGQLSSFTYTYLPKPSSLESGVDVSKSDEESSDGPTNSNELQQQNIDSEIISDSHSHSEVQSPTAVVNSEGNSSSDMKKSDEYFWRALNNVLNQNVLQNFGFSLPEVKQLGGFDLLSSLGLKSRNIAEQEYLESGLAMADTSTNGGSETTSENTVGVENENRTLTTKEEVQSSFPDINKVSRDVLSQTENILGALMILSKNLSPHDQSVPTTGTNGKYDMIREEQGASAADSVQKADTVSSALLSIDAQEAEDMRRLFASAETAMEAWAMLATSLGRNSFIKSDFEKICFLDNISTDTQVAIWCDSSRRRLNPERLGGDFKQEVQVHSGFLGAYDSVRNRIMTLIKYAIGYDDEEDAENIPRWHVYVTGHSLGGALATLLALELSSSQMAKVGNRRFAEVYNAKVKDSWRIVNHRDIIPTVPRLMGYCHVEAPVYLKFGDAKDAPVNNSILDDEDQGDVIGEYTPDVLVTEFMKGEKQLVEKLLQTEINLLRSIRDGSALMQHMEDFYYVTLLENVRSSYQVADTANDEYQLTA

SEQ ID NO: 164269 - protein, 723 aa, Zea Mays
MASISAPAVACRVAPARATTSVLPAHSRRPGCRSVVWRCWAATRGRRRRWAGLRARCRISCDVSQPSAVQPDSESSGEGLVAQDDGPRRPPFDINLAVVLAGFAFEAYTSPPADVGWRETDAADCQTVFLSDVFLREVYDGRLVVRLKKGINLPAMDPWGTSDPYVILQLNGQTAKSQIKWATKEPTWNEDFTFNIRKSRENLLQVAAWDANLVTPHKRMGNAGLYLESFCDGNNHGVTVELEGLGGGGTIEIEVKYKSYDDIEREKQWWRIPFVSDFLVKSSLGSALRMVLGSESINASQFVKSAFGQLSSFTYTYLPKPSSLESGVDVSKSDEESSDGPTNSNELQQQNIDSEIISDSHSHSEVQSPTAVVNSEGNSSSDMKKSDEYFWRALNNVLNQNVLQNFGFSLPEVKQLGGFDLLSSLGLKSRNIAEQEYLESGLAMADTSTNGGSETTSENTVGVENENRTLTTKEEVQSSFPDINKVSRDVLSQTENILGALMILSKNLSPHDQSVPTTGTNGKYDMIREEQGASAADSVQKADTVSSALLSIDAQEAEDMRRLFASAETAMEAWAMLATSLGRNSFIKSDFEKICFLDNISTDTQVAIWCDSSRRRLVVAFRGTEQSRWKDLRTDLMLVPAGLNPERLGGDFKQEVQVHSGFLGAYDSVRNRIMTLIKYAIGYDDEEDAENIPRWHVYVTGHSLGGALATLLALELSSSQMAK

SEQ ID NO: 164270 - protein, 650 aa, Zea Mays
MGNNHGVTVELEGLGGGGTIEIEVKYKSYDDIEREKQWWRIPFVSDFLVKSSLGSALRMVLGSESINASQFVKSAFGQLSSFTYTYLPKPSSLESGVDVSKSDEESSDGPTNSNELQQQNIDSEIISDSHSHSEVQSPTAVVNSEGNSSSDMKKSDEYFWRALNNVLNQNVLQNFGFSLPEVKQLGGFDLLSSLGLKSRNIAEQEYLESGLAMADTSTNGGSETTSENTVGVENENRTLTTKEEVQSSFPDINKVSRDVLSQTENILGALMILSKNLSPHDQSVPTTGTNGKYDMIREEQGASAADSVQKADTVSSALLSIDAQEAEDMRRLFASAETAMEAWAMLATSLGRNSFIKSDFEKICFLDNISTDTQVAIWCDSSRRRLVVAFRGTEQSRWKDLRTDLMLVPAGLNPERLGGDFKQEVQVHSGFLGAYDSVRNRIMTLIKYAIGYDDEEDAENIPRWHVYVTGHSLGGALATLLALELSSSQMAKNGAIFVTMYNFGSPRVGNRRFAEVYNAKVKDSWRIVNHRDIIPTVPRLMGYCHVEAPVYLKFGDAKDAPVNNSILDDEDQGDVIGEYTPDVLVTEFMKGEKQLVEKLLQTEINLLRSIRDGSALMQHMEDFYYVTLLENVRSSYQVADTANDEYQLTA

SEQ ID NO: 164271 - protein, 680 aa, Zea Mays
MGVAAWDANLVTPHKRMGNAGLYLESFCDGNNHGVTVELEGLGGGGTIEIEVKYKSYDDIEREKQWWRIPFVSDFLVKSSLGSALRMVLGSESINASQFVKSAFGQLSSFTYTYLPKPSSLESGVDVSKSDEESSDGPTNSNELQQQNIDSEIISDSHSHSEVQSPTAVVNSEGNSSSDMKKSDEYFWRALNNVLNQNVLQNFGFSLPEVKQLGGFDLLSSLGLKSRNIAEQEYLESGLAMADTSTNGGSETTSENTVGVENENRTLTTKEEVQSSFPDINKVSRDVLSQTENILGALMILSKNLSPHDQSVPTTGTNGKYDMIREEQGASAADSVQKADTVSSALLSIDAQEAEDMRRLFASAETAMEAWAMLATSLGRNSFIKSDFEKICFLDNISTDTQVAIWCDSSRRRLVVAFRGTEQSRWKDLRTDLMLVPAGLNPERLGGDFKQEVQVHSGFLGAYDSVRNRIMTLIKYAIGYDDEEDAENIPRWHVYVTGHSLGGALATLLALELSSSQMAKNGAIFVTMYNFGSPRVGNRRFAEVYNAKVKDSWRIVNHRDIIPTVPRLMGYCHVEAPVYLKFGDAKDAPVNNSILDDEDQGDVIGEYTPDVLVTEFMKGEKQLVEKLLQTEINLLRSIRDGSALMQHMEDFYYVTLLEVFENYFCFSHTKLCQKLLKVSN

SEQ ID NO: 164272 - protein, 170 aa, Zea Mays
MYNFGSPRVGNRRFAEVYNAKVKDSWRIVNHRDIIPTVPRLMGYCHVEAPVYLKFGDAKDAPVNNSILDDEDQGDVIGEYTPDVLVTEFMKGEKQLVEKLLQTEINLLRSIRDGSALMQHMEDFYYVTLLEVFENYFCFSHTKLCQKLLKNVRSSYQVADTANDEYQLTA

SEQ ID NO: 164273 - protein, 126 aa, Zea Mays
MGYCHVEAPVYLKFGDAKDAPVSMFYCTRPPVVTKNIKLHLYVIQMKGEKQLVEKLLQTEINLLRSIRDGSALMQHMEDFYYVTLLEVFENYFCFSHTKLCQKLLKNVRSSYQVADTANDEYQLTA

SEQ ID NO: 164274 - protein, 129 aa, Zea Mays
MGYCHVEAPVYLKFGDAKDAPVNNSILDDEDQGDVIGEYTPDVLVTEFMKGEKQLVEKLLQTEINLLRSIRDGSALMQHMEDFYYVTLLEVFENYFCFSHTKLCQKLLKNVRSSYQVADTANDEYQLTA

SEQ ID NO: 164275 - protein, 138 aa, Zea Mays
MDALTNSNQKKVKDSWRIVNHRDIIPTVPRLMGYCHVEAPVYLKFGDAKDAPVSMFYCTRPPVVTKNIKLHLYVIQMKGEKQLVEKLLQTEINLLRSIRDGSALMQHMEDFYYVTLLENVRSSYQVADTANDEYQLTA

SEQ ID NO: 164276 - protein, 168 aa, Zea Mays
MDPLRSAQELFARVALLHGSTVLGAGALHARTSPFLLLLLGNVEGDKFNDFSNQDTFIWHEHIASLFPHVYFASSGYPVDLTDPEYDHKSIFGRTHFVVAFLPNSKAGKKKNLLGDSEEPKEQAPHKVVIFILCHQVLAFRDINAQAPTHILIIPKVKDGLTGLSKER

SEQ ID NO: 164277 - protein, 106 aa, Zea Mays
MLVYSLISTSIYHCGNRNLLRALSSLQCSCRPTYLKIFFLFVNSPPIIIVLLSLIFFLVREGSRYLPPRGAPTSASSSSSASYFSFIIVLRILLQLHHRPRHSRTL

SEQ ID NO: 164278 - protein, 147 aa, Zea Mays
MWRVDIVLYVPSLDSSASLNLKKCITVSGWLPLSSWRRRPRRLPSPPLTPPMTGWTARERWTVPAASRSTTARRWSAATSAVCGCTRGVHAMSAVSTHPSATNAGGPSACLPPPTRPRLLSSSPSCQPTARLRCTAARPRSRSQPTS

SEQ ID NO: 164279 - protein, 430 aa, Zea Mays
MQSDEEVAVKLESVKSRHPQLHYESKLYMLLQGGTGIPHLKWFGVEREYNVMVIDLLGPSMEDLFNYCSRKFSLKTVLMLADQMISRVEYMHTRGFLHRDIKPDNFLMGLGRKANQVFVIDYGLAKKYRDLQTHKHIPYRENKNLTGTARYASVNTHLGVEQSRRDDLESLGYVLMYFLRGSLPWQGLKAGTKKQKYDIISEKKMLTPVEVLCKSHPSEFTAYFHYCRSLRFEDKPDYSYLKRLFRDLFLRKGYQLDYVFDWTIMKYPQFRDKNKFQSSGKTSGLAGPSAERTNRTAAEALFRRTRSGSGHNREHTKHRSLLESLMPSKVTVDSDKIRPSSSSRNGSTSRRAVLSSSKPSSSGDPSDPNRVGGLAPSSSIRPLSAQRAHHSGGTEIKSLSWSKMGRSSHDDAIRNFELLSLCADKRKIRN

SEQ ID NO: 164280 - protein, 255 aa, Zea Mays
MYFLRGSLPWQGLKAGTKKQKYDIISEKKMLTPVEVLCKSHPSEFTAYFHYCRSLRFEDKPDYSYLKRLFRDLFLRKGYQLDYVFDWTIMKYPQFRDKNKFQSSGKTSGLAGPSAERTNRTAAEALFRRTRSGSGHNREHTKHRSLLESLMPSKVTVDSDKIRPSSSSRNGSTSRRAVLSSSKPSSSGDPSDPNRVGGLAPSSSIRPLSAQRAHHSGGTEIKSLSWSKMGRSSHDDAIRNFELLSLCADKRKIRN

SEQ ID NO: 164281 - protein, 254 aa, Zea Mays
MYFLRGSLPWQGLKAGTKKQKYDIISEKKMLTPVEVLCKSHPSEFTAYFHYCRSLRFEDKPDYSYLKRLFRDLFLRKGYQLDYVFDWTIMKYPQFRDKNKFQSSGKTSGLAGPSAERTNRTAAEALFRRTRSGSGHNREHTKHRSLLESLMPSKTVDSDKIRPSSSSRNGSTSRRAVLSSSKPSSSGDPSDPNRVGGLAPSSSIRPLSAQRAHHSGGTEIKSLSWSKMGRSSHDDAIRNFELLSLCADKRKIRN

SEQ ID NO: 164282 - protein, 226 aa, Zea Mays
MASYSHQRGRLVPGLKPLFGCLESTGMFEAAGREVAAFLRVKSNWSKARNGPGQPAGRRDDGQDAGHGGGGQAERLWSSGAGVAQARPRALPGHHRRGLRRRASICKPVVDELEEVNRLTEEGRRFRTFGFKPPPRAVSRLPQTETVGLEPMLTRLHDLLEKGESSIIDVWGQEGIGKTTLLHTPSTMISKRNITIIRLKNITWVLKLGMLERLVITHCDGLLKIV

SEQ ID NO: 164283 - protein, 112 aa, Zea Mays
MTVGWNWSLDEVNSVGSLTLVDLGNGGALDSSWFCLLDLKTCHDIRQEQSTHLMNPTDPIPPQHPRTIRHDRDLKGEASPGISGGTNLQPWIKANKVLQTVYTMLQFHNSLF

SEQ ID NO: 164284 - protein, 95 aa, Zea Mays
MPHRHVVHRSLRSGSCQSCSCGKGRCARASRTGTRRRRSTSARSSPTCCSTWSASPTCAASTSATPPSGRSSRTPSSTRRRPRNKAPDDDEQYHL

SEQ ID NO: 164285 - protein, 256 aa, Zea Mays
MPLPLQEGGQRALRAGDAGGGRPARAGTMGASSFRDRKYATGPRTNRATKTGYWKATGKDREVRDPAARAVVVGMRKTLVFYQGRAPSGVKSCWVMHEFRLDSPRTTTTPPKEDWVLCRVFQKRKVDGSEQDNGVSPSPPVFAGASQSQGVVLPPDQPCVVDAYVVVDQPGSSSVGLAPPQENLGSGLDALLTNGAMWQYTSSVFGHLLPQEATSSPPVMDLGSRGGEGGDYGCSFFYDSSFEDMANIGFRQGWMG

SEQ ID NO: 164286 - protein, 330 aa, Zea Mays
MATKVVVDLRSDTVTKPSEAMRASMAAADVDDDVRGADPTARRFQEEMAALMGKEAALFVPSGTMGNLVSVLAHCDVRGSEVILGDDSHIHLYENGGISTLGGVHPKTVRNNSDGTMDIDSIVAAIRPPGGGLYYPTTRLICLENTHGNSGGKCLSAEYTEKVGEIAKSHGLKLHIDGARIFNASVALGVPVDRLVRAADSVSVCISKGLGAPVGSVIVGSKAFIDKAKILRKTLGGGMRQVGVLCAAAHVAVRDNVGKLADDHRKAKALADGLNKIEQFRVDSASVQTNMVFLDIVDSRISSNKLCQVLGTHNVLASPRSPKRKLLNSY

SEQ ID NO: 164287 - protein, 523 aa, Zea Mays
MRSPALLAAALAAVALLAAGAGFAVAATEEAYVTLLYGDEFVLGARVLGKSLRDTGTRRDMVVLVSDGVSEYSRKLLQADGWIVNRITLLANPNQFRPKRFWGVYTKLKIFNMTSYKKVVYLDADTIVVKSIEDLFKCGKFCGNLKHSERMNSGVMVVEPSETLFNDMIKKMDQLPSYTGGDQGFLNSYYSDFANSRVYEPDSPLTPEPATQRLSTLYNADVGLYMLANKWMVDEKELRIIHYTLGPLKPWDWFTAWLVKPVETWQDIRQKLEESLPGTGGGRNPHDQLVVKILFILPFCLLLFGYYQSCFQTDKELVSIRSLCAFARRARHKYKSEESLPSYSVLSNGHLKLPSYFGAIAVLVCFVSAGFSLAFAFAIIPRQVMPWTGLLLMLEWTFVAFFLLFGSYLRFVYRWGSISANHVGFSNSDSSENHMGPGHQRNMSDCDMDATFYWIGMASIATITVLLPTILGITALFTKLGLMVAGGIVLASFMTYAAEHLAISVFNKGQKYRNASRTRSFCF

SEQ ID NO: 164288 - protein, 411 aa, Zea Mays
MTSYKKVVYLDADTIVVKSIEDLFKCGKFCGNLKHSERMNSGVMVVEPSETLFNDMIKKMDQLPSYTGGDQGFLNSYYSDFANSRVYEPDSPLTPEPATQRLSTLYNADVGLYMLANKWMVDEKELRIIHYTLGPLKPWDWFTAWLVKPVETWQDIRQKLEESLPGTGGGRNPHDQLVVKILFILPFCLLLFGYYQSCFQTDKELVSIRSLCAFARRARHKYKSEESLPSYSVLSNGHLKLPSYFGAIAVLVCFVSAGFSLAFAFAIIPRQVMPWTGLLLMLEWTFVAFFLLFGSYLRFVYRWGSISANHVGFSNSDSSENHMGPGHQRNMSDCDMDATFYWIGMASIATITVLLPTILGITALFTKLGLMVAGGIVLASFMTYAAEHLAISVFNKGQKYRNASRTRSFCF

SEQ ID NO: 164289 - protein, 424 aa, Zea Mays
MTSYKKVVYLDADTIVVKSIEDLFKCGKFCGNLKHSERMNSGVMVVEPSETLFNDMIKKMDQLPSYTGGDQGFLNSYYSDFANSRVYEPDSPLTPEPATQRLSTLYNADVGLYMLANKWMVDEKELRIIHYTLGPLKPWDWFTAWLVKPVETWQDIRQKLEESLPGTGGGRNPHDQLVVKILFILPFCLLLFGYYQSCFQTDKELVSIRSLCAFARRARHKYKSEESLPSYSVVGSSSAFGISSQRLSNGHLKLPSYFGAIAVLVCFVSAGFSLAFAFAIIPRQVMPWTGLLLMLEWTFVAFFLLFGSYLRFVYRWGSISANHVGFSNSDSSENHMGPGHQRNMSDCDMDATFYWIGMASIATITVLLPTILGITALFTKLGLMVAGGIVLASFMTYAAEHLAISVFNKGQKYRNASRTRSFCF

SEQ ID NO: 164290 - protein, 139 aa, Zea Mays
MHQRKAEMARQSDAFIALPGGYGTLEELLEVITWAQLGIHDKPVGLLNVNGYYNSLLSFIDKAVEEEFISPTARHIVVLAPTPKELLDKLEEYSPRHEKLGRAEDEVGDGAADEQLQELRGPAGAQAQRWEADRPGAES

SEQ ID NO: 164291 - protein, 210 aa, Zea Mays
MDAAEHHVEETKEEEAAQVMETTTAHSRFGRICVFCGSSQGKKKSYQDAAVELGEELITGETVGEVKAVAGMHQRKAEMARQSDAFIALPGGYGTLEELLEVITWAQLGIHDKPVGLLNVNGYYNSLLSFIDKAVEEEFISPTARHIVVLAPTPKELLDKLEEYSPRHEKLGRAEDEVGDGAADEQLQELRGPAGAQAQRWEADRPGAES

SEQ ID NO: 164292 - protein, 221 aa, Zea Mays
MMCSESIKLSLLVLLLGVGIASVTDLKLNLLGSILSGLAIATTCVGQILTNTIQKRLKVSSTQLLYQSAPYQAAILFASGPFVDQLLTNRSVFAHKYSATVLGFIVLSCLIAVSVNFSTFLVIGTTSPVTYQVLGHLKTCLVLSFGYTLLHDPFTLRNILGILIAIFGMALYSYFSVREGKKKSANDALPVSQMPDKEVEPLLATKDSNDTEKANGLSHDC

SEQ ID NO: 164293 - protein, 186 aa, Zea Mays
MAAGFQIGVIGSLALSVASSVSIVLCNKALISTLGFPFATTLTSWHLMVTFCTLHVAQRLRFFEPKAIDGQTVILFGLLNGTSIGLLNLSLGFNSIGFYQMTKLAIIPFTVLLETIFLKKRFSESIKLSLLVLLLGVGIASVTDLKLNLLGSILSGLAIATTCVGQIVSYIKFNSNTIINSLKTVR

SEQ ID NO: 164294 - protein, 108 aa, Zea Mays
MGRSSLLARQKRSQTHLGHLASGPAKACPYYALTVTPRRLFPFLFFSGRDRAFPSLSSQIGVTYSIHKALLACTGQPHGLRWWRPAWAGLDDHRLQHQLAGAQADAAP

SEQ ID NO: 164295 - protein, 66 aa, Zea Mays
MAVPITWLMNMDLGEARVRYPVLKSCIRSEAVPTMLIMTPHAANPTSTPPCEAPAHAPMTKIASLP

SEQ ID NO: 164296 - protein, 274 aa, Zea Mays
MRSVVRSLRQLRRFIQHYAEGNSQATRLFGLQNALIMCGSTPRSLSMLRRNGEISRFASPGMELMRSMFSNVAAGSIKDIGRGGPMVEYERRIASGDLVDGDSFQVDTIQQLQGLYEELIENGEDCQLDRYKSSEKSGRSRWLWSRLITQPSSFAPVKGLYLYGGVGTGKTMLMDLFYEQLPSNWRKKRIHFHDFMLNVHSRLQMHKGVSDPLDVVAAEISDEAIILCLDEFMVTDVADAMILNRLFRQLFSKGIISFMKVAYNGTFSCHLLTP

SEQ ID NO: 164297 - protein, 209 aa, Zea Mays
MLMDLFYEQLPSNWRKKRIHFHDFMLNVHSRLQMHKGVSDPLDVVAAEISDEAIILCLDEFMVTDVADAMILNRLFRQLFSKGIILVSTSNRAPDKLYEGGLQRDLFLPFIDTLKERCIVHPIGSAVDYRQLGSAEQGFYFVGKHYSTLLKQKLQSLIGDEEPSPQTVEVIMGRKLQVSLGANGCAYFPFEDLCDRPLGAADYFGLFSK

SEQ ID NO: 164298 - protein, 338 aa, Zea Mays
MLMDLFYEQLPSNWRKKRIHFHDFMLNVHSRLQMHKGVSDPLDVVAAEISDEAIILCLDEFMVTDVADAMILNRLFRQLFSKGIILVSTSNRAPDKLYEGGLQRDLFLPFIDTLKERCIVHPIGSAVDYRQLGSAEQGFYFVGKHYSTLLKQKLQSLIGDEEPSPQTVEVIMGRKLQVSLGANGCAYFPFEDLCDRPLGAADYFGLFKKFHTLALDGVPKFGSSNRTAAYRFVTLIDVMYENKARLLCTAEAGPVELFENIMTLAEAQKVSPRSSRSQKSDDPDLCVDNELGFAKDRTISRLTEINSREYLEDFEMRLGQQQLLPLQALDNGGDVVLA

SEQ ID NO: 164299 - protein, 167 aa, Zea Mays
MGRKLQVSLGANGCAYFPFEDLCDRPLGAADYFGLFKKFHTLALDGVPKFGSSNRTAAYRFVTLIDVMYENKARLLCTAEAGPVELFENIMTLAEAQKVSPRSSRSQKSDDPDLCVDNELGFAKDRTISRLTEINSREYLEDFEMRLGQQQLLPLQALDNGGDVVLA

SEQ ID NO: 164300 - protein, 489 aa, Zea Mays
MAVTVVRDVETGLDASTSDRDGDAGDNPSWFTPKRLLVMFCIINMLNYIDRGAIASNGVNGTRKSCSGGTCTSGSGIQYNPFRLIGVGLLVWTIATAGCGVSFDFWSITICRMFVGVGEASFISLAAPFIDDNAPVAQKTAWLGMFYMCIPTGIALGYVYGGLVGKYLNWRVAFWGESILMVPFVILGFVIKPLDLKGFAHNTGKEYGQMLNPEVQDQINNNGTKNVLPSRIEDLSGKVRQNFSLSSFCHVLMTEIGRFSKDMKQLLQEKVFVIVVLGYISYNFVIGAYSYWGPKAGQEIYNMASADIMFGGITIVCGIVGTLAGGFILDKIGSTIPNAFKLLSGATFVGAIFCFGAFCFKSLYGFIPSFAVGELSVFATQAPVNFVCLHAVKPHLRPLAMAVSTVSIHIFGDVPSSPLVGLLQDKINNWRETALILTSILFAAVVFWFIGIFVPSVDRFNEESEYGLTAAERSSIRPLLGENEPRTSD

SEQ ID NO: 164301 - protein, 309 aa, Zea Mays
MAVTVVRDVETGLDASTSDRDGDAGDNPSWFTPKRLLVMFCIINMLNYIDRGAIASNGVNGTRKSCSGGTCTSGSGIQGDFDLNNLEDGTLSSAFMVGLLVSSLIFACLVKRYNPFRLIGVGLLVWTIATAGCGVSFDFWSITICRMFVGVGEASFISLAAPFIDDNAPVAQKTAWLGMFYMCIPTGIALGYVYGGLVGKYLNWRVAFWGESILMVPFVILGFVIKPLDLKGFAHNTGKEYGQMLNPEVQDQINNNGTKNVLPSRIEDLSGKVISPTTSSLVLIPTGAQRQVKRSTIWRVRILCLVELL

SEQ ID NO: 164302 - protein, 485 aa, Zea Mays
MFCIINMLNYIDRGAIASNGVNGTRKSCSGGTCTSGSGIQGDFDLNNLEDGTLSSAFMVGLLVSSLIFACLVKRYNPFRLIGVGLLVWTIATAGCGVSFDFWSITICRMFVGVGEASFISLAAPFIDDNAPVAQKTAWLGMFYMCIPTGIALGYVYGGLVGKYLNWRVAFWGESILMVPFVILGFVIKPLDLKGFAHNTGKEYGQMLNPEVQDQINNNGTKNVLPSRIEDLSGKVRQNFSLSSFCHVLMTEIGRFSKDMKQLLQEKVFVIVVLGYISYNFVIGAYSYWGPKAGQEIYNMASADIMFGGITIVCGIVGTLAGGFILDKIGSTIPNAFKLLSGATFVGAIFCFGAFCFKSLYGFIPSFAVGELSVFATQAPVNFVCLHAVKPHLRPLAMAVSTVSIHIFGDVPSSPLVGLLQDKINNWRETALILTSILFAAVVFWFIGIFVPSVDRFNEESEYGLTAAERSSIRPLLGENEPRTSD

SEQ ID NO: 164303 - protein, 261 aa, Zea Mays
MGQKMFCLVESRIFQERSSFCHVLMTEIGRFSKDMKQLLQEKVFVIVVLGYISYNFVIGAYSYWGPKAGQEIYNMASADIMFGGITIVCGIVGTLAGGFILDKIGSTIPNAFKLLSGATFVGAIFCFGAFCFKSLYGFIPSFAVGELSVFATQAPVNFVCLHAVKPHLRPLAMAVSTVSIHIFGDVPSSPLVGLLQDKINNWRETALILTSILFAAVVFWFIGIFVPSVDRFNEESEYGLTAAERSSIRPLLGENEPRTSD

SEQ ID NO: 164304 - protein, 345 aa, Zea Mays
MFYMCIPTGIALGYVYGGLVGKYLNWRVAFWGESILMVPFVILGFVIKPLDLKGFAHNTGKEYGQMLNPEVQDQINNNGTKNVLPSRIEDLSGKVRQNFSLSSFCHVLMTEIGRFSKDMKQLLQEKVFVIVVLGYISYNFVIGAYSYWGPKAGQEIYNMASADIMFGGITIVCGIVGTLAGGFILDKIGSTIPNAFKLLSGATFVGAIFCFGAFCFKSLYGFIPSFAVGELSVFATQAPVNFVCLHAVKPHLRPLAMAVSTVSIHIFGDVPSSPLVGLLQDKINNWRETALILTSILFAAVVFWFIGIFVPSVDRFNEESEYGLTAAERSSIRPLLGENEPRTSD

SEQ ID NO: 164305 - protein, 170 aa, Zea Mays
MSEFLTRLLRELTSPRGHSGTRTRDQGRRASFRGRTPCGSRARRRRRGKSTRTPARAGSGGGEGTPLPPPPPPRRNGRAAATATGEGVVSSGRPWHKAEEAAAASTAAVRTVSGRLEVRRGPPGTAAEAEAPAMAGLCSHVVGRKLAQESNSLVISSHRVYSVPVCRLYI

SEQ ID NO: 164306 - protein, 574 aa, Zea Mays
MSAGGGEEVFYESRDGVLSSSCSSASDDDDDDSDHPRRRRRDGAASTAAAAALDVWTSEPAPVQERRRKLLQMLGLAGDPALARLEMGRSVSYDDGPVPVRPAPASPPISRSRSDGGAVPASATKPPLGGRSPGSSEATPEGEEEEEEEADPRCLIRNLDDGSEFVVKEGSELREVGTGRQLTMEEFVDLCVGRSPIVQELMRRRENVASSGSSTPVQRSNSDSSNGATRHRRRRRHSSWLRGIRNVAGSVVASSRDRRSSDDKDTCSEKGGRRSSSATDDSQDSAGAVRHGPVRVKVRQYGKSYKELSGLFMNQEIQAHDGSIWSIRFSPDGRYLASAGEDCVIHVWEVSEFERKREENGACNPFVAMVCNGSPEPTLAVASSVDGSNREKKRRARFLEGRRSVSSDRLMLPEHVFALSEKPIRTFMGHSEDVLDLCWSKSQYLLSSSMDKTVKLWHISSTSCLKTFSHSDYVTCIQFNPVDDRYFISGSLDEKVRIWSIQNREIVDWKDLHEMITAACYTPDGQSALIGSHKGSCHIYDTSDNMLLQKKQIDLQNKKKKSSQKKITGFQFLE

SEQ ID NO: 164307 - protein, 480 aa, Zea Mays
MSAGGGEEVFYESRDGVLSSSCSSASDDDDDDSDHPRRRRRDGAASTAAAAALDVWTSEPAPVQERRRKLLQMLGLAGDPALARLEMGRSVSYDDGPVPVRPAPASPPISRSRSDGGAVPASATKPPLGGRSPGSSEATPEGEEEEEEEADPRCLIRNLDDGSEFVVKEGSELREVGTGRQLTMEEFVDLCVGRSPIVQELMRRRENVASSGSSTPVQRSNSDSSNGATRHRRRRRHSSWLRGIRNVAGSVVASSRDRRSSDDKDTCSEKGGRRSSSATDDSQDSAGAVRHGPVRVKVRQYGKSYKELSGLFMNQEIQAHDGSIWSIRFSPDGRYLASAGEDCVIHVWEVSEFERKREENGACNPFVAMVCNGSPEPTLAVASSVDGSNREKKRRARFLEGRRSVSSDRLMLPEHVFALSEKPIRTFMGHSEDVLDLCWSKSQYLLSSSMDKTVKLWHISSTSCLKTFSHSDYERTNWFP

SEQ ID NO: 164308 - protein, 600 aa, Zea Mays
MSAGGGEEVFYESRDGVLSSSCSSASDDDDDDSDHPRRRRRDGAASTAAAAALDVWTSEPAPVQERRRKLLQMLGLAGDPALARLEMGRSVSYDDGPVPVRPAPASPPISRSRSDGGAVPASATKPPLGGRSPGSSEATPEGEEEEEEEADPRCLIRNLDDGSEFVVKEGSELREVGTGRQLTMEEFVDLCVGRSPIVQELMRRRENVASSGSSTPVQRSNSDSSNGATRHRRRRRHSSWLRGIRNVAGSVVASSRDRRSSDDKDTCSEKGGRRSSSATDDSQDSAGAVRHGPVRVKVRQYGKSYKELSGLFMNQEIQAHDGSIWSIRFSPDGRYLASAGEDCVIHVWEVSEFERKREENGACNPFVAMVCNGSPEPTLAVASSVDGSNREKKRRARFLEGRRSVSSDRLMLPEHVFALSEKPIRTFMGHSEDVLDLCWSKSQYLLSSSMDKTVKLWHISSTSCLKTFSHSDYVTCIQFNPVDDRYFISGSLDEKVRIWSIQNREIVDWKDLHEMITAACYTPDGQSALIGSHKGSCHIYDTSDNMLLQKKQIDLQNKKKKSSQKKITGFQIQESGLLMALILFTSTKVSETVTARFQPV

SEQ ID NO: 164309 - protein, 476 aa, Zea Mays
MSAGGGEEVFYESRDGVLSSSCSSASDDDDDDSDHPRRRRRDGAASTAAAAALDVWTSEPAPVQERRRKLLQMLGLAGDPALARLEMGRSVSYDDGPVPVRPAPASPPISRSRSDGGAVPASATKPPLGGRSPGSSEATPEGEEEEEEEADPRCLIRNLDDGSEFVVKEGSELREVGTGRQLTMEEFVDLCVGRSPIVQELMRRRENVASSGSSTPVQRSNSDSSNGATRHRRRRRHSSWLRGIRNVAGSVVASSRDRRSSDDKDTCSEKGGRRSSSATDDSQDSAGAVRHGPVRVKVRQYGKSYKELSGLFMNQEIQAHDGSIWSIRFSPDGRYLASAGEDCVIHVWEVSEFERKREENGACNPFVAMVCNGSPEPTLAVASSVDGSNREKKRRARFLEGRRSVSSDRLMLPEHVFALSEKPIRTFMGHSEDVLDLCWSKSQYLLSSSMDKTVKLWHISSTSCLKTFSHSDYVDH

SEQ ID NO: 164310 - protein, 113 aa, Zea Mays
MHSTRLEFMLIAPKRQCKNWDFEIGGSFAGRDCTIVDCTRKIVAQMGKKELMGGKDFYHVEVQSGYDQAFIIGVMAILDSIHGERHGTNRRHLKLSKADASRGYLLSGHMIDA

SEQ ID NO: 164311 - protein, 92 aa, Zea Mays
MAATPDRVNADLHRRLAVDTPPPPQVAGGIVQALSTRNRWNGYSMDYQGKNKLVFSLTDPKSCTAQGRDCTIVDCTRKIVAQIKGISHESRK

SEQ ID NO: 164312 - protein, 229 aa, Zea Mays
MKIGVFVKACKEQIDILKNRIQEEEKNGSGKTWLGTRDGSSRLDLIAHQHGVVLILSERLHSVTAQFDRLRSMRFQDAINRAMPRKNQKRPEKKPAEPSKSSLVLKSDVSKIVDQEASTAPMRVQEQLLDDETKALQVELTSLLDAVQETETKMIEMSALNHLMSTHVLQQAQQIQYLYDQAVEATNNVERGNKELSQAIQRNSSSRTFLLLFFFVLTFSVLFLDWYNN

SEQ ID NO: 164313 - protein, 264 aa, Zea Mays
MKLESIRELERFIVKHRRDYVDLHRITEQERDNIEHEIGVFVKACKEQIDILKNRIQEEEKNGSGKTWLGTRDGSSRLDLIAHQHGVVLILSERLHSVTAQFDRLRSMRFQDAINRAMPRKNQKRPEKKPAEPSKSSLVLKSDVSKIVDQEASTAPMRVQEQLLDDETKALQVELTSLLDAVQETETKMIEMSALNHLMSTHVLQQAQQIQYLYDQAVEATNNVERGNKELSQAIQRNSSSRTFLLLFFFVLTFSVLFLDWYNN

SEQ ID NO: 164314 - protein, 227 aa, Zea Mays
MWTCIALPSKRGITLSMKIQEEEKNGSGKTWLGTRDGSSRLDLIAHQHGVVLILSERLHSVTAQFDRLRSMRFQDAINRAMPRKNQKRPEKKPAEPSKSSLVLKSDVSKIVDQEASTAPMRVQEQLLDDETKALQVELTSLLDAVQETETKMIEMSALNHLMSTHVLQQAQQIQYLYDQAVEATNNVERGNKELSQAIQRNSSSRTFLLLFFFVLTFSVLFLDWYNN

SEQ ID NO: 164315 - protein, 340 aa, Zea Mays
MPHQAPGCWVWASRSSRCQPVATRFISPTQPKPEDTVPSAVLPALPHHKQARARRQVASTATSTAYSLPPSSRLRLQVSRGPRFLPEQSRSALRHGDEVGMEYRDKLVLAPMVRVGTLPFRLLAAEYGADITYGEEIIDHKFLKCERVTNESLGTTDFVEKGTDSVVFRTCPQERGRVVFQMGTSNAVRALKAAQIVCRDVSAIDINMGCPKSFSLSGGMGAALLSKPELIHDILTTLRRNLDTTVTCKIRLLNTPKDTVELARRIEKTGVPALAVHGRKIKDRPRDLAKWDEIADVVSALSIPVIANGDVFEYEDFKRIKDATGFCLFILSFHSLLCLI

SEQ ID NO: 164316 - protein, 144 aa, Zea Mays
MPHQAPGCWVWASRSSRCQPVATRFISPTQPKPEDTVPSAVLPALPHHKQARARRQVASTATSTAYSLPPSSRLRLQVSRGPRFLPEQSRSALRHGDEVGMEYRDKLVLAPMVRVGTLPFRLLAAEYGADITYGEEIIDHKFLK

SEQ ID NO: 164317 - protein, 213 aa, Zea Mays
MGCPKSFSLSGGMGAALLSKPELIHDILTTLRRNLDTTVTCKIRLLNTPKDTVELARRIEKTGVPALAVHGRKIKDRPRDLAKWDEIADVVSALSIPVIANGDVFEYEDFKRIKDATGAASVMVARGAMWNASIFCAKGKTPWEDVKREYVRKSILWDNDVKSTKHTLKEMIMHYSCLELPEGKGVIKCDTSEDLARLYGEEDYYNFVVANRK

SEQ ID NO: 164318 - protein, 776 aa, Zea Mays
MGCPRPLLLLLLHAVALAAADEFTYNGFGGSDLLLDGMAAVAPNGLLALSNGTSQMAGHAFHPAPFRLRDGAAAAARSFSAAFVFAIVSNYTVLSDNGMALVVAPSTRLSAFNAGQYLGVLNVTDNGRDGNRVFFVELDTMLNPEFQDMNSNHVGVNVNSMRSLRNHSAGYYDDATGAFTNLSLISRRPMQVWVDYDGAAARLDVAMAPAGVPRPRKPLISTPLNLSAVGADDGTAYVGFSAATGVIYTRHYVLGWSFATGAAAPPLDISRLPALPRFGPKPRSKVLETVLPVATAALVLALVVGAFLFVRRRVRYAEVREDWEAEFGPHRFSYKELYQATKGFKNKMLLGTGGFGRVYKGVLSGSKLEVAVKRVSHDSKQGMKEFIAEVVSIGHLRHRNLVQLLGYCRRKGELLLVYDYMSNGSLDKYLYDDRTARPVLDWGQRFQIVRGVAAGLLYLHEDWEKVVIHRDVKASNVLLDGDMNGRLGDFGLARLYDHGVDPQTTHVVGTMGYLAPELVRTGRATPATDVFAFGVFVLEVACGRRPLGRVAPGVDQTVLLDWVQEHQRRGAALDTLDARLCGKYDADEARLAVKLGLMCAHPSPEARPGMRQVVQYLEGDAPMPDVAPSYVSYSMLALMQNDGFDSFANVSFPSTVTSSVSPVSGGFSSSVSGLSGGRIALVTGGNKGIGLETCRQLASRGVRVVLTARNEARGLEAVERVRCARGDAEVYFHQLDVTDPCSAARLADFVRDQFGRLDILVWQPLLARLSLSLPAA

SEQ ID NO: 164319 - protein, 786 aa, Zea Mays
MGCPRPLLLLLLHAVALAAADEFTYNGFGGSDLLLDGMAAVAPNGLLALSNGTSQMAGHAFHPAPFRLRDGAAAAARSFSAAFVFAIVSNYTVLSDNGMALVVAPSTRLSAFNAGQYLGVLNVTDNGRDGNRVFFVELDTMLNPEFQDMNSNHVGVNVNSMRSLRNHSAGYYDDATGAFTNLSLISRRPMQVWVDYDGAAARLDVAMAPAGVPRPRKPLISTPLNLSAVGADDGTAYVGFSAATGVIYTRHYVLGWSFATGAAAPPLDISRLPALPRFGPKPRSKVLETVLPVATAALVLALVVGAFLFVRRRVRYAEVREDWEAEFGPHRFSYKELYQATKGFKNKMLLGTGGFGRVYKGVLSGSKLEVAVKRVSHDSKQGMKEFIAEVVSIGHLRHRNLVQLLGYCRRKGELLLVYDYMSNGSLDKYLYDDRTARPVLDWGQRFQIVRGVAAGLLYLHEDWEKVVIHRDVKASNVLLDGDMNGRLGDFGLARLYDHGVDPQTTHVVGTMGYLAPELVRTGRATPATDVFAFGVFVLEVACGRRPLGRVAPGVDQTVLLDWVQEHQRRGAALDTLDARLCGKYDADEARLAVKLGLMCAHPSPEARPGMRQVVQYLEGDAPMPDVAPSYVSYSMLALMQNDGFDSFANVSFPSTVTSSVSPVSGGFSSSVSGLSGGRIALVTGGNKGIGLETCRQLASRGVRVVLTARNEARGLEAVERVRCARGDAEVYFHQLDVTDPCSAARLADFVRDQFGRLDILINNAGISGVHRDPVLSAAVKDKVPLI

SEQ ID NO: 164320 - protein, 202 aa, Zea Mays
MEEPGASPCSSARCAQAARLMAAATPSPHSARVAVVTGGNKGIGLEVCRQLASNGITVVLTARDEKRGAAAVEELADAGLSGVVFHQLEVTDAQSIARLAGFLKAWFGKLDILVNNAAIGGVQSLPVENVGEKIKGMDAFQMAELMRKSCRETNDTAKAGVQTNYYGVKNVTEALLPLLLQASSSGGGRVVNVSSDFGLLRE

SEQ ID NO: 164321 - protein, 302 aa, Zea Mays
MEEPGASPCSSARCAQAARLMAAATPSPHSARVAVVTGGNKGIGLEVCRQLASNGITVVLTARDEKRGAAAVEELADAGLSGVVFHQLEVTDAQSIARLAGFLKAWFGKLDILVNNAAIGGVQSLPVENVGEKIKGMDAFQMAELMRKSCRETNDTAKAGVQTNYYGVKNVTEALLPLLLQASSSGGGRVVNVSSDFGLLRYLRNEEVKHELDDIEGLTEERLDELLSTFLRDFEAGALKSRGWPTEFAAYKVAKAALNSYSRVLARRHPELRVNCAHPGYVKTDLPGACYLLPLCSLCCAA

SEQ ID NO: 164322 - protein, 54 aa, Zea Mays
MMERGCSVMLVFGGSEIYQETLVKALAKHFGARLLVLDSLLLPWEESGSSLPSD

SEQ ID NO: 164323 - protein, 310 aa, Zea Mays
MSTDGSRPPHFTCRSFSSCRCRRRRGPRGIDHHHHGEDSVLRQQGHQEGAMGAGGGQAARRLRPGQRTRQLAHSPQARGAEPVRQELPAAVDQLPAPGHQARALHPRGAQFHPSAPRRSRQQVVHDRGTDAGPDGQRDQELLEHAHEEASCPAARHTAQWETARLEAEARLSLLSSSAATTVTSATASSSSSTVAAEHAAPPDIFLRLWNSEVGDSFRGAAAQQGHGPEASAAGAGVPALLPELGGGGDDSSAASTYEAEAAADDGYQAFLDLAMEEFALLHGRLGAFSAFPQADVFAEAHCCLFAPFEE

SEQ ID NO: 164324 - protein, 240 aa, Zea Mays
MQQTRRNMHLDSGAHESQSYYSILAYACWNVVVSVRWSMIAAQMPGRTDNEIKNYWNTHMKKPPAPPPATRPSGRPPGSRPRRASPCSRPRPPRRSPPPPPPPRRPPSPPSMRRHPTSSCASGTPRSGILSAAQPRSRGTVRRRARRALACRRCCLSSAVAVTIPRPRRPTRLRPRRTTATRRSWTWRWRSSRCCTAGSARSRRSRRPTCSLRRTAAFSLRLRSSFARSHCQSSDIRVVD

SEQ ID NO: 164325 - protein, 244 aa, Zea Mays
MEVATAAKAPSSRLARSLAAAAPCYKGVSVFFAAVVAGALVSACWMSVSARLQVTPITPAATPGIARNAATGPEAPAPGRPRSTGVGASTNQTPSAGAASSAPPPREVPDCPAYFRWIHEDLRPWRGTGVTRGAVEGARRFAPRLRVAVVAGRLYVARYGRRRCFQTRAAFTQWGILQLLRRYPGRVPDLDLMFDCEDLPVVGAGERHGAQPQPPPPPLFRYCGSEATLDIAFPDWSFWGRSST

SEQ ID NO: 164326 - protein, 506 aa, Zea Mays
MEVATAAKAPSSRLARSLAAAAPCYKGVSVFFAAVVAGALVSACWMSVSARVTPITPAATPGIARNAATGPEAPAPGRPRSTGVGASTNQTPSAGAASSAPPPREVPDCPAYFRWIHEDLRPWRGTGVTRGAVEGARRFAPRLRVAVVAGRLYVARYGRRRCFQTRAAFTQWGILQLLRRYPGRVPDLDLMFDCEDLPVVGAGERHGAQPQPPPPPLFRYCGSEATLDIAFPDWSFWGWPELNIKPWEALQREINEANAVVNWTDRAPYAYWKGNPKVGAERLLLLRCNASGERDWNARVYAQDWGEEVRHGFRGSDLSKQCTHRYRIYIEGRGWSVSEKYILACESVALMVRPRFHDFFSRGLSPLRHYWPVRGDRGMCRSIKHAVDWGNAHADRAQEMAGNASRFIREELTMDRVYDYMFHLLTEYARLLRYRPAVPRGAAEVTVESMIRGRRGLERQFMVDTLAASASGDGPCRLKPAYSPEELQALRRARADAVRQVEAWEI

SEQ ID NO: 164327 - protein, 242 aa, Zea Mays
MEVATAAKAPSSRLARSLAAAAPCYKGVSVFFAAVVAGALVSACWMSVSARVTPITPAATPGIARNAATGPEAPAPGRPRSTGVGASTNQTPSAGAASSAPPPREVPDCPAYFRWIHEDLRPWRGTGVTRGAVEGARRFAPRLRVAVVAGRLYVARYGRRRCFQTRAAFTQWGILQLLRRYPGRVPDLDLMFDCEDLPVVGAGERHGAQPQPPPPPLFRYCGSEATLDIAFPDWSFWGRSST

SEQ ID NO: 164328 - protein, 230 aa, Zea Mays
MAAGRETDEQLTEYEKQRLSRIRENEARLEALGLRSLAASPLLRNSSPGTAKGKQKKRSVDEDEEYVPSDSGGEEKDESSSESAQDEEVDGEGKSASMSRAKGKKRKLSKSGKSTKNTPTKGSASFAEVVDDDTSLQQAIALSLAEYSEKPVTSLGAETSSTVTRASESTPQKNSKASIQDSAKNKKIKKLGKSRIQLSEDDVVQFFFSFDDKPRGFPQHYISMQHVAGA

SEQ ID NO: 164329 - protein, 212 aa, Zea Mays
MAAGRETDEQLTEYEKQRLSRIRENEARLEALGLRSLAASPLLRNSSPGTAKGKQKKRSVDEDEEYVPSDSGGEEKDESSSESAQDEEVDGEGKSASMSRAKGKKRKLSKSGKSTKNTPTKGSASFAEVVDDDTSLQQAIALSLAEYSEKPVTSLGAETSSTVTRASESTPQKNSKASIQDSAKNKKIKKLINLEDFRSIISQCNMLQEHEK

SEQ ID NO: 164330 - protein, 328 aa, Zea Mays
MVLFGFLYFFFFLRDKHTHTQSRDGRTALVAFCFWYWGFVILTHGVYACFSGRPVKDDGRMDALKCNNSVLPEETTADAAGAFVEKDGFSVEDLLDLEEFAEPDKDVAEREDDDAPPAAAAAAERSKADSQPSSVVKYDLPPLLPPPPEMVDLPSHDVEELEWVSRIMDDSLSELQPQAQPKPAAAVVASSAARPPLAQQRRPFAHDGTYRAVAAAPPQAGPQRTPTICALSTEAMIPVKAKPSDRRCSHCGVQKTPQWRAGPEGAKTLCNACGVRYKSGRLLPEYRPACSPTFVSSIHSNSHRKVLEMRRKKEGGMVATAAPAVASF

SEQ ID NO: 164331 - protein, 377 aa, Zea Mays
MDALKCNNSVLPEETTADAAGAFVEKDGFSVEDLLDLEEFAEPDKDVAEREDDDAPPAAAAAAERSKADSQPSSVVKYDLPPLLPPPPEMVDLPSHDVEELEWVSRIMDDSLSELQPQAQPKPAAAVVASSAARPPLAQQRRPFAHDGTYRAVAAAPPQAGPQRTPTICALSTEAMIPVKAKRSKRSRGPGWSRPGASFLPDSASSSSTTTTSSCSSSGSISPFLRLDSSPFGGGLELGEGLFSYGHLLPRPPSKKSKHGGKGSKHRPKKRGRKPKHLPPPHPSAAASQPGPSDRRCSHCGVQKTPQWRAGPEGAKTLCNACGVRYKSGRLLPEYRPACSPTFVSSIHSNSHRKVLEMRRKKEGGMVATAAPAVASF

SEQ ID NO: 164332 - protein, 516 aa, Zea Mays
MLTYYLALEHLVSIKTQKIPSLAGFQMEVVKTTHAGHAKSLVSTFDFSACPDGIVCVGGDGIVNEVLNGLLIRSDRAEAVSIPVGIIPAGSDNSLVWTVLGVRDPISASLLIVKGGFTALDILAVEWVQSGQIHFGSTVSYYGFVSDVLELSEKYQKKFGPLRYFVAGILKFLCLPSYFYELEYLPSPKEMAVNGKGTDQDKAHLSNVYTDVMHSRSKKEGIPRASSLSSIDSIMTPSRMSLGDVDTSGSTVASTEPSDYVRGLDPKAKRLSLGRSNIVSEPEEVLHPQPHHGSFWPRTRSKARADRNSVGITSTNDTRSSWAAPSMHDKEDISSTISDPGPIWDCEPKWDTGPKWDSELTWEPDHPIELPGPQEDMGIGAPMELVPNLDEKWVVRKGHFLGVLVCNHSCMTVQSLSSQVVAPKAIHDDNSLDLLLVGGKGRWKLLRFFILLQFGRHLSLPYVEYVKVKSVKLKPGANTHNGCGIDGELCRVKGQVLCSLLPEQCRLIGRRCRQSI

SEQ ID NO: 164333 - protein, 377 aa, Zea Mays
MCVATVFTVLELSEKYQKKFGPLRYFVAGILKFLCLPSYFYELEYLPSPKEMAVNGKGTDQDKAHLSNVYTDVMHSRSKKEGIPRASSLSSIDSIMTPSRMSLGDVDTSGSTVASTEPSDYVRGLDPKAKRLSLGRSNIVSEPEEVLHPQPHHGSFWPRTRSKARADRNSVGITSTNDTRSSWAAPSMHDKEDISSTISDPGPIWDCEPKWDTGPKWDSELTWEPDHPIELPGPQEDMGIGAPMELVPNLDEKWVVRKGHFLGVLVCNHSCMTVQSLSSQVVAPKAIHDDNSLDLLLVGGKGRWKLLRFFILLQFGRHLSLPYVEYVKVKSVKLKPGANTHNGCGIDGELCRVKGQVLCSLLPEQCRLIGRRCRQSI

SEQ ID NO: 164334 - protein, 206 aa, Zea Mays
MDRPGHHQHHFFMPPPPQQQQQQLCVPMMDDPSSFLAELMGVGGGGGGGPSSSARGERKRRFTEEQIRSLESTFRARHGHAKLEPREKAELARELGLQPRQVAIWFQNKRARWRSKQLEHDYAVLRAKFDDLHARVESLRRDKLALSTQFVSCGDISLISSYEKVENCVYTSTILRKCARWGSMTLNPWNRCSKWKLAHAEVGGPW

SEQ ID NO: 164335 - protein, 73 aa, Zea Mays
MVDFQSTGDAGNGATITEMGNPVPEPSYEEAVLSVEEARLWSVDTVNCLDFDVWTTIVEETDKNVEVMTNHNN

SEQ ID NO: 164336 - protein, 110 aa, Zea Mays
MSGPQLLRRRTKMLRVMTDEFELDSIKKLSREYAEAKELALAAPITWTEESQTVEVEDAKHLLQSVRGCWATRWTKSSKNGMSRRTEGGVLPEDRIILIPWRPAHGGRQR

SEQ ID NO: 164337 - protein, 148 aa, Zea Mays
MGQLAIWLIFNLQEMQGMAQPSPRWATRFLSHPTRKISMSGPQLLRRRTKMLRVMTDEFELDSIKKLSREYAEAKELALAAPITWTEESQTVEVEDAKHLLQSVRGCWATRWTKSSKNGMSRRTEGGVLPEDRIILIPWRPAHGGRQR

SEQ ID NO: 164338 - protein, 133 aa, Zea Mays
MHMNLVPSHTIDPQAASLVNTSTTLLALLALAVASGLAADGLDHRVDLNGTTGDMVDFQSTGDAGNGATITEMGNPVPEPSYEEAVLSVEEARLWSVDTVNCLDFDVWTTIVEETDKNVERCWIGRPKGRCLM

SEQ ID NO: 164339 - protein, 184 aa, Zea Mays
MSLGFRRRQGLHFRPTTSPSLGLLTGCVSLMDIGFRICASIISSCQLGRRHVYFHSCAPILASSIVSFWCTADFVCVKCIRLSQVGDFRLCSLQPRRRRRRRSVHNGCLLCGRIDATTHYGYLELAFKQMAETADASNALDHRLHYLRLTGNACAARALVWWVWENSNAHAANIHCSNHHGARL

SEQ ID NO: 164340 - protein, 1775 aa, Zea Mays
MLNSVSPSSKVCTDSRKVLLRTMSSPTQQKCENQEETKNTISVNQTDTAYKYPTTKPKISVQIPASYTPNMAPPQFMLPVPGRSMPVAFQQKQPQVPIEFRGPGFQMHSIGSVSSSLPVKMAVPLGNAPHIQPMFVHGAQPHAFHQQSFIHHGQGFGCAPPSNCYLPQFGNMRNVQELSQQYPRSGDEHKRTIKITHPETHEELMLDRHGHSFINVPASGQMPLNNINQLPHSVQTFSPLQKVYYPRPGTYNSAHVYLPNSTDVPLASRQFSSKIQPSMHGFDSTNSNQPFTSIRPPMPISRLDATSGPLTNLHTASEISNFKGMFPSSLPAPVHVELKPPITLPAEMNSESTISNQQNYCKIGLEMSLEPVNLVYEGNNKDSVATCDISCNLIPQPVSTPQTQTRPTSVDHATPVVDPQTILTSSLPLESTTCCKSSVKAKPIEVEQSLVVPTTLSSHTKLESSHATTSVILTATSLVSKIDGTPPTNRNYRYYGNSILGKPPLIYAQEILPSKFVGSNTSPEGLGKAKVNPVLFQEKFPSELNGSVPLRKHDFMIEEHVPNEKGMCSESKTEQVDVTMPSTAFGLEDDTSVAKSGRFHAYHQPVDLHPSIYIGDIQTSDDSQQPSPDLEIITSQSENKQNNSRVDSARDVKNAAPISTSAISQGKTEQERIGLEISNPCSITAALVAQPKKVVLESTKAKSTNGRRKKRKETLPKGSGHKYYDLDSAHSSLNENVESFVTSEDVQCSLATDLKLNFTCEAAKDNSTGGNDCQNRSDLFSWENTTENSADKLKLFGGTHSKSGAEVNKDKSEFDHKRYSRDFLLTFAQSCIELPAGFMIGFDISEAVMSVHVGAPFIDNTQLNSNHARIKDRGSRGSRHMTGKFDDDKWRKQFFSTVSGRNLLSDNFYQPAFSNRDAVQHVGNGSVRSLSQSQPLSQYSGEVLSGAMKVVSRRSMSRGSVDERWQHRTNVQGISSPSQVSMPIMHKAEKKYEIGKGIDEEGSKQRQLKAILNKLTPQNFEKLFAQFKELNIDNVVTLTGVISQIFDKALMEPTFCEMYASFCFRLAGDLPNFVKDDEKITFKRLLLNKCQEEFERGEREQAEANKAEEEGGAKQSEGEREEKRIRARRRMLGNIRLIGELYKKKMLTERIMHECINKLLGEYQNPDEEDLEALCKLMSTIGEMIDHPRTKVHMDFYFGLIHKLSENVKLSSRIRFMLEDVIDLRKNKWRQRRKVEGPKKIEEVRRDAVKHKFGQSTRFGSSPNYNSSVTCISSGLRPGPPDARYQSSNRVLHVPLHQRRAHKSIRLGPQGDLGRGISICGKQHVSNDILPEVTLNSHHGQTSENSRDSSFTGVTSNPTGFKAGNTSWGMVDLSSPVPSTIGQTHTSSTVRKEMCAEAHTFPEEVLQEKSILTIKEFYSAKDEKEVALCMKELNAPGFYPSLVSLWITDSFERKDLERELLAKLLVYLCTAQEHLLSQRQLLQGFQHVLSTLEDAVTDAPKATKFLGQIFARVVLEDGISLTEVGGLLQEWDGREEPAGQHALEDSLASEVLGSMLESIRVERGDNAVDEIRAKSNLQRRGVLIMFPSFSRRASCKKQEDPDSFEWAKKFLLSGALSAFVEPNMETVPIKIPSKCMLPPSQELHEEPQSPLPAEAVNRKKQSILIDTEVRSARLKEKARGFKTCSGIRKNCSCCARTSPPSISHKIIKKLGAEFCKVNPSKLCPNALNNSRSFSSAIQRPRASSSSRAELRATSEDQRDESEDEDDAGSRPSAGM

SEQ ID NO: 164341 - protein, 73 aa, Zea Mays
MKMSILMGVAQMNLGIVLSYFDARYHGNALDIRSWRKSTVLGPKGTSDIVVTSGFDRCSMDALPKTFYLEETS

SEQ ID NO: 164342 - protein, 221 aa, Zea Mays
MELAPILRSSTHPMTAELPAEVPVLHGAGSTASSPTRPSSLPALQLASCARPPCSTGHPPASHPARSSLWRTLCSPSQAAALSSSLGSPSAVPLFCSAASSSLVLRPSFARFLLPWQRILALWPSSSHGARTSARPSSLLSRASARISLCHAARRLLLVPAARVAFFYCAHENSLLTTTCQVSASNSSRACRSSSPSRFLAVVVFLSYPGHVCGCQACLLP

SEQ ID NO: 164343 - protein, 449 aa, Zea Mays
MEKLGLARNMPAAKRKDFGFVTFDTHDNAVACAEGISNSEIGEGDHKAKVRARLSRPLQRPPRMKHGLRGNFRVGHGAPRGGRLQYARAPPPRRPPPRLVRPAGSRLPPIRSHPLKRPIYIRDRRPAMPMLDRARRLPPSGRSYDRRPPAPVYLKKSPRREYGRRDELPPPRSRAMIDYSPRVPVDRRPSLRDDYLPRGSGYSDLGPHSAPHLSDRRAYADDSYGGKFDRPLPVYREGRGHDYDTVSGSKRPYADMDDAPRYQEIGVRQSKARLDYDIGGSSARYGDTYNERPGRPHAGYSSSRSIPGHDSAYGSSRNGMSYGGSASSADAGGMYPPSYSGSYGSRGSDAAIWVAAVVATMEVAVPVHITKVQNQISSVFHQACFTVLKLFAPSLTSITHAHIMVLLLGMRNVSPLCKMREVQNHKTLITQIWHHLVFVEQIWHYRTLV

SEQ ID NO: 164344 - protein, 379 aa, Zea Mays
MEKLGLARNMPAAKRKDFGFVTFDTHDNAVACAEGISNSEIGEGDHKAKVRARLSRPLQRPPRMKHGLRGNFRVGHGAPRGGRLQYARAPPPRRPPPRLVRPAGSRLPPIRSHPLKRPIYIRDRRPAMPMLDRARRLPPSGRSYDRRPPAPVYLKKSPRREYGRRDELPPPRSRAMIDYSPRVPVDRRPSLRDDYLPRGSGYSDLGPHSAPHLSDRRAYADDSYGGKFDRPLPVYREGRGHDYDTVSGSKRPYADMDDAPRYQEIGVRQSKARLDYDIGGSSARYGDTYNERPGRPHAGYSSSRSIPGHDSAYGSSRNGMSYGGSASSADAGGMYPPSYSGSYGSRGSDAAIWVAAVVATMEVAVPVHITKIWHYRTLV

SEQ ID NO: 164345 - protein, 379 aa, Zea Mays
MEKLGLARNMPAAKRKDFGFVTFDTHDNAVACAEGISNSEIGEGDHKAKVRARLSRPLQRPPRMKHGLRGNFRVGHGAPRGGRLQYARAPPPRRPPPRLVRPAGSRLPPIRSHPLKRPIYIRDRRPAMPMLDRARRLPPSGRSYDRRPPVYLKKSPRREYGRRDELPPPRSRAMIDYSPRVPVDRRPSLRDDYLPRGSGYSDLGPHSAPHLSDRRAYADDSYGGKFDRPLPVYREGRGHDYDTVSGSKRPYADMDDAPRYQEIGVRQSKARLDYDIGGSSARYGDTYNERPGRPHAGYSSSRSIPGHDSAYGSSRNGMSYGGSASSADAGGMYPPSYSGSYGSRGSDVGGSSYSSLYSGRNLGSSSGGYYGGSGSGSYY

SEQ ID NO: 164346 - protein, 215 aa, Zea Mays
MNALAATTRNFRRASKLLGLDSKLEQSLLIPFREIKVECTIPKDDGSLATFVGFRVQHDNARGPMKGGIRYHNEVDPDEVNALAQLMTWKTAVAAVPYGGAKGGIGCSPGELSRSELERLTRVFTQKIHDLIGTHTDVPAPDMGTNAQTMAWMLDEYSKFHGHSPAVVTGKPIDLGGSLGRDAATGRGVMVLAMLVHGLLDLFTRKVVRLLQLGM

SEQ ID NO: 164347 - protein, 234 aa, Zea Mays
MNALAATTRNFRRASKLLGLDSKLEQSLLIPFREIKVECTIPKDDGSLATFVGFRVQHDNARGPMKGGIRYHNEVDPDEVNALAQLMTWKTAVAAVPYGGAKGGIGCSPGELSRSELERLTRVFTQKIHDLIGTHTDVPAPDMGTNAQTMAWMLDEYSKFHGHSPAVVTGKPIDLGGSLGRDAATGRGVMYATEALLAEYGKCISGSTFVIQGFGNVGSWAARLIHEKGMKVMR

SEQ ID NO: 164348 - protein, 296 aa, Zea Mays
MNALAATTRNFRRASKLLGLDSKLEQSLLIPFREIKVECTIPKDDGSLATFVGFRVQHDNARGPMKGGIRYHNEVDPDEVNALAQLMTWKTAVAAVPYGGAKGGIGCSPGELSRSELERLTRVFTQKIHDLIGTHTDVPAPDMGTNAQTMAWMLDEYSKFHGHSPAVVTGKPIDLGGSLGRDAATGRGVMYATEALLAEYGKCISGSTFVIQGFGNVGSWAARLIHEKGGKIIAIGDVTGSIRNTAGIDIPALVKHRNEGHAMKDFDGAEVLDSTELLVHDCDVLVPCALGGVLNK

SEQ ID NO: 164349 - protein, 73 aa, Zea Mays
MARPILLRITQTTAHLHRWRFVVLLATGTWVSRCPVLKDNQANSVKECQGLSSSQVQTPWVLSPAANVHTKRQ

SEQ ID NO: 164350 - protein, 156 aa, Zea Mays
MWGLGVPEDVGFCDVYGLDDELLAMVPQPVLAVLLLYPQDRSKESQASATSSVETKEPSKNVYFTKQTVGNACGTVGIIHALGNATSRIKLGEGSYFDRFYKRTADMDPIQRAAFLEEDEEMENAHSIAATAGDTEVYNMCTVLSSLFKICGCYSF

SEQ ID NO: 164351 - protein, 129 aa, Zea Mays
MTSCSPWCPSRCSRSYFSTPRTGARSPKLQLPRRWRPRSPARTYISQSKLLGMPVAQLVLFMHWGMLLPESSEGSYFDRFYKRTADMDPIQRAAFLEEDEEMENAHSIAATAGDTECFSESKWFPVTSI

SEQ ID NO: 164352 - protein, 380 aa, Zea Mays
MGRDGEQTRRRSRKRSRDASPSSSDSDSFDSPSSPSSSPERRSRSSKRNRSSSSHRHSRKKSDRSRRSRDEDRRRRRRRGQERKRHGGDGGRSSDSQSSEEDRAEEAREIVRDILIELPAIAEELRQLLQIIDSGESIDISGISDKLLVKRLKKLFRSLRLKESASGAYLLPSKNVPTLDIVGSLLLASSKLADNKSGKPVSPNREALQQANFDVQNKDKDYIVSEEPKIVDVEEEPPKRRIIGPAMPSRELLAAAAEMTEALRCRDAELEANDDLLIGPPPPAVVAEAASANEAERFEEVTRILAADTNSPYEVLGVNWKMSTDNMKKRYWKLSLLVHPDKCPHPSAQEAFVKLNNAFKDLQDPDKQNSMFSPSIYHMA

SEQ ID NO: 164353 - protein, 446 aa, Zea Mays
MGRDGEQTRRRSRKRSRDASPSSSDSDSFDSPSSPSSSPERRSRSSKRNRSSSSHRHSRKKSDRSRRSRDEDRRRRRRRGQERKRHGGDGGRSSDSQSSEEDRAEEAREIVRDILIELPAIAEELRQLLQIIDSGESIDISGISDKLLVKRLKKLFRSLRLKESASGAYLLPSKNVPTLDIVGSLLLASSKLADNKSGKPVSPNREALQQANFDVQNKDKDYIVSEEPKIVDVEEEPPKRRIIGPAMPSRELLAAAAEMTEALRCRDAELEANDDLLIGPPPPAVVAEAASANEAERFEEVTRILAADTNSPYEVLGVNWKMSTDNMKKRYWKLSLLVHPDKCPHPSAQEAFVKLNNAFKDLQDPDKRGAIDEKIKKKEEMEQFEVELKAMREAAEWRRIQGVSLAGDDELLAGPKESQRPTRDEWMTTLPPERKECQCIQLHHLV

SEQ ID NO: 164354 - protein, 580 aa, Zea Mays
MGRDGEQTRRRSRKRSRDASPSSSDSDSFDSPSSPSSSPERRSRSSKRNRSSSSHRHSRKKSDRSRRSRDEDRRRRRRRGQERKRHGGDGGRSSDSQSSEEDRAEEAREIVRDILIELPAIAEELRQLLQIIDSGESIDISGISDKLLVKRLKKLFRSLRLKESASGAYLLPSKNVPTLDIVGSLLLASSKLADNKSGKPVSPNREALQQANFDVQNKDKDYIVSEEPKIVDVEEEPPKRRIIGPAMPSRELLAAAAEMTEALRDAELEANDDLLIGPPPPAVVAEAASANEAERFEEVTRILAADTNSPYEVLGVNWKMSTDNMKKRYWKLSLLVHPDKCPHPSAQEAFVKLNNAFKDLQDPDKRGAIDEKIKKKEEMEQFEVELKAMREAAEWRRIQGVSLAGDDELLAGPKESQRPTRDEWMTTLPPERKAGVPMHSTTSFSMNGKEGRGDTSVWTDTPLDRAQKAQQSYLEAYNKTKAIAEGDDVKSKNPDASIVDKYNTSKRSVSLVQKHRESKKEKKKQKQQEKEEWEGSHPWKPWDREKDLSAGRQNVALDAENMSQGLSSRFASGAVQRNFL

SEQ ID NO: 164355 - protein, 462 aa, Zea Mays
MERGRGGSGGRGGGRTFQRNNAGEEWPNLVGVVLSWSLADVMNKDLFKDKVKQIPSTFPNLKSYLECYTSPLLEELRAEMSSSLESLSTVPSVRISRIEEKRDKHEIYLASDCQVAKPHNRPECYTPSVGDVILLSDVKPGHISDTTRNGRPYRVAFVTDADGGDEYDDSPPAKYGIVASGKIDAADDERQDGKSTSLFAACLLNIVTYIRIWRCLDYEALRTNRGLIEKMVNYQPISSTSENSTEDAGPTDSVEIWTKLSAMELNTSQNDAVLNCISKMHSKSSTFTLIWGPPGTGKTKTISVLLWLMREMKHGTLVCAPTNLAIKQVASRFLKLVQEHSGDTRCLGDVLLIGNKERMCVDGDLKQIYLYDRVRRLFGCFAPLTGWKHHLSSLSDFLENGYSQYLQHLQDSQEGDTPSFFSYARKRFAVIYMELRRCFNDLLLHVPKSSILEVNYNTSLKG

SEQ ID NO: 164356 - protein, 919 aa, Zea Mays
MERGRGGSGGRGGGRTFQRNNAGEEWPNLVGVVLSWSLADVMNKDLFKDKVKQIPSTFPNLKSYLECYTSPLLEELRAEMSSSLESLSTVPSVRISRIEEKRDKHEIYLASDCQVAKPHNRPECYTPSVGDVILLSDVKPGHISDTTRNGRPYRVAFVTDADGGDEYDDSPPAKYGIVASGKIDAADDERQDENSTEDAGPTDSVEIWTKLSAMELNTSQNDAVLNCISKMHSKSSTFTLIWGPPGTGKTKTISVLLWLMREMKHGTLVCAPTNLAIKQVASRFLKLVQEHSGDTRCLGDVLLIGNKERMCVDGDLKQIYLYDRVRRLFGCFAPLTGWKHHLSSLSDFLENGYSQYLQHLQDSQEGDTPSFFSYARKRFAVIYMELRRCFNDLLLHVPKSSILEVNYNSILLLLEMLEEFNHMIQCRYFGDEIRKVFLYSNDEPDQTNSSVVTLGKMRIKCLEELSTLLSCLKLPLTSSKPTIRDFCIKSASIVFCTVSSSTKITANKKVEFLVVDEAAQLKECETLIPLRLWTLKHAVLIGDECQLPATVKSKVCTDALFGRSLFERLSSLGHEKHLLNMQYRMHPSISIFPNTSFYEGRISDATNVMEKEHRRMYLPGSMFGPYSFINIEDGREERDELGHSKRNFVEAAVIEEILYRLRRACFKTKRKVTVGVICPYNAQVVAIQGKIEKMRFDPLQVKTNSVDGFQGGEEDIIILSTVRSNSVGKVGFLSNAQRANVCLTRARHCLWILGNATTLASSGSIWSDLVRDAKDRRCFFNASSDYVISHVIAKQRRDLDRVNVEKSIHISSSKNCRVWVETRSPNDLNEQGTSSTSVSHYAGIPSSDIVVVSEFQRPSNKNEDVEDITVIPNKENDKDINAMPVIPDKGNVVDGNHILAIPCAMLSNLARWCIRSFRS

SEQ ID NO: 164357 - protein, 798 aa, Zea Mays
MERGRGGSGGRGGGRTFQRNNAGEEWPNLVGVVLSWSLADVMNKDLFKDKVKQIPSTFPNLKSYLECYTSPLLEELRAEMSSSLESLSTVPSVRISRIEEKRDKHEIYLASDCQVAKPHNRPECYTPSVGDVILLSDVKPGHISDTTRNGRPYRVAFVTDADGGDEYDDSPPAKYGIVASGKIDAADDERQDGKSTSLFAACLLNIVTYIRIWRCLDYEALRTNRGLIEKMVNYQPISSTSENSTEDAGPTDSVEIWTKLSAMELNTSQNDAVLNCISKMHSKSSTFTLIWGPPGTGKTKTISVLLWLMREMKHGTLVCAPTNLAIKQVASRFLKLVQEHSGDTRCLGDVLLIGNKERMCVDGDLKQIYLYDRVRRLFGCFAPLTGWKHHLSSLSDFLENGYSQYLQHLQDSQEGDTPSFFSYARKRFAVIYMELRRCFNDLLLHVPKSSILEVNYNSILLLLEMLEEFNHMIQCRYFGDEIRKVFLYSNDEPDQTNSSVVTLGKMRIKCLEELSTLLSCLKLPLTSSKPTIRDFCIKSASIVFCTVSSSTKITANKKVEFLVVDEAAQLKECETLIPLRLWTLKHAVLIGDECQLPATVKSKVCTDALFGRSLFERLSSLGHEKHLLNMQYRMHPSISIFPNTSFYEGRISDATNVMEKEHRRMYLPGSMFGPYSFINIEDGREERDELGHSKRNFVEAAVIEEILYRLRRACFKTKRKVTVGVICPYNAQVVAIQGKIEKMRFDPLQVKTNSVDGFQGGEEDIIILSTVRSNSVGKTLPLDPRKCNNSSKQWIYLV

SEQ ID NO: 164358 - protein, 463 aa, Zea Mays
MRIKCLEELSTLLSCLKLPLTSSKPTIRDFCIKSASIVFCTVSSSTKITANKKVEFLVVDEAAQLKECETLIPLRLWTLKHAVLIGDECQLPATVKSKVCTDALFGRSLFERLSSLGHEKHLLNMQYRMHPSISIFPNTSFYEGRISDATNVMEKEHRRMYLPGSMFGPYSFINIEDGREERDELGHSKRNFVEAAVIEEILYRLRRACFKTKRKVTVGVICPYNAQVVAIQGKIEKMRFDPLQVKTNSVDGFQGGEEDIIILSTVRSNSVGKVGFLSNAQRANVCLTRARHCLWILGNATTLASSGSIWSDLVRDAKDRRCFFNASSDYVISHVIAKQRRDLDRVNVEKSIHISSSKNCRVWVETRSPNDLNEQGTSSTSVSHYAGIPSSDIVVVSEFQRPSNKNEDVEDITVIPNKENDKDINAMPVIPDKGNVVDGNHILAIPCAMLSNLARWCIRSFRS

SEQ ID NO: 164359 - protein, 75 aa, Zea Mays
MAPPLLLFFLLLPLLTALADGHQHLSSYGSSALSDWRPAKASYYAADPEDAIVLSASAKVVSGSPSTVGTSSSQS

SEQ ID NO: 164360 - protein, 105 aa, Zea Mays
MAGVKCLREGGVRFSVNGRHFFFTVLISNVGGAGDVRSVKIKGTELGWLPMGRNWGQVWHINCDMRGQPLSFELSSSDSKTLTSFNVVPKDWEFGKTYTGKQFLL

SEQ ID NO: 164361 - protein, 349 aa, Zea Mays
MGNACGGALRSKYQHSFKHAASSQRRASSEYSASAVADDSPRKPTQPPATTDAHAPPPPPATAAAAMRRGGAGAPPDLGSVLGHPTPNLRDLYALGRKLGQGQFGTTFLCTELATGVDYACKSISKRKLITREDVDDVRREIQIMHHLSGHTNVVAIKGAYEDQLYVHIVMELCAGGELFDRIIQRGHYSERKAAELTRIIVGVVEACHSLGVMHRDLKPENFLLVNKDDDLSLKAIDFGLSVFFKPGQVFTDVVGSPYYVAPEVLLKNYGPAADVWTAGVILYILLSGVPPFWAETQQGIFDAVLKGVIDFDSDPWPVISDSAKDLIRRMLNPRSAKRLTAHEVLCNS

SEQ ID NO: 164362 - protein, 82 aa, Zea Mays
MASISKFSTRGLSGSVSYSPSSAFDCRLFQIHPPLTKLVRRRPRTSPCLVCSLAYYGLMLASSAALPDGLAALECEEREFLC

SEQ ID NO: 164363 - protein, 111 aa, Zea Mays
MDIMQTSDSSHHGIVENSPYRIPYDRHAEGGQLGASWYFSRKEIEENSLSRRDGIDLKKESYLRKSYCTFLQDLGMRLKVPQVTIATAIVFCHRFFLRQSHAKNDRRGTGV

SEQ ID NO: 164364 - protein, 114 aa, Zea Mays
MDIMQTSDSSHHGIVENSPYRIPYDRHAEGGQLGASWYFSRKEIEENSLSRRDGIDLKKESYLRKSYCTFLQDLGMRLKVPQVTIATAIVFCHRFFLRQSHAKNDRRARRGWIH

SEQ ID NO: 164365 - protein, 60 aa, Zea Mays
MAARSSSMVAEDDYETDQKKQAAADVLFHYSQFVMVCIGEDVRPTDLRLHLMKFQECPLL

SEQ ID NO: 164366 - protein, 68 aa, Zea Mays
MGDRAIRRLRCLCCRSVLLSPPGRHSSPAFPSLPSSTTWYALRLISPSCCGAVRANLNVVRRANRARK

SEQ ID NO: 164367 - protein, 98 aa, Zea Mays
MTYKKVEKKLFLALFTTRILLFAECHILCRVPRKKHSVKENTRRINSLPSVLFLTPGKEFLCRVSFLCRVSQIQHSTKSSLPSVFSPTLGKDNLKITF

SEQ ID NO: 164368 - protein, 133 aa, Zea Mays
MSEAVSDFYRVLGSGDVPSGSSPQSRLRALGDHARGRVREALHHGVRRAFAVLASHYVVDLERVSEGYCLPDEDDAALAEVQRLDAVAAGPSAVLATTFEAEILPPATSPEAEMDPTDGRDGAEGAAPSQGGA

SEQ ID NO: 164369 - protein, 110 aa, Zea Mays
MSTIPTDPPLHEQVRATREYTTLFRRSVARRVRATLAISPRPVRDCLFMNGIAGFKLTLSHSQGMWLDKIVLDQQAYIRIQSLIDPGGASSVPSPSLDLSISILRIVSVP

SEQ ID NO: 164370 - protein, 100 aa, Zea Mays
MLLDIAKKPQLSTRRWSILIVLVQLTLEKAPLQMRRLRVKRLLTVMMHFWLILEKALQKTSTAILNCLAVLTISLELGLGKRSKMVLTTAHILLVATDPV

SEQ ID NO: 164371 - protein, 64 aa, Zea Mays
MGIGQVCVCVTRGGHGGGGGGGGGLVPGGRGSIFQTLARAAPARATGTDAAQGTAGISTPHGHA

SEQ ID NO: 164372 - protein, 104 aa, Zea Mays
MPRGQCSSVSTRENPKVDRATDSNDDSRKNRRGAYLLLGLLIVFIHGSWSVYHIQFGSLPLPLDAEQAGKRGFSEASALKHVKYLTGLGPHPVGSDPLDHAIQI

SEQ ID NO: 164373 - protein, 176 aa, Zea Mays
MRGYVWLDRKVRESNMSTARTGLPDIRISSDTSAFPYTHRRGHRSAIRISRIVSETFRLDLPGVRWFVMGDDDTVFFPDNLLTVLNKFDHRQHYYIGSLSESHLQNIYFSYGMAYGGAGRAAHQAPGVPPVRRVRRPPRPPRVPPGRADCDAAPPRRREAAVPGGEVARRSGAAAV

SEQ ID NO: 164374 - protein, 106 aa, Zea Mays
MMHCNLERTDNWATHILAKWPALLLAWIRIRSQLLHVRKRQGKLKENRNCNANTCSFRLQKNINMSPRRNCCRVVSSPKDGKNGEKTMTIDVGVCREGEFSQVAGA

SEQ ID NO: 164375 - protein, 90 aa, Zea Mays
MSWIILLQLFSNHLTMHTIAAERCKKMIGKKTAKSEINTAPRRGEETRRLIGEKRSEGGRETAALAVRTQQRRNARASKIHFASAYKDVE

SEQ ID NO: 164376 - protein, 64 aa, Zea Mays
MIGKKTAKSEINTAPRRGEETRRLIGEKRSEGGRETAALAVRTQQRRNARASKIHFASAYKDVE

SEQ ID NO: 164377 - protein, 322 aa, Zea Mays
MAVGATAAKLHLSSAAAAARRPSLLHLAAVAVLCSLSYLFGIWHHGGFSAGPAAGGATSSSSVSIATAVSCASPALTTAPSSPPAGPLDFAAHHTAEGMESEAALRQRSYEACPAKYSEYTPCEDVERSLRFPRDRLVYRERHCPADGERLRCLVPAPRGYRNPFPWPASRDVAWFANVPHKELSVEKAVQNWIRVDGDRFRFPGGGTMFPRGAGAYIDDIAKLIPLHDGSIRTALDTGCGVASWGAYLLSRDILAMSFAPRDSHEAQVQFALERGVRATLLSGRSLLTTFIARPSTKLASPYPSALTKTQMLPGMTRWRLV

SEQ ID NO: 164378 - protein, 304 aa, Zea Mays
MGWAPRWLRGLLGGGGRKAADTRPVKEKKRWGFGKSFREKPPAPVPARPPTPTPPSHPAATPRRGYAAADEAGDEQSKRAIAVAAATAAVAEAAVAAAQAAAAARRRRRKPPPPPPVAVLDDDGFRAEQPELRDHGGVAVQGLDDRAAVGAEPGVGGHGRGGPEPAARARARGRGRALRQPPVLLGHVVAARELEAGPVHADGQERVLAQPLRRLLRLPELHGQHGVVPRQGAVAERAQAEAAVREVQLPTQGVGGAEVGGGGGLLPARQVHQQGVPGLWQAGSAWLAGQVLILILILPNSRQG

SEQ ID NO: 164379 - protein, 849 aa, Zea Mays
MANAACVGGSFLGVEKGKPATVSNLGAPAVLLLVLACLPLVLPSSDPKQGMSFGDLDGGGSAAGLQYPYGAFASSPVLSLTVVDARRRRGGGGNAKDASEAENEGQSMMSGHLDVVLSGGGDGEDGEAANQRKPKRKKPYNRHTPRQIEQLEAMFKEFHHPDEKQRAQLSRQLGLDPRQVKFWFQNRRTHLKCLTWLSLLHGPELGKNQLERQENARLKHENDKLRVENLSIREAIRDLVCSCCGGPAVLGELSPEEHQLRLENARLRDELARVCTVTSKFIGKPMSHMELLLAKEPHPMTGSSLELAVAVGVGSSVPSSKMPVSTISELAGSTSSSTGTVTTPMVTASLPMVSIDKSKFAQLAVSAMNELVKMARMNEPLWIPTIPSPGSPIMETLNFKEYLKAFSPCVGVKPTGFVSEASRESGIVTIDSSAALMEVFMDERRWSDIFYCIVAKASIVEEILPGVAGSRNGALLLMQAELQMLSPLVPIREVTFLRFCKQLAEGAWAVVDVSIDGLQTDQCLATNTKCRRLPSGCVLQDTPNGCKVTWVEHAEYPEASVHQLYQPLMRSGLALGAGRWLATLQRQCECLAILMSSLAAPEHDSAAVSLEGKWSLLKLARRMMENFCAGMGASSSREWSMLDGFTGSTGKDVRVMVQNSVDEPGVPPGVVLSVATAVWLPVTPERLFNFLRDEELRAEWDILSNGGPMQQVLRISKGQLDGNSVALLRADHTDSHLNSILILQETCTDRSGAMVVYTPVDFPAMQLVLGGGDSKNVALLPSGFVILPAGSTASGLGHKARGSLLTVAFQILVNSQPTAKLTVESVDTVYSLISCTIEKIKAALHCDVC

SEQ ID NO: 164380 - protein, 231 aa, Zea Mays
MATPRSPSPSAAARLDSAPLLGGASGGGSRRRDGALRRPSLRGAARLLRRGGRRAMREPSVLVREAAAEHLEERQADWAYSRPVVALDLLWNLAFITVAAVVLVLSRDEDSPMPLRTWVAGYALQCVVHMICVAIEYRMRHGQRGSAVAGAAPADVERGSDASSSSSDEDDRELDLHGRRTDYASIAKHLESANTMFSFIWWIIGFYWISAGGEEVIQDAPQLYCNSLCSI

SEQ ID NO: 164381 - protein, 381 aa, Zea Mays
MQTIAVLPLQLHGLVQFGSTRKVPRSSVFLNQVRDIFDRMKNASSDGPMEYTQNNSLACAVSGKVKDCLQTESDKFLCKSVSFGSNPCASKFQENRLSPYHALMHEQSLIPDPGESVRLLSQEESFIVQGDSSQFKDTADFTGQGNSTFPELPNRSPEEATAETLENNMKDCSGNNSLLETMMLDLSTNSFVQDWWDNSVLLAENLPNSSEKDPEPAMELANRHSLPTGERGSPFIPVIEQLLGDVAHPPTPTGHSSLEAEATALAGRVSDYQLPQFAFRDCLTVDNAQIPALACSNYTCRTRSAQNGSSEVPSANVSVDDTCSLNTANSNGSQSSNPEGTKVAKRRARAGESTRPRPKDRQLIQDRVKELREIVPNGAKH

SEQ ID NO: 164382 - protein, 808 aa, Zea Mays
MEAALGALCRAGGWSYAAVWRFHPQDPRLLTLGDCYCEDEAKAMVQKMLNLVEVVGEGILGQALVSGECQWIYDDTCHALNQISHADNGDLHQGYTWWQHQFLSGMKTIAVLPLQLHGLVQFGSTRKVPRSSVFLNQVRDIFDRMKNASSDGPMEYTQNNSLACGQQPILTSSRPVNDMLVHNKVNPLQTEKLLEDIERTESIRSSICSPSNSQRSLNDLTSHGTGNSSMDTNILAMPVNSKSIYDLKRFDNVTELFHRSSNDRIGFQVSSSKEPDSTIAGVMSEYKSLNNIHMTENDSCGQNIGYTPYLYTTTNSSNSGLDELSYSGVALSSSFTAVSGKVKDCLQTESDKFLCKSVSFGSNPCASKFQENRLSPYHALMHEQSLIPDPGESVRLLSQEESFIVQGDSSQFKDTADFTGQGNSTFPELPNRSPEEATAETLENNMKDCSGNNSLLETMMLDLSTNSFVQDWWDNSVLLAENLPNSSEKDPEPAMELANRHSLPTGERGSPFIPVIEQLLGDVAHPPTPTGHSSLEAEATALAGRVSDYQLPQFAFRDCLTVDNAQIPALACSNYTCRTRSAQNGSSEVPSANVSVDDTCSLNTANSNGSQSSNPEGTKVAKRRARAGESTRPRPKDRQLIQDRVKELREIVPNGAKCSIDALLERTIKHMLFLQSVNKYAEKIKQADEPKIIDKGSGVILKDNPVAGTNGGATWAYEVAGQTMVCPIIIEDLSPPGQMLVEMLCEEQGLFLEIADNIRGIGLTVLKGRMELCDGKIWSRFLVERGHKDGYISVACSVTGTEQPCSIY

SEQ ID NO: 164383 - protein, 801 aa, Zea Mays
MVQKMLNLVEVVGEGILGQALVSGECQWIYDDTCHALNQISHADNGDLHQGYTWWQHQFLSGMKTIAVLPLQLHGLVQFGSTRKVPRSSVFLNQVRDIFDRMKNASSDGPMEYTQNNSLACGQQPILTSSRPVNDMLVHNKVNPLQTEKLLEDIERTESIRSSICSPSNSQRSLNDLTSHGTGNSSMDTNILAMPVNSKSIYDLKRFDNVTELFHRSSNDRIGFQVSSSKEPDSTIAGVMSEYKSLNNIHMTENDSCGQNIGYTPYLYTTTNSSNSGLDELSYSGVALSSSFTAVSGKVKDCLQTESDKFLCKSVSFGSNPCASKFQENRLSPYHALMHEQSLIPDPGESVRLLSQEESFIVQGDSSQFKDTADFTGQGNSTFPELPNRSPEEATAETLENNMKDCSGNNSLLETMMLDLSTNSFVQDWWDNSVLLAENLPNSSEKDPEPAMELANRHSLPTGERGSPFIPVIEQLLGDVAHPPTPTGHSSLEAEATALAGRVSDYQLPQFAFRDCLTVDNAQIPALACSNYTCRTRSAQNGSSEVPSANVSVDDTCSLNTANSNGSQSSNPEGTKVAKRRARAGESTRPRPKDRQLIQDRVKELREIVPNGAKCSIDALLERTIKHMLFLQSVNKYAEKIKQADEPKIIDKGSGVILKDNPVAGTNGGATWAYEVAGQTMVCPIIIEDLSPPGQMLVEMLCEEQGLFLEIADNIRGIGLTVLKGRMELCDGKIWSRFLVEANREVTRMDIFLSLVQLLEQNSLVRSTDQMAKVMNNGVPSFANHQRSPLLVPVGIPERLQ

SEQ ID NO: 164384 - protein, 553 aa, Zea Mays
MQTIAVLPLQLHGLVQFGSTRKVPRSSVFLNQVRDIFDRMKNASSDGPMEYTQNNSLACGQQPILTSSRPVNDMLVHNKVNPLQTEKLLEDIERTESIRSSICSPSNSQRSLNDLTSHGTGNSSMDTNILAMPVNSKSIYDLKRFDNVTELFHRSSNDRIGFQVSSSKEPDSTIAGVMSEYKSLNNIHMTENDSCGQNIGYTPYLYTTTNSSNSGLDELSYSGVALSSSFTAVSGKVKDCLQTESDKFLCKSVSFGSNPCASKFQENRLSPYHALMHEQSLIPDPGESVRLLSQEESFIVQGDSSQFKDTADFTGQGNSTFPELPNRSPEEATAETLENNMKDCSGNNSLLETMMLDLSTNSFVQDWWDNSVLLAENLPNSSEKDPEPAMELANRHSLPTGERGSPFIPVIEQLLGDVAHPPTPTGHSSLEAEATALAGRVSDYQLPQFAFRDCLTVDNAQIPALACSNYTCRTRSAQNGSSEVPSANVSVDDTCSLNTANSNGSQSSNPEGTKVAKRRARAGESTRPRPKDRQLIQDRVKELREIVPNGAKH

SEQ ID NO: 164385 - protein, 765 aa, Zea Mays
MVQKMLNLVEVVGEGILGQALVSGECQWIYDDTCHALNQISHADNGDLHQGYTWWQHQFLSGMKTIAVLPLQLHGLVQFGSTRKVPRSSVFLNQVRDIFDRMKNASSDGPMEYTQNNSLACGQQPILTSSRPVNDMLVHNKVNPLQTEKLLEDIERTESIRSSICSPSNSQRSLNDLTSHGTGNSSMDTNILAMPVNSKSIYDLKRFDNVTELFHRSSNDRIGFQVSSSKEPDSTIAGVMSEYKSLNNIHMTENDSCGQNIGYTPYLYTTTNSSNSGLDELSYSGVALSSSFTAVSGKVKDCLQTESDKFLCKSVSFGSNPCASKFQENRLSPYHALMHEQSLIPDPGESVRLLSQEESFIVQGDSSQFKDTADFTGQGNSTFPELPNRSPEEATAETLENNMKDCSGNNSLLETMMLDLSTNSFVQDWWDNSVLLAENLPNSSEKDPEPAMELANRHSLPTGERGSPFIPVIEQLLGDVAHPPTPTGHSSLEAEATALAGRVSDYQLPQFAFRDCLTVDNAQIPALACSNYTCRTRSAQNGSSEVPSANVSVDDTCSLNTANSNGSQSSNPEGTKVAKRRARAGESTRPRPKDRQLIQDRVKELREIVPNGAKCSIDALLERTIKHMLFLQSVNKYAEKIKQADEPKIIDKGSGVILKDNPVAGTNGGATWAYEVAGQTMVCPIIIEDLSPPGQMLVEMLCEEQGLFLEIADNIRGIGLTVLKGRMELCDGKIWSRFLVERGHKDGYISVACSVTGTEQPCSIY

SEQ ID NO: 164386 - protein, 540 aa, Zea Mays
MKLLSSQSSSVYHGINWAVPIDECEKDDSLSCKHVPVHSQNAEHTAVLDGLELDYQYSQFSPFDRFMKRTSCSSEDMNSVEFLYTDHKRSVEKVSHGNAVNALHSESGPTKLSNGKNYEKFGNINQPWYTSIPYNLSLNPILKNAACYCTESDVQQKSKNQSLASFDFESVMDPCEVYCARSTSCLVEFVNGATIIQPSTHPCERLDCSPKLLQAQTRSQASLTSSGEMSTRDSLQKNVYGGAFWERSLLYNDKSKEKPAVDFSSQFDMPLDIVINKYKYVSSFTMKLLEEGFDLCAHLLALRRYHFMEIADWADSFIALIYNKKWSFVKSEQKRSEIQGLMDFALQRSSCDSDPYKERLFIYIREPPVDSFDASACDLDLLDDILLGYKAEWPVNIVITEDTLKIYAEIFCYLLQVRFAVFSLTEVWRFLKELTQFISRSSHRGSDVLKKLNVVMKVRHKLHHFLSTLQQYLHCHLSDISWRRFQHSLKNQVRDILDLEYVHMCYITDALDIWLREDMEYEHTYRVINRFIDDMGNIST

SEQ ID NO: 164387 - protein, 799 aa, Zea Mays
MEAAASSLSTLLSTLRVDGPWTPPGTWESAIPESGAARVTDLGGRLQPIYELASVTDDALIHLALHALYGVKSSLDEIEELSVLFSSNPADRTSNRVTNVWLRSSSTISVGSILKSLRSTGLVVFFLCKFVHFYLVQSREMNCASREVHEHEHPGDKDTEQHRPYSLVNQAFAAAVSKVLEGYFCSLNTLPASIRLRRSVGQSGIPSKTSDGMSCNSTAEVTLLEVYLHTEELRRHVKSLGNICFPKFAGATLCHDGLDTEASVEFENFPRGTDLLSYLYVYIRDADPVHYGLLKYLFIRSCEPYFNFIKSWIYRASVDDPYEEFLITQTENKGVQGVSSDITDEFTLFPLKQEYFISQKSTMKLLSSQSSSVYHGINWAVPIDECEKDDSLSCKHVPVHSQNAEHTAVLDGLELDYQYSQFSPFDRFMKRTSCSSEDMNSVEFLYTDHKRSVEKVSHGNAVNALHSESGPTKLSNGKNYEKFGNINQPWYTSIPYNLSLNPILKNAACYCTESDVQQKSKNQSLASFDFESVMDPCEVYCARSTSCLVEFVNGATIIQPSTHPCERLDCSPKLLQAQTRSQASLTSSGEMSTRDSLQKNVYGGAFWERSLLYNDKSKEKPAVDFSSQFDMPLDIVINKYKYVSSFTMKLLEEGFDLCAHLLALRRYHFMEIADWADSFIALIYNKKWSFVKSEQKRSEIQGLMDFALQRSSCDSDPYKERLFIYIREPPVDSFDASACDLDLLDDILLGYKAEWPVNIVITEDTLKIYAEIFCYLLQVRFAVFSLTEVWRFLKVSFLH

SEQ ID NO: 164388 - protein, 867 aa, Zea Mays
MEAAASSLSTLLSTLRVDGPWTPPGTWESAIPESGAARVTDLGGRLQPIYELASVTDDALIHLALHALYGVKSSLDEIEELSVLFSSNPADRTSNRVTNVWLRSSSTISVGSILKSLRSTGLVVFFLCKFVHFYLVQSREMNCASREVHEHEHPGDKDTEQHRPYSLVNQAFAAAVSKVLEGYFCSLNTLPASIRLRRSVGQSGIPSKTSDGMSCNSTAEVTLLEVYLHTEELRRHVKSLGNICFPKFAGATLCHDGLDTEASVEFENFPRGTDLLSYLYVYIRDADPVHYGLLKYLFIRSCEPYFNFIKSWIYRASVDDPYEEFLITQTENKGVQGVSSDITDEFTLFPLKQEYFISQKSTMKLLSSQSSSVYHGINWAVPIDECEKDDSLSCKHVPVHSQNAEHTAVLDGLELDYQYSQFSPFDRFMKRTSCSSEDMNSVEFLYTDHKRSVEKVSHGNAVNALHSESGPTKLSNGKNYEKFGNINQPWYTSIPYNLSLNPILKNAACYCTESDVQQKSKNQSLASFDFESVMDPCEVYCARSTSCLVEFVNGATIIQPSTHPCERLDCSPKLLQAQTRSQASLTSSGEMSTRDSLQKNVYGGAFWERSLLYNDKSKEKPAVDFSSQFDMPLDIVINKCIMEEVLLQYKYVSSFTMKLLEEGFDLCAHLLALRRYHFMEIADWADSFIALIYNKKWSFVKSEQKRSEIQGLMDFALQRSSCDSDPYKERLFIYIREPPVDSFDASACDLDLLDDILLGYKAEWPVNIVITEDTLKIYAEIFCYLLQVRFAVFSLTEVWRFLKELTQFISRSSHRGSDVLKKLNVVMKVRHKLHHFLSTLQQYLHCHLSDISWRRFQHSLKNQMFLI

SEQ ID NO: 164389 - protein, 993 aa, Zea Mays
MEAAASSLSTLLSTLRVDGPWTPPGTWESAIPESGAARVTDLGGRLQPIYELASVTDDALIHLALHALYGVKSSLDEIEELSVLFSSNPADRTSNRVTNVWLRSSSTISVGSILKSLRSTGLVVFFLCKFVHFYLVQSREMNCASREVHEHEHPGDKDTEQHRPYSLVNQAFAAAVSKVLEGYFCSLNTLPASIRLRRSVGQSGIPSKTSDGMSCNSTAEVTLLEVYLHTEELRRHVKSLGNICFPKFAGATLCHDGLDTEASVEFENFPRGTDLLSYLYVYIRDADPVHYGLLKYLFIRSCEPYFNFIKSWIYRASVDDPYEEFLITQTENKGVQGVSSDITDEFTLFPLKQEYFISQKSTMKLLSSQSSSVYHGINWAVPIDECEKDDSLSCKHVPVHSQNAEHTAVLDGLELDYQYSQFSPFDRFMKRTSCSSEDMNSVEFLYTDHKRSVEKVSHGNAVNALHSESGPTKLSNGKNYEKFGNINQPWYTSIPYNLSLNPILKNAACYCTESDVQQKSKNQSLASFDFESVMDPCEVYCARSTSCLVEFVNGATIIQPSTHPCERLDCSPKLLQAQTRSQASLTSSGEMSTRDSLQKNVYGGAFWERSLLYNDKSKEKPAVDFSSQFDMPLDIVINKCIMEEVLLQYKYVSSFTMKLLEEGFDLCAHLLALRRYHFMEIADWADSFIALIYNKKWSFVKSEQKRSEIQGLMDFALQRSSCDSDPYKERLFIYIREPPVDSFDASACDLDLLDDILLGYKAEWPVNIVITEDTLKIYAEIFCYLLQVRFAVFSLTEVWRFLKELTQFISRSSHRGSDVLKKLNVVMKVRHKLHHFLSTLQQYLHCHLSDISWRRFQHSLKNQVRDILDLEYVHMCYITDALDICFLSDESKQVATIIKSMLQLALELRSCFQSIGDTCDLPVNQLSNLQYLINFSQVDVIRTKFEGNIKDLYVLHSKSSKYGELGLSRFWGYQNYNEYHSMKVSKDMGSFCF

SEQ ID NO: 164390 - protein, 858 aa, Zea Mays
MEAAASSLSTLLSTLRVDGPWTPPGTWESAIPESGAARVTDLGGRLQPIYELASVTDDALIHLALHALYGVKSSLDEIEELSVLFSSNPADRTSNRVTNVWLRSSSTISVGSILKSLRSTGLVVFFLCKFVHFYLVQSREMNCASREVHEHEHPGDKDTEQHRPYSLVNQAFAAAVSKVLEGYFCSLNTLPASIRLRRSVGQSGIPSKTSDGMSCNSTAEVTLLEVYLHTEELRRHVKSLGNICFPKFAGATLCHDGLDTEASVEFENFPRGTDLLSYLYVYIRDADPVHYGLLKYLFIRSCEPYFNFIKSWIYRASVDDPYEEFLITQTENKGVQGVSSDITDEFTLFPLKQEYFISQKSTMKLLSSQSSSVYHGINWAVPIDECEKDDSLSCKHVPVHSQNAEHTAVLDGLELDYQYSQFSPFDRFMKRTSCSSEDMNSVEFLYTDHKRSVEKVSHGNAVNALHSESGPTKLSNGKNYEKFGNINQPWYTSIPYNLSLNPILKNAACYCTESDVQQKSKNQSLASFDFESVMDPCEVYCARSTSCLVEFVNGATIIQPSTHPCERLDCSPKLLQAQTRSQASLTSSGEMSTRDSLQKNVYGGAFWERSLLYNDKSKEKPAVDFSSQFDMPLDIVINKYKYVSSFTMKLLEEGFDLCAHLLALRRYHFMEIADWADSFIALIYNKKWSFVKSEQKRSEIQGLMDFALQRSSCDSDPYKERLFIYIREPPVDSFDASACDLDLLDDILLGYKAEWPVNIVITEDTLKIYAEIFCYLLQVRFAVFSLTEVWRFLKELTQFISRSSHRGSDVLKKLNVVMKVRHKLHHFLSTLQQYLHCHLSDISWRRFQHSLKNQMFLI

SEQ ID NO: 164391 - protein, 549 aa, Zea Mays
MKLLSSQSSSVYHGINWAVPIDECEKDDSLSCKHVPVHSQNAEHTAVLDGLELDYQYSQFSPFDRFMKRTSCSSEDMNSVEFLYTDHKRSVEKVSHGNAVNALHSESGPTKLSNGKNYEKFGNINQPWYTSIPYNLSLNPILKNAACYCTESDVQQKSKNQSLASFDFESVMDPCEVYCARSTSCLVEFVNGATIIQPSTHPCERLDCSPKLLQAQTRSQASLTSSGEMSTRDSLQKNVYGGAFWERSLLYNDKSKEKPAVDFSSQFDMPLDIVINKCIMEEVLLQYKYVSSFTMKLLEEGFDLCAHLLALRRYHFMEIADWADSFIALIYNKKWSFVKSEQKRSEIQGLMDFALQRSSCDSDPYKERLFIYIREPPVDSFDASACDLDLLDDILLGYKAEWPVNIVITEDTLKIYAEIFCYLLQVRFAVFSLTEVWRFLKELTQFISRSSHRGSDVLKKLNVVMKVRHKLHHFLSTLQQYLHCHLSDISWRRFQHSLKNQVRDILDLEYVHMCYITDALDIWLREDMEYEHTYRVINRFIDDMGNIST

SEQ ID NO: 164392 - protein, 583 aa, Zea Mays
METYGFSIQHTTLPCLQVGNQQRPNYLPMEVCKIVEGQRYSKRLNEKQITALLKVTCQRPQERELDILQTVHHNAYYEDPYALEFGIRIDERLAAVEARVLPPPRLKYHDSGREKDVLPRVGQWNMMNKKMVNGGRVSNWACINFSRNVQDSAARGFSHELAVMCQISGMDFALEPVLPPVTARPEHVERALKARYQDAMNILRPQGRELDLLIVILPDNNGSLYGDLKRICETELGLVSQCCLTKHVFKMSKQYLANVALKINVKVGGRNTVLLDALSRRIPLVSDRPTIIFGADVTHPHPGEDSSPSIAAVVASQDWPEVTKYAGLVSAQAHRQELIQDLFKVWQDPQRRTVTGGMIKELLISFKRATGQKPQRIIFYRDGVSEGQFYQVLLYELDAIRKACASLEPNYQPPVTFVVVQKRHHTRLFANNHSDQRTVDRSGNILPGTVVDSKICHPTEFDFYLCSHAGIQGTSRPAHYHVLWDENKFTADELQTLTNNLCYTYARCTRSVSIVPPAYYAHLAAFRARFYMEPDTSDSGSLASGARGPPPGAARSSTRGAGSVEVRPLPALKENVKRVMFYC

SEQ ID NO: 164393 - protein, 499 aa, Zea Mays
MVRKKRTGPGGSGETSGESSGASGQGSSQQPERTQQPGGGRGWVPQQGGHGGGQHQGRDRHYQGRGGPGPHHLGSGAPEYHPREYQGRGGEYQGHGGEYQGRGGDYQGRGGGRSRGGMPQPYYGGHRGGNVGRNVPPGPSRTVPELHQAPYVQYPAPVVSPSPSGPGSSSQPMAEVSSGQVQQQFQQLADRGQSSTSQEIQVAPASSKSVRFPLRPGKGTYGDRCIVKANHFFAELPDKDLHQYDVSITPEVTSRGVNRAVMGELVTIYRQSHLGGRLPAYDGRKSLYTAGPLPFTSMAFEITLQDEEDSLGGRQGGHRRERVFRVVIKFAARADLHHLAMFLAGRQADAPQEALQVLDIVLRELPTARYSPVGRSFYSPNLGRRQKLGEGLESWRGFYQSIRPTQMGLSLNIDMSSTAFIEPLPVIDFVAQLLNRDISVRPLSDSDRVKIKKALRGVKVEVTHRGNMRRKYRISGLTSQATRELSFFVIDSLLMIVVL

SEQ ID NO: 164394 - protein, 325 aa, Zea Mays
MFEDDVVVLPAASPSRDYLGVGGGAAAAASNMAGPAAAYGLLDPYYSPVVASRAPPVDHETASSPLVYSGDGVVRGTSMPCYDDDHEEKRPTGGRQPQGFGAPAAAFLQEMMIPSRVETKLQSGLGYLGMVSQSRLETSFGVVGSLPDAAGSFSDEYNSNRSSADFMSSNSDRLEQRVGGSSSGRGAATRRKSDGGLGGNTKKSKQEASPKQPQAPRVKIGEKITALQQIVSPFGKTDTSSVLFETIEYIKFLHEQIRMFSEPYMTKSTYKGHIGLRGEEEESGTGHDLRGRGLCLVPVSLTSQAYQDDTLPDCWAPAYRGCLYR

SEQ ID NO: 164395 - protein, 96 aa, Zea Mays
MGYFSLQKGRLSSTIITTNSILYFIILLCHCLFTVNATAMSCKKLSSVDKLTGCDLFLFLAKMYFILYVRAVGETSRARACLHRNIYAHGGMGVGE

SEQ ID NO: 164396 - protein, 481 aa, Zea Mays
MAAMVRSLYLCRLQTAVFSTFCSNQMSACRATLDSLGSMNLTCLFGFKNLTGLQRSSRHCTGTASSVVYFMAQEAHEAPVVGGSRSSSSPSRDTGMWESPRQTQAHTPFPSWIPYAGTFAAGVGMVAAADSSLPSERGPGPDCAWNQSAPSVGARDGGSGYRGNYFLSLLDSKNVTPEMFEDDVVVLPAASPSRDYLGVGGGAAAAASNMAGPAAAYGLLDPYYSPVVASRAPPVDHETASSPLVYSGDGVVRGTSMPCYDDDHEEKRPTGGRQPQGFGAPAAAFLQEMMIPSRVETKLQSGLGYLGMVSQSRLETSFGVVGSLPDAAGSFSDEYNSNRSSADFMSSNSDRLEQRVGGSSSGRGAATRRKSDGGLGGNTKKSKQEASPKQPQAPRVKIGEKITALQQIVSPFGKMFSEPYMTKSTYKGHIGLRGEEEESGTGHDLRGRGLCLVPVSLTSQAYQDDTLPDCWAPAYRGCLYR

SEQ ID NO: 164397 - protein, 165 aa, Zea Mays
MVWYGYSPCHCYAINRAMPRKKIQKRPEIKPAEPSKSNLVLKSDVSKVVDHEVSTTPMRVQEQLLDDETKALQVELTSLLDAVQETETKMIEMSALNHLMSTHVLQQAQQIQYLYDQAVEATNNVERGNKELSQAIQRNSSSRTFLLLFFFVLTFSILFLDWYNN

SEQ ID NO: 164398 - protein, 186 aa, Zea Mays
MVILPAIAVLILSERLHSVTAQFDHLRSIRFQDAINRAMPRKKIQKRPEIKPAEPSKSNLVLKSDVSKVVDHEVSTTPMRVQEQLLDDETKALQVELTSLLDAVQETETKMIEMSALNHLMSTHVLQQAQQIQYLYDQAVEATNNVERGNKELSQAIQRNSSSRTFLLLFFFVLTFSILFLDWYNN

SEQ ID NO: 164399 - protein, 168 aa, Zea Mays
MARVRDRTEDFKEAVRVAALSHGYTEAQLAALMSSFIIRKPSPKSPFTNAAIKTLQSIRELERFIVKHRRDYVDLHRSTEQERDNIEHEVGVFVKACKEQIDILKNRIHKEEKNGSGKTWLGTRDESSRVDLIAHQHGVMLLTEQCQGRRFRRDQKSNLLNHPSPILF

SEQ ID NO: 164400 - protein, 166 aa, Zea Mays
MARVRDRTEDFKEAVRVAALSHGYTEAQLAALMSSFIIRKPSPKSPFTNAAIKTSIRELERFIVKHRRDYVDLHRSTEQERDNIEHEVGVFVKACKEQIDILKNRIHKEEKNGSGKTWLGTRDESSRVDLIAHQHGVMLLTEQCQGRRFRRDQKSNLLNHPSPILF

SEQ ID NO: 164401 - protein, 268 aa, Zea Mays
MGTYGYAAPEYVATGHLYVKSDVYGFGVVLLEMLTGLRALDTARPAQQHNLVEWAKPYLADRRKLPRLVDPRLEGQYPSKAALQAAQLTLRCLEGDPRSRPSMAEVVLAIEAMEQLRLLTVQEEITWTISAGSGRLSDWSIVRLSSPCVMRSEEDPGIIRRLGFASCSLASVDTTGFSTCAPPNSSRQQCITSPSSLIIGVAVGAQGSYTCTVFGAAAVRSAAQCAAAPRHAGRGPGQGHRKGPPAWHSSVLQLTGSWRRLAGAEPGL

SEQ ID NO: 164402 - protein, 565 aa, Zea Mays
MGNCLGSDEAAELEVVKNSGQPQAAATAAPAMAPHKSEGSMSSGSGPSSSSRSAGSSMSSIATTTGRSGGSTSTSSGSRPLRAAAAASYREEEEEEEEEKEGRILEAPNLRIFTFAELRAATRNFRPDTVLGEGGFGRVYKGWVDERTMNPTRSGIGMVVAVKKLNQESVQGLQEWQSEVNFLGRLSHPNLVRLLGYCVEDRELLLVYEYMPKGSLENHLFRKGGSFEPISWNLRLRIAIGAARGLAFLHSSEKQVIYRDFKASNILLDTNYNAKLSDFGLAKNGPTGGDSHVTTRVMGTYGYAAPEYVATGHLYVKSDVYGFGVVLLEMLTGLRALDTARPAQQHNLVEWAKPYLADRRKLPRLVDPRLEGQYPSKAALQAAQLTLRCLEGDPRSRPSMAEVVLAIEAMEQLRLLTVQEEITWTISAGSGRLSDWSIVRLSSPCVMRSEEDPGIIRRLGFASCSLASVDTTGFSTCAPPNSSRQQCITSPSSLIIGVAVGAQGSYTCTVFGAAAVRSAAQCAAAPRHAGRGPGQGHRKGPPAWHSSVLQLTGSWRRLAGAEPGL

SEQ ID NO: 164403 - protein, 1196 aa, Zea Mays
MVTVGRRRGFVTFAAAAIALMQISYLLFPISAQQSNGSRVVPAEGYCSMYGICAQRSDGKVLNCANATKAVKPDTLFSSRIQSLCPTITGDVCCTVDQFDTLHQQVQQAVPFLVGCPACLRNFLNLFCEMSCSPNQSLFINVTSVKQINSTMTVDGIDYYVTTNYGEELYNSCKDVKFGTLNTRAMDFIGAGAKTYKDWLAFIGRQANLNEPGSPYLITFGSDFSDSSGVKPLNSTIYSCGDPSLGCSCGDCPSSSVCAGSLLPQLNTETACSVKMGSLKAKCLDFSLVVIYLALLCAFLLWGLLYRTRGRTASPLQAKPLRNSDNKSNMNKNGKSPHDSVQVPEAASSTAKPSNPSIVQTYMSIFFRKHGIFVARHPLRVLCVSLLVPVLLCIGLFRLKVETRPEKLWVSPGSEAANEKNYFDSHLAPFYRIEQLVLATSASGGSEAPSIVNDNNMKLLFEIQKKVDDLRANYSGSKVALADICLKPLSTDCATQSVLQYFQLDPKKFDDSGIDHAKFCFQHYTSEETCLSTFQSPVDPSTILGGFPGSNFTEASAFVITYPVNNKVQTTGKENGKAMAWERAFINLVKEEIRPMVLAQNLTLSFSSESSIQDELNRESTADAITIMISYIVMFAYISFTLGDRPSRWLLLFVSSKVLLGLSGVVLVMLSVLGSMGFFSAIGVKSTLIIMEVIPFLVLAVGVDNMCILVHAVKRQPDQSNLEERISDALVEVGPSITLASFAEVLAFAVSAINPMPATRVFSMFAALAVFMDFLLQVTAFVALIVFDIRRAQDGRIDCVPCARITPSTGAGDGGDGQRLHLLARYMRDVHGRILRNRAVKFVVITVFVGLTFASIALSTRLQPGLEQQIVLPRNSYLQDYFDDLAKYMKVGPPLYFVVKDFNYSSASVDTNQICSISQCNSNSLLNEISRQSLSPETSYIAKPAASWLDDFLIWMSPEAFGCCRKFVNGSYCPPDDQPPCCQLDQVSGSCMTSKTCSNCTTCFLHSDLDNGRPSTTQFRDKLPWFLDALPSSDCSKGGKGAYSTSLDLSGYESGIIQASAFRTYHTPLNKQSDYVNSMRAARDFSSKMSRDLQMKIFPYSVFYIFFEQYLSVWKTAIMNICVCLGTIFVVCFIVTSSLWASAIILTVLAMIVLDMMGVMAILGIQLNAISVVNLVMSIGIAVEFCVHITHAFMSA

SEQ ID NO: 164404 - protein, 301 aa, Zea Mays
MYGICAQRSDGKVLNCANATKAVKPDTLFSSRIQSLCPTITGDVCCTVDQFDTLHQQVQQAVPFLVGCPACLRNFLNLFCEMSCSPNQSLFINVTSVKQINSTMTVDGIDYYVTTNYGEELYNSCKDVKFGTLNTRAMDFIGAGAKTYKDWLAFIGRQANLNEPGSPYLITFGSDFSDSSGVKPLNSTIYSCGDPSLGCSCGDCPSSSVCAGSLLPQLNTETACSVKMGSLKAKCLDFSLVVIYLALLCAFLLWGLLYRTRGRTASPLQAKPLRNSDNKSNMNKNGKSPHDSVQEAWNFCC

SEQ ID NO: 164405 - protein, 442 aa, Zea Mays
MLLVLPGLLRPSASGTMAARAADENRRPGVGRPAPCVRDMGSRRALTDIKNLVGVAPNPCAVAKKPVLQKSRRDEKKTALPSSRPMTRKFVASLASKGQPECQPTGADPEPGVDQRKEPIGDGIIDIDVELDEPVDDSDCDVDMGDETENKDIMNQDESLMDIDSADSGNPLAATEYVEELYKFYRENEAKSCVNPDYMSSQQDINAKMRAILIDWLIEVHYKFELMDETLFLTVNVIDRFLEKEVVPRKKLQLVGITALLLACKYEEVSVPVVEDLVLISDRAYTKGQILEMEKLILNTLQFNMSVPTPYVFMKRFLKAADADKQLELVSFFMLELCLVEYQMLNYRPSHLAAAAVYTAQCAINRCQQWTKVCESHSRYTGDQLLECSRMMVDFHQKAGTGKLTGVHRKYSTYKFGCAAKILPAQFMLELGGTAPPPSGAI

SEQ ID NO: 164406 - protein, 268 aa, Zea Mays
MNKFLATLKKLDRKPAKSCVNPDYMSSQQDINAKMRAILIDWLIEVHYKFELMDETLFLTVNVIDRFLEKEVVPRKKLQLVGITALLLACKYEEVSVPVVEDLVLISDRAYTKGQILEMEKLILNTLQFNMSVPTPYVFMKRFLKAADADKQLELVSFFMLELCLVEYQMLNYRPSHLAAAAVYTAQCAINRCQQWTKVCESHSRYTGDQLLECSRMMVDFHQKAGTGKLTGVHRKYSTYKFGCAAKILPAQFMLELGGTAPPPSGAI

SEQ ID NO: 164407 - protein, 98 aa, Zea Mays
MPRALHRGDSISAAAAIVRNPTGDAAMGRSRCVGFPWKTRGEGAPWLLAWAAGRALDRGQGRAPGRSVKLQQGGATMAGRGGRHGRDVERAGMTSEAL

SEQ ID NO: 164408 - protein, 433 aa, Zea Mays
MGGVLELGTTDTVPEAPDLVSRATAAFWEPQCPTYSEEPSSSPSGRANETGEAAADDGTFAFEELDHNNGMDIEAMTAAGGHGQEEELRLREAEALSDDASLEHITKEIEEFYSLCDEMDLQALPLPLEDGWTVDASNFEVPCSSPQPAPPPVDRATANVAADASRAPVYGSRATSFMAWTRSSQQSSCSDDAAPAAVVPAIEEPQRLLKKVVAGGGAWESCGGATGAAQEMSGTGTKNHVMSERKRREKLNEMFLVLKSLLPSIHRVNKASILAETIAYLKELQRRVQELESSREPASRPSETTTRLITRPSRGNNESVRKEVCAGSKRKSPELGRDDVERPPVLIMDAGTSNVTVTVSDKDVLLEVQCRWEELLMTRVFDAIKSLHLDVLSVQASAPDGFMGLKIRAQFAGSGAVVPWMISEALRKAIGKR

SEQ ID NO: 164409 - protein, 1025 aa, Zea Mays
MLPPVTAPTHPPPPWESTTTTRPPPPPPPPSGAESEVPPKKRKLEGVGFQRSPYYTIRETVANLRVRFLQVCQGTDSEKKDTAVGILNEMKSVMELSKKTRLDLSASAEPVKPLNKHAARAPEDKRVGKVLSAEKSLVPPTSLGLAGHFVHNTGGGVPLKPDNSDTAAHGLPVKIRKWPGLSKITGFTKRQGGLPQGSYVIGGSPIGWNFLVWPGSKAVYYGLTKAECQNKGVGDQATKAPLLCLPFLSERAPLLTEATLLGHGNGPAASQLAIGPSQHLPKQEKPSPCAVRRFHRHLTPLRQVAVDRPQKGREPALVANDGERGRELDLGLGREGAPGDGAAAGALSTPCLLPCQAPDVQEGGLPRAPHGADPCAGLGDGVVVADGKRGLYNHERWPACFVTVRQFGRRERSSTWASSCSLCARLVRPPSMVDMAGSCIIALPSRFAMATSYGFCIGYVPKWFNWGYHQEVEDEYGDEYYDQDEYEEEGSGAGDGYAEEEEPTEGQKEILELRERLKEQIRRKAKAAAACTAGRSSSSQIPQARDKFGSFFGPSKPVISRRVIEERKSLKELHSTVAREPRPSGVHKDIPSSSKVQSRVNGHQHKQKIVNQVKKKAEALKDNRDYSFLLSDDADLSSSPKEKPAARSSLTQRADREVTQSTVKRKAPTSQPARLSNGYGPKNTMSTQRHAEGKVNSMRREDFSNTERVVSRDNERMYERVVSRDNERMHSIARNGSNQASTSKTTIQKHPSRGPIANKQPSKDSNDATLRKSSVASKHHPLEIDRPKSSQSQRMQSAGQRPQHSSHGQTPHQSMQHRTQQSLQSRRPQQMTQGQKPQQSLQSQRTQQSLQNRRPQQSSHIQKSQSSQAHRPQSLSNRSQALQGQRPLSSQGQYPEQRRVHASDRVKQAERQIRPPSKSMPSRPVSSNGIRDDHAKRKQVAKRRFDEDDEDPLAMIRNMFGYDPSRYAGRDEDVSDMEADFATIEMEEKRSARIARQEDEEQLRLIEEEERREQERKRRKMARGR

SEQ ID NO: 164410 - protein, 568 aa, Zea Mays
MRGYVYETNGYHQEVEDEYGDEYYDQDEYEEEGSGAGDGYAEEEEPTEGQKEILELRERLKEQIRRKAKAAAACTAGRSSSSQIPQARDKFGSFFGPSKPVISRRVIEERKSLKELHSTVAREPRPSGVHKDIPSSSKVQSRVNGHQHKQKIVNQVKKKAEALKDNRDYSFLLSDDADLSSSPKEKPAARSSLTQRADREVTQSTVKRKAPTSQPARLSNGYGPKNTMSTQRHAEGKVNSMRREDFSNTERVVSRDNERMYERVVSRDNERMHSIARNGSNQASTSKTTIQKHPSRGPIANKQPSKDSNDATLRKSSVASKHHPLEIDRPKSSQSQRMQSAGQRPQHSSHGQTPHQSMQHRTQQSLQSRRPQQMTQGQKPQQSLQSQRTQQSLQNRRPQQSSHIQKSQSSQAHRPQSLSNRSQALQGQRPLSSQGQYPEQRRVHASDRVKQAERQIRPPSKSMPSRPVSSNGIRDDHAKRKQVAKRRFDEDDEDPLAMIRNMFGYDPSRYAGRDEDVSDMEADFATIEMEEKRSARIARQEDEEQLRLIEEEERREQERKRRKMARGR

SEQ ID NO: 164411 - protein, 970 aa, Zea Mays
MKIEVPGMYVILTDQVCQGTDSEKKDTAVGILNEMKSVMELSKKTRLDLSASAEPVKPLNKHAARAPEDKRVGKVLSAEKSLVPPTSLGLAGHFVHNTGGGVPLKPDNSDTAAHGLPVKIRKWPGLSKITGFTKRQGGLPQGSYVIGGSPIGWNFLVWPGSKAVYYGLTKAECQNKGVGDQATKAPLLCLPFLSERAPLLTEATLLGHGNGPAASQLAIGPSQHLPKQEKPSPCAVRRFHRHLTPLRQVAVDRPQKGREPALVANDGERGRELDLGLGREGAPGDGAAAGALSTPCLLPCQAPDVQEGGLPRAPHGADPCAGLGDGVVVADGKRGLYNHERWPACFVTVRQFGRRERSSTWASSCSLCARLVRPPSMVDMAGSCIIALPSRFAMATSYGFCIGYVPKWFNWGYHQEVEDEYGDEYYDQDEYEEEGSGAGDGYAEEEEPTEGQKEILELRERLKEQIRRKAKAAAACTAGRSSSSQIPQARDKFGSFFGPSKPVISRRVIEERKSLKELHSTVAREPRPSGVHKDIPSSSKVQSRVNGHQHKQKIVNQVKKKAEALKDNRDYSFLLSDDADLSSSPKEKPAARSSLTQRADREVTQSTVKRKAPTSQPARLSNGYGPKNTMSTQRHAEGKVNSMRREDFSNTERVVSRDNERMYERVVSRDNERMHSIARNGSNQASTSKTTIQKHPSRGPIANKQPSKDSNDATLRKSSVASKHHPLEIDRPKSSQSQRMQSAGQRPQHSSHGQTPHQSMQHRTQQSLQSRRPQQMTQGQKPQQSLQSQRTQQSLQNRRPQQSSHIQKSQSSQAHRPQSLSNRSQALQGQRPLSSQGQYPEQRRVHASDRVKQAERQIRPPSKSMPSRPVSSNGIRDDHAKRKQVAKRRFDEDDEDPLAMIRNMFGYDPSRYAGRDEDVSDMEADFATIEMEEKRSARIARQEDEEQLRLIEEEERREQERKRRKMARGR

SEQ ID NO: 164412 - protein, 665 aa, Zea Mays
MESWKFPLTLEQKNSVLTPEVCQGTDSEKKDTAVGILNEMKSVMELSKKTRLDLSASAEPVKPLNKHAARAPEDKRVGKVLSAEKSLVPPTSLGLAGHFVHNTGGGVPLKPDNSDTAAHGLPVKIRKWPGLSKITGFTKRQGGLPQGSYVIGGSPIGWNFLVWPGSKAVYYGLTKAECQNKGVGDQATKAPLLCLPFLSERAPLLTEATLLGHGNGPAASQLAIGPSQHLPKQEKPSPCAVRRFHRHLTPLRQVAVDRPQKGREPALVANDGERGRELDLGLGREGAPGDGAAAGALSTPCLLPCQAPDVQEGGLPRAPHGADPCAGLGDGVVVADGKRGLYNHERWPACFVTVRQFGRRERSSTWASSCSLCARLVRPPSMVDMAGSCIIALPSRFAMATSYGFCIGYVPKWFNWGYHQEVEDEYGDEYYDQDEYEEEGSGAGDGYAEEEEPTEGQKEILELRERLKEQIRRKAKAAAACTAGRSSSSQIPQARDKFGSFFGPSKPVISRRVIEERKSLKELHSTVAREPRPSGVHKDIPSSSKVQSRVNGHQHKQKIVNQVKKKAEALKDNRDYSFLLSDDADLSSSPKEKPAARSSLTQRADREVTQSTVKRKAPTSQPARLSNGYGPKNTMSTQRHAEGMILVDMQAEMKMSVTWKPILLL

SEQ ID NO: 164413 - protein, 603 aa, Zea Mays
MRGYVYETNGYHQEVEDEYGDEYYDQDEYEEEGSGAGDGYAEEEEPTEGQKEILELRERLKEQIRRKAKAAAACTAGRSSSSQIPQARDKFGSFFGPSKPVISRRVIEERKSLKELHSTVAREPRPSGVHKDIPSSSKVQSRVNGHQHKQKIVNQVKKKAEALKDNRDYSFLLSDDADLSSSPKEKPAARSSLTQRADREVTQSTVKRKAPTSQPARLSNGYGPKNTMSTQRHAEGKVNSMRREDFSNTERVVSRDNERMYERVVSRDNERMHSIARNGSNQASTSKTTIQKHPSRGPIANKQPSKDSNDATLRKSSVASKHHPLEIDRPKSSQSQRMQSAGQRPQHSSHGQTPHQSMQHRTQQSLQSRRPQQMTQGQKPQQSLQSQRTQQSLQNRRPQQSSHIQKSQSSQAHRPQSLSNRSQALQGQRPLSSQGQYPEQRRVHASDRVKQAERQIRPPSKSMPSRPVSSNGIRDDHAKRKQVAKRRFDEDDEDPLAMIRNMFGYCLDKLTLSFLFWTLWLFEDVAYRYLDSNFGILCRYDPSRYAGRDEDVSDMEADFATIEMEEKRSARIARQEDEEQLRLIEEEERREQERKRRKMARGR

SEQ ID NO: 164414 - protein, 629 aa, Zea Mays
MVDMAGSCIIALPSRFAMATSYGFCIGYVPKWFNWGYHQEVEDEYGDEYYDQDEYEEEGSGAGDGYAEEEEPTEGQKEILELRERLKEQIRRKAKAAAACTAGRSSSSQIPQARDKFGSFFGPSKPVISRRVIEERKSLKELHSTVAREPRPSGVHKDIPSSSKVQSRVNGHQHKQKIVNQVKKKAEALKDNRDYSFLLSDDADLSSSPKEKPAARSSLTQRADREVTQSTVKRKAPTSQPARLSNGYGPKNTMSTQRHAEGKVNSMRREDFSNTERVVSRDNERMYERVVSRDNERMHSIARNGSNQASTSKTTIQKHPSRGPIANKQPSKDSNDATLRKSSVASKHHPLEIDRPKSSQSQRMQSAGQRPQHSSHGQTPHQSMQHRTQQSLQSRRPQQMTQGQKPQQSLQSQRTQQSLQNRRPQQSSHIQKSQSSQAHRPQSLSNRSQALQGQRPLSSQGQYPEQRRVHASDRVKQAERQIRPPSKSMPSRPVSSNGIRDDHAKRKQVAKRRFDEDDEDPLAMIRNMFGYCLDKLTLSFLFWTLWLFEDVAYRYLDSNFGILCRYDPSRYAGRDEDVSDMEADFATIEMEEKRSARIARQEDEEQLRLIEEEERREQERKRRKMARGR

SEQ ID NO: 164415 - protein, 86 aa, Zea Mays
MQEYEATVAALSQMEKRDVMAKTMLEATKQYQAGQVKDNQSFASSYSFGYILLPLSKHLDHLRDIIRSLLLQPRHDYFSCVPLTIP

SEQ ID NO: 164416 - protein, 120 aa, Zea Mays
MFVTGMLVNGPYALITTAVSADLGTHSSLNGNSRALATVTAIIDGTGSIGAAVGPLLTGYISARSWSAVFTMLMASALVAGLLLSRLVAAEVVAKMESRRTPAPAASDLLPVSSSSMDEP

SEQ ID NO: 164417 - protein, 174 aa, Zea Mays
MERTTSNMTYKAWRREPEEGPIMYCSRTIFEDATPELVRDFFWDGDFRLKWDPMLAYSKSLDEFPQNGATIVHWIKKFPFFCSDREYIFGGRIWESGKTYYCVTKSHAFIFLAALGQMPRRSYSPAPELPGKRPRVVAAAGAGTRTRALPMPGWGHRQVCTHAGCQGHTWTSHQ

SEQ ID NO: 164418 - protein, 277 aa, Zea Mays
MERTTSNMTYKAWRREPEEGPIMYCSRTIFEDATPELVRDFFWDGDFRLKWDPMLAYSKSLDEFPQNGATIVHWIKKFPFFCSDREYIFGGRIWESGKTYYCVTKGVPYPSLPKKEKPRRVELYFSSWRIRAVQSPKHVGQQSACEVTLVHYEDMGIPKDVARVAVRHGMWGAVKKLQSGFRAYQQMRDTENTLSHSAIMARMTTRVSITASNGGLDHDLSIADKISGENDSSHAVQHGFDWKWVVFGGAVAAVCVLNTGLVGKVLLLGAARRQAKK

SEQ ID NO: 164419 - protein, 169 aa, Zea Mays
MDHLALDSDASMAILDEWTEPAKLVLNSSALLTEEHQSVLDAFHLLREDAYVQKMVMALSTDKAVWNAVMNNDVVQEFKRSFKDAKETYLKGSSTPPPPGFMMWVMKNVHAKIREFFKTMFGLTNILFQAGDHSYQAGEQNYDFYDCIVRMSFMLTVFVFVMVTVARIR

SEQ ID NO: 164420 - protein, 227 aa, Zea Mays
MSNAADVEAGAQARAAPATTGIKPPPGRYNNMTSNGPYTPPSPFYYDPAAAHGRHHWSWLVPLVVIANVLMFVLVMFYNNCPRSGGDCVGRGFLRRFSFQPLKENPLLGPTAATLQRYGALDWYKVVHGNQAWRLESCTWLHAGLIHLLANMISLIFIGVRLEQQFGFWKVGLVYLVSGFGGSVLSVFFIRKGVSVGASGALFGLLGAMLSELITNWSIYTNRLQPC

SEQ ID NO: 164421 - protein, 69 aa, Zea Mays
MHNITIKQIRLMFHETKVCQVKRREKKFDLLVVILNMIKRLPDYLLVKYSGWSIAHYTKEYQSNGGSIC

SEQ ID NO: 164422 - protein, 137 aa, Zea Mays
MFSEWKINSEARGSGNISTFDSGVENTEAEPVEVVVHGRKVVHVEHHGRPYAGAVLRFHARRAAGEAEWRYRSRDLCVISFSISAPFEMIRMEARQGIVLLRRSELIWFQARKGKSSTNKGTRTTSMVTTLTSRDIF

SEQ ID NO: 164423 - protein, 157 aa, Zea Mays
MKGSLSHELETGLPAADVWEVYGGLLVGDLIPQLLPQVFSKVELVEGDGGVGTVLLVTLPPEAFKEKFVKVDDENRVKECLVTEGSFFDRGFKKYLVRIEIIGEDREASTIRSTIEYEVDQEHAGNPPVASSSGLATIAKAIAEYIIKQKKKGPPES

SEQ ID NO: 164424 - protein, 202 aa, Zea Mays
MLVITYTSEHNHPWPTQRNALAGSTRNHHGKNSSGSSGSKGSQNEKQEQQQPSNVKEEPKDPAATTTATSTITTLTTSISPAAVVKEETLAAGSSEALGQVMDTAVADHNIELMDQVFSESYRPMIPEAGHPDDFFSDLAELESDPMSLIFSKEYMEAKPSGGDRGHHEKAISKDLDPLFDMLDWSANSSSAGSSFEQGKRG

SEQ ID NO: 164425 - protein, 246 aa, Zea Mays
MQHSCLFQIKKMPFEHTCQSTGKVEKNCMATNHWVKDRVLDWLAKDNKVGAKELKKRLEEQYHLKLSYWVVWDGRKKALEQLKGKWDDSFECIFSFKTEVEKTNPGSLVDIEYEKVGKKVRFIRMFVALKSCVDGFLNGCRPFLGVDSTHLTGKWKGQLASATAIDGNNWMFPVCHGVFGSETTDNWEWFFSRLHQAIGSPPGLVISTDAGKGIDSAVTKVFKNGVEHRECMRHLVANFQEPMKSL

SEQ ID NO: 164426 - protein, 156 aa, Zea Mays
MTDRNQWPKMDPGFKLCPPILKRAAGRPRERRYKSVAEGGTGKRSTRCKRCKQLGHMEKTCNEYVYESDAPPPAPPKPKRKRAKKNVTVVPSSSATNPIQEQPSLDEPFATPTRTITSVSTPSPMTRSMSRRLLQQNPSTPTSAITPVQTPSPMTR

SEQ ID NO: 164427 - protein, 735 aa, Zea Mays
MYKRNQKRCDALEETKEAFVPQKEEINELDAPKQDEDEDMVIIDGEKLMEETPAEDPPVTDQERTGKSEFQEQQVDDEEKCLATLEEPPIIGLVSMVTEQPSEDDGGVNFQDGGGSSAALLDKNAGEEIELVAGVRALQVPLTGNGSDASHESEMRKFNEVLTVREKNSEVDTQEVDGDVDKVLHDSVDDTILIDCSSENVEMEKAGNVTREMPENQAALDEDVGKPNEVVIGDKPQDTVTDKVVQEGREVLITDEMQQGTAGMHDEIEDDQFESVFVQADQVVTADNLLEQVTDREITVEENTALIVGERQQSTVTMDDDVVEDHSDTDGDHSNEHIEAVTTVKVPELKLIEDIFVQSDHAVATDNLPEQVRDCGITMETTSLIVDEKQQIMVTVDGDLVMDGSETDNVHPDEQMEVVTAEEVLEDTGITVEDVEEKQKSTVTVDKDVVDDHFFKTDDVHADEQMEASTTDEVPELTEADYEVVEEKQQSTYTMNGGIEDDHFKTHVAHADEKKEVVATDVPEVTGTVGEIEEKTSVTMDGDVVFDHADGQKEVIVTEVPDEVTVTGDEGVERKAAVITEAIPDHGTAPSIAHTMNGCVKETHFGDGNEQKKVITADIISIPQDDCVRKENASSIDVAESLSSNKSSGCKNSSEKNTTEPMAVLKDKGLKATKKPVDLLALSLGKLKAKLKDRLNAEKKKEAKRLALARVDENVCRSIPRKGAGQQRNLNLQQH

SEQ ID NO: 164428 - protein, 258 aa, Zea Mays
MNEEHTIGDSLDEAEQEELNHEIALESTEDCTGSLCKATAFLFPKTAFDFLTNVAASLFGIHGSPSPSSVLVDPRYEIVKMAEMQPCAEETPKEEQIVKFVAQIDKPILSSEDAVSKRFDVVTDCLDHHFVKENGHESVTRGWLKKVRLEWNILQNDLPDGIHVRVYEERMDLLRACIVGAPGTPYHDNLFFFDIFFPPDYPHEPPVSSSIPVSIVLVDKITCLETDLIAYQPRHRACRINYSALHCTTVNLSGHATA

SEQ ID NO: 164429 - protein, 280 aa, Zea Mays
MQVQHFEIIGLDKLLDNSSVESMNEEHTIGDSLDEAEQEELNHEIALESTEDCTGSLCKATAFLFPKTAFDFLTNVAASLFGIHGSPSPSSVLVDPRYEIVKMAEMQPCAEETPKEEQIVKFVAQIDKPILSSEDAVSKRFDVVTDCLDHHFVKENGHESVTRGWLKKVRLEWNILQNDLPDGIHVRVYEERMDLLRACIVGAPGTPYHDNLFFFDIFFPPDYPHEPPVSSSIPVSIVLVDKITCLETDLIAYQPRHRACRINYSALHCTTVNLSGHATA

SEQ ID NO: 164430 - protein, 315 aa, Zea Mays
MLSDKSSGHSLKDQLTRMAENDYLLSGGLEGIGSTGKKCEVARRRNGLDTNKPKKGGGPTGRELNIGQACFHSEPSNASNQFILAQLMQVQHFEIIGLDKLLDNSSVESMNEEHTIGDSLDEAEQEELNHEIALESTEDCTGSLCKATAFLFPKTAFDFLTNVAASLFGIHGSPSPSSVLVDPRYEIVKMAEMQPCAEETPKEEQIVKFVAQIDKPILSSEDAVSKRFDVVTDCLDHHFVKENGHESVTRGWLKKVRLEWNILQNDLPDGIHVRVYEERMDLLRACIVGAPGTPYHDNLFFFDIFFPPDYPHEPP

SEQ ID NO: 164431 - protein, 367 aa, Zea Mays
MLSDKSSGHSLKDQLTRMAENDYLLSGGLEGIGSTGKKCEVARRRNGLDTNKPKKGGGPTGRELNIGQACFHSEPSNASNQFILAQLMQVQHFEIIGLDKLLDNSSVESMNEEHTIGDSLDEAEQEELNHEIALESTEDCTGSLCKATAFLFPKTAFDFLTNVAASLFGIHGSPSPSSVLVDPRYEIVKMAEMQPCAEETPKEEQIVKFVAQIDKPILSSEDAVSKRFDVVTDCLDHHFVKENGHESVTRGWLKKVRLEWNILQNDLPDGIHVRVYEERMDLLRACIVGAPGTPYHDNLFFFDIFFPPDYPHEPPVSSSIPVSIVLVDKITCLETDLIAYQPRHRACRINYSALHCTTVNLSGHATA

SEQ ID NO: 164432 - protein, 144 aa, Zea Mays
MWLLVCLVLVDPRYEIVKMAEMQPCAEETPKEEQIVKFVAQIDKPILSSEDAVSKRFDVVTDCLDHHFVKENGHESVTRGWLKKVRLEWNILQNDLPDGIHVRVYEERMDLLRACIVGAPGTPYHDNLFFFDIFFPPDYPHEPP

SEQ ID NO: 164433 - protein, 250 aa, Zea Mays
MIIYFLSNCVIQERLPSQEAKLAPLLARANLVIARDIEWANIMFAFEQESRYIIMDPLFPQSPVGFIREKSNIIFRQLLRTRRPFVAEITDAMGNEIFKVRRPFWWINSSIYVEVNDKEIGVVHRRWHLWRRIYDLYLGNMQFAVVENPGFWNWTFNLVDEDDKMLAQIDRNWRGLGFELFTDAGQYAIRFGDEGQSHKFAPAEDVEELHVVRQLTLPERAVALALAISLDSDYFSRRGGWGLPFLIATE

SEQ ID NO: 164434 - protein, 158 aa, Zea Mays
MGNEIFKVRRPFWWINSSIYVEVNDKEIGVVHRRWHLWRRIYDLYLGNMQFAVVENPGFWNWTFNLVDEDDKMLAQIDRNWRGLGFELFTDAGQYAIRFGDEGQSHKFAPAEDVEELHVVRQLTLPERAVALALAISLDSDYFSRRGGWGLPFLIATE

SEQ ID NO: 164435 - protein, 50 aa, Zea Mays
MSPVADTGPELAVLQPGSWPNKSIVNHLNNEGLGSSNLAVAISFISWPRP

SEQ ID NO: 164436 - protein, 332 aa, Zea Mays
MEEHMGRRTVGGLLLTKGGSILLFREDGSRPRAKNCCSRHGCSGHHSVGKAKGKEVHRAAVANESTPATPRRPKICRNPDRMPPHGTSAPGSISKDAGGSCSETGNRSRDTPGPGRDLLARLKERVNTSRKRSLNRENSPQSPSGFTASSPSNSRSVSLSRPSHRAASRVRRADEGANAGADSVHRNGAGGARRSSQRGDAGLLLVEQQVARNHVPSEGFLSGFMARYRSGLQEGLSSLDDSVEDSNGYLRFDTGGIEELQNYLIFSDRHRGMRMDIDGMSYEVCLTDAIFPFPSRFILFSVLSSVRVACFGRADWYCKNRSFRRCIVHVPK

SEQ ID NO: 164437 - protein, 398 aa, Zea Mays
MEEHMGRRTVGGLLLTKGGSILLFREDGSRPRAKNCCSRHGCSGHHSVGKAKGKEVHRAAVANESTPATPRRPKICRNPDRMPPHGTSAPGSISKDAGGSCSETGNRSRDTPGPGRDLLARLKERVNTSRKRSLNRENSPQSPSGFTASSPSNSRSVSLSRPSHRAASRVRRADEGANAGADSVHRNGAGGARRSSQRGDAGLLLVEQQVARNHVPSEGFLSGFMARYRSGLQEGLSSLDDSVEDSNGYLRFDTGGIEELQNYLIFSDRHRGMRMDIDGMSYEVCLTDAIFPFPSRFILFSVLSSELLALGERIGTVKTGLSDDALSTCLNRSLYMPTAPGSHEDCETKCSICQEEYLSGEDVGKMACKHYYHLSCIEHWLRQKNRCPICKSVALKTK

SEQ ID NO: 164438 - protein, 141 aa, Zea Mays
MSSVASKVAVPESVLRKRKREEQWATEKKEKALVEKKKSIESRKLIFTRAKQYAEEYDAQEKELVQLKREARLKGGFYVSPEAKLLFVVRIRGINAMHPKTRKILQLLRLRSSMVCSSKSTRRLLTCYAGLSHMLHMGTQT

SEQ ID NO: 164439 - protein, 51 aa, Zea Mays
MFPYQLNFRTYLLVSLKQENMSEKYNKKCVRFYKKYDKKYVLFSYKNIIIF

SEQ ID NO: 164440 - protein, 718 aa, Zea Mays
MHVGSIMELLLTPESDLGYMVTHISLNTDGSSLLLVGSHNLNIMYVHERISEDGDTIICRTAPIASQILPSDSDGIKVLQASWHPFSNNHFAVLTSDAVFRLFDLSSDLEQPEQGFYLQPIVPGKCQNASAICPVGFSYGSDHLWDRFSVFILFSDGSIFVLCPVVPFGSDYSKKHIQEIYEDVNAFGLKSSNPNVVTNSHLAIAWLEATFPDLLHQSTDTSFLMSKAHAYAPLDDSLTLQGPLCTVCEESNESESKSSSCEGKAVGFMYSSAGKDSVLVTAWGSGLLQVDALADEIQPRWNIGVPSRLNVDSHGQINNVAMICDSNSQDPLALRSHRPSSTGSNVKSNIEAVWMGHSPPLLRLAIVDLALPKTPNDNSLSLFADPLVPERFYCAHGGGLDMVTLHFLPFSYPEMSSTPPSVHPVLTTGNSETSSPFLSGFVTIADAYGHVQLAGITCLGECFVVEMKGWKEPAPLQLDLESKIVKDVEPPATGMISKELIAGPDPPILPSSSSLKSLTPDSIEGKSTLHHYIKVFHEYYVEYGHKVFIELKEHADYLKTEMEDKQKRLEAVKKSLISVEAKDGDINKRIDRAFKVYELLEKRIDSFKMLPAANKKPLTQAEQEFKSQLDRFADVELDALRSSIAALSARMKRFAQQSTGSAASTGMVPWQAQRAGRSHISESQMSLLKSSLEKLSLLNEENSLKLRLIDHELKNQER

SEQ ID NO: 164441 - protein, 494 aa, Zea Mays
MSKAHAYAPLDDSLTLQGPLCTVCEESNESESKSSSCEGKAVGFMYSSAGKDSVLVTAWGSGLLQVDALADEIQPRWNIGVPSRLNVDSHGQINNVAMICDSNSQDPLALRSHRPSSTGSNVKSNIEAVWMGHSPPLLRLAIVDLALPKTPNDNSLSLFADPLVPERFYCAHGGGLDMVTLHFLPFSYPEMSSTPPSVHPVLTTGNSETSSPFLSGFVTIADAYGHVQLAGITCLGECFVVEMKGWKEPAPLQLDLESKIVKDVEPPATGMISKELIAGPDPPILPSSSSLKSLTPDSIEGKSTLHHYIKVFHEYYVEYGHKVFIELKEHADYLKTEMEDKQKRLEAVKKSLISVEAKDGDINKRIDRAFKVYELLEKRIDSFKMLPAANKKPLTQAEQEFKSQLDRFADVELDALRSSIAALSARMKRFAQQSTGSAASTGMVPWQAQRAGRSHISESQMSLLKSSLEKLSLLNEENSLKLRLIDHELKNQER

SEQ ID NO: 164442 - protein, 740 aa, Zea Mays
MPQPLCLHGLLDWSWPLQYSCSMHVGSIMELLLTPESDLGYMVTHISLNTDGSSLLLVGSHNLNIMYVHERISEDGDTIICRTAPIASQILPSDSDGIKVLQASWHPFSNNHFAVLTSDAVFRLFDLSSDLEQPEQGFYLQPIVPGKCQNASAICPVGFSYGSDHLWDRFSVFILFSDGSIFVLCPVVPFGSDYSKKHIQEIYEDVNAFGLKSSNPNVVTNSHLAIAWLEATFPDLLHQSTDTSFLMSKAHAYAPLDDSLTLQGPLCTVCEESNESESKSSSCEGKAVGFMYSSAGKDSVLVTAWGSGLLQVDALADEIQPRWNIGVPSRLNVDSHGQINNVAMICDSNSQDPLALRSHRPSSTGSNVKSNIEAVWMGHSPPLLRLAIVDLALPKTPNDNSLSLFADPLVPERFYCAHGGGLDMVTLHFLPFSYPEMSSTPPSVHPVLTTGNSETSSPFLSGFVTIADAYGHVQLAGITCLGECFVVEMKGWKEPAPLQLDLESKIVKDVEPPATGMISKELIAGPDPPILPSSSSLKSLTPDSIEGKSTLHHYIKVFHEYYVEYGHKVFIELKEHADYLKTEMEDKQKRLEAVKKSLISVEAKDGDINKRIDRAFKVYELLEKRIDSFKMLPAANKKPLTQAEQEFKSQLDRFADVELDALRSSIAALSARMKRFAQQSTGSAASTGMVPWQAQRAGRSHISESQMSLLKSSLEKLSLLNEENSLKLRLIDHELKNQER

SEQ ID NO: 164443 - protein, 741 aa, Zea Mays
MTYMMIGLHGLLDWSWPLQYSCSMHVGSIMELLLTPESDLGYMVTHISLNTDGSSLLLVGSHNLNIMYVHERISEDGDTIICRTAPIASQILPSDSDGIKVLQASWHPFSNNHFAVLTSDAVFRLFDLSSDLEQPEQGFYLQPIVPGKCQNASAICPVGFSYGSDHLWDRFSVFILFSDGSIFVLCPVVPFGSDYSKKHIQEIYEDVNAFGLKSSNPNVVTNSHLAIAWLEATFPDLLHQSTDTSFLMSKAHAYAPLDDSLTLQGPLCTVCEESNESESKSSSCEGKAVGFMYSSAGKDSVLVTAWGSGLLQVDALADEIQPRWNIGVPSRLNVDSHGQINNVAMICDSNSQDPLALRSHRPSSTGSNVKSNIEAVWMGHSPPLLRLAIVDLALPKTPNDNSLSLFADPLVPERFYCAHGGGLDMVTLHFLPFSYPEMSSTPPSVHPVLTTGNSETSSPFLSGFVTIADAYGHVQLAGITCLGECFVVEMKGWKEPAPLQLDLESKIVKDVEPPATGMISKELIAGPDPPILPSSSSLKSLTPDSIEGKSTLHHYIKVFHEYYVEYGHKVFIELKEHADYLKTEMEDKQKRLEAVKKSLISVEAKDGDINKRIDRAFKVYELLEKRIDSFKMLPAANKKPLTQAEQEFKSQLDRFADVELDALRSSIAALSARMKRFAQQSTGSAASTGMVPWQAQRAGRSHISESQMSLLKSSLEKLSLLNEENSLKLRLIDHELKNQER

SEQ ID NO: 164444 - protein, 910 aa, Zea Mays
MGTRRVAMSFTHGPMTVGFVVLLTCVPIRVISIKTATSSPNNLPTTAPLHSSSSPSPPPPPPMTRITAPPPPSSPPGSPPPIRHSPAPATPPSRRRGRHSPSPSLALTPSSASTSSRPKPRPAPKRAYSPAQWVPLNSHPVFSRRDGDGGGGDAAWDAAASRLYAWDPSACSVHRIGVRTRDPDAENGEVDVTVESAVPSELLTPESDLGYMVTHISLNTDGSSLLLVGSHNLNIMYVHERISEDGDTIICRTAPIASQILPSDSDGIKVLQASWHPFSNNHFAVLTSDAVFRLFDLSSDLEQPEQGFYLQPIVPGKCQNASAICPVGFSYGSDHLWDRFSVFILFSDGSIFVLCPVVPFGSDYSKKHIQEIYEDVNAFGLKSSNPNVVTNSHLAIAWLEATFPDLLHQSTDTSFLMSKAHAYAPLDDSLTLQGPLCTVCEESNESESKSSSCEGKAVGFMYSSAGKDSVLVTAWGSGLLQVDALADEIQPRWNIGVPSRLNVDSHGQINNVAMICDSNSQDPLALRSHRPSSTGSNVKSNIEAVWMGHSPPLLRLAIVDLALPKTPNDNSLSLFADPLVPERFYCAHGGGLDMVTLHFLPFSYPEMSSTPPSVHPVLTTGNSETSSPFLSGFVTIADAYGHVQLAGITCLGECFVVEMKGWKEPAPLQLDLESKIVKDVEPPATGMISKELIAGPDPPILPSSSSLKSLTPDSIEGKSTLHHYIKVFHEYYVEYGHKVFIELKEHADYLKTEMEDKQKRLEAVKKSLISVEAKDGDINKRIDRAFKVYELLEKRIDSFKMLPAANKKPLTQAEQEFKSQLDRFADVELDALRSSIAALSARMKRFAQQSTGSAASTGMVPWQAQRAGRSHISESQMSLLKSSLEKLSLLNEENSLKLRLIDHELKNQER

SEQ ID NO: 164445 - protein, 450 aa, Zea Mays
MYSSAGKDSVLVTAWGSGLLQVDALADEIQPRWNIGVPSRLNVDSHGQINNVAMICDSNSQDPLALRSHRPSSTGSNVKSNIEAVWMGHSPPLLRLAIVDLALPKTPNDNSLSLFADPLVPERFYCAHGGGLDMVTLHFLPFSYPEMSSTPPSVHPVLTTGNSETSSPFLSGFVTIADAYGHVQLAGITCLGECFVVEMKGWKEPAPLQLDLESKIVKDVEPPATGMISKELIAGPDPPILPSSSSLKSLTPDSIEGKSTLHHYIKVFHEYYVEYGHKVFIELKEHADYLKTEMEDKQKRLEAVKKSLISVEAKDGDINKRIDRAFKVYELLEKRIDSFKMLPAANKKPLTQAEQEFKSQLDRFADVELDALRSSIAALSARMKRFAQQSTGSAASTGMVPWQAQRAGRSHISESQMSLLKSSLEKLSLLNEENSLKLRLIDHELKNQER

SEQ ID NO: 164446 - protein, 161 aa, Zea Mays
MAPRNALPAASAVANGMVMEPRFRGVRKRPWGRFAAEIRDPARKARVWLGTFDTAEAAARAYDAAALHFRGPKAKTNFPVAFAALPPPPPPKKPAAVTVSPSSSSTVESSSSSSRDSPATPPRPASPSQQSDTGSSSSVVDASPAVGVGFDLNMPPPAEVA

SEQ ID NO: 164447 - protein, 579 aa, Zea Mays
MDTVLQRLLDELTHMEARLTCVLAGRCGEQSARARTPSSDDGSTPSYLAPTSEAVDKLRQDLNPCCVYRDSIQHHRVEDPSAEEDLQPQAEVVESFESESAPPPIVYDCYDEPNHDEIAEVLALLEYNEGTSSATVLVDYTTTSMSPTKCSTMDFSDADSARTCDVTDVPIVHSALKAFVKMLNGGSEHPQEVTQTSIARLMDSSRSWIFTELGQPTYCPETFPEVPFERPTPPIIFFDEEHIFEEESSSSTTATPRNPSDPKQAGGDLDSIATAALSASEEIPQSLLVIDLERATSKCIRTHAVNDVPAVHSIIKGLQLERIGLAGSAPDLDTLTTARHCGSELSCQLGSNKRDVSLRVGCDQSYEWVDPETLDRSFVVLDNACATHEVFEGLVAETHLHFIGTYRGVVSTAFCTEIVESADAYIFAGSIFKDYSSVGYSFLLKKAKAIIVQPERVGVGNGLSFRCLMMKEYWTEIAKKVKKNTTTYENYKRNFVPEGQALESEPNEPLRVNVLFKYIQKMMTVNSVVMAETDDSWFNCHKLKLPESCGYQFQMQYGLIGWSMGALLGYAQVAMTMIL

SEQ ID NO: 164448 - protein, 239 aa, Zea Mays
MDTVLQRLLDELTHMEARLTCVLAGRCGEQSARARTPSSDDGSTPSYLAPTSEAVDKLRQDLNPCCVYRDSIQHHRVEDPSAEEDLQPQAEVVESFESESAPPPIVYDCYDEPNHDEIAEVLALLEYNEGTSSATVLVDYTTTSMSPTKCSTMDFSDADSARTCDVTDVPIVHSALKAFVKMLNGGSEHPQEVTQTSIARCARISACDTHQPTTSMSWLHTRVHRSVQTPSLRGVIGIA

SEQ ID NO: 164449 - protein, 349 aa, Zea Mays
MASNLLSAVAIEKETPESELPPTFLREDGRGAGSVRARFESMIRRVQGEVCAALEEADGGGARFVEDVWSRPGGGGGISRVLQDGRVFEKAGVNVSVVYGVMPPDAYRAAKGEAGKNEVAADGHKPGPVPFFAAGISSVLHPKNPFAPTLHFNYRYFETDAPKDAPGAPRQWWFGGGTDLTPSYIIEEDVKHFHSVQKQACDKFDPSFHPRFKKWCDDYFYIKHRNERRGLGGIFFDDLNDYDQEMLLNFATKCADSVLPAYIPIIERRKDTPFNEEHKEWQQLRRGRYVEFNLVYDRGTTFGLKTGGRIESILVSLPLTARWQYDHKPEEGTEEWKLLDACINPKDWI

SEQ ID NO: 164450 - protein, 97 aa, Zea Mays
MLLNFATKCADSVLPAYIPIIERRKDTPFNEEHKEWQQLRRGRYVEFNLVYDRGTTFGLKTGGRIESILVSLPLTARWQYDHMWRCLMQGTTGLRPS

SEQ ID NO: 164451 - protein, 58 aa, Zea Mays
MATSLAPCHSSLRVLARCFTPKIHLLQHCILTTVTLRQMHPKMHLVHQDSGGLAVVLT

SEQ ID NO: 164452 - protein, 104 aa, Zea Mays
MLLNFATKCADSVLPAYIPIIERRKDTPFNEEHKEWQQLRRGRYVEFNLVYDRGTTFGLKTGGRIESILVSLPLTARWQYDHKPEEGTEEWKLLDACINPKDWI

SEQ ID NO: 164453 - protein, 222 aa, Zea Mays
MGTPKAEVVACVLGQESNVLHPKNPFAPTLHFNYRYFETDAPKDAPGAPRQWWFGGGTDLTPSYIIEEDVKHFHSVQKQACDKFDPSFHPRFKKWCDDYFYIKHRNERRGLGGIFFDDLNDYDQEMLLNFATKCADSVLPAYIPIIERRKDTPFNEEHKEWQQLRRGRYVEFNLVYDRGTTFGLKTGGRIESILVSLPLTARWQYDHMWRCLMQGTTGLRPS

SEQ ID NO: 164454 - protein, 141 aa, Zea Mays
MIISILSTVTSGVGLVEYFLMTLMITIKKCFSTSLQVKPFARMIGWNYLYSECADSVLPAYIPIIERRKDTPFNEEHKEWQQLRRGRYVEFNLVYDRGTTFGLKTGGRIESILVSLPLTARWQYDHMWRCLMQGTTGLRPS

SEQ ID NO: 164455 - protein, 53 aa, Zea Mays
MQFCSQFVKQTHCSHVMWCTYLSPFVGDLLLNMLKWVRKKDSADLSAVSVLRV

SEQ ID NO: 164456 - protein, 82 aa, Zea Mays
MIISILSTVTSGVGLVEYFLMTLMITIKKCFSTSLQVKPFARMIGWNYLYSGLRPWYNIRPKDWRKNREHTRVPSTHSTVAV

SEQ ID NO: 164457 - protein, 79 aa, Zea Mays
MNRTIIVRRNYLHFVKKYQRYEKRHSNIPAHISPCFRVKEGDHVIIGQCRPLSKTVRFNVVKVIPAGSAAAGKKAFTAA

SEQ ID NO: 164458 - protein, 426 aa, Zea Mays
MFMTLMGTSTWILMQGSYVYDINGNKYLDSLAGLWCTALGGSEPRLVKAATEQLNNLPFYHSFWNRTTKPSLDLAQEILSMFTAREMGKVFFTNSGSEANDSQVKLVWYYNNALGRPDKKKFIARSKAYHGSTLISASLTGLPALHQKFDLPAPFVLHTDCPHYWRYHLPGETEEEFATRLATNLENLILKEGPETIAAFIAEPVMGAGGVIPPPKTYFDKVITAFGRLGTMFGCDYYNIKPDLVSLAKALSNAYVPIGATLVSPEISEVIHSQSNKLGSFAHGFTYSGHPVACAVAIEALKLYRERDIPGHVKQIAPKFQDGIRALADSPIIGEIRGLGMIMGTEFTNNKSPADLFPAEWGVGAIFGEECQKRGMLVRVAGDAIMMSPTLIMTPGEVDELVSIYGEALRATEERVSDLKMKSEKN

SEQ ID NO: 164459 - protein, 431 aa, Zea Mays
MTIARRLLRSNASAQAISLLKHVTGTASLQGHAHSPLDASVRHFSSAPSAQSDTTEENGFKGHGMLAPFTAGWQSNDLHPLIIERSEGSYVYDINGNKYLDSLAGLWCTALGGSEPRLVKAATEQLNNLPFYHSFWNRTTKPSLDLAQEILSMFTAREMGKVFFTNSGSEANDSQVKLVWYYNNALGRPDKKKFIARSKAYHGSTLISASLTGLPALHQKFDLPAPFVLHTDCPHYWRYHLPGETEEEFATRLATNLENLILKEGPETIAAFIAEPVMGAGGVIPPPKTYFDKVITAFGRLGTMFGCDYYNIKPDLVSLAKALSNAYVPIGATLVSPEISEVIHSQSNKLGSFAHGFTYSGHPVACAVAIEALKLYRERDIPGHVKQIAPKFQDGIRALADSPIIGEGLVPSLERSARSAACWSGLLATPS

SEQ ID NO: 164460 - protein, 447 aa, Zea Mays
MTIARRLLRSNASAQAISLLKHVTGTASLQGHAHSPLDASVRHFSSAPSAQSDTTEENGFKGHGMLAPFTAGWQSNDLHPLIIERSEGSYVYDINGNKYLDSLAGLWCTALGGSEPRLVKAATEQLNNLPFYHSFWNRTTKPSLDLAQEILSMFTAREMGKVFFTNSGSEANDSQVKLVWYYNNALGRPDKKKFIARSKAYHGSTLISASLTGLPALHQKFDLPAPFVLHTDCPHYWRYHLPGETEEEFATRLATNLENLILKEGPETIAAFIAEPVMGAGGVIPPPKTYFDKVQAVVKKYDILFIADEVITAFGRLGTMFGCDYYNIKPDLVSLAKALSNAYVPIGATLVSPEISEVIHSQSNKLGSFAHGFTYSGHPVACAVAIEALKLYRERDIPGHVKQIAPKFQDGIRALADSPIIGECSRTSDTWLRDDYGNRIHQQQITG

SEQ ID NO: 164461 - protein, 470 aa, Zea Mays
MTIARRLLRSNASAQAISLLKHVTGTASLQGHAHSPLDASVRHFSSAPSAQSDTTEENGFKGHGMLAPFTAGWQSNDLHPLIIERSEGSYVYDINGNKYLDSLAGLWCTALGGSEPRLVKAATEQLNNLPFYHSFWNRTTKPSLDLAQEILSMFTAREMGKVFFTNSGSEANDSQVKLVWYYNNALGRPDKKKFIARSKAYHGSTLISASLTGLPALHQKFDLPAPFVLHTDCPHYWRYHLPGETEEEFATRLATNLENLILKEGPETIAAFIAEPVMGAGGVIPPPKTYFDKALSNAYVPIGATLVSPEISEVIHSQSNKLGSFAHGFTYSGHPVACAVAIEALKLYRERDIPGHVKQIAPKFQDGIRALADSPIIGEIRGLGMIMGTEFTNNKSPADLFPAEWGVGAIFGEECQKRGMLVRVAGDAIMMSPTLIMTPGEVDELVSIYGEALRATEERVSDLKMKSEKN

SEQ ID NO: 164462 - protein, 306 aa, Zea Mays
MTIARRLLRSNASAQAISLLKHVTGTASLQGHAHSPLDASVRHFSSAPSAQSDTTEENGFKGHGMLAPFTAGWQSNDLHPLIIERSEGSYVYDINGNKYLDSLAGLWCTALGGSEPRLVKAATEQLNNLPFYHSFWNRTTKPSLDLAQEILSMFTAREMGKVFFTNSGSEANDSQVKLVWYYNNALGRPDKKKFIARSKAYHGSTLISASLTGLPALHQKFDLPAPFVLHTDCPHYWRYHLPGETEEEFATRLATNLENLILKEGPETIAAFIAEPVMGAGGVIPPPKTYFDKVIHYGFQKLLTLL

SEQ ID NO: 164463 - protein, 403 aa, Zea Mays
MTIARRLLRSNASAQAISLLKHVTGTASLQGHAHSPLDASVRHFSSAPSAQSDTTEENGFKGHGMLAPFTAGWQSNDLHPLIIERSEGSYVYDINGNKYLDSLAGLWCTALGGSEPRLVKAATEQLNNLPFYHSFWNRTTKPSLDLAQEILSMFTAREMGKVFFTNSGSEANDSQVKLVWYYNNALGRPDKKKFIARSKAYHGSTLISASLTGLPALHQKFDLPAPFVLHTDCPHYWRYHLPGETEEEFATRLATNLENLILKEGPETIAAFIAEPVMGAGGVIPPPKTYFDKALSNAYVPIGATLVSPEISEVIHSQSNKLGSFAHGFTYSGHPVACAVAIEALKLYRERDIPGHVKQIAPKFQDGIRALADSPIIGEGLVPSLERSARSAACWSGLLATPS

SEQ ID NO: 164464 - protein, 317 aa, Zea Mays
MTIARRLLRSNASAQAISLLKHVTGTASLQGHAHSPLDASVRHFSSAPSAQSDTTEENGFKGHGMLAPFTAGWQSNDLHPLIIERSEGSYVYDINGNKYLDSLAGLWCTALGGSEPRLVKAATEQLNNLPFYHSFWNRTTKPSLDLAQEILSMFTAREMGKVFFTNSGSEANDSQVKLVWYYNNALGRPDKKKFIARSKAYHGSTLISASLTGLPALHQKFDLPAPFVLHTDCPHYWRYHLPGETEEEFATRLATNLENLILKEGPETIAAFIAEPVMGAGGVIPPPKTYFDKVQAVVKKYDILFIADEMLSTDNSF

SEQ ID NO: 164465 - protein, 486 aa, Zea Mays
MTIARRLLRSNASAQAISLLKHVTGTASLQGHAHSPLDASVRHFSSAPSAQSDTTEENGFKGHGMLAPFTAGWQSNDLHPLIIERSEGSYVYDINGNKYLDSLAGLWCTALGGSEPRLVKAATEQLNNLPFYHSFWNRTTKPSLDLAQEILSMFTAREMGKVFFTNSGSEANDSQVKLVWYYNNALGRPDKKKFIARSKAYHGSTLISASLTGLPALHQKFDLPAPFVLHTDCPHYWRYHLPGETEEEFATRLATNLENLILKEGPETIAAFIAEPVMGAGGVIPPPKTYFDKVQAVVKKYDILFIADEALSNAYVPIGATLVSPEISEVIHSQSNKLGSFAHGFTYSGHPVACAVAIEALKLYRERDIPGHVKQIAPKFQDGIRALADSPIIGEIRGLGMIMGTEFTNNKSPADLFPAEWGVGAIFGEECQKRGMLVRVAGDAIMMSPTLIMTPGEVDELVSIYGEALRATEERVSDLKMKSEKN

SEQ ID NO: 164466 - protein, 486 aa, Zea Mays
MRKAISLLKHVTGTASLQGHAHSPLDASVRHFSSAPSAQSDTTEENGFKGHGMLAPFTAGWQSNDLHPLIIERSEGSYVYDINGNKYLDSLAGLWCTALGGSEPRLVKAATEQLNNLPFYHSFWNRTTKPSLDLAQEILSMFTAREMGKVFFTNSGSEANDSQVKLVWYYNNALGRPDKKKFIARSKAYHGSTLISASLTGLPALHQKFDLPAPFVLHTDCPHYWRYHLPGETEEEFATRLATNLENLILKEGPETIAAFIAEPVMGAGGVIPPPKTYFDKVITAFGRLGTMFGCDYYNIKPDLVSLAKALSNAYVPIGATLVSPEISEVIHSQSNKLGSFAHGFTYSGHPVACAVAIEALKLYRERDIPGHVKQIAPKFQDGIRALADSPIIGEIRGLGMIMGTEFTNNKSPADLFPAEWGVGAIFGEECQKRGMLVRVAGDAIMMSPTLIMTPGEVDELVSIYGEALRATEERVSDLKMKSEKN

SEQ ID NO: 164467 - protein, 1293 aa, Zea Mays
MEAEVSAPADLKAPDKTTVHGDDKENIPNGNANLQVKEADNDEDDGTRSDGFELIDVKQNFDSARVEEEMAAPRSTTVDTSPVTEESETQEDKTTAHEEQSVATNTRHLESSMLNQQTEQLEKLTMRIEELESENDKLVKDLTEAENKQSLHYSCLQEAQCSLAMKDKELAEVTESLKDLGSELGTSKKRIQEIEAELDSSADKLCKLEELKDERSLHAAQEAKRASELDKMLELAQSNMKEMEKHIGSLQEEVKGYQDKAADHQQIEESLRNTISELKVVQEALELSKSQVENLKQKLASQDTDFSKLTEELNLHCSSEESLKEKSLKLETELTTVLEELQAKGGLDKLKDENKTLQGSLVDLNSKLSEKDSILHQAEDELSKAQLVLLEALSQKEELELNLNSLSEQHGKSKAFGENANQKILDLEAQIQAMHAAEQALKFELKEAEASVQAAEKKGSDLEQQLSEIENKFVKSSEEIELLKERIQQEAAVSAERGMQLQETVTSVEGYKEKIIELQSSLGSSVSKNQLLEQEVMELTDKCSEHQEQAHSVRQRSLELEDLLHTSKTHAEGVYSRTQELEQELNNTYEMFKGVEEELEQYRSKASQLSDDLEAYQTKAASLEAVVEAASEKEKEFMESLSQITEEKKKTESRNAEIEAQLQEALEAVGQKEAESRNLNEKLVALESEIESSMHVNEALKQEINAKLVMVDELQEKCSFISSEKEEVAEKLSIHEEKLEHLTEEHSRGLELLSVAESRNKETESQLREVLEKLAQKEAEVTDLTEKLALLEAENEKMTCLNEALKEVDAKLVMFDELQERFSSTLAEKEEAAEKLAVHERTISQLTEKEGEVKESSSQKIKILEEQLAETHSKVEHFLTEKESLVQETSSLNKEFEVHQNKLNDLQLALAAALAEKEAAFEEIHSLCKTLDGMIEHKAELEIQVSSTIQEHEELKSKYQNTMEEKQMLSDKYETAKKELEDAIAKLEEEMNVDKSEKESHISKLERQITLSEIKYMEEIKTMQVETTEKNEALTAKMQEHTDLQHEKHELEQQLLEVRKELDGAYHTIVNQEEQASLREIKWDTFRIYSEDRLEAEQQRAEELELQVAALKQQLQEAEEEQVSLREVQWEGDQNHSLNELKSQRQYATDLEKQIEDLTQKLRSADAHYKQKATEERDKLAEITTEFSKLTHKVSKSVELEKKVQDLEQKLQLAYSKSDEQATDVLESRSREFSLDSLSSLVKQQDRTQAADKASPSPTLQEVQEPSGTMAFKFILGVALLSVLAGVFLGKRY

SEQ ID NO: 164468 - protein, 659 aa, Zea Mays
MEAEVSAPADLKAPDKTTVHGDDKENIPNGNANLQVKEADNDEDDGTRSDGFELIDVKQNFDSARVEEEMAAPRSTTVDTSPVTEESETQEDKTTAHEEQSVATNTRHLESSMLNQQTEQLEKLTMRIEELESENDKLVKDLTEAENKQSLHYSCLQEAQCSLAMKDKELAEVTESLKDLGSELGTSKKRIQEIEAELDSSADKLCKLEELKDERSLHAAQEAKRASELDKMLELAQSNMKEMEKHIGSLQEEVKGYQDKAADHQQIEESLRNTISELKVVQEALELSKSQVENLKQKLASQDTDFSKLTEELNLHCSSEESLKEKSLKLETELTTVLEELQAKGGLDKLKDENKTLQGSLVDLNSKLSEKDSILHQAEDELSKAQLVLLEALSQKEELELNLNSLSEQHGKSKAFGENANQKILDLEAQIQAMHAAEQALKFELKEAEASVQAAEKKGSDLEQQLSEIENKFVKSSEEIELLKERIQQEAAVSAERGMQLQETVTSVEGYKEKIIELQSSLGSSVSKNQLLEQEVMELTDKCSEHQEQAHSVRQRSLELEDLLHTSKTHAEGVYSRTQELEQELNNTYEMFKGVEEELEQYRSKASQLSDDLEAYQTKAASLEAVVEAASEKEKEFMESLSQITEEKKKSEELAAKYD

SEQ ID NO: 164469 - protein, 318 aa, Zea Mays
MLLLTWTTQTRRCITHCHPTLGLVFILELSKGQHLLSRMMFETFVRADGAFIPFAHDFDISTVTTTVRGVGDIGDVKVIDLQCPLNRLIGRRVCKIGRSSGHTTGTVMAYALEYNDEKGISFFTDLLVVGENRQTFDLEGDSGSLIILTGQDSEKPRPIGIIWGGTANRGRLKLRCDHGPQNWTSGVDLGRLLDRLELDLIITSESLKDAVQQQRRALAAAANSAAGESSTAAAPVLEEKVEEIFEPLGIKIEQLRRHDVSASEAEEAAGINVEERQFISNFVGRSPVRDDQGAPRQIANLNNPSEEELAMLLHLGDQ

SEQ ID NO: 164470 - protein, 399 aa, Zea Mays
MRPSDDRAQLSGFAQSDESTLDVEGHCCHQPSFPCSPSMQPIVSGCTHTENSAAYFLWPTSNLQHCAAEGRANYFANLSKGLLPKIGRRLPKGQQANSLLDLMTIRAFHSKVLRCFGLGTAVGFRIRKGVLTDIPAILCFVARKVHKKWLDPAHCLPAILAGPGGIWCDVDVVEFSYYGAPAQTPKVQIFTELVDKLCGSDECIGSGSQVASQDTFGTLGAIVKRRTGNKLVGFVTNRHVAVDLDYPNQKMYHPLPPNLGPGVYLGAVERATSFITDDVWYGIYAGTNPDAVQQQRRALAAAANSAAGESSTAAAPVLEEKVEEIFEPLGIKIEQLRRHDVSASEAEEAAGINVEERQFISNFVGRSPVRDDQGAPRQIANLNNPSEEELAMLLHLGDQ

SEQ ID NO: 164471 - protein, 495 aa, Zea Mays
MRPSDDRAQLSGFAQSDESTLDVEGHCCHQPSFPCSPSMQPIVSGCTHTENSAAYFLWPTSNLQHCAAEGRANYFANLSKGLLPKIGRRLPKGQQANSLLDLMTIRAFHSKGPGGIWCDVDVVEFSYYGAPAQTPKVQIFTELVDKLCGSDECIGSGSQVASQDTFGTLGAIVKRRTGNKLVGFVTNRHVAVDLDYPNQKMYHPLPPNLGPGVYLGAVERATSFITDDVWYGIYAGTNPVTTTVRGVGDIGDVKVIDLQCPLNRLIGRRVCKIGRSSGHTTGTVMAYALEYNDEKGISFFTDLLVVGENRQTFDLEGDSGSLIILTGQDSEKPRPIGIIWGGTANRGRLKLRCDHGPQNWTSGVDLGRLLDRLELDLIITSESLKDAVQQQRRALAAAANSAAGESSTAAAPVLEEKVEEIFEPLGIKIEQLRRHDVSASEAEEAAGINVEERQFISNFVGRSPVRDDQGAPRQIANLNNPSEEELAMLLHLGDQ

SEQ ID NO: 164472 - protein, 252 aa, Zea Mays
MRPSDDRAQLSGFAQSDESTLDVEGHCCHQPSFPCSPSMQPIVSGCTHTENSAAYFLWPTSNLQHCAAEGRANYFANLSKGLLPKIGRRLPKGQQANSLLDLMTIRAFHSKGPGGIWCDVDVVEFSYYGAPAQTPKVQIFTELVDKLCGSDECIGSGSQVASQDTFGTLGAIVKRRTGNKLVGFVTNRHVAVDLDYPNQKMYHPLPPNLGPGVYLGAVERATSFITDDVWYGIYAGTNPGRGVISYVVNIGN

SEQ ID NO: 164473 - protein, 294 aa, Zea Mays
MPCSNSQTYVLCSNESAETFVRADGAFIPFAHDFDISTVTTTVRGVGDIGDVKVIDLQCPLNRLIGRRVCKIGRSSGHTTGTVMAYALEYNDEKGISFFTDLLVVGENRQTFDLEGDSGSLIILTGQDSEKPRPIGIIWGGTANRGRLKLRCDHGPQNWTSGVDLGRLLDRLELDLIITSESLKDAVQQQRRALAAAANSAAGESSTAAAPVLEEKVEEIFEPLGIKIEQLRRHDVSASEAEEAAGINVEERQFISNFVGRSPVRDDQGAPRQIANLNNPSEEELAMLLHLGDQ

SEQ ID NO: 164474 - protein, 299 aa, Zea Mays
MPVILREMEDHSVHPMSKSNHGSLSGNGYEMKHSGHKVCDWDSSSKSDRSHQEASAASESSPNEHTSTQSDNDEDHGKDNQDTMKPVLSLGKEGSAFLAPKLHYSPSFACIPYTVDAYYSGVGVLTGYAPHAIVCSLLIFQFLSSWPHSVHPQQNDTTNTPGMLPVEPAEEPIYVNAKQYHAILRRRQTRAKLEAQNKMVKNRKAAKEGEPFWDSPWGRGRPGWHIECSAMSAHYLGHVFDIHGGGKDLIFPHHENELAQSQAAYPESEVKCWMHNGFVNKDDKKMAKSDNNFSRLEIS

SEQ ID NO: 164475 - protein, 291 aa, Zea Mays
MPVILREMEDHSVHPMSKSNHGSLSGNGYEMKHSGHKVCDWDSSSKSDRSHQEASAASESSPNEHTSTQSDNDEDHGKDNQDTMKPVLSLGKEGSAFLAPKLHYSPSFACIPYTVDAYYSGVGVLTGYAPHAIVHPQQNDTTNTPGMLPVEPAEEPIYVNAKQYHAILRRRQTRAKLEAQNKMVKNRKAAKEGEPFWDSPWGRGRPGWHIECSAMSAHYLGHVFDIHGGGKDLIFPHHENELAQSQAAYPESEVKCWMHNGFVNKDDKKMAKSDNNFSRLEMYLTYFRFKL

SEQ ID NO: 164476 - protein, 52 aa, Zea Mays
MFVIQNNNMFVTLAKIKMEKKKNAINLLCSNEIPIHAAIVKLGTLCSRIINL

SEQ ID NO: 164477 - protein, 212 aa, Zea Mays
MEDGSSAPRRATPPTRRSRSADFHNFSERRRRDRINEKLRALQELLPNCTKTDKVSMLDEAIDYLKSLQLQLQMLVMGKGGGMAPVVPPELQQYMHYITADPAHQMMPPPLRPSAGQLQPAAGRQFQITQAAAAAANNDNDPQRRRQSNVESDFLSQMQNLHPSDQPPHHHNFLRPPRLQLFTPRGGGGGLPTTSHNAGWISGRSSSYNFME

SEQ ID NO: 164478 - protein, 654 aa, Zea Mays
MHDYPKRNPRRASTSKSKGVASGGYASRPTAESSTKKIEQSRNNEGDFSRANGSLYGEAAEQASTAEESSQVYMTGDILSGAERDGAGTEEEADQNQSSALPSASMDDDSIDRQLDEYRGKISALVSSKPEPSSLASVAGQNESVGGFHGQHEPITGSEEHGSSIVDAPTKGRLFAEAVVGHKDFTESAAGKASSENEEGQAVSLEDDVGISTDADEELPVSEDDPEVLLRRLQELADENYSTGNNCFVFPEVVKADSMIDLYLNRSMSALASESDVFVKGAFNGWRWNRFTETMHRSELRGDWWCCKLYIPKQAYRLDFVFFNGDTVYENNNHNDFFLEIESDIDEHSFEDFLVEEKRKELERLAAEEAERKRQAEERHRREEERAAMEADRAQARSEVEMKKEKLRQMLSSASRYAENLWYIEPNTYRGGDRVRLYYNRSSRSLMHNTEIWMHGGYNNWIDGLSIAERLVKSHEKEGDWWYVEVTLPERALVLDWVFADGPPGNAWNYDNNGRQDFHAIVPNNISDDIFWVEEEHRIFTRLQQERRERESAERIKAERSAKMKAEMKEKTMRAFLLSQKHIVYTEPLEVRAGTTVDVLYNPSNTVLNGKSEVWFRGSFNRWTHPSGPLPPQKMVKAENSSHLRTTVFPWMHI

SEQ ID NO: 164479 - protein, 843 aa, Zea Mays
MEMNLRAESPLCSRGRPALVVRPAAAATGLALSVVRCSRFTRGGLVRCMVSSSDYPKRNPRRASTSKSKGVASGGYASRPTAESSTKKIEQSRNNEGDFSRANGSLYGEAAEQASTAEESSQVYMTGDILSGAERDGAGTEEEADQNQSSALPSASMDDDSIDRQLDEYRGKISALVSSKPEPSSLASVAGQNESVGGFHGQHEPITGSEEHGSSIVDAPTKGRLFAEAVVGHKDFTESAAGKASSENEEGQAVSLEDDVGISTDADEELPVSEDDPEVLLRRLQELADENYSTGNNCFVFPEVVKADSMIDLYLNRSMSALASESDVFVKGAFNGWRWNRFTETMHRSELRGDWWCCKLYIPKQAYRLDFVFFNGDTVYENNNHNDFFLEIESDIDEHSFEDFLVEEKRKELERLAAEEAERKRQAEERHRREEERAAMEADRAQARSEVEMKKEKLRQMLSSASRYAENLWYIEPNTYRGGDRVRLYYNRSSRSLMHNTEIWMHGGYNNWIDGLSIAERLVKSHEKEGDWWYVEVTLPERALVLDWVFADGPPGNAWNYDNNGRQDFHAIVPNNISDDIFWVEEEHRIFTRLQQERRERESAERIKAERSAKMKAEMKEKTMRAFLLSQKHIVYTEPLEVRAGTTVDVLYNPSNTVLNGKSEVWFRGSFNRWTHPSGPLPPQKMVKAENSSHLRTTVSVPLDAYMMDFVFSESEEGGRYDNRNGMDYHIPVSDSVAREPPMHIVHIAVEMAPIAKVGGLGDVVTSLSRAVQDLGHKVEVILPKYDCLILSSQLQYTSDILEHVGTLDYNLCATSMDIQAKVSDDGPLVGDPSAFRSLAVAL

SEQ ID NO: 164480 - protein, 705 aa, Zea Mays
MEMNLRAESPLCSRGRPALVVRPAAAATGLALSVVRCSRFTRGGLVRCMVSSSDYPKRNPRRASTSKSKGVASGGYASRPTAESSTKKIEQSRNNEGDFSRANGSLYGEAAEQASTAEESSQVYMTGDILSGAERDGAGTEEEADQNQSSALPSASMDDDSIDRQLDEYRGKISALVSSKPEPSSLASVAGQNESVGGFHGQHEPITGSEEHGSSIVDAPTKGRLFAEAVVGHKDFTESAAGKASSENEEGQAVSLEDDVGISTDADEELPVSEDDPEVLLRRLQELADENYSTGNNCFVFPEVVKADSMIDLYLNRSMSALASESDVFVKGAFNGWRWNRFTETMHRSELRGDWWCCKLYIPKQAYRLDFVFFNGDTVYENNNHNDFFLEIESDIDEHSFEDFLVEEKRKELERLAAEEAERKRQAEERHRREEERAAMEADRAQARSEVEMKKEKLRQMLSSASRYAENLWYIEPNTYRGGDRVRLYYNRSSRSLMHNTEIWMHGGYNNWIDGLSIAERLVKSHEKEGDWWYVEVTLPERALVLDWVFADGPPGNAWNYDNNGRQDFHAIVPNNISDDIFWVEEEHRIFTRLQQERRERESAERIKAERSAKMKAEMKEKTMRAFLLSQKHIVYTEPLEVRAGTTVDVLYNPSNTVLNGKSEVWFRGSFNRWTHPSGPLPPQKMVKAENSSHLRTTVFPWMHI

SEQ ID NO: 164481 - protein, 772 aa, Zea Mays
MEMNLRAESPLCSRGRPALVVRPAAAATGLALSVVRCSRFTRGGLVRCMVSSSDYPKRNPRRASTSKSKGVASGGYASRPTAESSTKKIEQSRNNEGDFSRANGSLYGEAAEQASTAEESSQVYMTGDILSGAERDGAGTEEEADQNQSSALPSASMDDDSIDRQLDEYRGKISALVSSKPEPSSLASVAGQNESVGGFHGQHEPITGSEEHGSSIVDAPTKGRLFAEAVVGHKDFTESAAGKASSENEEGQAVSLEDDVGISTDADEELPVSEDDPEVLLRRLQELADENYSTGNNCFVFPEVVKADSMIDLYLNRSMSALASESDVFVKGAFNGWRWNRFTETMHRSELRGDWWCCKLYIPKQAYRLDFVFFNGDTVYENNNHNDFFLEIESDIDEHSFEDFLVEEKRKELERLAAEEAERKRQAEERHRREEERAAMEADRAQARSEVEMKKEKLRQMLSSASRYAENLWYIEPNTYRGGDRVRLYYNRSSRSLMHNTEIWMHGGYNNWIDGLSIAERLVKSHEKEGDWWYVEVTLPERALVLDWVFADGPPGNAWNYDNNGRQDFHAIVPNNISDDIFWVEEEHRIFTRLQQERRERESAERIKAERSAKMKAEMKEKTMRAFLLSQKHIVYTEPLEVRAGTTVDVLYNPSNTVLNGKSEVWFRGSFNRWTHPSGPLPPQKMVKAENSSHLRTTVSVPLDAYMMDFVFSESEEGGRYDNRNGMDYHIPVSDSVAREPPMHIVHIAVEMAPIAKVDLHFIFCDTNDDTT

SEQ ID NO: 164482 - protein, 988 aa, Zea Mays
MEMNLRAESPLCSRGRPALVVRPAAAATGLALSVVRCSRFTRGGLVRCMVSSSDYPKRNPRRASTSKSKGVASGGYASRPTAESSTKKIEQSRNNEGDFSRANGSLYGEAAEQASTAEESSQVYMTGDILSGAERDGAGTEEEADQNQSSALPSASMDDDSIDRQLDEYRGKISALVSSKPEPSSLASVAGQNESVGGFHGQHEPITGSEEHGSSIVDAPTKGRLFAEAVVGHKDFTESAAGKASSENEEGQAVSLEDDVGISTDADEELPVSEDDPEVLLRRLQELADENYSTGNNCFVFPEVVKADSMIDLYLNRSMSALASESDVFVKGAFNGWRWNRFTETMHRSELRGDWWCCKLYIPKQAYRLDFVFFNGDTVYENNNHNDFFLEIESDIDEHSFEDFLVEEKRKELERLAAEEAERKRQAEERHRREEERAAMEADRAQARSEVEMKKEKLRQMLSSASRYAENLWYIEPNTYRGGDRVRLYYNRSSRSLMHNTEIWMHGGYNNWIDGLSIAERLVKSHEKEGDWWYVEVSVPLDAYMMDFVFSESEEGGRYDNRNGMDYHIPVSDSVAREPPMHIVHIAVEMAPIAKVGGLGDVVTSLSRAVQDLGHKVEVILPKYDCLILSSVKDLHYQQSFASGGTEVKVWFGKVEDLPVYFLEPQNGMFWVGCVYGKNDESRFGFFCHSALEFLLQKGSSPDIIHCHDWSSAPVAWLYKEQYALNGMGNGRIVFTIHNLEFGAHHIGKAMAHCDKATTVSDTYSKEVAGHGAIAPHYYKFHGIRNGIDPDIWDPYTDRFIPVHYTSENVLEGKSAAKKALQQMLGLQQTDSPVVGIITRLTVQKGIHLIKHAMHRALERNGQVVLLGSAPDHRIQGDFTNLASKLHGEYHGRVKLCLTYDEPLSHLIYAGADFILVPSIFEPCGLTQLIAMRYGSIPIVRKTGGLYDTVFDVDDDKDRAQAQGLEPNGFSFEGADSSGVDYALDRQV

SEQ ID NO: 164483 - protein, 577 aa, Zea Mays
MKAEMKEKTMRAFLLSQKHIVYTEPLEVRAGTTVDVLYNPSNTVLNGKSEVWFRGSFNRWTHPSGPLPPQKMVKAENSSHLRTTVSVPLDAYMMDFVFSESEEGGRYDNRNGMDYHIPVSDSVAREPPMHIVHIAVEMAPIAKVGGLGDVVTSLSRAVQDLGHKVEVILPKYDCLILSSVKDLHYQQSFASGGTEVKVWFGKVEDLPVYFLEPQNGMFWVGCVYGKNDESRFGFFCHSALEFLLQKGSSPDIIHCHDWSSAPVAWLYKEQYALNGMGNGRIVFTIHNLEFGAHHIGKAMAHCDKATTVSDTYSKEVAGHGAIAPHYYKFHGIRNGIDPDIWDPYTDRFIPVHYTSENVLEGKSAAKKALQQMLGLQQTDSPVVGIITRLTVQKGIHLIKHAMHRALERNGQVVLLGSAPDHRIQGDFTNLASKLHGEYHGRVKLCLTYDEPLSHLIYAGADFILVPSIFEPCGLTQLIAMRYGSIPIVRKTGGLYDTVFDVDDDKDRAQAQGLEPNGFSFEGADSSGVDYALDRAITAFYDARDWFNSLSKRVMEQDWSWNRPALDYMELYHSARKN

SEQ ID NO: 164484 - protein, 361 aa, Zea Mays
MFWVGCVYGKNDESRFGFFCHSALEFLLQKGSSPDIIHCHDWSSAPVAWLYKEQYALNGMGNGRIVFTIHNLEFGAHHIGKAMAHCDKATTVSDTYSKEVAGHGAIAPHYYKFHGIRNGIDPDIWDPYTDRFIPVHYTSENVLEGKSAAKKALQQMLGLQQTDSPVVGIITRLTVQKGIHLIKHAMHRALERNGQVVLLGSAPDHRIQGDFTNLASKLHGEYHGRVKLCLTYDEPLSHLIYAGADFILVPSIFEPCGLTQLIAMRYGSIPIVRKTGGLYDTVFDVDDDKDRAQAQGLEPNGFSFEGADSSGVDYALDRAITAFYDARDWFNSLSKRVMEQDWSWNRPALDYMELYHSARKN

SEQ ID NO: 164485 - protein, 206 aa, Zea Mays
MLGLQQTDSPVVGIITRLTVQKGIHLIKHAMHRALERNGQVVLLGSAPDHRIQGDFTNLASKLHGEYHGRVKLCLTYDEPLSHLIYAGADFILVPSIFEPCGLTQLIAMRYGSIPIVRKTGGLYDTVFDVDDDKDRAQAQGLEPNGFSFEGADSSGVDYALDRAITAFYDARDWFNSLSKRVMEQDWSWNRPALDYMELYHSARKN

SEQ ID NO: 164486 - protein, 460 aa, Zea Mays
MASNSSCGENARKPHTPSAIVIGGGFAGLAAADALRNASFQVILLESRDRIGGRVHTDYSFGFPVDLGASWLHGVCEENPLAPIIGRLGLPLYRTSGDDSVLFDHDLESYALYDTNGRQVPQELVEKIGKVFETILEETGKLREGTNEDMSIAKAIAIVMDRNPQLRQEGIAHEVLQWYLCRMEGWFATDADSISLQGWDQEVLLPGGHGLMVRGYRPVINTLAKGLDIRLNHKVLEIVRHRNRVEVTVSSGQTFVADAAVVTVPLGVLKVKTIRFEPRLPEWKEEAIRELTVGVENKIVLHFGQVFWPNVEFLGVVSSSTYGCSYFLNLHKATGHPVLVYMPAGRLARDIEKMSDEAAAQFAFSQLKKILPNAAEPMNYLVSHWGSDENTLGSYTFDGVNKPRDLYEKLRGAFSTGVMAAEECKMRVLERFRELDMLEMCHPAMGDESPVSVPLLISRL

SEQ ID NO: 164487 - protein, 608 aa, Zea Mays
MDFSAPSFSLGFDWDDDDPPASSDRREQPRGYGAPDAPSFSLGIDDDDDVEEPRIPARGRQNEQAREFTAPDPPSFSLGFDDEHGDGDILSADRCREQSQPQVAPGSPSNGTADDDDDKEDGFVVAGGKRPVRVERDTLYPDPLPTPAETNRFKRLRKGSATAHPAQTPQVPHREAPDAPSSSLSISDDDFLTGGQHHERLKPQASPRIPSSLSIEDEDDDFFLAGDRQPEPTLPQVTQLKRLRKGPVPPHLAPSPPPPKVPGQPTTEASPVMTEDAARGAVGSWEDEIEDWTTDEDRPVRDVPPSVGSCSTSSNSKFSLLNRGVLMTQSGTKASTSKFTQTPNTSASISLEESCTKKLLPKITVSPMRKIYLLDSDTDADDDYSQNKAKSMQQNRKPQMNSTVQKSGAMMSDNWATPALDEFCKEYFESPKDAGFSQPKEGNTHYKASQPKNSGHFQQQASSSGGEVDDGPPAMQYLYHPDPRVGDLFRNRLQHFVPIGAGSTIANEQNRAKSLRSCRRQSSSSAAATDDWVTPGRVSVPTDASKRRVHASGTHSGSGHWFTNDSGRKVYVSKNGQELTGRDAYRQYQKVQEERFIRNQTRCCSSEN

SEQ ID NO: 164488 - protein, 316 aa, Zea Mays
MDFSAPSFSLGFDWDDDDPPASSDRREQPRGYGAPDAPSFSLGIDDDDDVEEPRIPARGRQNEQAREFTAPDPPSFSLGFDDEHGDGDILSADRCREQSQPQVAPGSPSNGTADDDDDKEDGFVVAGGKRPVRVERDTLYPDPLPTPAETNRFKRLRKGSATAHPAQTPQVPHREAPDAPSSSLSISDDDFLTGGQHHERLKPQASPRIPSSLSIEDEDDDFFLAGDRQPEPTLPQVTQLKRLRKGPVPPHLAPSPPPPKVPGQPTTEASPVMTEDAARGAVGSWEDEIEDWTTDEDRPVRVKIKQRACSKTGSPK

SEQ ID NO: 164489 - protein, 478 aa, Zea Mays
MDFSAPSFSLGFDWDDDDPPASSDRREQPRGYGAPDAPSFSLGIDDDDDVEEPRIPARGRQNEQAREFTAPDPPSFSLGFDDEHGDGDILSADRCREQSQPQVAPGSPSNGTADDDDDKEDGFVVAGGKRPVRVERDTLYPDPLPTPAETNRFKRLRKGSATAHPAQTPQVPHREAPDAPSSSLSISDDDFLTGGQHHERLKPQASPRIPSSLSIEDEDDDFFLAGDRQPEPTLPQVTQLKRLRKGPVPPHLAPSPPPPKVPGQPTTEASPVMTEDAARGAVGSWEDEIEDWTTDEDRPVRDVPPSVGSCSTSSNSKFSLLNRGVLMTQSGTKASTSKFTQTPNTSASISLEESCTKKLLPKITVSPMRKIYLLDSDTDADDDYSQNKAKSMQQNRKPQMNSTVQKSGAMMSDNWATPALDEFCKEYFESPKDAGFSQPKEGNTHYKASQPKNSGHFQQQASSSGGCNISFLLGQEVP

SEQ ID NO: 164490 - protein, 340 aa, Zea Mays
MMQQPPQPQPGMALPPPPQTGGGQPPQWGAIPPPMTQQYGAPPPQQPPAMWGQPPSQAHYGQAPPPQPYYAAPPVPAAPAAADEVRTLWIGDLQYWMDDNYVFGCFSNTGEVQNVKLIRDKNSGQLQGYGFVEFTSRAAAERVLQTYNGQMMPNVDLTFRLNWASAGEKRDDTPDYTIFVGDLAADVTDYLLQETFRVHYPSVKGAKVVTDKLTMRTKGYGFVKFGDPTEQARAMTEMNGMPCSSRPMRIGPAASRKNAGGVVQERVPNSQGAQSENDPNNTTIFVGGLDPNVTEDVLKQAFSPYGEVIHVKIPVGKRCGFVQFVTRGLDWCTECSAFVG

SEQ ID NO: 164491 - protein, 425 aa, Zea Mays
MMQQPPQPQPGMALPPPPQTGGGQPPQWGAIPPPMTQQYGAPPPQQPPAMWGQPPSQAHYGQAPPPQPYYAAPPVPAAPAAADEVRTLWIGDLQYWMDDNYVFGCFSNTGEVQNVKLIRDKNSGQLQGYGFVEFTSRAAAERVLQTYNGQMMPNVDLTFRLNWASAGEKRDDTPDYTIFVGDLAADVTDYLLQETFRVHYPSVKGAKVVTDKLTMRTKGYGFVKFGDPTEQARAMTEMNGMPCSSRPMRIGPAASRKNAGGVVQERVPNSQGAQSENDPNNTTIFVGGLDPNVTEDVLKQAFSPYGEVIHVKIPVGKRCGFVQFVTRPSAEQALLMLQGALIGAQNVRLSWGRSLSNKQTQESMQWGAGAPAGVGDYYGGYGQGYEAYGSGYAQPQDPNMYGYGAYVGYPNYQQQPAAQQPQQQQ

SEQ ID NO: 164492 - protein, 256 aa, Zea Mays
MIRADQKQTHHQPGKKEGSTDDRGREQSSTRVAVAPAIRSESESHGHAPWSPSSACGLPFSGRLRSSLSLWLSPSPMARPRKPPPPSPPKAAAPSIADALLLATVCMVGLPVEVRVRDGSAYAGVLHTACVDAGYGVVLKKAKKIANGKGDVNLSLGSFVDTLVVCPDDLVQVIAKGLSLPLKGVCKPLDSNVVAASGSLKPQISHANDPKMSNKTKNMSPLMYVINSSHAYCYVLFHIYEKSHMDCMYASYLAPI

SEQ ID NO: 164493 - protein, 425 aa, Zea Mays
MIRADQKQTHHQPGKKEGSTDDRGREQSSTRVAVAPAIRSESESHGHAPWSPSSACGLPFSGRLRSSLSLWLSPSPMARPRKPPPPSPPKAAAPSIADALLLATVCMVGLPVEVRVRDGSAYAGVLHTACVDAGYGVVLKKAKKIANGKGDVNLSLGSFVDTLVVCPDDLVQVIAKGLSLPLKGVCKPLDSNVVAASGSLKPQISHANDPKMSNKTKNMSPLMQAEKCTSVGQEKNTSVKRNGQDNGITTSLSSSTRHVGACLSNNWDSRSGSMVPKVDVITSSASAVPVVASGVKPSQPVNNSVAKIVTSSKTAAKEFKLNPSAKVFSPSFASSRQVLAAAAPVDTYYISHSAPEVPMGVPVYEPKSVSGVSPLSNKVYCSNLSPANYAISPQYVPSVSASIYSYVFLIVSFISPSLDNTILSS

SEQ ID NO: 164494 - protein, 380 aa, Zea Mays
MARPRKPPPPSPPKAAAPSIADALLLATVCMVGLPVEVRVRDGSAYAGVLHTACVDAGYGVVLKKAKKIANGKGDVNLSLGSFVDTLVVCPDDLVQVIAKGLSLPLKGVCKPLDSNVVAASGSLKPQISHANDPKMSNKTKNMSPLMQAEKCTSVGQEKNTSVKRNGQDNGITTSLSSSTRHVGACLSNNWDSRSGSMVPKVDVITSSASAVPVVASGVKPSQPVNNSVAKIVTSSKTAAKEFKLNPSAKVFSPSFASSRQVLAAAAPVDTYYISHSAPEVPMGVPVYEPKSVSGVSPLSNKVYCSNLSPANYAISPQYVPSIMGHNASRLDPSRIGTPYHPMQVGATYTTPSPQPVMAGKFSPVVYVQPGPQQLSVLHI

SEQ ID NO: 164495 - protein, 298 aa, Zea Mays
MARPRKPPPPSPPKAAAPSIADALLLATVCMVGLPVEVRVRDGSAYAGVLHTACVDAGYGVVLKKAKKIANGKGDVNLSLGSFVDTLVVCPDDLVQVIAKGLSLPLKGVCKPLDSNVVAASGSLKPQISHANDPKMSNKTKNMSPLMQAEKCTSVGQEKNTSVKRNGQDNGITTSLSSSTRHVGACLSNNWDSRSGSMVPKVDVITSSASAVPVVASGVKPSQPVNNSVAKIVTSSKTAAKEFKLNPSAKVFSPSFASSRQVLAAAAPVDTYYISHSAPEVPMGVPVYEPKSVSDHGP

SEQ ID NO: 164496 - protein, 262 aa, Zea Mays
MCCCRCYRLVGSSTIGVIGPVYISTDSSERSSLPSHIPIRKTKQHQHNRSIARAAAATPTVSSGRALPVRTMDNKSASSSCVITPAATSTMSSAGGESSWAVHIANFLASMPQDDIATTDDPQAAVSGGGGSFSSSFDSFGDADASSFITSQLMCGGDDDESLQDTACSSAAGQKMATMESFGLKQMAAMDGAKESNMPHHLQLMAKYVEAVGSKQQVTGVGDQQAINSSSNSEKALLCESNELRKRGLCLVPISMLIDYLG

SEQ ID NO: 164497 - protein, 312 aa, Zea Mays
MTAVALALPTDDDKDGGRRGVDHSPTAPAPPPPPPPPQELVMVARAVQRLVARNDAVVPPAPDGRGGGRRLGMRAFEAAEGAAAPRIGVPEYLERVHRYAALDPECYVVAYAYVDMAAHRRPAAAVASRNVHRLLLASLLVASKPPQQRLLRARGRREQRGDEQAGAGAAGRARLRGRGRPPRVPQVPRAPGEGDDADDAAQGRRPRPARARARQRRGAHQVENGRVVGRQAAADGGSSPPGRSWRRRRRRRTRRPAEAAQQRDGGGVSSRAVGLRLLAVDCCMSKLKPAVQAKSVSCVVVRANPTTGSVTG

SEQ ID NO: 164498 - protein, 302 aa, Zea Mays
MDKNSHLKGLQQLGPLTVLRADMDEEGSFDDAVAGCDYAFLVAAPVNLSAQDPEKEQIEPSVRGTLNAMRSCAKAGTVRRVILTSSVAGVYIRPDLLQLRGDGHVLDEESWSDVEYLRANRPPTWGYCVSKVLLEKEACRFAGEHGISLVTVCPVITVGAAPAPKVRTSIIDSLSMLSGDERGLAVLKGIEKTSGAVQLVHVDDLCRAELFLAEAAAADGRYICCGLNTTVLELARFLAHKYPQYGVKTNLDGDEQQLLEKPRVRVSSEKLVREGFEYRHNTLDEIYDNVVEYGKSLGILPY

SEQ ID NO: 164499 - protein, 264 aa, Zea Mays
MDKNSHLKGLQQLGPLTVLRADMDEEGSFDDAVAGCDYAFLVAAPVNLSAQDPEACLAVDVPMAERADRAVRPRHAERDAVVREGRDGAARDPDLVGGRSLHQAGPAATARRRARAGRGVLVRRRVPQSQQATNLGVLRVEGAPREGGVQVRGRARHQPGHRLPRHHRGRGAGAQGPHEHHRQPLHAVRRRARARRAQGHREDLRRGAAGPRRRPLPRRAVPGGGGGGRREVHLLRPQHDRPRARAFPGTQVPAVRRENKPRRR

SEQ ID NO: 164500 - protein, 314 aa, Zea Mays
MCLYFTVAVGDDMDKNSHLKGLQQLGPLTVLRADMDEEGSFDDAVAGCDYAFLVAAPVNLSAQDPEKEQIEPSVRGTLNAMRSCAKAGTVRRVILTSSVAGVYIRPDLLQLRGDGHVLDEESWSDVEYLRANRPPTWGYCVSKVLLEKEACRFAGEHGISLVTVCPVITVGAAPAPKVRTSIIDSLSMLSGDERGLAVLKGIEKTSGAVQLVHVDDLCRAELFLAEAAAADGRYICCGLNTTVLELARFLAHKYPQYGVKTNLDGDEQQLLEKPRVRVSSEKLVREGFEYRHNTLDEIYDNVVEYGKSLGILPY

SEQ ID NO: 164501 - protein, 313 aa, Zea Mays
MAAAAGEERKKTACVTGGNGYIASLLIKMLLEKGYAVKTTVRHPEDKESNSHLEDLEKLGLGPLEVYRADLAEEGSYDEAVAGCDYAFLLAAPVNYTSKNPEKELMELGVQGTLNVMRSCVKSGTVKRVVLTSSTAAVSSKPLENDGHGHVLDEESLSDIDYLTAKRTGLWAYPVSKVLMEKAAAEFAAVEGVSLVTLCPSVTVGEAPDRQVYTTVPAILSLLSGDEAELKVLRGIERASGSVPLVHVEDVCRAEIFAAEEAADGRYICNGVDTTIVEMARFLADKYPQYDVNTNLPAEISLRSRSRSGRPPS

SEQ ID NO: 164502 - protein, 392 aa, Zea Mays
MIGAGVFGHLSDSFLGRKGSLQVVCVLNAAFGLLTALAPTYWAYAALRLLTGFSTGSVGVLAFVLATEPVGPARRGAAGMSAFYFFSGGIAALAGVAALLPRSWRLLYAATSLPSLVFAVAVVPFVSESPRWYLVRRRPDDALRVVRAIAAANGRAVPEDLTLKLDDEDEDDDGGAAAAAAAAASTSSGSIVDVFRSPTTRVRLVLSVLINLLASVVYYGLSLNVVNLKTNLYVTVVVNSLAEMPAYLLTALLLDRFGRKPLAIGTMLLSGVFCTAGSLIPGAGTMRLARMACGVVGIFGMAATYNLLFIYTAELFPTVVRNAALGCTAQAAQMGAIVAPLVVVLGERLPFAVFGASGIVGGLLVFYLPETMNKPLYDTMAGLEEGEKSVIK

SEQ ID NO: 164503 - protein, 313 aa, Zea Mays
MSAFYFFSGGIAALAGVAALLPRSWRLLYAATSLPSLVFAVAVVPFVSESPRWYLVRRRPDDALRVVRAIAAANGRAVPEDLTLKLDDEDEDDDGGAAAAAAAAASTSSGSIVDVFRSPTTRVRLVLSVLINLLASVVYYGLSLNVVNLKTNLYVTVVVNSLAEMPAYLLTALLLDRFGRKPLAIGTMLLSGVFCTAGSLIPGAGTMRLARMACGVVGIFGMAATYNLLFIYTAELFPTVVRNAALGCTAQAAQMGAIVAPLVVVLGERLPFAVFGASGIVGGLLVFYLPETMNKPLYDTMAGLEEGEKSVIK

SEQ ID NO: 164504 - protein, 149 aa, Zea Mays
MASDRVLGTVKWFNGTKGFGFITPDDGSEDLFVHQSSIKSDGYRSLNDGDAVEYTVGSGNDGRAKALDVTAPGGGPLAGGERPDGGNGGGRGGYGGGYGGGYGGGGGGGGRGCFKCGEEGHRRVGSGGVPCRLSPLPYPSKGIARLTLA

SEQ ID NO: 164505 - protein, 132 aa, Zea Mays
MASDRVLGTVKWFNGTKGFGFITPDDGSEDLFVHQSSIKSDGYRSLNDGDAVEYTVGSGNDGRAKALDVTAPGGGPLAGGERPDGGNGGGRGGRGCFKCGEEGHRRVGSGGVPCRLSPLPYPSKGIARLTLA

SEQ ID NO: 164506 - protein, 457 aa, Zea Mays
MGDHAEMLHATPAMYNGAGAAPRGGWWSTAVPATTCSTELAGGFTTWSSALAASYDLAAEGAKANKSATTASSESPGNNSSVTFQEPAGGVGTAVVQQPLAGCADWRHPYLSSGAATLHGFLQDGHQQDMSSSTTEQSPMAASSLMNPSSNNLALALQQGHHHQEPDHQQMLSNFGGSEAELLLSPTTSPYGFQSSLLRSLMEPTADAAKPALPGYQQQYDQYQQMGMGQARSFAPAGGAASREALQFTNDAPSWNPSAAAGFGVPPAPAPAPAPADQASSSVRSVKPSPAARATATLALKTALEGVGESASSIITKKKANGELVPAFKKSRLQTPSPLPTFKVRKEKLGDRVTALQQLVAPFGKTDTASVLHETVEYIKFLHDQVLSAPYLKNNGHQVPYLKRSSPDRSEDDNSHAGERSLKGRGLCLVPISSTFAVASEVPVDFGWSTAFAASFR

SEQ ID NO: 164507 - protein, 85 aa, Zea Mays
MSSLAAARADNFYYPPEWSPKKGGLNKFHGQHALRERARKLDQGILIIRFEMPFNIWCGGCNSMIAKGVRFNAEKKQVGNYYSTK

SEQ ID NO: 164508 - protein, 160 aa, Zea Mays
MYRLEHQEEDLRKKKEAEPVLVRLQRLSDSRHSDDYALNRALRDRLRRVAEEKKSARKIGLGVRLLPPSAEDATAAASVKFASKFEKSRRDKRAAIKAASIFPESSSSASHGKPDLVLKRRNIKAGAATALMAGRVKPSSWQSASSTSSRTRMPVLAARK

SEQ ID NO: 164509 - protein, 201 aa, Zea Mays
MANLQRGEEPKNREGPFSKKLARTFQNYDYNPASWWQLYGTETSALQKMATRILSLTSSSSGCERNWSGFEGIHTKKRNRLTTTRLNKLVYIQFNNRLMNNREKIKSKKITDVLLSSDTTEAQGFLQEGGDDCAQVVFRDEEDEMEGTGIPWSVIGEAVGAEEQLEPCRSARVRELYEGEEFESEEEEYEDEDLCYSEDEI

SEQ ID NO: 164510 - protein, 403 aa, Zea Mays
MANLQRGEEPKEREAEKMKNGFDASTTCLMQVVTDNASNNMGAKKLLLEKRPQIFWTSCAAHTINLMLQGIGKLPRFRKVIDQAFWKDVKLMLAVFEPLVKVLRLVDGDVKPSMGFLYGELLKAKREIKEAFGNVEFRFKDVMAVTEKKMNGRLDSPLHLTAFLLNPHYSYANPSIFDEPKMNEAFISCVEQFYYHDEDQQEQAANFELKKFQNREGPFSKKLARTFQNYDYNPASWWQLYGTETSALQKMATRILSLTSSSSGCERNWSGFEGIHTKKRNRLTTTRLNKLVYIQFNNRLMNNREKIKSKKITDVLLSSDTTEAQGFLQEGGDDCAQVVFRDEEDEMEGTGIPWSVIGEAVGAEEQLEPCRSARVRELYEGEEFESEEEEYEDEDLCYSEDEI

SEQ ID NO: 164511 - protein, 82 aa, Zea Mays
MRTNTFDPKSFHCCGSVYFCFFVEICGPEPPILTCFLDEVIDTYFNMSSSPSSCVPCALVTLYFKKYHIYNCPFKLALLVMK

SEQ ID NO: 164512 - protein, 145 aa, Zea Mays
MVLPDGYVLVAIPTAGSAPSVSLPLRRTRPVDPQRSRSLSSSRRLPSVPGRARAHASPPWRRRTWAQRPHVPTPGAVAPATDIPTLPPALVAVLSSLTGYATLFSVVRAPSPTSRQRPAPPLSRRRSPPLPYATSPSPSTWTLVP

SEQ ID NO: 164513 - protein, 123 aa, Zea Mays
MYGQGPALFLGEFFPLPPLRPCRAAAAASTVRAKIRSSLSAIFGRRRQQDLREGFRVEMAGRKETALDLAKFVDKGVQVKLTGGRQVTGTLKGYDQLLNLVLDEAVENERGVQRHGSHAGLTD

SEQ ID NO: 164514 - protein, 203 aa, Zea Mays
MICMGAFQFLESRCGQMWSSKPPPIFRQPRVWQGLMRGARMKQQRRDPSREGVLGLHRQNPWHQHWPRSRHQTPDQASEEELAAKGVSGECYNCTKKYTADHNCAAKGVFFLELDDKEEEEEVAAELRISLDALTVGNTRQLQVIIHGTPLIARYISSQPTLSTKRMWQLQVVSRPGLSVKVANGDKISDGICHNIQFSIDQT

SEQ ID NO: 164515 - protein, 76 aa, Zea Mays
MPWIWDRVSLNPAIPYMKRQSRTGSGEMARVACTLLTKDRLKGVVSSRVARTYSWSGGSVGMVDICKSYEKHMSCG

SEQ ID NO: 164516 - protein, 470 aa, Zea Mays
MTDEMLSARSFSRQLMDQIYLAKTYVVVAKEANNLQFVAELSAQVRRAQSILAHAAAYGGTVMEQEAEKAIRDMSVLLFQAQQLRYDSSITIMKLKGQIQSLEEKSKVEVEKSTKYGQIAAEDLPKGLYCLGVRLTMEWFKSPELQRKFSDRSPAVQSNLRDNSLYHFCVFSDNILAVSVVVNSTAINSRHPDKVVFHLVTDELNYAPMKAWFGMNDYRGVTVEIQKVEDFTWLNASYVPVLKQLQNAATQKFYFSGSGSRGTPIKFRNPKYLSMLNHLRFYIPEIYPELQKVVFLDDDIVVQKDLSELFTINLNGNVMGAVETCMETFHRFHKYLNHSHPLIRAHFDPDACGWAFGMNVLDLVEWRNKNVTGIYHYWQERNADHTLWKLGSLPPGLLAFYGLVEALDPKWHVLGLGYTNVDLATIKEGAVLHYNGNMKPWLKIGMEKYKSFWDNYVDYSHPLIQQCFMR

SEQ ID NO: 164517 - protein, 1026 aa, Zea Mays
MAVAGLAPSPAPALLRRFPCSAPPWAPSPFRPRRPRRGRSMMSPFTGARRQEYSHSSVLGIQDNRALKLPVCVNFNLQNGGAQEWADESRRLSLSKAGNSNGSTHLGSGIFHHEPLEDFKSSNQSLLHSVRQRMAPNSLANRHVNTELAKHHAIKHAAVAVSALTSVVNDDLKSVKRPKESEVEVHWSNGPKFHSHIPKISEVETSLRFDENATDGYAKDVNECSPEETVQPSRTRAPSSQESLDARKALSTIYDKVLVVDNVMSARSVVQLLTTKYRNYIHACDTEVANINVKQETPVGHGKVTCFSIYSGTKGAEADFGNGKTCIWVDVLDGGPDVLMEFVPFFEDSSIRKVWHNYSFDSHVIENYGIKVAGFHADTMHLARLWDSSRRTDGGYSLEGLTNDHRVMGVVPKELQKIGKRSMKTIFGRKKIKKDGSEGKITAIEPVEILQREDRELWICYSSLDSMSTLRLYESLKSKLERKPWTFDGYPRPGGSLYDFYEEYWCPFGAILVKMETAGMLVDRAYLSEIEKVAVAQRESAADKFRKWASKYCPDAKYMNVNSDTQIRQLFFGGIENIYKSGDFLPKSKAIKVPNNETAVSEGKKVPKYRTIDLFSIVEDLKTDIFTASGWPSVSGAALRNLAGKVPSDLVYSTDDVNDDECGIHSEISHCDLEDTSSYGTAYDAFGGGKEGKEACHAIAALCEICSINSLISNFILPLQGNHISCKEGRIHCSLNINTETGRLSARAPNLQDRYKIRQAFVAAPGNTLIVADYGQLELRILAHLADCKSMLDAFKAGGDFHSRTAMNMYQHIREAVEEEKVILEWHPQPGQEKPPVPLLKDAFGAERRKAKMLNFSIAYGKTAHGLARDWKVSVKEAKDTLKLWYSDRKEVLAWQMKQKQLAHEKREVYTLLGRSRRFPNMAHATSGQRGHIERAAINAPVQGSAADVAMCAMLEIDRNTRLKELGWTLLLQVHDEVILEGPSESAELAKSIVVECMSKPFYGTNILKVDLAVDAKCAQNWYAAK

SEQ ID NO: 164518 - protein, 1184 aa, Zea Mays
MAVAGLAPSPAPALLRRFPCSAPPWAPSPFRPRRPRRGRSMMSPFTGARRQEYSHSSVLGIQDNRALKLPVCVNFNLQNGGAQEWADESRRLSLSKAGNSNGSTHLGSGIFHHEPLEDFKSSNQSLLHSVRQRMAPNSLANRHVNTELAKHHAIKHAAVAVSALTSVVNDDLKSVKRPKESEVEVHWSNGPKFHSHIPKISEVETSLRFDENATDGYAKDVNECSPEETVQPSRTRAPSSQESLDARKALSTIYDKVLVVDNVMSARSVVQLLTTKYRNYIHACDTEVANINVKQETPVGHGKVTCFSIYSGTKGAEADFGNGKTCIWVDVLDGGPDVLMEFVPFFEDSSIRKVWHNYSFDSHVIENYGIKVAGFHADTMHLARLWDSSRRTDGGYSLEGLTNDHRVMGVVPKELQKIGKRSMKTIFGRKKIKKDGSEGKITAIEPVEILQREDRELWICYSSLDSMSTLRLYESLKSKLERKPWTFDGYPRPGGSLYDFYEEYWCPFGAILVKMETAGMLVDRAYLSEIEKVAVAQRESAADKFRKWASKYCPDAKYMNVNSDTQIRQLFFGGIENIYKSGDFLPKSKAIKVPNNETAVSEGKKVPKYRTIDLFSIVEDLKTDIFTASGWPSVSGAALRNLAGKVPSDLVYSTDDVNDDECGIHSEISHCDLEDTSSYGTAYDAFGGGKEGKEACHAIAALCEICSINSLISNFILPLQGNHISCKEGRIHCSLNINTETGRLSARAPNLQASSIVGGKGASIARSWAQMHSWKIGVRRYFFEGKGCRENPYSTILLNNEKKGTRNGPRKEKNKKTKNKKIGYREFSQRHPKPPNAIKPKHLQLEHVIEAALPRKERRGHVLEDEVIHLLPNAPYYHCQNIHEEVVPKGTPCSFDKKGVPSANQPALEKDRYKIRQAFVAAPGNTLIVADYGQLELRILAHLADCKSMLDAFKAGGDFHSRTAMNMYQHIREAVEEEKVILEWHPQPGQEKPPVPLLKDAFGAERRKAKMLNFSIAYGKTAHGLARDWKVSVKEAKDTLKLWYSDRKEVLAWQMKQKQLAHEKREVYTLLGRSRRFPNMAHATSGQRGHIERAAINAPVQGSAADVAMCAMLEIDRNTRLKELGWTLLLQVHDEVILEGPSESAELAKSIVVECMSKPFYGTNILKVDLAVDAKCAQNWYAAK

SEQ ID NO: 164519 - protein, 723 aa, Zea Mays
MELLLFGGGVFAELQWLIARQEYSHSSVLGIQDNRALKLPVCVNFNLQNGGAQEWADESRRLSLSKAGNSNGSTHLGSGIFHHEPLEDFKSSNQSLLHSVRQRMAPNSLANRHVNTELAKHHAIKHAAVAVSALTSVVNDDLKSVKRPKESEVEVHWSNGPKFHSHIPKISEVETSLRFDENATDGYAKDVNECSPEETVQPSRTRAPSSQESLDARKALSTIYDKVLVVDNVMSARSVVQLLTTKYRNYIHACDTEVANINVKQETPVGHGKVTCFSIYSGTKGAEADFGNGKTCIWVDVLDGGPDVLMEFVPFFEDSSIRKVWHNYSFDSHVIENYGIKVAGFHADTMHLARLWDSSRRTDGGYSLEGLTNDHRVMGVVPKELQKIGKRSMKTIFGRKKIKKDGSEGKITAIEPVEILQREDRELWICYSSLDSMSTLRLYESLKSKLERKPWTFDGYPRPGGSLYDFYEEYWCPFGAILVKMETAGMLVDRAYLSEIEKVAVAQRESAADKFRKWASKYCPDAKYMNVNSDTQIRQLFFGGIENIYKSGDFLPKSKAIKVPNNETAVSEGKKVPKYRTIDLFSIVEDLKTDIFTASGWPSVSGAALRNLAGKVPSDLVYSTDDVNDDECGIHSEISHCDLEDTSSYGTAYDAFGGGKEGKEACHAIAALCEICSINSLISNFILPLQGNHISCKEGRIHCSLNINTETGRLSARAPNLQV

SEQ ID NO: 164520 - protein, 664 aa, Zea Mays
MVDQMYSWSLSHFLRIHQSGRRTDGGYSLEGLTNDHRVMGVVPKELQKIGKRSMKTIFGRKKIKKDGSEGKITAIEPVEILQREDRELWICYSSLDSMSTLRLYESLKSKLERKPWTFDGYPRPGGSLYDFYEEYWCPFGAILVKMETAGMLVDRAYLSEIEKVAVAQRESAADKFRKWASKYCPDAKYMNVNSDTQIRQLFFGGIENIYKSGDFLPKSKAIKVPNNETAVSEGKKVPKYRTIDLFSIVEDLKTDIFTASGWPSVSGAALRNLAGKVPSDLVYSTDDVNDDECGIHSEISHCDLEDTSSYGTAYDAFGGGKEGKEACHAIAALCEICSINSLISNFILPLQGNHISCKEGRIHCSLNINTETGRLSARAPNLQNQPALEKDRYKIRQAFVAAPGNTLIVADYGQLELRILAHLADCKSMLDAFKAGGDFHSRTAMNMYQHIREAVEEEKVILEWHPQPGQEKPPVPLLKDAFGAERRKAKMLNFSIAYGKTAHGLARDWKVSVKEAKDTLKLWYSDRKEVLAWQMKQKQLAHEKREVYTLLGRSRRFPNMAHATSGQRGHIERAAINAPVQGSAADVAMCAMLEIDRNTRLKELGWTLLLQVHDEVILEGPSESAELAKSIVVECMSKPFYGTNILKVDLAVDAKCAQNWYAAK

SEQ ID NO: 164521 - protein, 996 aa, Zea Mays
MELLLFGGGVFAELQWLIARQEYSHSSVLGIQDNRALKLPVCVNFNLQNGGAQEWADESRRLSLSKAGNSNGSTHLGSGIFHHEPLEDFKSSNQSLLHSVRQRMAPNSLANRHVNTELAKHHAIKHAAVAVSALTSVVNDDLKSVKRPKESEVEVHWSNGPKFHSHIPKISEVETSLRFDENATDGYAKDVNECSPEETVQPSRTRAPSSQESLDARKALSTIYDKVLVVDNVMSARSVVQLLTTKYRNYIHACDTEVANINVKQETPVGHGKVTCFSIYSGTKGAEADFGNGKTCIWVDVLDGGPDVLMEFVPFFEDSSIRKVWHNYSFDSHVIENYGIKVAGFHADTMHLARLWDSSRRTDGGYSLEGLTNDHRVMGVVPKELQKIGKRSMKTIFGRKKIKKDGSEGKITAIEPVEILQREDRELWICYSSLDSMSTLRLYESLKSKLERKPWTFDGYPRPGGSLYDFYEEYWCPFGAILVKMETAGMLVDRAYLSEIEKVAVAQRESAADKFRKWASKYCPDAKYMNVNSDTQIRQLFFGGIENIYKSGDFLPKSKAIKVPNNETAVSEGKKVPKYRTIDLFSIVEDLKTDIFTASGWPSVSGAALRNLAGKVPSDLVYSTDDVNDDECGIHSEISHCDLEDTSSYGTAYDAFGGGKEGKEACHAIAALCEICSINSLISNFILPLQGNHISCKEGRIHCSLNINTETGRLSARAPNLQDRYKIRQAFVAAPGNTLIVADYGQLELRILAHLADCKSMLDAFKAGGDFHSRTAMNMYQHIREAVEEEKVILEWHPQPGQEKPPVPLLKDAFGAERRKAKMLNFSIAYGKTAHGLARDWKVSVKEAKDTLKLWYSDRKEVLAWQMKQKQLAHEKREVYTLLGRSRRFPNMAHATSGQRGHIERAAINAPVQGSAADVAMCAMLEIDRNTRLKELGWTLLLQVHDEVILEGPSESAELAKSIVVECMSKPFYGTNILKVDLAVDAKCAQNWYAAK

SEQ ID NO: 164522 - protein, 754 aa, Zea Mays
MELLLFGGGVFAELQWLIARQEYSHSSVLGIQDNRALKLPVCVNFNLQNGGAQEWADESRRLSLSKAGNSNGSTHLGSGIFHHEPLEDFKSSNQSLLHSVRQRMAPNSLANRHVNTELAKHHAIKHAAVAVSALTSVVNDDLKSVKRPKESEVEVHWSNGPKFHSHIPKISEVETSLRFDENATDGYAKDVNECSPEETVQPSRTRAPSSQESLDARKALSTIYDKVLVVDNVMSARSVVQLLTTKYRNYIHACDTEVANINVKQETPVGHGKVTCFSIYSGTKGAEADFGNGKTCIWVDVLDGGPDVLMEFVPFFEDSSIRKVWHNYSFDSHVIENYGIKVAGFHADTMHLARLWDSSRRTDGGYSLEGLTNDHRVMGVVPKELQKIGKRSMKTIFGRKKIKKDGSEGKITAIEPVEILQREDRELWICYSSLDSMSTLRLYESLKSKLERKPWTFDGYPRPGGSLYDFYEEYWCPFGAILVKMETAGMLVDRAYLSEIEKVAVAQRESAADKFRKWASKYCPDAKYMNVNSDTQIRQLFFGGIENIYKSGDFLPKSKAIKVPNNETAVSEGKKVPKYRTIDLFSIVEDLKTDIFTASGWPSVSGAALRNLAGKVPSDLVYSTDDVNDDECGIHSEISHCDLEDTSSYGTAYDAFGGGKEGKEACHAIAALCEICSINSLISNFILPLQGNHISCKEGRIHCSLNINTETGRLSARAPNLQLLLQLQGTLLLLLIMVSWNSGSWRILLIAKAC

SEQ ID NO: 164523 - protein, 1011 aa, Zea Mays
MELLLFGGGVFAELQWLIARQEYSHSSVLGIQDNRALKLPVCVNFNLQNGGAQEWADESRRLSLSKAGNSNGSTHLGSGIFHHEPLEDFKSSNQSLLHSVRQRMAPNSLANRHVNTELAKHHAIKHAAVAVSALTSVVNDDLKSVKRPKESEVEVHWSNGPKFHSHIPKISEVETSLRFDENATDGYAKDVNECSPEETVQPSRTRAPSSQESLDARKALSTIYDKVLVVDNVMSARSVVQLLTTKYRNYIHACDTEVANINVKQETPVGHGKVTCFSIYSGTKGAEADFGNGKTCIWVDVLDGGPDVLMEFVPFFEDSSIRKVWHNYSFDSHVIENYGIKVAGFHADTMHLARLWDSSRRTDGGYSLEGLTNDHRVMGVVPKELQKIGKRSMKTIFGRKKIKKDGSEGKITAIEPVEILQREDRELWICYSSLDSMSTLRLYESLKSKLERKPWTFDGYPRPGGSLYDFYEEYWCPFGAILVKMETAGMLVDRAYLSEIEKVAVAQRESAADKFRKWASKYCPDAKYMNVNSDTQIRQLFFGGIENIYKSGDFLPKSKAIKVPNNETAVSEGKKVPKYRTIDLFSIVEDLKTDIFTASGWPSVSGAALRNLAGKVPSDLVYSTDDVNDDECGIHSEISHCDLEDTSSYGTAYDAFGGGKEGKEACHAIAALCEICSINSLISNFILPLQGNHISCKEGRIHCSLNINTETGRLSARAPNLQASSIVGGKGASIARSWAQMHSWKIGVRRYFFEGKGCRENPYSTILLNNEKKGTRNGPRKEKNKKTKNKKIGYREFSQRHPKPPNAIKPKHLQLEHVIEAALPRKERRGHVLEDEVIHLLPNAPYYHCQNIHEEVVPKGTPCSFDKKGVPSANQPALEKDRYKIRQAFVAAPGNTLIVADYGQLELRILAHLADCKSMLDAFKAGGDFHSRTAMNMYQHIREAVEEEKVILEWHPQPGQEKPPVPLLKDAFGAERRKAKMLNFSIAYGKTAHGLARDWKVQTCQTNIAIS

SEQ ID NO: 164524 - protein, 750 aa, Zea Mays
MELLLFGGGVFAELQWLIARQEYSHSSVLGIQDNRALKLPVCVNFNLQNGGAQEWADESRRLSLSKAGNSNGSTHLGSGIFHHEPLEDFKSSNQSLLHSVRQRMAPNSLANRHVNTELAKHHAIKHAAVAVSALTSVVNDDLKSVKRPKESEVEVHWSNGPKFHSHIPKISEVETSLRFDENATDGYAKDVNECSPEETVQPSRTRAPSSQESLDARKALSTIYDKVLVVDNVMSARSVVQLLTTKYRNYIHACDTEVANINVKQETPVGHGKVTCFSIYSGTKGAEADFGNGKTCIWVDVLDGGPDVLMEFVPFFEDSSIRKVWHNYSFDSHVIENYGIKVAGFHADTMHLARLWDSSRRTDGGYSLEGLTNDHRVMGVVPKELQKIGKRSMKTIFGRKKIKKDGSEGKITAIEPVEILQREDRELWICYSSLDSMSTLRLYESLKSKLERKPWTFDGYPRPGGSLYDFYEEYWCPFGAILVKMETAGMLVDRAYLSEIEKVAVAQRESAADKFRKWASKYCPDAKYMNVNSDTQIRQLFFGGIENIYKSGDFLPKSKAIKVPNNETAVSEGKKVPKYRTIDLFSIVEDLKTDIFTASGWPSVSGAALRNLAGKVPSDLVYSTDDVNDDECGIHSEISHCDLEDTSSYGTAYDAFGGGKEGKEACHAIAALCEICSINSLISNFILPLQGNHISCKEGRIHCSLNINTETGRLSARAPNLQLQGTLLLLLIMVSWNSGSWRILLIAKAC

SEQ ID NO: 164525 - protein, 230 aa, Zea Mays
MLDDWEENLAIITANRTKGDVLVITHLGDCLWKEKNEVAAAHSCYLVAELNIDSYSESARLCLIGADHLKCPRTFASPEAIQRIEVYEYAKVLGNSQYILLSFQPYKLIYAYMLVEVGKVSDSLRYCQASIKVLKASGRAPELEVWKQLFSSLEERIHTHQQRLEEIGSKTWGIMRGVMAMASQKVEEYTERLGRGLATQRAERSWDDWDDQGKKGEPAKPHQSSYSWAG

SEQ ID NO: 164526 - protein, 649 aa, Zea Mays
MELLTKAPVVDCFGKMQKQQQRESVLDSLVVGAGGSPTAMSPGIEMLSLGSFKTGAILSKLKHAVASEKIQGVIPGTNSSAPQKYNSENIQHENKIVSQNINSAGDCIGDCKNSSNAFSSREENTIAETRCPTDNSNSCQFALSNGSPILNNHSAPQDSLTYGDNDLKYIDWPGIDNFEDVDTLFRRSDFTYDQQQLENTDGLSWLPSSNVVYSSYVALQQGFDSSYSDYDILDDLSAFQCAKDKSLPSVGPSSDLCDNQFNDTYLFSEQKNIYQEDGMELLPTDQICSGHENIDMGIEMLSLGSFKTGAILSLLFSTADDARPFSMLGLGDIVIPGDLIVLGADLIVMAISVVDGWTNADTKLMEHVLLVVLKRARMERMKALEKMMNSKSASSIANLVALIISVIFCFFILWQGVAETIIHLTDSYVSRAQGSARPFIDDEEHRSREVGMAEVHLGLPGPWAADYREMADHYTTKIGGVPDWPTGDMGFKPETLQCSLCGTKLCLVAQIRDGTKRFWKVLRVQKCHNVMQTEGGGDELGQPNGPSSTSLPEEQNDKNKIPETNDDDFDLDALAEALEQAATLASNSKKKNKSKHANAPVKRPVLKEQACDLSIPGILMVASHCWLQQNYKILAPVGCVVHHASMNCN

SEQ ID NO: 164527 - protein, 815 aa, Zea Mays
MELLTKAPVVDCFGKMQKQQQRESVLDSLVVGAGGSPTAMSPGIEMLSLGSFKTGAILSKLKHAVASEKIQGVIPGTNSSAPQKYNSENIQHENKIVSQNINSAGDCIGDCKNSSNAFSSREENTIAETRCPTDNSNSCQFALSNGSPILNNHSAPQDSLTYGDNDLKYIDWPGIDNFEDVDTLFRRSDFTYDQQQLENTDGLSWLPSSNVVYSSYVALQQGFDSSYSDYDILDDLSAFQCAKDKSLPSVGPSSDLCDNQFNDTYLFSEQKNIYQEDGMELLPTDQICSGHENIDMGIEMLSLGSFKTGAILSLLFSTADDARPFSMLGLGDIVIPGDLIVLGADLIVMAISVVDGWTNADTKLMEHVLLVVLKRARMERMKALEKMMNSKSASSIANLVALIISVIFCFFILWQGVAETIIHLTDSYVSRAQGSARPFIDDEEHRSREVGMAEVHLGLPGPWAADYREMADHYTTKIGGVPDWPTGDMGFKPETLQCSLCGTKLCLVAQVHAPVAKLNIEERIIYVLVCPTPECGPKPQSWKVLRVQKCHNVMQTEGGGDELGQPNGPSSTSLPEEQNDKNKIPETNDDDFDLDALAEALEQAATLASNSKKKNKSKHANAPVKRPVLKEQACDLSIPVLPCFYIHYNKELYGGKGAVGSSSSELVLDKEIMDAANDEEEKWEGEKYEYDRAIGADRTFLKFKKRLDAYPQQCFRYSYGGKPLLATTKLQDPGTCRLCGSPRQYELQLMSPLSYFLHEAGDGSSNYAPSSWTWLTVIIYTCPKSCCPSSCGGKPQSCCWGAAEEEILIQEDEVL

SEQ ID NO: 164528 - protein, 364 aa, Zea Mays
MAEVHLGLPGPWAADYREMADHYTTKIGGVPDWPTGDMGFKPETLQCSLCGTKLCLVAQVHAPVAKLNIEERIIYVLVCPTPECGPKPQSWKVLRVQKCHNVMQTEGGGDELGQPNGPSSTSLPEEQNDKNKIPETNDDDFDLDALAEALEQAATLASNSKKKNKSKHANAPVKRPVLKEQACDLSIPGEDNFETTRYHELYGGKGAVGSSSSELVLDKEIMDAANDEEEKWEGEKYEYDRAIGADRTFLKFKKRLDAYPQQCFRYSYGGKPLLATTKLQDPGTCRLCGSPRQYELQLMSPLSYFLHEAGDGSSNYAPSSWTWLTVIIYTCPKSCCPSSCGGKPQSCCWGAAEEEILIQEDEVL

SEQ ID NO: 164529 - protein, 773 aa, Zea Mays
MAEVHLGLPGPWAADYREMADHYTTKIGGVPDWPTGDMGFKPETLQCSLCGTKLCLVAQVHAPVAKLNIEERIIYVLVCPTPECGPKPQSWKVLRVQKCHNVMQTEGGGDELGQPNGPSSTSLPEEQNDKNKIPETNDDDFDLDALAEALEQAATLASNSKKKNKSKHANAPVKRPVLKEQACDLSIPVLPCFYIHYNKELYGGKGAVGSSSSELVLDKEIMDAANDEEEKWEGEKYEYDRAIGADRTFLKFKKRLDAYPQQCFRYSYGGKPLLATTKLQDPGTCRLCGSPRQYELQLMSPLSYFLHEAGDGSSNYAPSSWTWLTVIIYTCPKQQGNKVLPLLFVPRSGDFCFNRTSPDTDGQQHEGTGCVSRGVISVIQRNAGLTGVGKVQGVHQEFAFLMAVGRGCNKGAESRTTFCKAHGGGRRCQELGCTKSVAGKTEFCIAHGGGRWCGIKECSSAARGKSGFCLKHGEGKRWRIEGCTRGAEGHSGLCISHGGGRRCQHPNCELQKDSALPSNSSDSEPEAMELDDNGAGKSHSIEGNRDSPIDTDEGQPSMDVDIKGKSSLNDDVNGKSSSEPFSNPPINMSVESLEKFCKEASRSFFDEVGLISHQINSYNEFVSHGLQELFDSLGEVIVEPGYDPSKKGSGSWKHAIIKFGRVKLEKPVFWTGKDEVSVDFKPWHARLQNMTYASRLRVEVTIQVYSLEKSDKSKTGNDGFVQKRNFMNETHWIFIGLLPVMVKSNLCLLHSLKESECLFDAGGYFLVKGMEKV

SEQ ID NO: 164530 - protein, 1334 aa, Zea Mays
MAVGRGCNKGAESRTTFCKAHGGGRRCQELGCTKSVAGKTEFCIAHGGGRWCGIKECSSAARGKSGFCLKHGEGKRWRIEGCTRGAEGHSGLCISHGGGRRCQHPNCELQKDSALPSNSSDSEPEAMELDDNGAGKSHSIEGNRDSPIDTDEGQPSMDVDIKGKSSLNDDVNGKSSSEPFSNPPINMSVESLEKFCKEASRSFFDEVGLISHQINSYNEFVSHGLQELFDSLGEVIVEPGYDPSKKGSGSWKHAIIKFGRVKLEKPVFWTGKDEVSVDFKPWHARLQNMTYASRLRVEVTIQVYSLEKSDKSKTGNDGFVQKRNFMNETHWIFIGLLPVMVKSNLCLLHSLKESECLFDAGGYFLVKGMEKVFIAQELRCLRRLWISDRPCWTISFMSEMKRRRIYIKLVESTRSEDFSGSKIISISFLYATMPVWLLFFALGISSDKEAFDVIDMQDCDASVINTISATIKESDELCGGFRKSDKARQYVDELVKSSKFPPVESFDDYIAKFLFPGISGNRNKALFLGYMVKCLLMAFTGKRKCDNKDDFRNKRLDLPGELLGRELRAHLRQAERRMVKAIQRDLNSDRELQDLERYIDASIVTNGLNRAFSTGSWCHPYKRAERCSGIVATLRRTNPLQMMSDLRKTRQRVAYAGKAGDARYPNPSYWGKLCFMSTPDGENCGLVKNLAVTSIVSSKVVQPLIESFISCGMNKLNDIPTEHIQRMDKIFLNGNWLGSCSDSASFVFRLRCMRRSSLIDPQVEIKRDKHYKEVRLFSDAGRILRPLLVVENLNKIRKPKGRSFSFQELMQQEIIEFIGVEEEEDIQCAWGIRHLFESEGAISSYTHCELDPSFILGLSCGIIPFANHNFARRVLYQSEKHSQQAIGYSTSNPRIRVDTLSHQLYYPQRPLFKTVIADCLGRSDCTTFGRKDDFTRPEYFNGQNAIVAVNVHQGFNQEDSLVMNRASLERGMFRTEHLRSYKADVENKDGTKRLKLKEKIDFGKTESKRGRVDNLDDDGLPYIGASLQTNDIVIGKVSESGEDHSIKLKHTEKGMVQKVLLSANDEGKNFAVVTLRQVRTPCLGDKFSSMHGQKGVVGFLESQENFPFTHDGIVPDIVINPHAFPTRQTPGQLLEAALGKGIACKGTMRYATPFTTASVDVIAEQLHKAGYSRWGAENVLNGRTGERMKSLVFMGPTFYQRLIHMSEDKVKYRNTGPVHPLTRQPVADRKRFGGVKFGEMERDCLLAHGSAANLHERLFMLSDFSQMHICQTCERVANVVMRSVPGGKKIRGPYCGFCKSSENIVRINVPYGAKLLYQELFSMGICLKFETEVC

SEQ ID NO: 164531 - protein, 405 aa, Zea Mays
MDPTNQRSSGAGRRSSVAATMGRGGACVHGQQHVPAPTSLRSPSLPELQQAQSAMPPNPSWNFYPPNGFLNLINQPYMPMSSQPLGENFHFVGLTQNFNTSPPPPPSAKRTKKASRLAKETIQIGGDGDAATEESKAVNKRYWAHDEEVRLASSWLNCSHDPIHGNDKKGETFWKEIAEYFNKHAPADRQRDVNQLKIHWTRLKTVTNNFNGCWSAVSKMHTSGYSDDQLMDEAQKMYANGSNGKPFTLVHWWKALRNEPKFCAQISQMIKEKGQSHTIDITKDKDQLPLQRPIGRDAAKAQRNGKRKAEEVLDGIARLGDSINKIIEVQHDRKQERKKVAETQLEISRLQLKAAQEQKEVKLLEVYSSLLQQDTSQLSNQGKINREKALQKMELKLFGDSENMM

SEQ ID NO: 164532 - protein, 298 aa, Zea Mays
MTTSCAASSIVSPLAMDMAASGALPVVDLAPFFTDGDEGGASRARATEAVRQACRTHGFFRVVNHGVPAHLMARALELSSAFFALPDDDKARARAPEGSEAPLPAGYARQPAHSADKNEYLLVFGPKLGFNVYPAEPSGFSDRSFDFLAALRYFPATEEEDNGISAHEDGNCITFVIQDGVGGLEVLNDDGDWVPAEPVEGSIIVNLGDVIQVLSNNKLKSATHRVVRKPVHRHSFVFFFNIHGAKWIEPLPEFTAKIGEAARYRGFVYNEYMQLRMRNKTHPPARPEDVVHITHYAI

SEQ ID NO: 164533 - protein, 177 aa, Zea Mays
MASSASSTTACRHTSWRARSSCRPLSSRCRTTTRPGLGRPRAPKHRSPRATRGSRRTRRTRTSTSWCLVPSLGSTCTPPSHQDSGGPERVHGPPAGLPHGLQQRPQLRLLGGVALLPGDGGGGQRHQRARGRELHHLRHPGRRRGPRGPQRRRRLGPGGARRGQHHRQPRRRHTGAE

SEQ ID NO: 164534 - protein, 173 aa, Zea Mays
MVPCSVIRRRRSQVDKARHIRHYVEHLADIAVLGGNRGQLDGAAAGGVVRHEPERIERRGVVFSLLPSSRAAAPAVLAACRDCRLPAPRPAAAPQLAPTNSSAEGATAAAPAGRGVGDRREEEGRGGGGGTRAGAAVRHGGPRQPVCVPNSLRWWCTGGWCSGGSVGGSRPGE

SEQ ID NO: 164535 - protein, 833 aa, Zea Mays
MAPKAGRGKGRGGGGRGGDRRKKEEKVVPSVVDVTVVTPYESQVTLKGISTDRVLDVRRLLGSNVETCHLTNYSLSHVARGHRLEDGVEVVALKPCALRIVEEEYATAEQAEAHVRRLLDILACTTAFAKPRDGAAKHRPSKHGRPASPGAHGAVSGEAAAPPPISEAHDMAAIRPPPKLGEFYDFLSFAHLTPPVHLIRRKEASGASREGVYFEIEVKVCNGKLLHVVASRKGFYLAGKPQNVSHSLVDLLQQLSNAFANAYEALMKAFVDHNKFGNLPYGFRANTWLIPPIYVDPATKCPALPVEDENWGGNGGGCGRDGRYDRRCWSKEFSVLSRMPCKSDEERVIRDRKAFLLHNLFVDTAIFRAASTIRRLIDQSMNSIGSRGTTHGSNVFEEHIGDMNITVKKDEADASSKVDDKVDGVAFCKTGAMDIAQKNLLKGLTSDENVLIKDSSTLGVVIVKHCGYTATVKVSGRAKDSNDVKQTHDVSDNFDGMLNIDVPDHPDGGSNALNVNSLRIPLQSVTHPETVVGKQNPSPKSHAYNPARKLACKILEDSLVKLDSMPSINSRIIRWELGSSWLQQLQKKDSPASENVKRNATKADKESAVKGLGKHFEQLKKIKKKECNIDGSSSEKEECNSNCSSMNGMQVSDKISVDETNKGADVSKLMSEDAFFRLKSLGAGLHEKSLEELTKMAHNFYDETALPKLVADFASLELSPVDGRTMTDFMHTRGLNMSSLGRVVELAEKLPHIQSICIHEMVIRSFKHIVRAVIAAVDDMQNISAAIAETLNILLGSPRLENGADTDAHIDNNLRLKWVESFLSKKILLETER

SEQ ID NO: 164536 - protein, 1108 aa, Zea Mays
MAPKAGRGKGRGGGGRGGDRRKKEEKVVPSVVDVTVVTPYESQVTLKGISTDRVLDVRRLLGSNVETCHLTNYSLSHVARGHRLEDGVEVVALKPCALRIVEEEYATAEQAEAHVRRLLDILACTTAFAKPRDGAAKHRPSKHGRPASPGAHGAVSGEAAAPPPISEAHDMAAIRPPPKLGEFYDFLSFAHLTPPVHLIRRKEASGASREGVYFEIEVKVCNGKLLHVVASRKGFYLAGKPQNVSHSLVDLLQQLSNAFANAYEALMKAFVDHNKFGNLPYGFRANTWLIPPIYVDPATKCPALPVEDENWGGNGGGCGRDGRYDRRCWSKEFSVLSRMPCKSDEERVIRDRKAFLLHNLFVDTAIFRAASTIRRLIDQSMNSIGSRGTTHGSNVFEEHIGDMNITVKKDEADASSKVDDKVDGVAFCKTGAMDIAQKNLLKGLTSDENVLIKDSSTLGVVIVKHCGYTATVKVSGRAKDSNDVKQTHDVSDNFDGMLNIDVPDHPDGGSNALNVNSLRIPLQSVTHPETVVGKQNPSPKSHAYNPARKLACKILEDSLVKLDSMPSINSRIIRWELGSSWLQQLQKKDSPASENVKRNATKADKESAVKGLGKHFEQLKKIKKKECNIDGSSSEKEECNSNCSSMNGMQVSDKISVDETNKGADVSKLMSEDAFFRLKSLGAGLHEKSLEELTKMAHNFYDETALPKLVADFASLELSPVDGRTMTDFMHTRGLNMSSLGRVVELAEKLPHIQSICIHEMVIRSFKHIVRAVIAAVDDMQNISAAIAETLNILLGSPRLENGADTDAHIDNNLRLKWVGLELVARDYDMNSPNPFDKSDIVSIVPVCKHVVYSSIDGRNLLESSKMALDKGKLDDAVSYGTKALSKIIAVCGPYHRLTANAYSLLAVVLYHTGDFNQATVYQQKALDINERELGLDHPETMKSYGDLSVFYYRLQHIEMALKYVNRALYLLQFSCGLSHPNSAATYINVAMMEEGMGNVHVALRYLHEALKCNKRLLGADHIQTAASYHAIAIALSMMDAYSLSVQHEQTTLQILQEKLGQDDLRTQDAAAWLEYFESKALEQQEAARRGMPKPDSSIASKGHLRSS

SEQ ID NO: 164537 - protein, 1685 aa, Zea Mays
MAPKAGRGKGRGGGGRGGDRRKKEEKVVPSVVDVTVVTPYESQVTLKGISTDRVLDVRRLLGSNVETCHLTNYSLSHVARGHRLEDGVEVVALKPCALRIVEEEYATAEQAEAHVRRLLDILACTTAFAKPRDGAAKHRPSKHGRPASPGAHGAVSGEAAAPPPISEAHDMAAIRPPPKLGEFYDFLSFAHLTPPVHLIRRKEASGASREGVYFEIEVKVCNGKLLHVVASRKGFYLAGKPQNVSHSLVDLLQQLSNAFANAYEALMKAFVDHNKFGNLPYGFRANTWLIPPIYVDPATKCPALPVEDENWGGNGGGCGRDGRYDRRCWSKEFSVLSRMPCKSDEERVIRDRKAFLLHNLFVDTAIFRAASTIRRLIDQSMNSIGSRGTTHGSNVFEEHIGDMNITVKKDEADASSKVDDKVDGVAFCKTGAMDIAQKNLLKGLTSDENVLIKDSSTLGVVIVKHCGYTATVKVSGRAKDSNDVKQTHDVSDNFDGMLNIDVPDHPDGGSNALNVNSLRIPLQSVTHPETVVGKQNPSPKSHAYNPARKLACKILEDSLVKLDSMPSINSRIIRWELGSSWLQQLQKKDSPASENVKRNATKADKESAVKGLGKHFEQLKKIKKKECNIDGSSSEKEECNSNCSSMNGMQVSDKISVDETNKGADVSKLMSEDAFFRLKSLGAGLHEKSLEELTKMAHNFYDETALPKLVADFASLELSPVDGRTMTDFMHTRGLNMSSLGRVVELAEKLPHIQSICIHEMVIRSFKHIVRAVIAAVDDMQNISAAIAETLNILLGSPRLENGADTDAHIDNNLRLKWVGLELVARDYDMNSPNPFDKSDIVSIVPVCKHVVYSSIDGRNLLESSKMALDKGKLDDAVSYGTKALSKIIAVCGPYHRLTANAYSLLAVVLYHTGDFNQATVYQQKALDINERELGLDHPETMKSYGDLSVFYYRLQHIEMALKYVNRALYLLQFSCGLSHPNSAATYINVAMMEEGMGNVHVALRYLHEALKCNKRLLGADHIQTAASYHAIAIALSMMDAYSLSVQHEQTTLQILQEKLGQDDLRTQDAAAWLEYFESKALEQQEAARRGMPKPDSSIASKGHLSVSDLLDFISPDQERKERDMQRKCRRAKNNIRAHHGESVEEKENFQLVSGSPLEASKDSFQEEKLDVHPPAVLEENYAAHDEHKQCDVLSPEEYSDEGWQAASMRGRSANVRKKSSRRKPALMKLMVDHFEGSHTGSVYRTGLQPQTKGDKEDSVSAPSQLSFGSFLKTDKLNGDSSIAEDKTCNGSANQEQRTKLTGINRPTSIASKFISYKDVAVSPPGTVLKPILEKKEAKEKDSGRDIDLALSSEEEDKKFTEKEKEKPSEDSSKEILSIQRDLESHAEIPPDSNSDEGPSAASKASGSKLSASAPPFNPGSVLSMSQPYSTVAVYDASAILQAIPSQAMEILPSAIDTRVPRGPRSTLYYRTGHSFQRKQGYTHSQSTIVRGSYSPTTMNPHAAEFVPGKTSQQSDVADREPSPANPVANSDLDVVSQTTDEARAETPATEKAGQVEKVVSGKGKENRGKDIVRNSYKTELARQILLSFIVKSVHDSLGPSRAEPERKPSGSDEASNEQTSVLGKNASGSGRKDPDKQEKATEVTKGLKDTEGFTVVSKRRRRPQPFMNPINGLYSQPSICTSVS

SEQ ID NO: 164538 - protein, 871 aa, Zea Mays
MAPKAGRGKGRGGGGRGGDRRKKEEKVVPSVVDVTVVTPYESQVTLKGISTDRVLDVRRLLGSNVETCHLTNYSLSHVARGHRLEDGVEVVALKPCALRIVEEEYATAEQAEAHVRRLLDILACTTAFAKPRDGAAKHRPSKHGRPASPGAHGAVSGEAAAPPPISEAHDMAAIRPPPKLGEFYDFLSFAHLTPPVHLIRRKEASGASREGVYFEIEWLIQFDLRFSVKSQPCNSQSTRRVGMSIRLMKEFICAQVKVCNGKLLHVVASRKGFYLAGKPQNVSHSLVDLLQQLSNAFANAYEALMKAFVDHNKFGNLPYGFRANTWLIPPIYVDPATKCPALPVEDENWGGNGGGCGRDGRYDRRCWSKEFSVLSRMPCKSDEERVIRDRKAFLLHNLFVDTAIFRAASTIRRLIDQSMNSIGSRGTTHGSNVFEEHIGDMNITVKKDEADASSKVDDKVDGVAFCKTGAMDIAQKNLLKGLTSDENVLIKDSSTLGVVIVKHCGYTATVKVSGRAKDSNDVKQTHDVSDNFDGMLNIDVPDHPDGGSNALNVNSLRIPLQSVTHPETVVGKQNPSPKSHAYNPARKLACKILEDSLVKLDSMPSINSRIIRWELGSSWLQQLQKKDSPASENVKRNATKADKESAVKGLGKHFEQLKKIKKKECNIDGSSSEKEECNSNCSSMNGMQVSDKISVDETNKGADVSKLMSEDAFFRLKSLGAGLHEKSLEELTKMAHNFYDETALPKLVADFASLELSPVDGRTMTDFMHTRGLNMSSLGRVVELAEKLPHIQSICIHEMVIRSFKHIVRAVIAAVDDMQNISAAIAETLNILLGSPRLENGADTDAHIDNNLRLKWVESFLSKKILLETER

SEQ ID NO: 164539 - protein, 798 aa, Zea Mays
MAPKAGRGKGRGGGGRGGDRRKKEEKVVPSVVDVTVVTPYESQVTLKGISTDRVLDVRRLLGSNVETCHLTNYSLSHVARGHRLEDGVEVVALKPCALRIVEEEYATAEQAEAHVRRLLDILACTTAFAKPRDGAAKHRPSKHGRPASPGAHGAVSGEAAAPPPISEAHDMAAIRPPPKLGEFYDFLSFAHLTPPVHLIRRKEASGASREGVYFEIEWLIQFDLRFSVKSQPCNSQSTRRVGMSIRLMKEFICAQVKVCNGKLLHVVASRKGFYLAGKPQNAYEALMKAFVDHNKFGNLPYGFRANTWLIPPIYVDPATKCPALPVEDENWGGNGGGCGRDGRYDRRCWSKEFSVLSRMPCKSDEERVIRDRKAFLLHNLFVDTAIFRAASTIRRLIDQSMNSIGSRGTTHGSNVFEEHIGDMNITVKKDEADASSKVDDKVDGVAFCKTGAMDIAQKNLLKGLTSDENVLIKDSSTLGVVIVKHCGYTATVKVSGRAKDSNDVKQTHDVSDNFDGMLNIDVPDHPDGGSNALNVNSLRIPLQSVTHPETVVGKQNPSPKSHAYNPARKLACKILEDSLVKLDSMPSINSRIIRWELGSSWLQQLQKKDSPASENVKRNATKADKESAVKGLGKHFEQLKKIKKKECNIDGSSSEKEECNSNCSSMNGMQVSDKISVDETNKGADVSKLMSEDAFFRLKSLGAGLHEKVELAEKLPHIQSICIHEMVIRSFKHIVRAVIAAVDDMQNISAAIAETLNILLGSPRLENGADTDAHIDNNLRLKWVESFLSKKILLETER

SEQ ID NO: 164540 - protein, 810 aa, Zea Mays
MAPKAGRGKGRGGGGRGGDRRKKEEKVVPSVVDVTVVTPYESQVTLKGISTDRVLDVRRLLGSNVETCHLTNYSLSHVARGHRLEDGVEVVALKPCALRIVEEEYATAEQAEAHVRRLLDILACTTAFAKPRDGAAKHRPSKHGRPASPGAHGAVSGEAAAPPPISEAHDMAAIRPPPKLGEFYDFLSFAHLTPPVHLIRRKEASGASREGVYFEIEVKVCNGKLLHVVASRKGFYLAGKPQNVSHSLVDLLQQLSNAFANAYEALMKAFVDHNKFGNLPYGFRANTWLIPPIYVDPATKCPALPVEDENWGGNGGGCGRDGRYDRRCWSKEFSVLSRMPCKSDEERVIRDRKAFLLHNLFVDTAIFRAASTIRRLIDQSMNSIGSRGTTHGSNVFEEHIGDMNITVKKDEADASSKVDDKVDGVAFCKTGAMDIAQKNLLKGLTSDENVLIKDSSTLGVVIVKHCGYTATVKVSGRAKDSNDVKQTHDVSDNFDGMLNIDVPDHPDGGSNALNVNSLRIPLQSVTHPETVVGKQNPSPKSHAYNPARKLACKILEDSLVKLDSMPSINSRIIRWELGSSWLQQLQKKDSPASENVKRNATKADKESAVKGLGKHFEQLKKIKKKECNIDGSSSEKEECNSNCSSMNGMQVSDKISVDETNKGADSLEELTKMAHNFYDETALPKLVADFASLELSPVDGRTMTDFMHTRGLNMSSLGRVVELAEKLPHIQSICIHEMVIRSFKHIVRAVIAAVDDMQNISAAIAETLNILLGSPRLENGADTDAHIDNNLRLKWVESFLSKKILLETER

SEQ ID NO: 164541 - protein, 1067 aa, Zea Mays
MAPKAGRGKGRGGGGRGGDRRKKEEKVVPSVVDVTVVTPYESQVTLKGISTDRVLDVRRLLGSNVETCHLTNYSLSHVARGHRLEDGVEVVALKPCALRIVEEEYATAEQAEAHVRRLLDILACTTAFAKPRDGAAKHRPSKHGRPASPGAHGAVSGEAAAPPPISEAHDMAAIRPPPKLGEFYDFLSFAHLTPPVHLIRRKEASGASREGVYFEIEVKVCNGKLLHVVASRKGFYLAGKPQNAYEALMKAFVDHNKFGNLPYGFRANTWLIPPIYVDPATKCPALPVEDENWGGNGGGCGRDGRYDRRCWSKEFSVLSRMPCKSDEERVIRDRKAFLLHNLFVDTAIFRAASTIRRLIDQSMNSIGSRGTTHGSNVFEEHIGDMNITVKKDEADASSKVDDKVDGVAFCKTGAMDIAQKNLLKGLTSDENVLIKDSSTLGVVIVKHCGYTATVKVSGRAKDSNDVKQTHDVSDNFDGMLNIDVPDHPDGGSNALNVNSLRIPLQSVTHPETVVGKQNPSPKSHAYNPARKLACKILEDSLVKLDSMPSINSRIIRWELGSSWLQQLQKKDSPASENVKRNATKADKESAVKGLGKHFEQLKKIKKKECNIDGSSSEKEECNSNCSSMNGMQVSDKISVDETNKGADSLEELTKMAHNFYDETALPKLVADFASLELSPVDGRTMTDFMHTRGLNMSSLGRVVELAEKLPHIQSICIHEMVIRSFKHIVRAVIAAVDDMQNISAAIAETLNILLGSPRLENGADTDAHIDNNLRLKWVGLELVARDYDMNSPNPFDKSDIVSIVPVCKHVVYSSIDGRNLLESSKMALDKGKLDDAVSYGTKALSKIIAVCGPYHRLTANAYSLLAVVLYHTGDFNQATVYQQKALDINERELGLDHPETMKSYGDLSVFYYRLQHIEMALKYVNRALYLLQFSCGLSHPNSAATYINVAMMEEGMGNVHVALRYLHEALKCNKRLLGADHIQTAASYHAIAIALSMMDAYSLSVQHEQTTLQILQEKLGQDDLRTQDAAAWLEYFESKALEQQEAARRGMPKPDSSIASKGHLRSS

SEQ ID NO: 164542 - protein, 1567 aa, Zea Mays
MAPKAGRGKGRGGGGRGGDRRKKEEKVVPSVVDVTVVTPYESQVTLKGISTDRVLDVRRLLGSNVETCHLTNYSLSHVARGHRLEDGVEVVALKPCALRIVEVIRRKEASGASREGVYFEIEVKVCNGKLLHVVASRKGFYLAGKPQNVSHSLVDLLQQLSNAFANAYEALMKAFVDHNKFGNLPYGFRANTWLIPPIYVDPATKCPALPVEDENWGGNGGGCGRDGRYDRRCWSKEFSVLSRMPCKSDEERVIRDRKAFLLHNLFVDTAIFRAASTIRRLIDQSMNSIGSRGTTHGSNVFEEHIGDMNITVKKDEADASSKVDDKVDGVAFCKTGAMDIAQKNLLKGLTSDENVLIKDSSTLGVVIVKHCGYTATVKVSGRAKDSNDVKQTHDVSDNFDGMLNIDVPDHPDGGSNALNVNSLRIPLQSVTHPETVVGKQNPSPKSHAYNPARKLACKILEDSLVKLDSMPSINSRIIRWELGSSWLQQLQKKDSPASENVKRNATKADKESAVKGLGKHFEQLKKIKKKECNIDGSSSEKEECNSNCSSMNGMQVSDKISVDETNKGADSLEELTKMAHNFYDETALPKLVADFASLELSPVDGRTMTDFMHTRGLNMSSLGRVVELAEKLPHIQSICIHEMVIRSFKHIVRAVIAAVDDMQNISAAIAETLNILLGSPRLENGADTDAHIDNNLRLKWVGLELVARDYDMNSPNPFDKSDIVSIVPVCKHVVYSSIDGRNLLESSKMALDKGKLDDAVSYGTKALSKIIAVCGPYHRLTANAYSLLAVVLYHTGDFNQATVYQQKALDINERELGLDHPETMKSYGDLSVFYYRLQHIEMALKYVNRALYLLQFSCGLSHPNSAATYINVAMMEEGMGNVHVALRYLHEALKCNKRLLGADHIQTAASYHAIAIALSMMDAYSLSVQHEQTTLQILQEKLGQDDLRTQDAAAWLEYFESKALEQQEAARRGMPKPDSSIASKGHLSVSDLLDFISPDQERKERDMQRKCRRAKNNIRAHHGESVEEKENFQLVSGSPLEASKDSFQEEKLDVHPPAVLEENYAAHDEHKQCDVLSPEEYSDEGWQAASMRGRSANVRKKSSRRKPALMKLMVDHFEGSHTGSVYRTGLQPQTKGDKEDSVSAPSQLSFGSFLKTDKLNGDSSIAEDKTCNGSANQEQRTKLTGINRPTSIASKFISYKDVAVSPPGTVLKPILEKKEAKEKDSGRDIDLALSSEEEDKKFTEKEKEKPSEDSSKEILSIQRDLESHAEIPPDSNSDEGPSAASKASGSKLSASAPPFNPGSVLSMSQPYSTVAVYDASAILQAIPSQAMEILPSAIDTRVPRGPRSTLYYRTGHSFQRKQGYTHSQSTIVRGSYSPTTMNPHAAEFVPGKTSQQSDVADREPSPANPVANSDLDVVSQTTDEARAETPATEKAGQVEKVVSGKGKENRGKDIVRNSYKTELARQILLSFIVKSVHDSLGPSRAEPERKPSGSDEASNEQTSVLGKNASGSGRKDPDKQEKATEVTKGLKDTEGFTVVSKRRRRPQPFMNPINGLYSQPSICTSVS

SEQ ID NO: 164543 - protein, 542 aa, Zea Mays
MQGQRNSVEHFADVFGFDIASSSGNPVMDQQSYWNNVLGSVESQNLQGYQMNHSDAAMPYGNETQQDGTFLGFWESGEASASGSSNNAKTEHLSIGGGLRIGERRLVADNGISLDVDINLNANVNDLCGQSSNVNCTSQGPEHYGGGDRSVVNSQPTDLRLHPYRTFLLDAEQADSFTLNPSENPLCDFSLMQESIDQRPGSSLDGRRLACKRKNVEGPNGQSSAGASTSFSHRNDNAFHNIASSSYNPAPIRNPSSPNCLPVPSSIDDQLPRYGTNAGLSAGTYDLNGGVNNAGNSQRSFRARITTSQQIAPCSVWPSSNAIRLPNSWNHQPPHFQSAFDDTQEVIPVVSSLNLQYQHPVNVSSVPPAANRFTGHGASSSRAGSLENRILGSQEAPTRNVVPANYSDLVPPSVVDPRRLLPEPSNWSSDVRGTAISGSIPPVSRANNSATVNPPAGFSHQNLTRRHPRNLSEEIGRLSGALRGHQPPRLRPGFLLERQGDGVWGVPLSTRGREGRRLMEVHGSLSYDNPSLLVNRFGMHLK

SEQ ID NO: 164544 - protein, 413 aa, Zea Mays
MWDLNDSPAAEAAPPSPSADDSGASFSSAAALVDIPDDDSAAAAVVTRQFFVLAPAATIGAAPGSSNARAGWLRRAAAPAGGPAAVQAAAGKKSRRGPRSRSSQYRGVTFYRRTGRWESHIWAYDRAAIKFRGVEADINFSLEDYQDDMKQMCHLSKEEFVHVLRRQSTGFPRGSSKYRGVTLHKCGRWEARMGQFLGKKYVYLGLFDTEEEAARAYDRAAIKCNGKDAVTNFDPSIYAEEEVAPAAATGGAAGDEHNLDLSLGSSAGNKRGSLDGGGGGGGDDKSSDQRVPMAFDIDWQTAARRSTKAKLLSNGDPGTAAGGLSLAIGGGGGHWPPQLQHQQQQQRLHGARNNGGGTSWPPPPHPCPPPVPAAAATAAAASSRFHPYVVTSTTQSPAGWVQKNGFHSLARPT

SEQ ID NO: 164545 - protein, 187 aa, Zea Mays
MQIAAAPEQRRSGDRGGRPFPGDRRRRRALASAAAASAAAAEAPRRQEQRRRHELAAAAAPVPAASTGRRRDRSCSIITIPSLRCYEYDAKPGRLGPEEWVPFAGQAHVDQEPGLGVRPSIVFHGEGPSFDPRANGSSIHRFTPPPPFFPFSILCVLDWVRHGSEDGWACCPPAVNEEFPGRRRVLW

SEQ ID NO: 164546 - protein, 447 aa, Zea Mays
MPRLSLTVTDDAAAMPFALRLGGSPALRPGSQSPSWLRFGGRAGVRKALFCSAEDARRCGSDGGEREHMPRACYGERLRGGGLCIHREAIDWIWKAYTHYSFHPLTAYLAVNYLNRFLSLSECLSYWNKDWMTQLLSVACVLHFRFRWLPKMEEIPVMQSLDLQVGDVCYVFEAKTVHRMELLVLTTLNWRMKAITPFSYMDYFLNKLNGGNTNMIVILLREIGTGCLGFRPSEIAAAVAATVAGEVDATGIENAYAHIDKEPIDETHVPEVINEVPKKFQFHLPLYHWRRHQRSHMLQLFGRDWKKIEEHVGTKTTVQIRSHAQKYFVKVQKLGLAVGLPPMYPRRHFAMQQQQQSSVAGGSSAAAMPLLHGRQPTCAPVAMPGLAEPDAVAHHGSIGWSSPSVVVPAASSDGGMQGLDLEWVAGASVPGANIWFYTCRWMCSLLG

SEQ ID NO: 164547 - protein, 50 aa, Zea Mays
MKTLCMKMATTLLRSLKPQDMLATIKVQVSRKWEFHENTNTGPILHNDMV

SEQ ID NO: 164548 - protein, 51 aa, Zea Mays
MKTLCMQKMATTLLRSLKPQDMLATIKVQVSRKWEFHENTNTGPILHNDMV

SEQ ID NO: 164549 - protein, 196 aa, Zea Mays
MTKTFKKVDCTYTFGGCAEESGCPTALLSVCWASASPSHSALSLVPCFFEIPLVSMYVSSKSVNDAALAAKGAPRPLGSSYCRRRMGRLLSLSPSSHQLRRRLLLAWQTLQPPWSSWRCQEWLPLVRPSLSRRLLHLARGRFRSPRKSLSARARWRQGRSPVCRRRPRPVKGVLGWRCCPRRSPRPRCHRRLPLLP

SEQ ID NO: 164550 - protein, 53 aa, Zea Mays
MRSLGPRDRVKGRRQAALNMTVTSPGRTCAPDHRNFSPESSCRHTAWSGPSAP

SEQ ID NO: 164551 - protein, 438 aa, Zea Mays
MESSIRLLHLRKKMATFNNIATQVEILTKRKLLYSHLAQMKHLFPEAIQIKRILVHDEKSICMYADMEITLVMDVVECTSPDHSLSMTICEAFYSKLLRFLDAHHKGADIPEAILPEPFNSRPREKLYLEAVHNGHAAEPPLHGAVEEGFSNASHFPQSFQKFMSKKIIADGTEKTQLLSDPAELSSVSAYGTKGSNRNPKKQDEHAPVPVNSEISATPSRHLISCCQESTPKQQTSESPLLSGTPAMQTPKRPLLAPLEKPKATCGHISEPRSASSARRSLNTSLTYEGGSPSYYDGMEHTATAKKCMISEDLSSFNKSFEEDSHVFFTDKDKINEVESVDSQERIASLRTTFDIVYDISHSTKNPLITKQELFHNILANNLEIEEIGEIEEQLHILEDLAPDLISKKVINGGEILYSIEPITDKNSVRARLVVEPV

SEQ ID NO: 164552 - protein, 380 aa, Zea Mays
MHVIAHDPYASADRARAIGVELVSMEEAMTTADFISLHMPLTPATNKMLNDEAFAKMKYGVRIINVARGGVIDEDALVRALDSGIVAQAALDVFTKEPPAPDNKLVLHENVTVTPHLGASTVEAQEGVAIEIAEAVIGALKGELAASAVNAPMVPAEVLSELAPFVVLAEKLGHLAVQLVAGGGGIKSVKVTYASARAPDDLDTRLLRAMITKGLIEPISSVFVNLVNADFTAKQRGVRITEERIILDGSPETPIDYIQVQIANVKSKFPSAISETGEITVEGRVKDGVPHLTKVGAFQVDVSLEGSLILCRQVDQPGMIGSVGSVLGEENINVSFMSVGRIAPRKHAVMAIGVDEEPSKVTLRKIGEIPAIEEFVFLKL

SEQ ID NO: 164553 - protein, 199 aa, Zea Mays
MATAPVTSSMATNSTCVRLPSMPLRRAPAIVSFASRPWSTAMTSCTGLSRHSDVVAAAGHQKLMGSLNNNEGLMFGVVVARFNEVVTNLLLQGALETFERYSVKAENITVVSVPGSFEVPITAQKLGKSGKFDAILCIGAVIRGDTTHYDAVANSAASGVLNAGLSAGVPCVFGVLTCEDMDQVLHGLIMYIFNPEWPH

SEQ ID NO: 164554 - protein, 142 aa, Zea Mays
MTSCTGLSRHSDVVAAAGHQKLMGSLNNNEGLMFGVVVARFNEVVTNLLLQGALETFERYSVKAENITVVSVPGSFEVPITAQKLGKSGKFDAILCIGAVIRGDTTHYDAVANSAASGVLNAGLSAGMLFSVLPYHVSCSTG

SEQ ID NO: 164555 - protein, 120 aa, Zea Mays
MRRFLCTPAPRPFPFLASAPLRLCCLRPAPFFIPKKTPISRRKEREERCELVRWIGWRSGTLRRGRGRWRRRARKRSGRRRRGTGIPRSRSKVKASASHSPTAATAAGFGKELWQMACTS

SEQ ID NO: 164556 - protein, 182 aa, Zea Mays
MDRLEERNIKKGEREMEEARKEEERKEEAGDRNTQEPQQGQGLSLSLANGSDSGRSGMLPMSNPSANPTQLTIFYGGSVCVYDSVPPEKAQAIMLIAAAAAAAAATKGSAATAFNPPMSTSVAAGQAQVVADPSSISKLQADLPIARRHSLQRFLEKRRDRKITYLRIGMFLCIILFYLEKL

SEQ ID NO: 164557 - protein, 235 aa, Zea Mays
MAVMGLMFPAVLHFTHSEVRQGASEVALSRFSSCIMLVAYASYLYFQLSGRSNIYSPIGSEEAPSEDNPEEDEEAEIGMWEAVTWLAVLTFWVSFLSEYLVNAIEGASDSLNLPVAFISVILLPIVGNAAEHASAIMFAMKDKLDITLGVAIGSSTQISMFVIPFCVVIGWTMGQKMDLNFQLFETATLFITVLVVAFMLQDGTANYLKGLMLILCYLIVAASFFVHVDPQSSEG

SEQ ID NO: 164558 - protein, 143 aa, Zea Mays
MWEAVTWLAVLTFWVSFLSEYLVNAIEGASDSLNLPVAFISVILLPIVGNAAEHASAIMFAMKDKLDITLGVAIGSSTQISMFVMDLNFQLFETATLFITVLVVAFMLQDGTANYLKGLMLILCYLIVAASFFVHVDPQSSEG

SEQ ID NO: 164559 - protein, 521 aa, Zea Mays
MAALEAVRSWAVSVIPPELAAAAGGDPLAALAATAAALVAGLLILAVWFRSGGGAPSKPVATPLRPPPVKVDADADVDDGRKRVTIFFGTQTGTAEGFAKSMADEARVRYEKAVFKVVDLDDYAQEDEEYEEKLKKETVALFFLATYGDGEPTDNAARFYKWFTEGKEKEVWLKDLKYGIFGLGNRQYEHFNKVAKVVDELLEEQGGKRLVPVGLGDDDQCIEDDFTAWKELVWPELDQLLRDEDDTNGASTPYTAAIPEYRVVFIDKSDLSFQDRSWSLANGTGVIDIHHPCRANVAVRKELHKPASDRSCIHLEFDISGTSLVYETGDHVGVYAENSVETVEEAESLLDLSPDTVFSIHADAEDGSPRKGGSSLAPPFPSPCTLRTALLRYADLLNPPKKAALLALASHASDPAEAERLRFLASPAGKDEYSQWITASQRSLLEVMAAFPSAKPPLGVFFAAIAPRLQPRYYSISSSPKMAPSRIHVTCALVYGPSPTGRIHQGVCSTWMKNTIPLEYS

SEQ ID NO: 164560 - protein, 870 aa, Zea Mays
MCSIRWWRRPQKFGTSSHMVVTYMYAVMPREWLALKQSGAELGTSILFFGCRNRNMDYIYEDELQTFLEAGALSELIVAFSQEGPTKEYVQHKMVEKSDLKILEPMEEEEYSSETSNEEDGEKEGNAAESDVFRPVDVDPACLPRVGMIFDSEEDAFQFYVTYGCHAGFGITRRSNNTFDGFRYRSTFICSKGGQSRLRSGVTKPARKRGVKTGCKAKMIVKDAHFQNRWEVIVLELEHNHPLDPNLLKFKRHLKNSPFTINPPQICESEGQQSNSALVHSSRVVDTGITSSSTQIEFKAKIDRNRKLKLAEGDLDALLDFLNKMQDQNPCFFYSLDMNEQGQLRNVFWSDAKSRSSYNYFGDVVAINVTNFSDQYDMQFVSFMGTNHHAQPVLLGCGLLAGRSLGAYVWLFGTWLRCMNAKPPHSIITNYCHDVAIAIKKVFPNARHRFCLSHILNVLPEKLEEIDNKDEIISTFTTLAYDYVTMTDFDREWQDTIQHFRLERNEWLSKLYEVRMQWAPVYVKDSFWAGMSVTDRSDSVTDYFDGWLMSGTSLKMFVEQYEEAVKGKLEKESYEDLRSAQMRPPMVTGLPVEDQAAKVYTAEIFQKFFNEIGHSFHCNYNILERNESVVTYIVSEHVDQTNKVDYKVAYDNVQGDIWCLCRLYQSKGILCRHALTVLRQELVLMIPQKYIIHRWCKDCKQTCASISQPVSAEVVEFGSMNSESKEYALSIMREVRDKVISYEKSLRDQRVDSHVSTANFAYNPVNEDFTDDALPISLSTKGWDLTQGQSKRSRKKKLATPTVLDTLKKKTKRAYNKRRNATANTLNTSATATDGITDGTNVENISFDLSQYNNAPSFHWPESSSRSQLH

SEQ ID NO: 164561 - protein, 430 aa, Zea Mays
MAALEAVRSWAVSVIPPELAAAAGGDPLAALAATAAALVAGLLILAVWFRSGGGAPSKPVATPLRPPPVKVDADADVDDGRKRVTIFFGTQTGTAEGFAKSMADEARVRYEKAVFKVVDLDDYAQEDEEYEEKLKKETVALFFLATYGDGEPTDNAARFYKWFTEGKEKEVWLKDLKYGIFGLGNRQYEHFNKVAKVVDELLEEQGGKRLVPVGLGDDDQCIEDDFTAWKELVWPELDQLLRDEDDTNGASTPYTAAIPEYRVVFIDKSDLSFQDRSWSLANGTGVIDIHHPCRANVAVRKELHKPASDRSCIHLEFDISGTSLVYETGDHVGVYAENSVETVEEAESLLDLSPDTVFSIHADAEDGSPRKGGSSLAPPFPSPCTLRTALLRYADLLNPPKKLLMHLIQLKLNDLGSWPLLLERMSILNG

SEQ ID NO: 164562 - protein, 954 aa, Zea Mays
MWEPVALGLLFYRTVLFMPVWHTMLEVVDGSLQNSCNMCISFWAFTNRKDPPRSLFNMDEGLAPFRGFLQERLALKQSGAELGTSILFFGCRNRNMDYIYEDELQTFLEAGALSELIVAFSQEGPTKEYVQHKMVEKSDLKILEPMEEEEYSSETSNEEDGEKEGNAAESDVFRPVDVDPACLPRVGMIFDSEEDAFQFYVTYGCHAGFGITRRSNNTFDGFRYRSTFICSKGGQSRLRSGVTKPARKRGVKTGCKAKMIVKDAHFQNRWEVIVLELEHNHPLDPNLLKFKRHLKNSPFTINPPQICESEGQQSNSALVHSSRVVDTGITSSSTQIEFKAKIDRNRKLKLAEGDLDALLDFLNKMQDQNPCFFYSLDMNEQGQLRNVFWSDAKSRSSYNYFGDVVAINVTNFSDQYDMQFVSFMGTNHHAQPVLLGCGLLAGRSLGAYVWLFGTWLRCMNAKPPHSIITNYCHDVAIAIKKVFPNARHRFCLSHILNVLPEKLEEIDNKDEIISTFTTLAYDYVTMTDFDREWQDTIQHFRLERNEWLSKLYEVRMQWAPVYVKDSFWAGMSVTDRSDSVTDYFDGWLMSGTSLKMFVEQYEEAVKGKLEKESYEDLRSAQMRPPMVTGLPVEDQAAKVYTAEIFQKFFNEIGHSFHCNYNILERNESVVTYIVSEHVDQTNKVDYKVAYDNVQGDIWCLCRLYQSKGILCRHALTVLRQELVLMIPQKYIIHRWCKDCKQTCASISQPVSAGNQELGSYDDLYKLGHLYFAEVVEFGSMNSESKEYALSIMREVRDKVISYEKSLRDQRVDSHVSTANFAYNPVNEDFTDDALPISLSTKGWDLTQGQSKRSRKKKLATPTVLDTLKKKTKRAYNKRRNATANTLNTSATATDGITDGTNVQQNPVNEGWQLASTSAPETFSYGVENISFDLSQYNNAPSFHWPESSSRSQLH

SEQ ID NO: 164563 - protein, 934 aa, Zea Mays
MWEPVALGLLFYRTVLFMPVWHTMLEVVDGSLQNSCNMCISFWAFTNRKDPPRSLFNMDEGLAPFRGFLQERLALKQSGAELGTSILFFGCRNRNMDYIYEDELQTFLEAGALSELIVAFSQEGPTKEYVQHKMVEKSDLKILEPMEEEEYSSETSNEEDGEKEGNAAESDVFRPVDVDPACLPRVGMIFDSEEDAFQFYVTYGCHAGFGITRRSNNTFDGFRYRSTFICSKGGQSRLRSGVTKPARKRGVKTGCKAKMIVKDAHFQNRWEVIVLELEHNHPLDPNLLKFKRHLKNSPFTINPPQICESEGQQSNSALVHSSRVVDTGITSSSTQIEFKAKIDRNRKLKLAEGDLDALLDFLNKMQDQNPCFFYSLDMNEQGQLRNVFWSDAKSRSSYNYFGDVVAINVTNFSDQYDMQFVSFMGTNHHAQPVLLGCGLLAGRSLGAYVWLFGTWLRCMNAKPPHSIITNYCHDVAIAIKKVFPNARHRFCLSHILNVLPEKLEEIDNKDEIISTFTTLAYDYVTMTDFDREWQDTIQHFRLERNEWLSKLYEVRMQWAPVYVKDSFWAGMSVTDRSDSVTDYFDGWLMSGTSLKMFVEQYEEAVKGKLEKESYEDLRSAQMRPPMVTGLPVEDQAAKVYTAEIFQKFFNEIGHSFHCNYNILERNESVVTYIVSEHVDQTNKVDYKVAYDNVQGDIWCLCRLYQSKGILCRHALTVLRQELVLMIPQKYIIHRWCKDCKQTCASISQPVSAEVVEFGSMNSESKEYALSIMREVRDKVISYEKSLRDQRVDSHVSTANFAYNPVNEDFTDDALPISLSTKGWDLTQGQSKRSRKKKLATPTVLDTLKKKTKRAYNKRRNATANTLNTSATATDGITDGTNVQQNPVNEGWQLASTSAPETFSYGVENISFDLSQYNNAPSFHWPESSSRSQLH

SEQ ID NO: 164564 - protein, 789 aa, Zea Mays
MEEEEYSSETSNEEDGEKEGNAAESDVFRPVDVDPACLPRVGMIFDSEEDAFQFYVTYGCHAGFGITRRSNNTFDGFRYRSTFICSKGGQSRLRSGVTKPARKRGVKTGCKAKMIVKDAHFQNRWEVIVLELEHNHPLDPNLLKFKRHLKNSPFTINPPQICESEGQQSNSALVHSSRVVDTGITSSSTQIEFKAKIDRNRKLKLAEGDLDALLDFLNKMQDQNPCFFYSLDMNEQGQLRNVFWSDAKSRSSYNYFGDVVAINVTNFSDQYDMQFVSFMGTNHHAQPVLLGCGLLAGRSLGAYVWLFGTWLRCMNAKPPHSIITNYCHDVAIAIKKVFPNARHRFCLSHILNVLPEKLEEIDNKDEIISTFTTLAYDYVTMTDFDREWQDTIQHFRLERNEWLSKLYEVRMQWAPVYVKDSFWAGMSVTDRSDSVTDYFDGWLMSGTSLKMFVEQYEEAVKGKLEKESYEDLRSAQMRPPMVTGLPVEDQAAKVYTAEIFQKFFNEIGHSFHCNYNILERNESVVTYIVSEHVDQTNKVDYKVAYDNVQGDIWCLCRLYQSKGILCRHALTVLRQELVLMIPQKYIIHRWCKDCKQTCASISQPVSAEVVEFGSMNSESKEYALSIMREVRDKVISYEKSLRDQRVDSHVSTANFAYNPVNEDFTDDALPISLSTKGWDLTQGQSKRSRKKKLATPTVLDTLKKKTKRAYNKRRNATANTLNTSATATDGITDGTNVQQNPVNEGWQLASTSAPETFSYGVENISFDLSQYNNAPSFHWPESSSRSQLH

SEQ ID NO: 164565 - protein, 980 aa, Zea Mays
MHLIQLKLNDLGSWPLLLERGEGLPPQSCGSLWRWVCSFIELSCSCRCGILCLRWWMAPSRIRVTCALVFGPSPTGRIHQGVCSTWMKGWLLLEVSCRLALKQSGAELGTSILFFGCRNRNMDYIYEDELQTFLEAGALSELIVAFSQEGPTKEYVQHKMVEKSDLKILEPMEEEEYSSETSNEEDGEKEGNAAESDVFRPVDVDPACLPRVGMIFDSEEDAFQFYVTYGCHAGFGITRRSNNTFDGFRYRSTFICSKGGQSRLRSGVTKPARKRGVKTGCKAKMIVKDAHFQNRWEVIVLELEHNHPLDPNLLKFKRHLKNSPFTINPPQICESEGQQSNSALVHSSRVVDTGITSSSTQIEFKAKIDRNRKLKLAEGDLDALLDFLNKMQDQNPCFFYSLDMNEQGQLRNVFWSDAKSRSSYNYFGDVVAINVTNFSDQYDMQFVSFMGTNHHAQPVLLGCGLLAGRSLGAYVWLFGTWLRCMNAKPPHSIITNYCHDVAIAIKKVFPNARHRFCLSHILNVLPEKLEEIDNKDEIISTFTTLAYDYVTMTDFDREWQDTIQHFRLERNEWLSKLYEVRMQWAPVYVKDSFWAGMSVTDRSDSVTDYFDGWLMSGTSLKMFVEQYEEAVKGKLEKESYEDLRSAQMRPPMVTGLPVEDQAAKVYTAEIFQKFFNEIGHSFHCNYNILERNESVVTYIVSEHVDQTNKVDYKVAYDNVQGDIWCLCRLYQSKGILCRHALTVLRQELVLMIPQKYIIHRWCKDCKQTCASISQPVSAGNQELGSYDDLYKLGHLYFAEVVEFGSMNSESKEYALSIMREVRDKVISYEKSLRDQRVDSHVSTANFAYNPVNEDFTDDALPISLSTKGWDLTQGQSKRSRKKKLATPTVLDTLKKKTKRAYNKRRNATANTLNTSATATDGITDGTNVQQNPVNEGWQLASTSAPETFSYGVENISFDLSQYNNAPSFHWPESSSRSQLH

SEQ ID NO: 164566 - protein, 411 aa, Zea Mays
MEEEEYSSETSNEEDGEKEGNAAESDVFRPVDVDPACLPRVGMIFDSEEDAFQFYVTYGCHAGFGITRRSNNTFDGFRYRSTFICSKGGQSRLRSGVTKPARKRGVKTGCKAKMIVKDAHFQNRWEVIVLELEHNHPLDPNLLKFKRHLKNSPFTINPPQICESEGQQSNSALVHSSRVVDTGITSSSTQIEFKAKIDRNRKLKLAEGDLDALLDFLNKMQDQNPCFFYSLDMNEQGQLRNVFWSDAKSRSSYNYFGDVVAINVTNFSDQYDMQFVSFMGTNHHAQPVLLGCGLLAGRSLGAYVWLFGTWLRCMNAKPPHSIITNYCHDVAIAIKKVFPNARHRFCLSHILNVLPEKLEEIDNKDEIISTFTTLAYDYVTMTDFDREWQDTIQHFRLERNEWLSKLYEEPL

SEQ ID NO: 164567 - protein, 84 aa, Zea Mays
MYQFSGTGSLHNHSFFSFHGYLQLPIDLSEPCKLGQMPLNRPDVSLWIPQEIICPFSDEAVCNKMFIASPSSSVFANICSVQFL

SEQ ID NO: 164568 - protein, 927 aa, Zea Mays
MGPLQRRPTAMGGLEEIKNEAVDLENIPIEEVFEQLKCTREGLSSSEGQQRLEIFGPNRLEEKKESKILKFLGFMWNPLSWVMEMAAVMAIALANGGGKPPDWEDFVGIIVLLVINSTISFIEENNAGNAAAALMANLAPKTKVLRDGRWGEQEAAILVPGDIVSIKLGDIVPADARLLEGDPLKVDQSALTGESLPVTKGPGDEVFSGSTCKQGEIEAVVIATGVHTFFGKAAHLVDSTNQHRRYRSGIENLLVLLIGGIPIAMPTVLSVTMAIGSHKLSQQGAITKRMTAIEEMAGMDVLCSDKTGTLTLNKLSVDKNLVEVFCKGVDKDHVLLLAARASRTENQDAIDAAMVGMLADPKEARAGIREIHFLPFNPVDKRTALTYIDADGHWHRVSKGAPEQILDLCHCKEDLRRKVHGIIDKYAERGLRSLAVARQEVPERNKESPGGPWQFVGLLPLFDPPRHDSAETIRKALVLGVNVKMITGDQLAIGKETGRRLGMGTNMYPSSALLGQNKDATLEALPVDELIEKADGFAGVFPEHKYEIVKRLQEKKHIVGMTGDGVNDAPALKKADIGIAVADATDAARSASDIVLTEPGLSVIISAVLTSRCIFQRMKNYTIYAVSITIRIVLGFMLIALIWQYDFSPFMVLIIAILNDGTIMTISKDRVKPSPLPDSWKLKEIFATGIVLGSYLALMTVIFFWAMHKTDFFSDKFGVRSIRDSEHEMMSALYLQVSIVSQALIFVTRSRSWSFVERPGLLLVTAFLLAQLVATFLAVYANWGFARIKGIGWGWAGVVWLYSIVFYFPLDLIKFFIRFVLSGRAWDNLLENKTAFTTKKDYGREEREAQWATAQRTLHGLQPPEAATSTLFHDKNSYRELSEIAEQAKRRAEIARLRELNTLKGHVESVVKLKGLDIDTIQQNYTV

SEQ ID NO: 164569 - protein, 887 aa, Zea Mays
MWNPLSWVMEMAAVMAIALANGGGKPPDWEDFVGIIVLLVINSTISFIEENNAGNAAAALMANLAPKTKVLRDGRWGEQEAAILVPGDIVSIKLGDIVPADARLLEGDPLKVDQSALTGESLPVTKGPGDEVFSGSTCKQGEIEAVVIATGVHTFFGKAAHLVDSTNQVGHFQQVLTAIGNFCICSIAVGIVVEIIVMFPIQHRRYRSGIENLLVLLIGGIPIAMPTVLSVTMAIGSHKLSQQGAITKRMTAIEEMAGMDVLCSDKTGTLTLNKLSVDKNLVEVFCKGVDKDHVLLLAARASRTENQDAIDAAMVGMLADPKEARAGIREIHFLPFNPVDKRTALTYIDADGHWHRVSKGAPEQILDLCHCKEDLRRKVHGIIDKYAERGLRSLAVARQEVPERNKESPGGPWQFVGLLPLFDPPRHDSAETIRKALVLGVNVKMITGDQLAIGKETGRRLGMGTNMYPSSALLGQNKDATLEALPVDELIEKADGFAGVFPEHKYEIVKRLQEKKHIVGMTGDGVNDAPALKKADIGIAVADATDAARSASDIVLTEPGLSVIISAVLTSRCIFQRMKNYTIYAVSITIRIVLGFMLIALIWQYDFSPFMVLIIAILNDGTIMTISKDRVKPSPLPDSWKLKEIFATGIVLGSYLALMTVIFFWAMHKTDFFSDKFGVRSIRDSEHEMMSALYLQVSIVSQALIFVTRSRSWSFVERPGLLLVTAFLLAQLVATFLAVYANWGFARIKGIGWGWAGVVWLYSIVFYFPLDLIKFFIRFVLSGRAWDNLLENKTAFTTKKDYGREEREAQWATAQRTLHGLQPPEAATSTLFHDKNSYRELSEIAEQAKRRAEIARLRELNTLKGHVESVVKLKGLDIDTIQQNYTV

SEQ ID NO: 164570 - protein, 690 aa, Zea Mays
MFPIQHRRYRSGIENLLVLLIGGIPIAMPTVLSVTMAIGSHKLSQQGAITKRMTAIEEMAGMDVLCSDKTGTLTLNKLSVDKNLVEVFCKGVDKDHVLLLAARASRTENQDAIDAAMVGMLADPKEARAGIREIHFLPFNPVDKRTALTYIDADGHWHRVSKGAPEQILDLCHCKEDLRRKVHGIIDKYAERGLRSLAVARQEVPERNKESPGGPWQFVGLLPLFDPPRHDSAETIRKALVLGVNVKMITGDQLAIGKETGRRLGMGTNMYPSSALLGQNKDATLEALPVDELIEKADGFAGVFPEHKYEIVKRLQEKKHIVGMTGDGVNDAPALKKADIGIAVADATDAARSASDIVLTEPGLSVIISAVLTSRCIFQRMKNYTIYAVSITIRIVLGFMLIALIWQYDFSPFMVLIIAILNDGTIMTISKDRVKPSPLPDSWKLKEIFATGIVLGSYLALMTVIFFWAMHKTDFFSDKFGVRSIRDSEHEMMSALYLQVSIVSQALIFVTRSRSWSFVERPGLLLVTAFLLAQLVATFLAVYANWGFARIKGIGWGWAGVVWLYSIVFYFPLDLIKFFIRFVLSGRAWDNLLENKTAFTTKKDYGREEREAQWATAQRTLHGLQPPEAATSTLFHDKNSYRELSEIAEQAKRRAEIARLRELNTLKGHVESVVKLKGLDIDTIQQNYTV

SEQ ID NO: 164571 - protein, 429 aa, Zea Mays
MDTVREEAWPVAAPRQQPSAPQPQQQQQNGRIDLRELKAQMEKQLGPDRSRRYFGYLNGYLSERLGRQDFEKLCLHTLGRENLQLHNRLIRAILYNAYQGKCPPPPLDAGRPVGASVKKAYQAAEVLNACNGDARLLQIQRLRPVARAQDHTLKDSTNNTGPNCRVAAANHNQVTHDASGSLENGTLNQLELKRLRFQQCEPVEPVAKHPRVEQLPPNNLPVQRRSMSSTAEQSAEILRSPVRAPLGIPFCSASVGGARKFPPPLIVAGEDHFNSCSEHDGLFSTELLHRRMEKTAETLGLAGITMDSAELLNIALDKYMKNLIRSSVELVGGSVQRDARKGTPTYKQQAYGKQINGVRLPNHVHMQSASGSPGAKNEIGINHLISINDFKRSFVPMCLLVPIRCTFELEVARLQAQHKICTCGVKAEI

SEQ ID NO: 164572 - protein, 82 aa, Zea Mays
MRRCWVQCASGAGGHVTSSARRCREARRGSLISLDSGRRRRAIRWLWRAATRVAVGCCLLVHVAGPGAGAVIHPWILRARAL

SEQ ID NO: 164573 - protein, 152 aa, Zea Mays
MMSSSRSLGVRCCRCPHRLLPCRPKTMMISILILACLFTSPEQQSTLIRRRRSYVCNISIRSSVCVHTHGRRTEQGTTVQELVLSSPLIKRPASLFGLGSGLSTVTIHPIPENNEMEGRPRQKAPNLLTYAQHSGADSASCTGSSCTHPYIK

SEQ ID NO: 164574 - protein, 68 aa, Zea Mays
MIRLVVAGNGVIIATSLATASTYILFKRAGVNFLLNSIQRSRSSCELSAKSKFNNSVNRGRTVRILVV

SEQ ID NO: 164575 - protein, 416 aa, Zea Mays
MSASTEPEKDAAAAAATEGDEKTEAKDSGSGWELLYCGGTSFDAMGRKVVGGAQGNLVSPTRLRPLVGVDIRFVASGCTACHCVALDAGGKCYTWGRNEKGQLGHGDTLLRNLPTVVSQLSKYKIIKACVGRNHTVVVTDDGKSLSFGHNKHGQLGTGSLRNEIESSPVSCIVAEATNVACGADFTAWLSSVEGSSILTAGLPQYGQLGHGTDNEYNAKESSVKLTYEPQPRPRAIAAFSGKTVVKVACGTNHTVAVDSNGFVYTWGFGGYGRLGHREQKDEWQPRLVEVFQKHNVLPPNAIVSAGSVSSACTAGGGQLYMWGKMKNTGDDWMYPKPVMDLSGWNIRCMASGNMHHIVGADDSCISWGVAQNGELGYGPNGQKSSANPKKVDILEGMHVTSLRTLSPVSAVDLDCL

SEQ ID NO: 164576 - protein, 535 aa, Zea Mays
MSASTEPEKDAAAAAATEGDEKTEAKDSGSGWELLYCGGTSFDAMGRKVVGGAQGNLVSPTRLRPLVGVDIRFVASGCTACHCVALDAGGKCYTWGRNEKGQLGHGDTLLRNLPTVVSQLSKYKIIKACVGRNHTVVVTDDGKSLSFGHNKHGQLGTGSLRNEIESSPVSCIVAEATNVACGADFTAWLSSVEGSSILTAGLPQYGQLGHGTDNEYNAKESSVKLTYEPQPRPRAIAAFSGKTVVKVACGTNHTVAVDSNGFVYTWGFGGYGRLGHREQKDEWQPRLVEVFQKHNVLPPNAIVSAGSVSSACTAGGGQLYMWGKMKNTGDDWMYPKPVMDLSGWNIRCMASGNMHHIVGADDSCISWGVAQNGELGYGPNGQKSSANPKKVDILEGMHVTRANVGDRLGQLEIYDGDTGAEVEKVEVQVTKKASASTNSRANKRKKTKDVSESESEEDDDDDEDESGDDENGGVEESKGRRGRKPANRGRGRGGKKATPEAKPSGRGRGRPKKTESSAQKAGGTSGRGKRGRPRK

SEQ ID NO: 164577 - protein, 229 aa, Zea Mays
MWGKMKNTGDDWMYPKPVMDLSGWNIRCMASGNMHHIVGADDSCISWGVAQNGELGYGPNGQKSSANPKKVDILEGMHVTSVGCGFGLSLIVVDRANVGDRLGQLEIYDGDTGAEVEKVEVQVTKKASASTNSRANKRKKTKDVSESESEEDDDDDEDESGDDENGGVEESKGRRGRKPANRGRGRGGKKATPEAKPSGRGRGRPKKTESSAQKAGGTSGRGKRGRPRK

SEQ ID NO: 164578 - protein, 774 aa, Zea Mays
MPLHQDSSEKLMEKPIEKHIDKLMEEPADQIIEKSIELPTQKITETPTDEPAEKINETPTGEPAEKIIEAASENTEGTIKNATEETHEMAVEELIEEPEETISVSSTGLKQGENTSLVEGSSADDEEDHLECAATNLQPGNDTCLEREEVLNQKDLVKLQAVIRGHLVRKQALESLQCLLAIIKIQGLIRAHQAQHSPGMIQETIVHSSGEKLLRNGFALKLMDNMSTSKSICIKCDPSESDVTWEWMERWTTLIPPITVVHVPEHKENSELMGETVTEQVTEHAQCDEDIVALDSDICFPKLVADDVKETVETSESSTLEAPVSVPDETPKMEMKHDTESELIETTNVDAEQVTDQKAENDVDKAFMSLNQQYTQADASRDPCPLSEKFESSKEDSGDAYNSEQTLEMEGKRFVVRKSCNPAFAAAQLKFEELSTNSTVSRSSSLSHLDGASKSRVHAPSSQEDCSSKQDGTGMPDRSVGHDTKMIIAASECGTEISISSTLDSPDRSEGDGGEIVLEIGALENRNYVTSKADNDFNTVHPEVKNAPEVEAQPQKQIEQNGHVPALEIEAQPQDELVQEPHAEPEMPGLHERLEKPVASYATPEGTPMSRTTITESQETPSSEVSVNTKKSRSKKPKPHASKRSLASPGSDSVGRSSTDNFSKESRHPKRESSSKAAKSDHVEQEPRTSNSNSNLLPSYMQFTESARAKASSSPKMSPDVQDSNPRKRHSLPMTDGKHDSSPRMQRSSSHAQQNVKSNGPAPHSASGSGISDG

SEQ ID NO: 164579 - protein, 773 aa, Zea Mays
MPLHQDSSEKLMEKPIEKHIDKLMEEPADQIIEKSIELPTQKITETPTDEPAEKINETPTGEPAEKIIEAASENTEGTIKNATEETHEMAVEELIEEPEETISVSSTGLKQGENTSLVEGSSADDEEDHLECAATNLQPGNDTCLEREEVLNQKDLVKLQAVIRGHLVRKQALESLQCLLAIIKIQGLIRAHQAQHSPGMIQETIVHSSGEKLLRNGFALKLMDNMSTSKSICIKCDPSESDVTWEWMERWTTLIPPITVVHVPEHKENSELMGETVTEQVTEHAQCDEDIVALDSDICFPKLVADDVKETVETSESSTLEAPVSVPDETPKMEMKHDTESELIETTNVDAEQVTDQKAENDVDKAFMSLNQQYTQADASRDPCPLSEKFESSKEDSGDAYNSEQTLEMEGKRFVVRKSCNPAFAAAQLKFEELSTNSTVSRSSSLSHLDGASKSRVHAPSSQEDCSSKQDGTGMPDRSVGHDTKMIIAASECGTEISISSTLDSPDRSEGDGGEIVLEIGALENRNYVTSKADNDFNTVHPEVKNAPEVEAQPQKQIEQNGHVPALEIEAQPQDELVQEPHAEPEMPGLHERLEKPVASYATPEGTPMSRTTITESQETPSSEVSVNTKKSRSKKPKPHASKRSLASPGSDSVGRSSTDNFSKESRHPKRESSSKAAKSDHVEQEPRTSNSNSNLLPSYMQFTESARAKASSSPKMSPDVQDSNPRKRHSLPMTDGKHDSSPRMQRSSSHAQQNVKSNGPAPHSASDRKWHI

SEQ ID NO: 164580 - protein, 75 aa, Zea Mays
MPFLHLHMLWNWNYKAPTGLSEVSTDNRRGEHGKADTQAGLIPFSGSHKRKGQPHKFDTTVPLPPNYTLQPPPLH

SEQ ID NO: 164581 - protein, 150 aa, Zea Mays
MAAKVVLKLDLHDNRDKQKVLKAVSTLHGIDSIAVDMKESKLTVVGLADPVDVVGRLRKVGSAAIVSVGPATEEKKKDGDKKEGGGDKKDADKKGDDKKPPPPPVYPYPYPWHAYAAAAAAAQYQYHPRPYPPQYVVHSAEEDPNSCVIC

SEQ ID NO: 164582 - protein, 203 aa, Zea Mays
MASSLARLGAALPRARPRAATRTLPPPRWDAAALGASRRAAPNDNACASAYPIGIPTERCLVHSDVKVAPTSDFKDSSKSETWRIKMLYDGDCPLCMREVNMLRERNKSYGAIKFVDISSKDYSPDDNQGLDYETAFRKLYEEVGLGWVYAVTKYEPVASMANAVYGLWAKYRMQITGRPPLEEIMASRRAAGECKDDKVCKM

SEQ ID NO: 164583 - protein, 181 aa, Zea Mays
MASSLARLGAALPRARPRAATRTLPPPRWDAAALGASRRAAPNDNACASAYPIGIPTERCLVHSDVKVAPTSDFKDSSKSETWRIKMLYDGDCPLCMREVNMLRERNKSYGAIKFVDISSKDYSPDDNQGLDYETVASMANAVYGLWAKYRMQITGRPPLEEIMASRRAAGECKDDKVCKM

SEQ ID NO: 164584 - protein, 397 aa, Zea Mays
MACTVSCSRVFVVRCSASPSGGGGGGNAVRVNGAAHRAPLQVGAALETSINRSLAELSPPLLPLLPTDDAGEERSRQNIPTEKQTVDPFRQALIVEGGVRYQQTLVVRSYEVGPDKTATLETVLNLLQETALNHVWMSGLLGDGFGATHGMIRNNLIWVVSRMHVQVDQYPIWGEVLDIDTWVGSSGKNGMRRDWLIRGRNSGDVFVRATSTWVMMNKVTRRLSKMPEEVRAEIAPWFIDRHAIYQEEATDKIIKLDSNAMYVDSDLKPKRSDLDMNHHVNNVKYVRWMLETLPDHFQQQNQLSSIILEYRKECGSSDVVQSICQPDDDSIPPQEDVSMAIGPSLSPELISGHHSLAGALQHSPMKYTHLLQLKAGDKYEEIVRGRTTWKKKSYKAP

SEQ ID NO: 164585 - protein, 273 aa, Zea Mays
MACTVSCSRVFVVRCSASPSGGGGGGNAVRVNGAAHRAPLQVGAALETSINRSLAELSPPLLPLLPTDDAGEERSRQNIPTEKQTVDPFRQALIVEGGVRYQQTLVVRSYEVGPDKTATLETVLNLLQETALNHVWMSGLLGDGFGATHGMIRNNLIWVVSRMHVQVDQYPIWGEVLDIDTWVGSSGKNGMRRDWLIRGRNSGDVFVRATRQASLVTRRLSKMPEEVRAEIAPWFIDRHAIYQEEATDKIIKLDSNAMYVDSDLKVSSPCLLR

SEQ ID NO: 164586 - protein, 104 aa, Zea Mays
MGFTMGAYRTRNDIEKLRLVHAIMQAACSVSHMIFPSVILSFRLLRGTLQAAPSNYAGCLLIRCPSTGSSFSEILLLPPFLFSCRWIVQFCTIQRQLKRNGEST

SEQ ID NO: 164587 - protein, 251 aa, Zea Mays
MLNRDTWGNEAVAQLIRSNFIFWQVYYDTSEGRKVCTYYHLVSMPAILLIDPVTGQKVHAWNGMVHPDRLLEDLLPYLDKGPKGHHAAQPQKRPRKVDQEASTGKQGKIAVEDEDEELARAIAASLEVVIEASDASDDDMAEAEPEEENEPSLNIKPDYPPLPEEPKGSRELLCRVAIRLPNNQRIQRNFLHTDPIKLLWSFCAPQVEDGEKRAFHFVQAIPGASQKLQFGSDLTFRKAGLANSMINLLWG

SEQ ID NO: 164588 - protein, 310 aa, Zea Mays
MAGDPPTAAEKETLVSSFIEITAGQTLETATQFLQMTSWHLEEALQLFYIDGEAAHTAAHSVDPSPAAAAPSALAAAAGVEEAMRFAPPPAAALGDAMSHGFGVREDDDVRAPLPVKRETLYGEGIVSVMRPNASAAFRNFEQEARQSAVWDSEQNVASSSGDNLASLYRPPFPLMFNGSFDKAKLEASSLDKWLLINLQSTEEFSSHMLNRDTWGNEAVAQLIRSNFIFWQVYYDTSEGRKVCTYYHLVSMPAILLIDPVTGQKVHAWNGMVHPDRLLEVRRGTMQLNLKSAQGKLIRKLLRASKAKSL

SEQ ID NO: 164589 - protein, 136 aa, Zea Mays
MLGARVQLKGWQQAAVAFGSAFGALLDPRRADLIAALGETTGKPAFERVLQRMKNSAEGRFSRSVPAWYPRRFPMPGTCLRTHLARRMLSSWDQGTSHQTIARLSVSWTPMSSPTSRHVLARCTTFGTCCLVFRRT

SEQ ID NO: 164590 - protein, 50 aa, Zea Mays
MAYLHSVCLNRGGVTNERPTIGKPRYSTGFFISPLENTSHYLTALFSCHF

SEQ ID NO: 164591 - protein, 403 aa, Zea Mays
MIALAIGGGAYVSTTDEGKFCGWLFKSTELVNPLFALLDAEFAHSLAVKAAAHGFVPREKRPDPSVLGVEVWGRKFSNPIGLAAGFDKNAEAVEGLLGLGFGFVEVGSVTPLPQEGNPKPRIFRLKEHGAVINRCGFNSEGIVVVAKRLGAQHGKRKMEETSSSTLPSTSDIKQGGKAGPGILGVNLGKNKTSEDAAADYVQGVHTLSQYADYLVINISSPNTPGLRKLQGRKQLKDLVKKVQAARDEMQWAEDGPPPLLVKIAPDLSKQDLEDIAAVALALRLDGLIISNTTVSRPSPADKHPLAQETGGLSGKPLLDLSTNILRDMYMLTRGKIPLIGCGGVSSGEDAYKKIRSGATLVQLYTALAYGGPALIPRIKAELAECLERDGFKSVQEAVGADFR

SEQ ID NO: 164592 - protein, 469 aa, Zea Mays
MSSSTALAWRRTLRNALLRGFPRRGAAPERYASTASASGAAADAAAAAAPKKVPPSPRKGRLLTGAMIALAIGGGAYVSTTDEGKFCGWLFKSTELVNPLFALLDAEFAHSLAVKAAAHGFVPREKRPDPSVLGVEVWGRKFSNPIGLAAGFDKNAEAVEGLLGLGFGFVEVGSVTPLPQEGNPKPRIFRLKEHGAVINRCGFNSEGIVVVAKRLGAQHGKRKMEETSSSTLPSTSDIKQGGKAGPGILGVNLGKNKTSEDAAADYVQGVHTLSQYADYLVINISSPNTPGLRKLQGRKQLKDLVKKVQAARDEMQWAEDGPPPLLVKIAPDLSKQDLEDIAAVALALRLDGLIISNTTVSRPSPADKHPLAQETGGLSGKPLLDLSTNILRDMYMLTRGKIPLIGCGGVSSGEDAYKKIRSGATLVQLYTALAYGGPALIPRIKAELAECLERDGFKSVQEAVGADFR

SEQ ID NO: 164593 - protein, 411 aa, Zea Mays
MGRLLTGAMIALAIGGGAYVSTTDEGKFCGWLFKSTELVNPLFALLDAEFAHSLAVKAAAHGFVPREKRPDPSVLGVEVWGRKFSNPIGLAAGFDKNAEAVEGLLGLGFGFVEVGSVTPLPQEGNPKPRIFRLKEHGAVINRCGFNSEGIVVVAKRLGAQHGKRKMEETSSSTLPSTSDIKQGGKAGPGILGVNLGKNKTSEDAAADYVQGVHTLSQYADYLVINISSPNTPGLRKLQGRKQLKDLVKKVQAARDEMQWAEDGPPPLLVKIAPDLSKQDLEDIAAVALALRLDGLIISNTTVSRPSPADKHPLAQETGGLSGKPLLDLSTNILRDMYMLTRGKIPLIGCGGVSSGEDAYKKIRSGATLVQLYTALAYGGPALIPRIKAELAECLERDGFKSVQEAVGADFR

SEQ ID NO: 164594 - protein, 543 aa, Zea Mays
MAHPITVRNLFDAITNSTGGRLHFLIYHKYLRILNEAFCSAKRVLGGHRAPALQLSDDEVILDIHGAATTKPVLQHIGTSTWPGRLTLTNHALYFEAIGVDFSYGEAVVYDLARDLKQSVKRESTGPWGAHLFDKAVMYKSSLTSEPVFFEFPQFKGHTRRDYWFAAIKEVLHAHKFIRKYKLAGFQKAEALSVATLGILRYRTVKEGFHILPAHFKTILAFNLAEKLPKGDKILEALYGQLKQHCPRFRGGQDLGQSSSEELMLADPFPLSAYTMVTMGLLKLKEEDNAEERDFAVRDVQIGGTSSVQMALERSVGYSGRVEAARATLDQVRVEDIDTNVAVLKELLFPLIEIGKRLLALSGWEEPFKSYVFLLCFLYMAYSGWIWLMFPGFLLGSTIFMLWNKHYRHGRSVGAFEIITPPRRRTVEQLLALQQAISQLEAHVQAGNIFLLKLRSLMLAAFPQSTNRVAAALVAVAAIFTFVPLRTIVLLILLEEYTRQMPVRKKSSEKLVRRLREWWLRIPAAPVQLVKPRETRRWRSRLR

SEQ ID NO: 164595 - protein, 187 aa, Zea Mays
MFSSRPKYKKKSSTYNTTTPFHSLQAEKLREKLRQECLRKGTELAHGVADALFAVPPTEDLDGPIVHLPLPVVRLPREKHLGAGTSLPRLVAAKVGADVTLTDIAQNAEVSSNSSLESLLFDPCQSFSSMVWTSLPGLVAFTKSFGSCGGYIVASKEIIQHLKHSCPAHLYATSMSPPAVQQENIKI

SEQ ID NO: 164596 - protein, 152 aa, Zea Mays
MINMVPLPQRNSMFSSRPKYKKKSSTYNTTTPFHSLQAEKLREKLRQECLRKGTELAHGVADALFAVPPTEDLDGPIVHLPLPVVRLPREKHLGAGTSLPRLVAAKVGADVTLTDIAQNAEEIIQHLKHSCPAHLYATSMSPPAVQQENIKI

SEQ ID NO: 164597 - protein, 67 aa, Zea Mays
MRSALAGGGMRPRWLEEGMWLRFRVWCAVEVEGGRGGETELSGWGRPGAVRWGWGRQDAGGGRRERW

SEQ ID NO: 164598 - protein, 58 aa, Zea Mays
MGISVSGQIMENGTSTTADSCCRRTGTGVAPAARVRASNSYLYLLAKGLNIVYQFCKA

SEQ ID NO: 164599 - protein, 217 aa, Zea Mays
MINMPCMLSSFILRELSGEDLKVPLPQRNSMFSSRPKYKKKSSTYNTTTPFHSLQAEKLREKLRQECLRKGTELAHGVADALFAVPPTEDLDGPIVHLPLPVVRLPREKHLGAGTSLPRLVAAKVGADVTLTDIAQNAEVSSNSSLESLLFDPCQSFSSMVWTSLPGLVAFTKSFGSCGGYIVASKEIIQHLKHSCPAHLYATSMSPPAVQQENIKI

SEQ ID NO: 164600 - protein, 110 aa, Zea Mays
MFSSRPKYKKKSSTYNTTTPFHSLQAEKLREKLRQECLRKGTELAHGVADALFAVPPTEDLDGPIVHLPLPVVRLPREKHLGAGTSLPRLVAAKVGADVTLTDIAQNAED

SEQ ID NO: 164601 - protein, 122 aa, Zea Mays
MINMVPLPQRNSMFSSRPKYKKKSSTYNTTTPFHSLQAEKLREKLRQECLRKGTELAHGVADALFAVPPTEDLDGPIVHLPLPVVRLPREKHLGAGTSLPRLVAAKVGADVTLTDIAQNAED

SEQ ID NO: 164602 - protein, 225 aa, Zea Mays
MYPDDAGAEPCMLSSFILRELSGEDLKVKTVPLPQRNSMFSSRPKYKKKSSTYNTTTPFHSLQAEKLREKLRQECLRKGTELAHGVADALFAVPPTEDLDGPIVHLPLPVVRLPREKHLGAGTSLPRLVAAKVGADVTLTDIAQNAEVSSNSSLESLLFDPCQSFSSMVWTSLPGLVAFTKSFGSCGGYIVASKEIIQHLKHSCPAHLYATSMSPPAVQQENIKI

SEQ ID NO: 164603 - protein, 52 aa, Zea Mays
MYPDDAGAEPCMLSSFILRELSGEDLKVKTVSLSLSHFDFLLNDNMDLIVLF

SEQ ID NO: 164604 - protein, 243 aa, Zea Mays
MINMVPLPQRNSMFSSRPKYKKKSSTYNTTTPFHSLQAEKLREKLRQECLRKGTELAHGVADALFAVPPTEDLDGPIVHLPLPVVRLPREKHVSEEAGNHLFVESCIPLHDYMYIIVSQDNATVTLLSNSHVSFLQLGAGTSLPRLVAAKVGADVTLTDIAQNAEVSSNSSLESLLFDPCQSFSSMVWTSLPGLVAFTKSFGSCGGYIVASKEIIQHLKHSCPAHLYATSMSPPAVQQENIKI

SEQ ID NO: 164605 - protein, 58 aa, Zea Mays
MVWTSLPGLVAFTKSFGSCGGYIVASKEIIQHLKHSCPAHLYATSMSPPAVQQENIKI

SEQ ID NO: 164606 - protein, 222 aa, Zea Mays
MYPDDAGAEPCMLSSFILRELSGEDLKVPLPQRNSMFSSRPKYKKKSSTYNTTTPFHSLQAEKLREKLRQECLRKGTELAHGVADALFAVPPTEDLDGPIVHLPLPVVRLPREKHLGAGTSLPRLVAAKVGADVTLTDIAQNAEVSSNSSLESLLFDPCQSFSSMVWTSLPGLVAFTKSFGSCGGYIVASKEIIQHLKHSCPAHLYATSMSPPAVQQENIKI

SEQ ID NO: 164607 - protein, 168 aa, Zea Mays
MINMVPLPQRNSMFSSRPKYKKKSSTYNTTTPFHSLQAEKLREKLRQECLRKGTELAHGVADALFAVPPTEDLDGPIVHLPLPVVRLPREKHLGAGTSLPRLVAAKSFSSMVWTSLPGLVAFTKSFGSCGGYIVASKEIIQHLKHSCPAHLYATSMSPPAVQQENIKI

SEQ ID NO: 164608 - protein, 211 aa, Zea Mays
MLSSFILRELSGEDLKVPLPQRNSMFSSRPKYKKKSSTYNTTTPFHSLQAEKLREKLRQECLRKGTELAHGVADALFAVPPTEDLDGPIVHLPLPVVRLPREKHLGAGTSLPRLVAAKVGADVTLTDIAQNAEVSSNSSLESLLFDPCQSFSSMVWTSLPGLVAFTKSFGSCGGYIVASKEIIQHLKHSCPAHLYATSMSPPAVQQENIKI

SEQ ID NO: 164609 - protein, 572 aa, Zea Mays
MPEAARARGLREPAGEGEAEQEDEFYESLDRILSSSCSSASASDDDADHRRRRSRRHHLLHQHQHQHQPLSSAYDVWISEPTSVEERRRLLLQRLGLASDPPPRRSPSPPASTPASPPAPPEEPRSGAGLGSPPLTRNPSSSGGEQQCRIRNLDDGTEFEVGEVHEEEVVREVGTGRHLTFEEFELCVGRSPIVHELMKRTTTAASASASNHAAPAASKPRRKPGGGWLRGIRQLAGTVAYGRRGADDGDKEKEKEKKEREARRLSSATDDSLDGAGSRDELAAHSGSVWCINFSLDGRYLATAGEDRVIHVWEVSEGDRKGELLGEGSLAKENGGGCSPFLTFLGNDSPEIAALSFTCADMDKKRRLRKQSNRKSVGSDHLVVPECVFGFRDKPVCSLLGHAADVLDLSWSKSQYLISSSMDKTVKLWDITTSTCLKTFSHTDYVTCIQFNPVDDNFFISGSLDEKVRIWSVRDRKIEDWNDLHEMVTAACYSPDGQVAMVGSHKGCCHIFDTSEKKLLYKSQIDLRIRKKKSGQKKITGFQIQEYVLLTAMNLFTSLKGFGTRVAKSQLL

SEQ ID NO: 164610 - protein, 184 aa, Zea Mays
MAWIWMVLAAGAVLLWAISLGRVLSSAAPSCVPSSPQFMPPLSGDRRSRNVLLVVAHPDDESMFFAPTILFLKSKGHSIHILCMSRGNADGLGDTRKEELYHACVSLKIPHEQVKVLDHPKLQDGFHEKWDHGLVAELTMEHVQLWAIDTIVTFDSYGVSGHPNHKDVHHGIWLVQLSGLTLHD

SEQ ID NO: 164611 - protein, 124 aa, Zea Mays
MEHVQLWAIDTIVTFDSYGVSGHPNHKDVHHGICKFLHTNRQGNVEAWELASLSILRKYSGPIDIWLSSLTSFAWTKQPIYTLVNSSPSRSYEAMAAHRSQWVWFRRLFVMFSSYTYINMLRRI

SEQ ID NO: 164612 - protein, 264 aa, Zea Mays
MRPHPPTPPPVTSQVHQAGPRISASPSPTMASFFADDGTDDLPRTTSHPFDSDDFGAAAADVAAADGYGGKNAMELEKKEQKERELRAQIIAEAEEFKKAFFEKRIQNCASNMVNNREREKIFVASQEKFHAGADKQYWKSISDLIPHEIATIEKRGKKDKDKKPSITVVQGPKPGKPTDLSRMRHILVKLKHAPPPHMLQPPPPAPAAKEGTKDGSAKGGGKDGAKEGGAAAPANGAKQPAESQETTANGPSEAEKEQPAASE

SEQ ID NO: 164613 - protein, 191 aa, Zea Mays
MELEKKEQKERELRAQIIAEAEEFKKAFFEKRIQNCASNMVNNREREKIFVASQEKFHAGADKQYWKSISDLIPHEIATIEKRGKKDKDKKPSITVVQGPKPGKPTDLSRMRHILVKLKHAPPPHMLQPPPPAPAAKEGTKDGSAKGGGKDGAKEGGAAAPANGAKQPAESQETTANGPSEAEKEQPAASE

SEQ ID NO: 164614 - protein, 207 aa, Zea Mays
MRMSYSPAAHFFLFLVQWTDCSLAGALGLLRILIYKVYVDGSTTMSTHERKASIREFYAVIFPSLMQLPKGISDVDDRRQKAACTERYRRRDEDEGKRPVSEADIEREEECGICMEMNGKVVLPSCSHAMCIKCYRQWRSRSQSCPFCRDSLKRVNSGDLWMLTDCRDVVDMATVTRENIRRLFMYVEKLPLVAPDNIFYAYDSHVK

SEQ ID NO: 164615 - protein, 382 aa, Zea Mays
MGPARQSRLSRVAPGPGDGRDACPCSSSPPSALPLPLPQPVSLYPRNEYNTNRGKGASGKPRWGKQGSEAKWSGAGLRLGSARGRSLLPVFHGVGVGGCGDSRSLKRRVVCGGRKEPHGAGRHGEEEEEEEEMVVCSTRKSFKDSLKVLEADIQHANTLAADFSRDYDGACLQMRMSYSPAAHFFLFLVQWTDCSLAGALGLLRILIYKLRCAGLCRWEYHHVDAREESEHQGVLCCYLSLPDATAQGDQRRGRPEAEGGVHGEVPEEGRGRGQEAGFGGRHRKGGRVRHLHGDERQGGAAQLQPCHVHQVLPPMAIKIAILPLLSGQPETSELRGPVDAHRLPGRGRHGDGDEGEHQASVHVRREAAPRRPGQHLLRLRFS

SEQ ID NO: 164616 - protein, 376 aa, Zea Mays
MGPARQSRLSRVAPGPGDGRDACPCSSSPPSALPLPLPQPVSLYPRNEYNTNRGKGASGKPRWGKQGSEAKWSGAGLRLGSARGRSLLPVFHGVGVGGCGDSRSLKRRVVCGGRKEPHGAGRHGEEEEEEEEMVVCSTRKSFKDSLKVLEADIQHANTLGFLEGLRRGLPPDAHVLQPRRPLLPLPRAVDRLQPSRRARAAQDPNLQGLCRWEYHHVDAREESEHQGVLCCYLSLPDATAQGDQRRGRPEAEGGVHGEVPEEGRGRGQEAGFGGRHRKGGRVRHLHGDERQGGAAQLQPCHVHQVLPPMAIKIAILPLLSGQPETSELRGPVDAHRLPGRGRHGDGDEGEHQASVHVRREAAPRRPGQHLLRLRFS

SEQ ID NO: 164617 - protein, 264 aa, Zea Mays
MSCHVVSRRAHERAVGADDRAGTPPAFLTRAFPRADCSLAQTTRQCSGFLEGLRRGLPPDAHVLQPRRPLLPLPRAVDRLQPSRRARAAQDPNLQGLCRWEYHHVDAREESEHQGVLCCYLSLPDATAQGDQRRGRPEAEGGVHGEVPEEGRGRGQEAGFGGRHRKGGRVRHLHGDERQGGAAQLQPCHVHQVLPPMAIKIAILPLLSGQPETSELRGPVDAHRLPGRGRHGDGDEGEHQASVHVRREAAPRRPGQHLLRLRFS

SEQ ID NO: 164618 - protein, 380 aa, Zea Mays
MAASAKGRLVPVLAVAAALAAVLLYRAPFSKSLGGEGCSLLPHDHFWIASDRVVTLGRVGPAAVEVKGGLINAIAVGDYRSFVLRRPLLDYGDAVIMPGLIDVHAHLDEPGRAEWEGFSNGTRAAAAGGITTLVDMPLNSFPSTVSEETLKLKLEAARDKLYVDVGFWGGLVPENAFNPSALEGLLKAGVLGLKSFMCPSGINDFPMTNSTHIEEGLVTLAKYKRSLLIHAERIPEAEDHDLQEDELDPRSYMTYLKSRPPSWEEAAIRDLQRAMKDTELGGRSEGAHIHIVHLSDAKTSLELMKVEWHHMKFAMPLFHDLSEPMVSTPRNKIHINEWREYVQLLLWTRSYICQFISSYFFFFQSKVFLVGFTYYNSLCL

SEQ ID NO: 164619 - protein, 310 aa, Zea Mays
MCPSGINDFPMTNSTHIEEGLVTLAKYKRSLLIHAERIPEAEDHDLQEDELDPRSYMTYLKSRPPSWEEAAIRDLQRAMKDTELGGRSEGAHIHIVHLSDAKTSLELMKDAKRSGASLSIETCPHYLAFSSEEVPDGDTRFKCSPPIRDDTNRENLWKALLDGHIDMLSSDHSPSTPDLKLMEEGDFLRAWGGISSLQFVLPVTWSYGRKYGVTLNQLASWWSERPAKLAGQKNKGAILPGYHADIVVWKPETEFQLDNNHAIYHKHQNISAYLGKQLSGKVLSTFVRGNLVFAEDKHANAACGVPILAK

SEQ ID NO: 164620 - protein, 141 aa, Zea Mays
MVHGKLEVLLVSAKGLEDTDFLNNMDPFVILTCRTQEQKSSVANGSEPEWNETFVFTVSDDTPQLHLKIMDSDLTNDDFVGEATIPLEAVFQEGSLPPAVHPVVKEEKYCGEVKLALTFTPAAETRRPDDNEEGPPYSSWS

SEQ ID NO: 164621 - protein, 151 aa, Zea Mays
MRILCPPFDEKNTNPKISAPQGSPSTMATGGGANETAVGAGEENASASRIPTRRFFVALHVGAGFHAPANEKAYRRAMKRACLAAAAVLREGTGTSLDAVAAAIQVLEDDPVTNAGRGSNLTESGHVECDASIMDGSTGSFGAVGAIRDQM

SEQ ID NO: 164622 - protein, 267 aa, Zea Mays
MRILCPPFDEKNTNPKISAPQGSPSTMATGGGANETAVGAGEENASASRIPTRRFFVALHVGAGFHAPANEKAYRRAMKRACLAAAAVLREGTGTSLDAVAAAIQVLEDDPVTNAGRGSNLTESGHVECDASIMDGSTGSFGAVGAIRDVKNPIQVALHLAKEQMAGPSLLGRIPPMFLVGEGAYQWAKSKGMDLVESTSEANSWLVTENARAQWVKYTSLLVNTKKSLYHSTGSGSEHHSVQLEAQGYLHVYLLLILFNSSHTLKF

SEQ ID NO: 164623 - protein, 654 aa, Zea Mays
MPGNQSLMERFLKRKLPPASDSNDPGADGETSRRGANASNTNLDRTASHRPLRVSRNQVNFDELPYDPADRRSISDYIGQKLQDEIRKKYLIRGPFRPPVGFKYPQKIIAGHARRFQPEWFTKYDWLEYSIKVDKCFCLQCYLFRDSNEGQGGNDAFVKDGWDGFNKLKRLQDHVGTGPDSFHNTAVKRCDNLMKPNQSIDSAIGKQQNITKEQYLIRLNTSIDAVRYLLHQGLAFRGHDESEKSKNQGNFRELVKLLAKQNDKRNKALGLGNAQMLASEIQKDIANCFAEIIVKSIIEEIGGDVFCLLVDESSDVSGKEQMAVVLRYVSKLGLIKERLIGVVHVKETSASCLKSNIDSLFGKYGLSIKQVRGQGYDGASNMRGEFNGLRALILRENSSAYYIHCFAHQLQLVIVAVAKKNDDISDFFDMVSLLINVAGASCKRKDMIRECQQERVSKAICSGQLRSGTGLNQEQSLQRAGDTRWSSHFKTLQRLSSLFPDVIEVLQYVEKEGPNDAKRRQARGLMDYLMDFDFVFHLQLMLLILGHANALSLSLQRKDKDILEAMVEVKLTKQRFQQIRDDGWDSLLEDVLSFCEKHGIPKLDMDHEYINRHKPRQRTNRTNYQHYRYDCLNPVIDLQLIEFNDRFNEPSGTR

SEQ ID NO: 164624 - protein, 620 aa, Zea Mays
MKPNQSIDSAIGKQQNITKEQYLIRLNTSIDAVRYLLHQGLAFRGHDESEKSKNQGNFRELVKLLAKQNDKRNKALGLGNAQMLASEIQKDIANCFAEIIVKSIIEEIGGDVFCLLVDESSDVSGKEQMAVVLRYVSKLGLIKERLIGVVHVKETSASCLKSNIDSLFGKYGLSIKQVRGQGYDGASNMRGEFNGLRALILRENSSAYYIHCFAHQLQLVIVAVAKKNDDISDFFDMVSLLINVAGASCKRKDMIRECQQERVSKAICSGQLRSGTGLNQEQSLQRAGDTRWSSHFKTLQRLSSLFPDVIEVLQYVEKEGPNDAKRRQARGLMDYLMDFDFVFHLQLMLLILGHANALSLSLQRKDKDILEAMVEVKLTKQRFQQIRDDGWDSLLEDVLSFCEKHGIPKLDMDHEYINRHKPRQRTNRTNYQHYRYDCLNPVIDLQLIEFNDRFNEVNSELLTHMAAFSPNNSFGAFKHESLMELAKAYPDDFSPVELDDLSSELHCYIDNVRADARFAQLGTISEHGKLMVDTKKHLAFSLVYRLLKLVLVLPIATASVERSFSAMKIVKTVLRNRIGDDFMNDCVISFMEQELLDTISNNDVIVRFQKMDGHNRRVKL

SEQ ID NO: 164625 - protein, 704 aa, Zea Mays
MILVPMERHQEGEQMHQTLTLTVQRVIVLCEFHETRDSNEGQGGNDAFVKDGWDGFNKLKRLQDHVGTGPDSFHNTAVKRCDNLMKPNQSIDSAIGKQQNITKEQYLIRLNTSIDAVRYLLHQGLAFRGHDESEKSKNQGNFRELVKLLAKQNDKRNKALGLGNAQMLASEIQKDIANCFAEIIVKSIIEEIGGDVFCLLVDESSDVSGKEQMAVVLRYVSKLGLIKERLIGVVHVKETSASCLKSNIDSLFGKYGLSIKQVRGQGYDGASNMRGEFNGLRALILRENSSAYYIHCFAHQLQLVIVAVAKKNDDISDFFDMVSLLINVAGASCKRKDMIRECQQERVSKAICSGQLRSGTGLNQEQSLQRAGDTRWSSHFKTLQRLSSLFPDVIEVLQYVEKEGPNDAKRRQARGLMDYLMDFDFVFHLQLMLLILGHANALSLSLQRKDKDILEAMVEVKLTKQRFQQIRDDGWDSLLEDVLSFCEKHGIPKLDMDHEYINRHKPRQRTNRTNYQHYRYDCLNPVIDLQLIEFNDRFNEVNSELLTHMAAFSPNNSFGAFKHESLMELAKAYPDDFSPVELDDLSSELHCYIDNVRADARFAQLGTISEHGKLMVDTKKHLAFSLVYRLLKLVLVLPIATASVERSFSAMKIVKTVLRNRIGDDFMNDCVISFMEQELLDTISNNDVIVRFQKMDGHNRRVKL

SEQ ID NO: 164626 - protein, 271 aa, Zea Mays
MVASVSCLPMTECFRLKQYHNSRETAVQQPQVMWGVVGKTTLVWHWLRQKLVSGCHWLWEEQRKTNCWLHSVLLRHDIVGFRFVAFGGKLEMWQLWLYASWRNRRYKHTHFVFFFVELLCSVFAAESRSNVVVVVLLLLATRMWIAAFVVLECLPRKQRIPTLCENRQGGGPGDKRDTCTAAYYPMDGMMDASDPITGRLPSVTDLPLAPAERFAALFRDQDIGMVEKIAMDLADIAYGDNAHWKLVRMSHANYHSSCLCCGTLLRRGIMS

SEQ ID NO: 164627 - protein, 383 aa, Zea Mays
MVASVSCLPMTECFRLKQYHNSRETAVQQPQVMWGVVGKTTLVWHWLRQKLVSGCHWLWEEQRKTNCWLHSVLLRHDIVGFRFVAFGGKLEMWQLWLYASWRNRRYKHTHFVFFFVELLCSVFAAESRSNVVVVVLLLLATRMWIAAFVVLECLPRKQRIPTLCENRQGGGPGDKRDTCTAAYYPMDGMMDASDPITGRLPSVTDLPLAPAERFAALFRDQDIGMVEKIAMDLADIAYGDNAHWKLRNLVKEGHHVLIFSQTRKMLNLIQDFQEGPGAPIFLLTTQVGGLGLTKAARVIVVDPAWNPSTDNQSVDRAYRIGQNKDVIVYSYLVCALRRFQSFLVCHNKVLMFPSRISSCKKSMVNKLLCKRSVLAELPLIEHG

SEQ ID NO: 164628 - protein, 78 aa, Zea Mays
MAKRTVGRQRKNRMKSCLEGGSGTKRKVTQNAQGTTKIKRQYTCPSCGQLGHRKTSYKCPLNGTKKRKRKPRKNTTKN

SEQ ID NO: 164629 - protein, 399 aa, Zea Mays
MATQLPCFTQLSPPSCSWIKDVGNCKATPDRVARSARALGHCHFRCCAGPRSANSFKKKDSFEKKDSFLELHPEVSLLRGEKSAEVVPMKGSSDGGLLEGLGVPPDRNDYSEAKIKVVGVGGGGSNAVNRMIESSMNGVEFWIVNTDVQAIRMSPVLPHNRLQIGQELTRGLGAGGNPDIGMNAAKESSESIQEALFGADMVFVTAGMGGGTGTGGAPVIAGIAKSMGILTVGIVTTPFSFEGRRRAVQAQEGIAALRNSVDTLIVIPNDKLLSAVSPNTPVTEAFNLADDILRQGIRGISDIITVPGLVNVDFADVRAIMQNAGSSLMGIGTATGKSRARDAALNAIQSPLLDIGIERATGIVWNITGGTDLTLFEVWSSHFLVFSTQCRLFFRLEFC

SEQ ID NO: 164630 - protein, 342 aa, Zea Mays
MTAKSTVTWTALISGYAQDNQVEPCLHLFALMRHSVCKPNDVTFATIFSVCTNHAFLVLGKSVQALQMRMGFDSYVHVSNALISMYAKCGSIGEARAVFESIRCKDLVSWNSLIFGYSQHGLAEHCLYLLREMEGHITPDAISFLGVLSSCRHACLVAEGRRCFRAMIEHGVVPEIDHYSCMVDLFGRAGLLDEAWDLIQTMPMPPNGVVWGSLLASCRVHGSTWIGIQAAEHRLKLEPSCAAIHVQLANLYGSIGCWDDVARVRKVMKERGLKTNIGCSWIEVGNKVYTFTAENRSKNQVNNVLVVLDCLQSHMDHEYDILLIEGLDWDYPEHIKLSLNTI

SEQ ID NO: 164631 - protein, 109 aa, Zea Mays
MPSSSTPSMSSLSACHRNKDTRQWTKRPWKLRSRKEFNHYARIQINAHTMPLDSTIVYLDWIPTLTFKHHDGNTAMTLKCSFSFFSHISASCQFFSFLSIQQSSSGYIA

SEQ ID NO: 164632 - protein, 261 aa, Zea Mays
MTTFESDLHLPVTCVDASEQFLSKLKGVEDPEKKRKIIGREFIAVFDDFAHKLEQKIGKRPEYLVQGTLYPDVIESCPPPGSGRTHSHTIKSHHNVGGLPKDMKLKLIEPLKLLFKDEVRKLGGILNVPDSFLKRHPFPGPGLAVRVLGDVTQGNALEVLRQVDEIFVQSIKDAGLYDKIWQAFAVFLPVQTVGVQGDQRTHSNAVVLRAITSEDGMTADWYYFEHAFLVDVVNKICNNVRGINRVCQDITSKPPATVEWE

SEQ ID NO: 164633 - protein, 235 aa, Zea Mays
MPPSRSASTATPCTSGWPKIWLGDEAGGQEEQLDGNLILFSGNDYMGLSSHPAVREAAVKAAQDYGMGPRGSALICGYTTYHKLVEESLARLKKKEDCLLCPTGFSANMAAITALGSITSLLSPGRKPAEHERIAIFSDALNHASIIDGIRLLERQQEALVFVYKHCDMFHLDFLLSSCSLEKKVVVTDSLFSMDGDFAPFPELIKLRRKLMGHLFAVRMVVVQLSCLNVKRTLT

SEQ ID NO: 164634 - protein, 157 aa, Zea Mays
MQLFACIGASCAVEKIEERNIIWVPLPIFSLGVICMLPKPTTLGLSLQSPPTAHAMRRSCASRPPGRPISYSSSPNCLSPPISPMFAKPRAEPPPVDLGSPASCPPCPGHTVVRRADRPGRSVMRSSLPRSRFVYELRGIDDQAWRQSDRTLRVLRD

SEQ ID NO: 164635 - protein, 449 aa, Zea Mays
MPLLGAFLADAYLGRYRSVIIACTLYVLGYGMLTLSATVPALQPSHMPCREDGVSSSSCQPGWPQVAFFYVSLYLIAIAQGADKPCGLAFAADQFDAEHQGERASRGSLFNWWFFCMAIGISVSVSVVGYIQEYVGWGLGFGVPCAIVLCAFLVFLLGTPTYRLYAPTPEAKSPFRRLARGLAANANKTGGLSASHSEEEEAAADARCVLRLLPIWAASLAYGVVYAQIMTLFNKQGRTLDRHIGDGLELPPAALQTLGPASILLFVPVYDRAVVPALRWATGNPSGLSMLQRVGAGMAVSLAGVAVAALVEARRLAMAREHGLVDDPSATVPMSWAWIVPQYAMMGVADVLAVVGLQELFYDQMPDGLRSLGLALYLSVMGIGGFISSLLISLIDGVTGSGGGDSWFADNLNRAHVDYFYWLLAGLSAVELALFLYFARSYVYKHKPN

SEQ ID NO: 164636 - protein, 611 aa, Zea Mays
MAASALWQPQEQGLREICAHLEAHISPNSDQARIWQQLQQYSQFPDFNNYLLFILARGEGKSIEVRQAAGLLLKNNLRTTYISMQSSSQHYVKSELLPCIGATNRAIRSTVGTVISVLFQIVRVAGWIELFQALHKCLESNDLDHMEGAMDAIYKICEDVPEELDVDVPGLSERPINVFMPRILQFFQSPHASLRKLSLGIINQYIVVMPSALYMSMDQYIQGLFNLAKDSSADVRKLVCSAWVQLIEVRPSILEPHLKNVTELILQANKDSDDEVALEACEFWSAYCDVSMPPEGLQEFLPHLIPTLLSNMVYADGDESLDDAEEDESFPDRDQDLKPRFHDSRLHGSETGDDDDDADAVNVWNLRKCSAAGLDVLSNVFGDSILPTLMPLIEQNLARTDDDSWKERETAVLCLGAIAEGCISGLYPHLPQIVAFLIPLLDDKFPLIRSITCWTLSRYSKFIVQSLDHPNGRGQFDKILMGVLRRILDTNKRVQEAACSAFAILEEEASEELVPHLEVILQHLMCAYRKYQRRNLRILYDALGTLADAVGAELNQAKYLDIFMPPLITKWQQLSNYDKDLFPLLECFTSIAQFGVGAAFSCLLWFQTRRT

SEQ ID NO: 164637 - protein, 259 aa, Zea Mays
MAASALWQPQEQGLREICAHLEAHISPNSDQARIWQQLQQYSQFPDFNNYLLFILARGEGKSIEVRQAAGLLLKNNLRTTYISMQSSSQHYVKSELLPCIGATNRAIRSTVGTVISVLFQIVRVAGWIELFQALHKCLESNDLDHMEGAMDAIYKICEDVPEELDVDVPGLSERPINVFMPRILQFFQSPHASLRKLSLGIINQYIVVMPSALYMSMDQYIQGLFNLAKDSSADVRKLVCSAWVQLIEVRPSILEVCIL

SEQ ID NO: 164638 - protein, 349 aa, Zea Mays
MFGNWFVQPGFSSLKFAHQFWRSAYCDVSMPPEGLQEFLPHLIPTLLSNMVYADGDESLDDAEEDESFPDRDQDLKPRFHDSRLHGSETGDDDDDADAVNVWNLRKCSAAGLDVLSNVFGDSILPTLMPLIEQNLARTDDDSWKERETAVLCLGAIAEGCISGLYPHLPQIVAFLIPLLDDKFPLIRSITCWTLSRYSKFIVQSLDHPNGRGQFDKILMGVLRRILDTNKRVQEAACSAFAILEEEASEELVPHLEVILQHLMCAYRKYQRRNLRILYDALGTLADAVGAELNQAKYLDIFMPPLITKWQQLSNYDKDLFPLLECFTSIAQFGVGAAFSCLLWFQTRRT

SEQ ID NO: 164639 - protein, 612 aa, Zea Mays
MAASALWQPQEQGLREICAHLEAHISPNSDQARIWQQLQQYSQFPDFNNYLLFILARGEGKSIEVRQAAGLLLKNNLRTTYISMQSSSQHYVKSELLPCIGATNRAIRSTVGTVISVLFQIVRVAGWIELFQALHKCLESNDLDHMEGAMDAIYKICEDVPEELDVDVPGLSERPINVFMPRILQFFQSPHASLRKLSLGIINQYIVVMPSALYMSMDQYIQGLFNLAKDSSADVRKLVCSAWVQLIEVRPSILEPHLKNVTELILQANKDSDDEVALEACEFWSAYCDVSMPPEGLQEFLPHLIPTLLSNMVYADGDESLDDAEEDESFPDRDQDLKPRFHDSRLHGSETGDDDDDADAVNVWNLRKCSAAGLDVLSNVFGDSILPTLMPLIEQNLARTDDDSWKERETAVLCLGAIAEGCISGLYPHLPQIVAFLIPLLDDKFPLIRSITCWTLSRYSKFIVQSLDHPNGRGQFDKILMGVLRRILDTNKRVQEAACSAFAILEEEASEELVPHLEVILQHLMCAYRKYQQRRNLRILYDALGTLADAVGAELNQAKYLDIFMPPLITKWQQLSNYDKDLFPLLECFTSIAQFGVGAAFSCLLWFQTRRT

SEQ ID NO: 164640 - protein, 853 aa, Zea Mays
MAASALWQPQEQGLREICAHLEAHISPNSDQARIWQQLQQYSQFPDFNNYLLFILARGEGKSIEVRQAAGLLLKNNLRTTYISMQSSSQHYVKSELLPCIGATNRAIRSTVGTVISVLFQIVRVAGWIELFQALHKCLESNDLDHMEGAMDAIYKICEDVPEELDVDVPGLSERPINVFMPRILQFFQSPHASLRKLSLGIINQYIVVMPSALYMSMDQYIQGLFNLAKDSSADVRKLVCSAWVQLIEVRPSILEPHLKNVTELILQANKDSDDEVALEACEFWSAYCDVSMPPEGLQEFLPHLIPTLLSNMVYADGDESLDDAEEDESFPDRDQDLKPRFHDSRLHGSETGDDDDDADAVNVWNLRKCSAAGLDVLSNVFGDSILPTLMPLIEQNLARTDDDSWKERETAVLCLGAIAEGCISGLYPHLPQIVAFLIPLLDDKFPLIRSITCWTLSRYSKFIVQSLDHPNGRGQFDKILMGVLRRILDTNKRVQEAACSAFAILEEEASEELVPHLEVILQHLMCAYRKYQRRNLRILYDALGTLADAVGAELNQALGPGFAQFAEPVFQRCINLIHSQQLSKIDPTAAGAVYDREFIVCSLDLLSGLAEGLGAGIESLVAQSNLRDLLLQCCMDEAADVRQSALALLGDLSRVCPIHLHPRLQEFLTVAAKQLNPQSVKDAVSVANNACWAIGELAIKIGKEIAPVVITVVSCLVPILKSPEGSNKSLVENSAITLGRLSWVCPDIVAPHMEHFMQAWCKALCMIRDDFEKEDSFHGLCAMVAANPTGGAGSLAYICQACASWTEIKSEGLHNEVCQILNGYKQLLGNGGWEQCMATLQPDVVQKLARYGV

SEQ ID NO: 164641 - protein, 238 aa, Zea Mays
MAAAAAPVSLVFLCTRGQQQLVLVDATKPPLPLRSRAFSVRAAQQQQQQQHRARPRPPRRNKPPGPARRPPRVPLDQDEYDGGYDDREEGRFAGGTRAAAMPKPPAGFVLDDQGRCIAAASKRIVTIIDDTNNRPLECIIRRVFRSSQDHDCMLLCPVDMPVQVLKSTNFSGWVAVDDDQLKQIIPSVMDAREYLYRKRKRDSSDCSRIEWNGMEWSAFATVSSCNLQYLEWSDGQRS

SEQ ID NO: 164642 - protein, 135 aa, Zea Mays
MASDSGDFGGENKSLETARRLLEETFTSEAEAEALPSLPSGFYDAFVLRGIRVVQALQPGTLLCHFNVPSRLLNSGGFLHGGATASLVDLVASAAFATAGLRTRGSPLEMNISYLDAAFADRLISRRRFFALARQ

SEQ ID NO: 164643 - protein, 504 aa, Zea Mays
MGIAVVALHTMPGAFTTHSPASILSLRPDFTRINSRTNSVPNARTLQGVLRIPRLRSVRRLCQRIDDRVTEGNGPWVKDAMNNASQVLGDISVLGQAVSGNGGLNGSAAKTPPQRRKSSSVEDEAWELLQESMVYYCGSPVGTIAANDPNDSDPVNYDQVFIRDFIPSGIAFLLKGEYEIVRNFILHTLQLQSWEKTMDCHSPGQGLMPASFKVRTIPLDGDEDATEEVLDPDFGEAAIGRVAPVDSGLWWIILLRAYGKCSGDLSVQERIDVQTGMKMILKLCLADGFDMFPTLLVTDGSCMIDRRMGIHGHPLEIQALFYSALLCAREMLTQEDGSADLIRALNNRLIALSFHIREYYWLDMQKLNEIYRYKTEEYSYDAVNKFNIYPDQISPWLVEWIPPKGGYFIGNLQPAHMDFRFFSLGNLWSIVSSLATTHQSHAILDLIESKWSDLVAEMPLKICYPALENQEWKIITGSDPKNTPWSYHNGGSWPTLLWQWHASR

SEQ ID NO: 164644 - protein, 549 aa, Zea Mays
MGIAVVALHTMPGAFTTHSPASILSLRPDFTRINSRTNSVPNARTLQGVLRIPRLRSVRRLCQRIDDRVTEGNGPWVKDAMNNASQVLGDISVLGQAVSGNGGLNGSAAKTPPQRRKSSSVEDEAWELLQESMVYYCGSPVGTIAANDPNDSDPVNYDQVFIRDFIPSGIAFLLKGEYEISWEKTMDCHSPGQGLMPASFKVRTIPLDGDEDATEEVLDPDFGEAAIGRVAPVDSGLWWIILLRAYGKCSGDLSVQERIDVQTGMKMILKLCLADGFDMFPTLLVTDGSCMIDRRMGIHGHPLEIQALFYSALLCAREMLTQEDGSADLIRALNNRLIALSFHIREYYWLDMQKLNEIYRYKTEEYSYDAVNKFNIYPDQISPWLVEWIPPKGGYFIGNLQPAHMDFRFFSLGNLWSIEWKIITGSDPKNTPWSYHNGGSWPTLLWQLTVACIKMNRPELAAKAIEVAERRIATDKWPEYYDTKRARFIGKQSRLYQTWSIAGFLVAKLLIEKPDAARILWNDEDAEILNASSTNRKRGKKVLKKTYIV

SEQ ID NO: 164645 - protein, 433 aa, Zea Mays
MGIAVVALHTMPGAFTTHSPASILSLRPDFTRINSRTNSVPNARTLQGVLRIPRLRSVRRLCQRIDDRVTEGNGPWVKDAMNNASQVLGDISVLGQAVSGNGGLNGSAAKTPPQRRKSSSVEDEAWELLQESMVYYCGSPVGTIAANDPNDSDPVNYDQVFIRDFIPSGIAFLLKGEYEIVRNFILHTLQLQSWEKTMDCHSPGQGLMPASFKVRTIPLDGDEDATEEVLDPDFGEAAIGRVAPVDSGLWWIILLRAYGKCSGDLSVQERIDVQTGMKMILKLCLADGFDMFPTLLVTDGSCMIDRRMGIHGHPLEIQALFYSALLCAREMLTQEDGSADLIRALNNRLIALSFHIREYYWLDMQKLNEIYRYKTEEYSYDAVNKFNIYPDQISPWLVEWIPPKGGYFIGNLQPAHMDFRFFSLGNLWSIRCH

SEQ ID NO: 164646 - protein, 561 aa, Zea Mays
MGIAVVALHTMPGAFTTHSPASILSLRPDFTRINSRTNSVPNARTLQGVLRIPRLRSVRRLCQRIDDRVTEGNGPWVKDAMNNASQVLGDISVLGQAVSGNGGLNGSAAKTPPQRRKSSSVEDEAWELLQESMVYYCGSPVGTIAANDPNDSDPVNYDQVFIRDFIPSGIAFLLKGEYEIVRNFILHTLQLQSWEKTMDCHSPGQGLMPASFKVRTIPLDGDEDATEEVLDPDFGEAAIGRVAPVDSGLWWIILLRAYGKCSGDLSVQERIDVQTGMKMILKLCLADGFDMFPTLLVTDGSCMIDRRMGIHGHPLEIQALFYSALLCAREMLTQEDGSADLIRALNNRLIALSFHIREYYWLDMQKLNEIYRYKTEEYSYDAVNKFNIYPDQISPWLVEWIPPKGGYFIGNLQPAHMDFRFFSLGNLWSIEWKIITGSDPKNTPWSYHNGGSWPTLLWQLTVACIKMNRPELAAKAIEVAERRIATDKWPEYYDTKRARFIGKQSRLYQTWSIAGFLVAKLLIEKPDAARILWNDEDAEILNASSTNRKRGKKVLKKTYIV

SEQ ID NO: 164647 - protein, 75 aa, Zea Mays
MGTNTWLVAPPRKLCSAGTWLVTPPHRFAGWWLGRQPHLANLLDGDLVGSLVSLTCLSETWSAAPPAGLLAEDLV

SEQ ID NO: 164648 - protein, 297 aa, Zea Mays
MAKPPPPTSTSDPALPTTATTTSSAPKSSSRPSPRPRGLLDPLAASARSLLASARRSPVTTLAAAFFLLALVMYGEDARTIAELSIDDYLYPDADLYNVSGLPPLALPPLTCDLSSGRWVFDNVSVPAYREKDCTFLTKQVSCLANGRPDDMWQYWRWQPNECSLPTFDARRFMEAMRGKRLMFVGDSLNRNQWESLVCLVQSILSKGRKKIVKRGSFNTFYAKEYRATLEFYWAPFLVESNSDNPNFHSIKERIISPERIEAHAKHWKDADYLVFNTYIWWMNNADIKETQFEVLV

SEQ ID NO: 164649 - protein, 453 aa, Zea Mays
MAKPPPPTSTSDPALPTTATTTSSAPKSSSRPSPRPRGLLDPLAASARSLLASARRSPVTTLAAAFFLLALVMYGEDARTIAELSIDDYLYPDADLYNVSGLPPLALPPLTCDLSSGRWVFDNVSVPAYREKDCTFLTKQVSCLANGRPDDMWQYWRWQPNECSLPTFDARRFMEAMRGKRLMFVGDSLNRNQWESLVCLVQSILSKGRKKIVKRGSFNTFYAKDIKERIISPERIEAHAKHWKDADYLVFNTYIWWMNNADIKVRRPNSRYWSDNDEVPRIEAYGRVFKTWSDWLNDNIDPARTSIFFMTISPPHLSPQNWGNPDGIKCVRETLPYQNYSQHLDLYHDMRLYDLVVNVASSMEKVPVTVINITRMSDYRKDAHTSLYTIRQGKLLTPKQKADPEKFADCIHWCLPGVPDVWNQILYTRILSKSSWHSNFSPPPSQSLPLPPQ

SEQ ID NO: 164650 - protein, 489 aa, Zea Mays
MANASDSDIPSVTHDLDEDEEFDDDDLDDEDDDGGEPLASSSEAARLEAVLRRLTADEVRIRVHQVTIRGCARTRRAAVEAAVGPDVSRAATVRDLVRAAAAAGDRLRCLGAFDTVSITLDAAPPGIPGSAVVVLIDVAEARGRAAGDFGVFANTQSRSCSLEGSVKLKNLFGYCETWDASGALELDKTAELSAGVQMPRIGAIPTPLMARISFVSDDWLKSSLKEHLMGVSVGLLSTINHNIAYNLTWRKLTDPTRMSSNSVQEELGHSLLSSIKYAYKVDRRDSSIRPARGYAFMSTSQVGGLAPGSKYSRFLRQEFDLRVALPLGVLNGALNAGVAAGVIHPLERGSAGSVSPLVERFNLGGNRALVCRLGGPSSLLGFKTRGLRAATESRTQDPNTPGNGTSPSPELNGLGGEVAVTAFADLSFDLPLKPLRELGIHGHAFVCAGNLGRLTECDLRKFPVTEFLQTFRSCAGWGVVVPTRLFRVE

SEQ ID NO: 164651 - protein, 328 aa, Zea Mays
MANASDSDIPSVTHDLDEDEEFDDDDLDDEDDDGGEPLASSSEAARLEAVLRRLTADEVRIRVHQVTIRGCARTRRAAVEAAVGPDVSRAATVRDLVRAAAAAGDRLRCLGAFDTVSITLDAAPPGIPGSAVVVLIDVAEARGRAAGDFGVFANTQSRSCSLEGSVKLKNLFGYCETWDASGALELDKTAELSAGVQMPRIGAIPTPLMARISFVSDDWLKSSLKEHLMGVSVGLLSTINHNIAYNLTWRKLTDPTRMSSNSVQEELGHSLLSSIKYAYKVDRRDSSIRPARGYAFMSTSQVGGLAPGSKYSRFLRNLIFEWLCLWVC

SEQ ID NO: 164652 - protein, 153 aa, Zea Mays
MSPPKSAARPPASLTSPKTGANKRQRKAASAVPLGDITNLLVLAESPTPSKPRRTARRALPATSDVSAVSSTCSSSASVTPAPKPSSAAVFEEEHSVVKSPTISTVHRRTTGAQERCRRNPASANNKGKEPVAATASCPPLGKSARTHSRSLQ

SEQ ID NO: 164653 - protein, 1324 aa, Zea Mays
MALGDLMASRLVHSSSSRGLSSSPTPPLPNQHHHQNHNHTGDGLLAASGPEPRNGLEADEVDKSAPVPYLPQLVVLCEQRHEPEGIDEAAAAAAGPSTSGLVSKWRPKDRMKTGCVALVLCLNISVDPPDVIKISPCARMECWIDPFSMAPPKALESIGKTLHSQYERWQPKARYKLQLDPTVEEVKKLCNTCRKYARSERVLFHYNGHGVPKPTSNGEIWVFNKSYTQYIPLPITDLDSWLKTPSIYVFDCSASGIIVKAFLERLDWSSSSSASSRKDCILLAACEAHQTLPQSAEFPADVFTACLTTPIKMALHWFCKRSLLRGSLDLSLIDQIPGRQNDRKTLLGELNWIFTAITDTIAWNVLPHDLFQRLFRQDLLVASLFRNFLLAERIMRSANCSPVSYPLLPPTHQHHMWDAWDMAAEICLSKLPQLIADPNAEFQPSPFFTEQLTAFEVWLDHGSEDKKPPEQLPIVLQVLLSQSHRFRALVLLGRFLDMGPWAVDLALSVGIFPYVLKLLQTSAMELRQILVFIWTKILSLDKSCQVDLVKDGGHTYFVRFLDSLDAYPEQRAMAAFVLAVIVDGHRTGQEACMNAGLIDVCLRHLQPENPHDSQTEPLLLQWLCLCLGKLWEDFPDVQLLTLQTNTPEIVLCLLSEPQPEVKAEINVVRSLLQISSDASPLVRSEVAIALTRFALGHNKHLKSVAAEYWKPQSNSLLKSLPSLANINNPNNVYSPNNILQGSIGPVLRVGSDSSAAGRDGRMSTSSPIATSSIMHGSPQSDDSSQLSDSGLLLRENASNGGPGYTRSRPVDNVIYSQFISTMCSFAKDPYPRIATIGRRALSLIGVEQVVMKNTRFNSGGAHRGETSASNFGMARSSSWLDMNSGNNLIKFRTPPVSPPQHDFLPGLRRVCSMEFGQHPISSPDGLAVPLLSSAAATSNAELSILPQSTIYNWSCGHFSRPLLIGSDDNEEANARREERERLALDYIAKCQRSSCKMTNQIASWDTRFELGTKTALLLPFSPIVVAADENEQIRVWNYDDALPVNSYQNHNLSDRGLSKLLLINELDESLLLAASSDGNVRVWKNFTQKGGQKLVTAFSSVQGHRTAGRSIVIDWQQQSGYLYASGDMSSILLWDLDKEQQLSTIQSSGDSAISSLSASQVCSGHFAAGFAAGSVRIYDIRSPDRVVYTARPHAPRTEKVVGIGFQPGFDPYKIVSASQAGDIQFLDVRRSAEPYLTIEAHRGSLTALAVHRHAPVVASGSAKQMIKVFSLEGEQLTIIRYQPSFMGQRIGTVNCLSFHPYKSLLSAGAGDNALVSIYAEENYK

SEQ ID NO: 164654 - protein, 252 aa, Zea Mays
MRGRQRRRRLISPAFPSPNPPRPLPVSKLVDSNSKETKSKTKEWNDRIKQDKKPEQLRSAARQRHEDMGRNARFAQIWKSRKGEKADAGDSLREICHLYDAVQVDPDDEKHPAEPRITSFEEGAVLCNFLPLIREYLPSTAEEIEADIISLAQSEDSEVYDIYTVKEVDDTMEATSAASYPRLQVDDGEDECYEDCPYDTDDSNAEDNPLFDYPDESSEDEDDGRNDEDPFGDKEGSDSDYEKEEVEVEEDE

SEQ ID NO: 164655 - protein, 77 aa, Zea Mays
MLKLKLIWRSVALRYKWMMEKMNATKIVHMTQMIPMPKTILFLIILMNLPRTRMMVGTTRILLETKKVLTQITRRKK

SEQ ID NO: 164656 - protein, 75 aa, Zea Mays
MLTRSQLRKANISEVIWSIHIWSRAWTMLYFIKYGVKLKRNLRQRMGRIQSQGQQKKIRQSPSAPQLQSLCTNGS

SEQ ID NO: 164657 - protein, 119 aa, Zea Mays
MSSKKNYYKEKLMRRKEEKKEEPETPRYRDRAKERREDQNPDYEPTELGSFHAVAPPGNDLRLADAHKISIEKSKYLGGDLEHTHLVKGLDYALLHKVRSEIEKKPEAEDGKDTKSSTT

SEQ ID NO: 164658 - protein, 285 aa, Zea Mays
MCVCLSTQAHTHTSSTTIHQKAKHQPLMPSQSTHTSSSLSSSTTPILPCSSAAALFRSVMAAVATETPFHVLAVDDSLPDRKLIERLLKTSSFQVTTVDSGSKALQFLGLHDQDSTVPPVHTHQLDVAANQDVAVNLIITDYCMPGMTGYDLLKKIKESSSLRDIPVVIMSSENIPSRINRCLEEGADEFFLKPVRLSDMNKLKPHILKSRCNQEQHQQSDSHSGERRNPTISSSDSINNRKRKGAGTEEILPQLANRSRHNVSPGFAKRNGICKLILLESNRSK

SEQ ID NO: 164659 - protein, 954 aa, Zea Mays
MKAGFCISPDELASITSKHDAKALSMHGGVDGICAKVRSSPDRGVSAASDDDLDARRAVYGANRYAEKPGRSFWMFVWDALQDVTLVILMACALLSAAVGLASEGWPRGVYDGLGIMLSILLVVVVTAVSDYRQSLQFKELDNEKKKVSVHVTRDGCRQQVSIYDLVVGDVVHLSIGDQVPADGLYVHGYSLLIDESSLSGESEPVYISRAKPFILAGTKVQDGSGKMLVTAVGMHTEWGRLMSTLSEGGEDETPLQVKLNGVATVIGKIGLLFATLTFVVLMVRFLVDKTFTVGLSSRWTSADALAIVDYFATAVTIIVVAVPEGLPLAVTLSLAFAMKKLMNDKALVRHLSACETMGSAGTICTDKTGTLTTNHMVVDRIWVSEVSESVSSSGSGLEDLSSAAVSRPATLGLLLQGVFENTSAEVVREKDGGQAVLGTPTERAILEFGLKLEARRRDAGDRSCTKVKVEPFNSVKKMMAVLVSLPDGRYRWYVKGASEIIVQMCDAMVDGDGNGVPLSEARRKDVLGTINSFASDALRTLCLAYKEGDGFGEDADSPAGGFTLICIFGIKDPVRPGVKDAVKACMSAGIVVRMVTGDNINTAKAIAKECGILTDGGVAIEGPEFRNKSPEEMRDLIPKIQVMARSLPLDKHTLVKNLRGMFREVVAVTGDGTNDAPALHEADIGLAMGIAGTEVAKESADVIVLDDNFTTIINVARWGRAVYINIQKFVQFQLTVNIVALVINFVSACITGSAPLTAVQLLWVNMIMDTLGALALATEPPNDDMMKRPPVGRGESFITKVMWRNIVGQSLYQLAVLGALMFGGERLLNIHGADSKPVVNTLIFNSFVFCQVFNEINSREMQKINVFRGMFGNWIFVGIIAATVAFQVVIVEFLGTFASTVPLGWQLWLVSVGLGSVSLVVGAVLKCVPVEPDDGVRASPNGYAPLPGGPDNI

SEQ ID NO: 164660 - protein, 349 aa, Zea Mays
MPRWTENSASTKSAELVKQQDRLEFDDPDEVDEEEEVEYEEVEEEVEYEETEDEYGQTEAVRQVDAKHDSKMVDADTDEGGKGSHDELLALPPHGSEVYVGGIASDVSSDDLKKLCESVGEVVEVRMPGKSGRLYAFVNFRTKELASKAIQKLNNKDLKGKKIRVSSSQAKNRLFIGNIPYNWTENEFKKAAEEVGPGVLKVNLVKAPHSDTNKGYGFIEYYNQACAEYAKKMMSTPEFKLDKNAPNVSWADTKNGGESASTAQPMLYVPGAPPGSTMIPMVLPDGRLVYVPQPAGQQPVPMTSPPPPQQGDRHYGGSGGSSSGGRRQQRRDDSGGSNTNSRRGRRRPY

SEQ ID NO: 164661 - protein, 329 aa, Zea Mays
MPRWTENSASTKSAELVKQQDRLEFDDPDEVDEEEEVEYEEVEEEVEYEETEDEYGQTEAVRQVDAKHDSKMVDADTDEGGKGSHDELLALPPHGSEVYVGGIASDVSSDDLKKLCESVGEVVEVRMPGKSGRLYAFVNFRTKELASKAIQKLNNKDLKGKKIRVSSSQAKNRLFIGNIPYNWTENEFKKAAEEVGPGVLKVNLVKAPHSDTNKGYGFIEYYNQACAEYAKKMMSTPEFKLDKNAPNVSWADTKNGGESASTAQVKSLYVKNLPKAVTQEQLKKLFEHLGEVTKPMLYVPGAPPGSTMIPMVLPDGRLVYVLQDSSLCP

SEQ ID NO: 164662 - protein, 379 aa, Zea Mays
MPRWTENSASTKSAELVKQQDRLEFDDPDEVDEEEEVEYEEVEEEVEYEETEDEYGQTEAVRQVDAKHDSKMVDADTDEGGKGSHDELLALPPHGSEVYVGGIASDVSSDDLKKLCESVGEVVEVRMPGKSGRLYAFVNFRTKELASKAIQKLNNKDLKGKKIRVSSSQAKNRLFIGNIPYNWTENEFKKAAEEVGPGVLKVNLVKAPHSDTNKGYGFIEYYNQACAEYAKKMMSTPEFKLDKNAPNVSWADTKNGGESASTAQVKSLYVKNLPKAVTQEQLKKLFEHLGEVTKVVIPPAKAGHENRYGFVHFKERSMAMKALEDTERFELDANVVCSRCSSRFDNDPNGSTRWSSCIRTTACRTAACAHDFASAATAR

SEQ ID NO: 164663 - protein, 471 aa, Zea Mays
MPRWTENSASTKSAELVKQQDRLEFDDPDEVDEEEEVEYEEVEEEVEYEETEDEYGQTEAVRQVDAKHDSKMVDADTDEGGKGSHDELLALPPHGSEVYVGGIASDVSSDDLKKLCESVGEVVEVRMPGKSGRLYAFVNFRTKELASKAIQKLNNKDLKGKKIRVSSSQAKNRLFIGNIPYNWTENEFKKAAEEVGPGVLKVNLVKAPHSDTNKGYGFIEYYNQACAEYAKKMMSTPEFKLDKNAPNVSWADTKNGGESASTAQVKSLYVKNLPKAVTQEQLKKLFEHLGEVTKVVIPPAKAGHENRYGFVHFKERSMAMKALEDTERFELDGQLLDCSLAKPLADKKDDTSAPKGGPLLPSYTPVGYGLMGAYNPLGNGLAVAGAYNPYGNGLAGAYGVLGAHAAQLEPAVRASPLAARSSARPNVVCSRCSSRFDNDPNGSTRWSSCIRTTACRTAACAHDFASAATAR

SEQ ID NO: 164664 - protein, 442 aa, Zea Mays
MPRWTENSASTKSAELVKQQDRLEFDDPDEVDEEEEVEYEEVEEEVEYEETEDEYGQTEAVRQVDAKHDSKMVDADTDEGGKGSHDELLALPPHGSEVYVGGIASDVSSDDLKKLCESVGEVVEVRMPGKSGRLYAFVNFRTKELASKAIQKLNNKDLKGKKIRVSSSQAKNRLFIGNIPYNWTENEFKKAAEEVGPGVLKVNLVKAPHSDTNKGYGFIEYYNQACAEYAKKMMSTPEFKLDKNAPNVSWADTKNGGESASTAQVKSLYVKNLPKAVTQEQLKKLFEHLGEVTKVVIPPAKAGHENRYGFVHFKERSMAMKALEDTERFELDGQLLDCSLAKPLADKKDDTSAPKGGPLLPSYTPVGYGLMGAYNPLGNGLAVAGAYNPYGNGLAANVVCSRCSSRFDNDPNGSTRWSSCIRTTACRTAACAHDFASAATAR

SEQ ID NO: 164665 - protein, 343 aa, Zea Mays
MPRWTENSASTKSAELVKQQDRLEFDDPDEVDEEEEVEYEEVEEEVEYEETEDEYGQTEAVRQVDAKHDSKMVDADTDEGGKGSHDELLALPPHGSEVYVGGIASDVSSDDLKKLCESVGEVVEVRMPGKSGRLYAFVNFRTKELASKAIQKLNNKDLKGKKIRVSSSQAKNRLFIGNIPYNWTENEFKKAAEEVGPGVLKVNLVKAPHSDTNKGYGFIEYYNQACAEYAKKMMSTPEFKLDKNAPNVSWADTKNGGESASTAQVKSLYVKNLPKAVTQEQLKKLFEHLGEVTKVVIPPAKAGHENRYGFVHFKERSMAMKALEDTERFELDGDFPSLSSFCS

SEQ ID NO: 164666 - protein, 364 aa, Zea Mays
MPRWTENSASTKSAELVKQQDRLEFDDPDEVDEEEEVEYEEVEEEVEYEETEDEYGQTEAVRQVDAKHDSKMVDADTDEGGKGSHDELLALPPHGSEVYVGGIASDVSSDDLKKLCESVGEVVEVRMPGKSGRLYAFVNFRTKELASKAIQKLNNKDLKGKKIRVSSSQAKNRLFIGNIPYNWTENEFKKAAEEVGPGVLKVNLVKAPHSDTNKGYGFIEYYNQACAEYAKKMMSTPEFKLDKNAPNVSWADTKNGGESASTAQVKSLYVKNLPKAVTQEQLKKLFEHLGEVTKVVIPPAKAGHENRYGFVHFKERSMAMKALEDTERFELDGQLLDCSLAKPLADKKDDTSAPKGAFSSPHLR

SEQ ID NO: 164667 - protein, 434 aa, Zea Mays
MPRWTENSASTKSAELVKQQDRLEFDDPDEVDEEEEVEYEEVEEEVEYEETEDEYGQTEAVRQVDAKHDSKMVDADTDEGGKGSHDELLALPPHGSEVYVGGIASDVSSDDLKKLCESVGEVVEVRMPGKSGRLYAFVNFRTKELASKAIQKLNNKDLKGKKIRVSSSQAKNRLFIGNIPYNWTENEFKKAAEEVGPGVLKVNLVKAPHSDTNKGYGFIEYYNQACAEYAKKMMSTPEFKLDKNAPNVSWADTKNGGESASTAQVKSLYVKNLPKAVTQEQLKKLFEHLGEVTKVVIPPAKAGHENRYGFVHFKERSMAMKALEDTERFELDGQLLDCSLAKPLADKKDDTSAPKGGPLLPSYTPVGYGLMGAYNPLGNGLAVAGAYNPYGNGLAGAYGVLGAHAAQLEPAVRASPLAACSSARRTSLALRLLV

SEQ ID NO: 164668 - protein, 513 aa, Zea Mays
MRELKSGRGNLVGLRLGEPKHCRPGSLASVRLPPRVPLFRSPPPPHPSPSHCAPSIPPCLRRLGGLPLPSLSRAKSAHQMPRWTENSASTKSAELVKQQDRLEFDDPDEVDEEEEVEYEEVEEEVEYEETEDEYGQTEAVRQVDAKHDSKMVDADTDEGGKGSHDELLALPPHGSEVYVGGIASDVSSDDLKKLCESVGEVVEVRMPGKSGRLYAFVNFRTKELASKAIQKLNNKDLKGKKIRVSSSQAKNRLFIGNIPYNWTENEFKKAAEEVGPGVLKVNLVKAPHSDTNKGYGFIEYYNQACAEYAKKMMSTPEFKLDKNAPNVSWADTKNGGESASTAQVKSLYVKNLPKAVTQEQLKKLFEHLGEVTKVVIPPAKAGHENRYGFVHFKERSMAMKALEDTERFELDGQLLDCSLAKPLADKKDDTSAPKGGPLLPSYTPVGYGLMGAYNPLGNGLAVAGAYNPYGNGLAGAYGVLGAHAAQLEPAVRASPLAACSSARRTSLALRLLV

SEQ ID NO: 164669 - protein, 410 aa, Zea Mays
MTWSLLVFSTMFLFYARFLLISQYMRDCIIGNFRRRFHSMIRTENCIQRPSIIESLLRRHLGIIHLAEQHISMDLTEGIREVLLAESYTGPFPNLQMFETPVGTQGGGSAVEMICNWYIENVVKDASRIGVAFDAIQNCFRSSQPIGGGCLAESFTDKREMKSLVRLFGGYGIDKMDKMLREHTSALLNCIDSALRSNRDALEGLAGTVNSGDRIERDVNLKQIIDLETLADLCIQAGQAITFRRLLVEAVGAVLEEKVPLIYSLLKGLALQLPDEVPDKNEIIRLRKVASSVGVGDKHDAEWVHSILADAGAANDNSWILLPYLCAAFMVSNIWNGAVYDVNIGGLSNNLHCLARYGLTLCLMSKIVSCGYVSAVIVFVQVCKCCDWGKRIHSGRKGAANKFSFKCAYR

SEQ ID NO: 164670 - protein, 325 aa, Zea Mays
MSYTGPFPNLQMFETPVGTQGGGSAVEMICNWYIENVVKDASRIGVAFDAIQNCFRSSQPIGGGCLAESFTDKREMKSLVRLFGGYGIDKMDKMLREHTSALLNCIDSALRSNRDALEGLAGTVNSGDRIERDVNLKQIIDLETLADLCIQAGQAITFRRLLVEAVGAVLEEKVPLIYSLLKGLALQLPDEVPDKNEIIRLRKVASSVGVGDKHDAEWVHSILADAGAANDNSWILLPYLCAAFMVSNIWNGAVYDVNIGGLSNNLHCLARYGLTLCLMSKIVSCGYVSAVIVFVQVCKCCDWGKRIHSGRKGAANKFSFKCAYR

SEQ ID NO: 164671 - protein, 882 aa, Zea Mays
MRAQDLANVTSYREWVLLGYLVCPDELLRVTSIDVAMVVLKENLILPLFRDEYILLHENYQLYVLPKVLESKRMAKSGRTKQKEADLEYNVAKQVERMLTEVHEQALVSCDAMHRERRILLKQEIGRMVLFFTDQPSLLAPNIQMVFSALALSQCEVIWYFQHVGIASSKSTRLKTVDIDATDPTIGFLLDGIGKLCCLVRKYIAAIKGYALSYLLSSAGRIRFLLGTPGMVALDLDATLKGLFQQVLHCLENIPKPQGESVPDITADLADLRKHWLSILMIVTSSRSSINIKHLEKATVSTGKEGLVSEGNAAYNWSRCVDELESQLSKHGSLKKLYFYHQHLTTVFRNTMFGPEGRPQHCCAWLGAACSFPECASAIIPEEVNKIGRDSISYVESLIESIMGGLEGLINILDSEGGFGSLEMQLSPEQAALRLNNTRAKGVSSLLTPGYESYPDNSSSIKMLEAAMQRLTSLCSVLNDMEPIGVLNHVFVLREYMRDCIIGNFRRRFHSMIRTENCIQRPSIIESLLRRHLGIIHLAEQHISMDLTEGIREVLLAESYTGPFPNLQMFETPVGTQGGGSAVEMICNWYIENVVKDASRIGVAFDAIQNCFRSSQPIGGGCLAESFTDKREMKSLVRLFGGYGIDKMDKMLREHTSALLNCIDSALRSNRDALEGLAGTVNSGDRIERDVNLKQIIDLETLADLCIQAGQAITFRRLLVEAVGAVLEEKVPLIYSLLKGLALQLPDEVPDKNEIIRLRKVASSVGVGDKHDAEWVHSILADAGAANDNSWILLPYLCAAFMVSNIWNGAVYDVNIGGLSNNLHCLARYGLTLCLMSKIVSCGYVSAVIVFVQVCKCCDWGKRIHSGRKGAANKFSFKCAYR

SEQ ID NO: 164672 - protein, 846 aa, Zea Mays
MVVLKENLILPLFRDEYILLHENYQLYVLPKVLESKRMAKSGRTKQKEADLEYNVAKQVERMLTEVHEQALVSCDAMHRERRILLKQEIGRMVLFFTDQPSLLAPNIQMVFSALALSQCEVIWYFQHVGIASSKSTRLKTVDIDATDPTIGFLLDGIGKLCCLVRKYIAAIKGYALSYLLSSAGRIRFLLGTPGMVALDLDATLKGLFQQVLHCLENIPKPQGESVPDITADLADLRKHWLSILMIVTSSRSSINIKHLEKATVSTGKEGLVSEGNAAYNWSRCVDELESQLSKHGSLKKLYFYHQHLTTVFRNTMFGPEGRPQHCCAWLGAACSFPECASAIIPEEVNKIGRDSISYVESLIESIMGGLEGLINILDSEGGFGSLEMQLSPEQAALRLNNTRAKGVSSLLTPGYESYPDNSSSIKMLEAAMQRLTSLCSVLNDMEPIGVLNHVFVLREYMRDCIIGNFRRRFHSMIRTENCIQRPSIIESLLRRHLGIIHLAEQHISMDLTEGIREVLLAESYTGPFPNLQMFETPVGTQGGGSAVEMICNWYIENVVKDASRIGVAFDAIQNCFRSSQPIGGGCLAESFTDKREMKSLVRLFGGYGIDKMDKMLREHTSALLNCIDSALRSNRDALEGLAGTVNSGDRIERDVNLKQIIDLETLADLCIQAGQAITFRRLLVEAVGAVLEEKVPLIYSLLKGLALQLPDEVPDKNEIIRLRKVASSVGVGDKHDAEWVHSILADAGAANDNSWILLPYLCAAFMVSNIWNGAVYDVNIGGLSNNLHCLARYGLTLCLMSKIVSCGYVSAVIVFVQVCKCCDWGKRIHSGRKGAANKFSFKCAYR

SEQ ID NO: 164673 - protein, 732 aa, Zea Mays
MAHVSFKSKDVDSGMSRWSEYLSVEEPIPSAMATWRNMSADAPQGSSAGSHKHLQMEPVVQLSKVAEGLLAKMYRLNSILDYPDPNTHTFSDAFWKAGVFPNFPKICITMSKKFPEHPNKLQLERVDKFGLDALNENAEGYMHNLEQWILLLLDLLAFREQALRLILDLSSTVITLLPHQNSLILHAFMDLFCSFVRVNLFSDKMPRKMILQVYNILHIMLKGGRDCEFYHRLVQFVDSYDPPIKGLHEDLNFVSPRIGEVLEAVGPIIFLSTDTKKLRNEGFLSPFHPRYPDILTNSAHPMRAQDLANVTSYREWVLLGYLVCPDELLRVTSIDVAMVVLKENLILPLFRDEYILLHENYQLYVLPKVLESKRMAKSGRTKQKEADLEYNVAKQVERMLTEVHEQALVSCDAMHRERRILLKQEIGRMVLFFTDQPSLLAPNIQMVFSALALSQCEVIWYFQHVGIASSKSTRLKTVDIDATDPTIGFLLDGIGKLCCLVRKYIAAIKGYALSYLLSSAGRIRFLLGTPGMVALDLDATLKGLFQQVLHCLENIPKPQGESVPDITADLADLRKHWLSILMIVTSSRSSINIKHLEKATVSTGKEGLVSEGNAAYNWSRCVDELESQLSKHGSLKKLYFYHQHLTTVFRNTMFGPEGRPQHCCAWLGAACSFPECASAIIPEEVNKIGRDSISYVESLIESIMGGLEGLINILDSEGGFGSLEMQSKQLFA

SEQ ID NO: 164674 - protein, 1147 aa, Zea Mays
MAHVSFKSKDVDSGMSRWSEYLSVEEPIPSAMATWRNMSADAPQGSSAGSHKHLQMEPVVQLSKVAEGLLAKMYRLNSILDYPDPNTHTFSDAFWKAGVFPNFPKICITMSKKFPEHPNKLQLERVDKFGLDALNENAEGYMHNLEQWILLLLDLLAFREQALRLILDLSSTVITLLPHQNSLILHAFMDLFCSFVRVNLFSDKMPRKMILQVYNILHIMLKGGRDCEFYHRLVQFVDSYDPPIKGLHEDLNFVSPRIGEVLEAVGPIIFLSTDTKKLRNEGFLSPFHPRYPDILTNSAHPMVVLKENLILPLFRDEYILLHENYQLYVLPKVLESKRMAKSGRTKQKEADLEYNVAKQVERMLTEVHEQALVSCDAMHRERRILLKQEIGRMVLFFTDQPSLLAPNIQMVFSALALSQCEVIWYFQHVGIASSKSTRLKTVDIDATDPTIGFLLDGIGKLCCLVRKYIAAIKGYALSYLLSSAGRIRFLLGTPGMVALDLDATLKGLFQQVLHCLENIPKPQGESVPDITADLADLRKHWLSILMIVTSSRSSINIKHLEKATVSTGKEGLVSEGNAAYNWSRCVDELESQLSKHGSLKKLYFYHQHLTTVFRNTMFGPEGRPQHCCAWLGAACSFPECASAIIPEEVNKIGRDSISYVESLIESIMGGLEGLINILDSEGGFGSLEMQLSPEQAALRLNNTRAKGVSSLLTPGYESYPDNSSSIKMLEAAMQRLTSLCSVLNDMEPIGVLNHVFVLREYMRDCIIGNFRRRFHSMIRTENCIQRPSIIESLLRRHLGIIHLAEQHISMDLTEGIREVLLAESYTGPFPNLQMFETPVGTQGGGSAVEMICNWYIENVVKDASRIGVAFDAIQNCFRSSQPIGGGCLAESFTDKREMKSLVRLFGGYGIDKMDKMLREHTSALLNCIDSALRSNRDALEGLAGTVNSGDRIERDVNLKQIIDLETLADLCIQAGQAITFRRLLVEAVGAVLEEKVPLIYSLLKGLALQLPDEVPDKNEIIRLRKVASSVGVGDKHDAEWVHSILADAGAANDNSWILLPYLCAAFMVSNIWNGAVYDVNIGGLSNNLHCLARYGLTLCLMSKIVSCGYVSAVIVFVQVCKCCDWGKRIHSGRKGAANKFSFKCAYR

SEQ ID NO: 164675 - protein, 457 aa, Zea Mays
MAHVSFKSKDVDSGMSRWSEYLSVEEPIPSAMATWRNMSADAPQGSSAGSHKHLQMEPVVQLSKVAEGLLAKMYRLNSILDYPDPNTHTFSDAFWKAGVFPNFPKICITMSKKFPEHPNKLQLERVDKFGLDALNENAEGYMHNLEQWILLLLDLLAFREQALRLILDLSSTVITLLPHQNSLILHAFMDLFCSFVRVNLFSDKMPRKMILQVYNILHIMLKGGRDCEFYHRLVQFVDSYDPPIKGLHEDLNFVSPRIGEVLEAVGPIIFLSTDTKKLRNEGFLSPFHPRYPDILTNSAHPMRAQDLANVTSYREWVLLGYLVCPDELLRVTSIDVAMVVLKENLILPLFRDEYILLHENYQLYVLPKVLESKRMAKSGRTKQKEADLEYNVAKQVERMLTEVHEQALVSCDAMHRERRILLKQEIGRMVLFFTDQPSLLAPNIQDKKRISPHGAPG

SEQ ID NO: 164676 - protein, 458 aa, Zea Mays
MAHVSFKSKDVDSGMSRWSEYLSVEEPIPSAMATWRNMSADAPQGSSAGSHKHLQMEPVVQLSKVAEGLLAKMYRLNSILDYPDPNTHTFSDAFWKAGVFPNFPKICITMSKKFPEHPNKLQLERVDKFGLDALNENAEGYMHNLEQWILLLLDLLAFREQALRLILDLSSTVITLLPHQNSLILHAFMDLFCSFVRVNLFSDKMPRKMILQVYNILHIMLKGGRDCEFYHRLVQFVDSYDPPIKGLHEDLNFVSPRIGEVLEAVGPIIFLSTDTKKLRNEGFLSPFHPRYPDILTNSAHPMRAQDLANVTSYREWVLLGYLVCPDELLRVTSIDVAMVVLKENLILPLFRDEYILLHENYQLYVLPKVLESKRMAKSGRTKQKEADLEYNVAKQVERMLTEVHEQALVSCDAMHRERRILLKQEIGRMVLFFTDQPSLLAPNIQRPSAELLEIGSSG

SEQ ID NO: 164677 - protein, 352 aa, Zea Mays
MAHVSFKSKDVDSGMSRWSEYLSVEEPIPSAMATWRNMSADAPQGSSAGSHKHLQMEPVVQLSKVAEGLLAKMYRLNSILDYPDPNTHTFSDAFWKAGVFPNFPKICITMSKKFPEHPNKLQLERVDKFGLDALNENAEGYMHNLEQWILLLLDLLAFREQALRLILDLSSTVITLLPHQNSLILHAFMDLFCSFVRVNLFSDKMPRKMILQVYNILHIMLKGGRDCEFYHRLVQFVDSYDPPIKGLHEDLNFVSPRIGEVLEAVGPIIFLSTDTKKLRNEGFLSPFHPRYPDILTNSAHPMRAQDLANVTSYREWVLLGYLVCPDELLRVTSIDVAMGCSERELNTSSVQR

SEQ ID NO: 164678 - protein, 94 aa, Zea Mays
MSVQKKLTPGHMHRLLQYTFSCGLGSLATLGLNQTSSNKLLSTPRLNQERNCRSQLIDIYAWYSVISSIVICTGQIYYWESYTSNQLSTLLSSL

SEQ ID NO: 164679 - protein, 991 aa, Zea Mays
MELALGAMTSLALKLGDLLMEEYVVQKGLKPDIESLSRELVMMNAALIDASRVPPDQLTEVEKLWARKVRDLSYDMEDAVDDFILRVAGGDDSAADSKFFKKTLAMVKDVMSMKKFKDRRQISDKVKDIKKLSNELAELRAKYTVRGVGADLAASTGIDPRVINLYKKETDLVGIKKSRNKVIRMLSMETKDDDALESHQALKIVSIVGVGGLVDMARWDLEQFKNELDEFLKDKRYLIVVDDIWDVDSWEAIRYALKDNNCGSRIIMTTRNFGIVTKLEEVYRLKPLSNANSKKLFYKRIESQEGESLDGELSSKIIHKCGGIPLAIIAIASLLVERSREEWSEVYDKIGLGNEDNTTKIMSYSYYDLPPYLKPCLLQLSIYPEDCIIDTNSTIWKWIGEGLVHLEKEEGSLFKVGERYFKELVNRSMIQPTEDKNDRFVEGFRIHDIVFDLICKLSKDEDFITISGQHSSRDSLRREKKTCVPRSDCKLRRLAVRNQRVQRFPEETIDMPEVLRSLSIIDCNIEVMAPIDSFRVCRVLHLGKSYVPISLKHLGKLLHLKFLEIVYTPIDELPKEIGHLRSLQTLILDRTGLDELPPVVCSLTRLMCLIAQGFERLPADRMGNLTSLEELRLRRVVGRSATQALVAELGKLTRLRVVDITFSEQLEESLQEALVQSLSNLRGLQELTLLFKMTRWGSDMWGDWEPPRQLRRLIIEGIIVFSRQPRWINRSCLPRLCYLSLMVHTLEAQDLDNLARLPELQYLTLDGLSWPPRYTVGPDDFRNLRFCKVGTTFEFRKGAMPRLEVLQFRVFAGYYCWAYNGVPFEQFPTKDLDLDLDNVLLLQQVIVKVNCVGATVTQVEEVEAVVMRAVENHANRPTIKMNRAYEIAILSDEGREALLRRHIEKDCCVRTMKDKSDAFFISQLRRYRHLQKAIIFIDCSGASMCEVQKVEAAFRHAAEVHPNHPSIELIRTNTDGMASSSSDHPNTEPRN

SEQ ID NO: 164680 - protein, 106 aa, Zea Mays
MLSSSASCGGIDIFRKPLFSSTVRVPACVRCRKWKQLLDMQPRFILTIQVLNLSEQTPTEWPPPHLTIPTQSPGIDGSVCQILPTQEQVNVSCLSTKERGPVQQDD

SEQ ID NO: 164681 - protein, 193 aa, Zea Mays
MLSERQGDPNGDALYSLPIVLESGKWRNMSQWGCHSWRMRRKQADDGEFLNMYSGATVTQVEEVEAVVMRAVENHANRPTIKMNRAYEIAILSDEGREALLRRHIEKDCCVRTMKDKSDAFFISQLRRYRHLQKAIIFIDCSGASMCEVQKVEAAFRHAAEVHPNHPSIELIRTNTDGMASSSSDHPNTEPRN

SEQ ID NO: 164682 - protein, 708 aa, Zea Mays
MLLELDREHKQVDMARWDLEQFKNELDEFLKDKRYLIVVDDIWDVDSWEAIRYVLKDNNCGSRIIMTTRNSGVVTKVEEVYRLKPLSTENSEKLFYKRIESQEGESLDGELSSKIIHKCGGIPLAIIAIASLLVERSREEWPEVYDKIGLGNEDNTTKIMLYSYYDLPPYLKPCLLQLSIFPEDCFIDTKAVIWMWIGEGLVHLEKEEGSLFEVGERYFKELVNRSMIQPIEEKYHWFVERFCIHDIMFDLICKLSKDEDFITLSGQHSSQSLQSLFNLRSDCKLRRLAVRNQRVQRFPEETMDMPEVLRSLSIIDCNIEVMAPIDSFRVCRVLHIENNYVPISLKHLGKLLHLKFLEIFDTTIDELPREIGHLRSLQTLVLVSTGLDELPVAVCSLTRLMCLIAYGFERLPADRIGNLTSLEELQLHRVVGRSATQDLVAELGKLTRLRVVRITFSEQLEESSQEALVQSLSNLRLLQELVLFSEMPERGSDMWGDWELPRQLRRLIIEGIVFSRQPRWINRSCLPRLYSLYLMVHAVEAQDLDNLARLPELQYLMLFGFSWPPRYTVGPDDFRNLRFCEVGTTFEFRKGAMPRLEVLRFGVCVPFEQFPTKDVIEDLDFDLDNVILLQQVRVKVNCAGATVTQVEEVEAVVMRAVENHANRPTIKMDRVYEQNILSDEEREALPAAEVSTSSESHYFHRLFGCQHV

SEQ ID NO: 164683 - protein, 969 aa, Zea Mays
MELALGAMASLAPKLGDLLMEEYVVQKGLKPDIESLSRELVMMNAALVDASRVPPDQLTEKTLATVKDVMSMKKFKDRRQISDKVKDIKKLSNELAELRAKYTVRGVGADLAASTGIDPRVINLYKKETDLVGIEESRDKVIRMLSMGTKDDDAHESHQDLKIVSIVGVGGLGKTTLAKTVHDMLKKQFDCSAFISIGRTPNLNRTFEKMLLELDREHKQVDMARWDLEQFKNELDEFLKDKRYLIVVDDIWDVDSWEAIRYVLKDNNCGSRIIMTTRNSGVVTKVEEVYRLKPLSTENSEKLFYKRIESQEGESLDGELSSKIIHKCGGIPLAIIAIASLLVERSREEWPEVYDKIGLGNEDNTTKIMLYSYYDLPPYLKPCLLQLSIFPEDCFIDTKAVIWMWIGEGLVHLEKEEGSLFEVGERYFKELVNRSMIQPIEEKYHWFVERFCIHDIMFDLICKLSKDEDFITLSGQHSSQSLQSLFNLRSDCKLRRLAVRNQRVQRFPEETMDMPEVLRSLSIIDCNIEVMAPIDSFRVCRVLHIENNYVPISLKHLGKLLHLKFLEIFDTTIDELPREIGHLRSLQTLVLVSTGLDELPVAVCSLTRLMCLIAYGFERLPADRIGNLTSLEELQLHRVVGRSATQDLVAELGKLTRLRVVRITFSEQLEESSQEALVQSLSNLRLLQELVLFSEMPERGSDMWGDWELPRQLRRLIIEGIVFSRQPRWINRSCLPRLYSLYLMVHAVEAQDLDNLARLPELQYLMLFGFSWPPRYTVGPDDFRNLRFCEVGTTFEFRKGAMPRLEVLRFGVCVPFEQFPTKDVIEDLDFDLDNVILLQQVRVKVNCAGATVTQVEEVEAVVMRAVENHANRPTIKMDRVYEQNILSDEEREALVRLFSLNMFVYFNSQLQRHIEKDCCVRTMKDKSDAFFISQLRRTNTDGMASSSSDHPNTEELMARFVQSFQPNSR

SEQ ID NO: 164684 - protein, 265 aa, Zea Mays
MVYYGVVNNIADEESKLGTKYSVPQIAFYKGLLEAIVQEAGNDGSITSIDALNVRLDNQVAVLDGSQDSQSRLPSSIKNFSMSQKEKTLDELIRDRWLSYTATGKIGLGTRSFLDLRSWFRGNDIPSCVVCNEACIKASSCPNEGCDVRIHEYCLKKKFSQRKASRACPSCGTGWPCQDGEGEADEVNEPGEEDLASPANHPSRKKRSRVKAELVEENDIAGPSTEVPRTRRTLRSAKAEAVEADQEASSTAASQPGRGSKRRKK

SEQ ID NO: 164685 - protein, 149 aa, Zea Mays
MTPEESESLTMAPRSAKAADENPVQVHLQREGPDEGEEHGDVPERHGPRHRRDVRVLPQRHQQRLREQVHGELHHGARRQDDPRPLQLHADAYRARPDADDADLLEQSRRRPVDAWVPGHFLRRRREKEAAAKTKREEEEAAAKRAIGT

SEQ ID NO: 164686 - protein, 178 aa, Zea Mays
MTPEESESLTMAPRSAKAADENPVQVRGHPPKKTKASWPNTGIHMATTMEPMTPARPRRRWTAASQDRARWRPRLSMARYVMIMFLICACSCMQMHIAPGRTPTTRTCWNRAVVDQSTPGCLAIFFAEEGKKKPPPRPRGKKRKQQPREQLEHDCWDRHEMSSRRRQALLIPMFFFSI

SEQ ID NO: 164687 - protein, 57 aa, Zea Mays
MWTFLVFNSISQVSCNAIKFITNAFISSIYVCACVHKPALGCMNYKDVLRAVVFYDK

SEQ ID NO: 164688 - protein, 595 aa, Zea Mays
MVRELRVDSFYARLRAAAGSSSSSPLLILPSAADADSLCAVRVLAHVLSADSIRFSIYPVSSAVSARALLASFAAPAPPCLVLVNWGAHRDLRALLPAASTAFVVDSHRPVHLHNLCARNDRVVVLFTADDERTADLSYDFDLSALADASDLAADAGDDDHLRGGPGSDASDSEDSDDDEDDAGGGRRKRRRLSDDDGDDPAPNTDPVRLFCRLRREYYRLGTFHGKPSGCLMYDLAHAMRKNTNELLWLACVALTDQFVHDRITNERYQAAVMELEQHINGSGNLDPSGAGSVVTLKDGTKIRAPEASRIAYEDEPRLMLLREWSLFDSMLCSSYVATKLKTWSDNGLKKLKLLLARMGFPLADCQKNFQYMSMEVKRKMRDEFDRFLPEYGLTEFYYRSFLRVHGYRSKVSAADVVYGVTALLESLDSQSKDTKESSAAEQFWVAYSALSLSNADQLRKGMLSAIEIQRAILRQGSSAITKTGFIRSAKKFRWVKLDDPVDTNKLCHPQALTKFCFFLLDALKERGARMKPLICACLAKEPEKVLVVGVCGKPRLGAVQGNAFGNAFRWHEVYTTWIILSVPRTGESGMILSK

SEQ ID NO: 164689 - protein, 308 aa, Zea Mays
MELATVAAAVASAAARPHGPFSSPRAVSASVSWTSLSLAYTSRCLSSTSSRRRLRWLPVTSAAVELREATAGGGDSLRVTKTPQPGSSVKFSVEVPTSIIHECYQSTLQEYAKRVKVPGFRPGKTIPENVLINYVGPQHVQDATIEAILKHTLPQALSSVEERALEDSVRILTQFDDMRNSFSLDNVFRYDVAVDVAPEVRWLSEDKYRNLKVVVEIDEAVDAEKAAEKELQRRHKALGLLRIVADRGLQIGDLVVLDIFAESINNDGSRGEKISSAESTGFHLDTEENSNLVPGFLGSLIGIRAGCV

SEQ ID NO: 164690 - protein, 183 aa, Zea Mays
MDDSLAVKLLPGCTTIDEVRERILKRCKEVEKTAIEQATDNAILDQLGKLVEVDVPRALFQEQGQQLYGAKLLQLQAERKLDKDQLASLSTKRSVQAYLEDEKENITRIIKQMLAVGDIFKSENLQYSTDQLVKEVENSIAEFKQYNQDYDEDNIRQQVQDVLEAAKVLEWLKENCSVEYIRR

SEQ ID NO: 164691 - protein, 165 aa, Zea Mays
MHCGAIIDHVFFNTTMNYVEENCAPAVYTPELRYVCIAGRYIQGAPLLGNSAAASDEILTVDTPSEGGDAVIVSSSDNSTSTPSAVSWRARFIGQGYKQVCGRADVWGDDVVPEMAAHLDYLSINFLRIKAGGLEYLSLTVYIVSFTRVDISLQISHYTGCCSWI

SEQ ID NO: 164692 - protein, 327 aa, Zea Mays
MKERASENFRVDYAVSREQTNAAGERMYIQTRMAEYKEELWELLKKDNTYVYMCGLKGMENGIDDIMLDQESLKYNNVNGRSSRWSGTDTVRSPSPSAQHLLVLLMAENLSVQIQHWLQRQPYQEPNDADPEGMSSCCEIDGGAETCVAYIAYLNVKNRLVRLQEAAEEGRSMECGGLLTAEFCRFGCDWKKIEEHVGTKTTVQIRSHAQKYFLKVQKLGLAVGLPLMYPRRHFAMQQQQQSSVAGGSSATAMPLLHGRQPTCAPVAMPGLAEPDTVAHHGSIGWSSPSVVVPAASGGGDKDARLGLGVGGSIDRSDYKSGDQLVVL

SEQ ID NO: 164693 - protein, 119 aa, Zea Mays
MKERASENFRVDYAVSREQTNAAGERMYIQTRMAEYKEELWELLKKDNTYVYMCGLKGMENGIDDIMVSLAEKDVWIRCTRNFCNDSTETLGALFGSNNACDFRVRASFLSLQVVWYRY

SEQ ID NO: 164694 - protein, 194 aa, Zea Mays
MSSCCEIDGGAETCVAYIAYLNVKNRLVRLQEAAEEGRSMECGGLLTAEFCRFGCDWKKIEEHVGTKTTVQIRSHAQKYFLKVQKLGLAVGLPLMYPRRHFAMQQQQQSSVAGGSSATAMPLLHGRQPTCAPVAMPGLAEPDTVAHHGSIGWSSPSVVVPAASGGGDKDARLGLGVGGSIDRSDYKSGDQLVVL

SEQ ID NO: 164695 - protein, 297 aa, Zea Mays
MPRLSLTVTDDAAAMPFVLRLGGSPALRPGSQSPSWLRFGGRAGARKALFCSAEDARRCGSDDDAEAEECRRRGGSRVPSDRRIRGRNAAATVGDLQSGDNVQITGPVGKEMLMPKDPNATIIMLATGTVQRSGLALPGCSNEQLVALQGGQYIDLYKEEFRKMKERASENFRVDYAVSREQTNAAGERMYIQTRMAEYKEELWELLKKDNTYVYMCGLKGMENGIDDIMLDQESLKYNNVNGRSSRSAYDEIKLDFSHFLDLKITFIGTVPSKHSKKAVSLYISDDPFASCFHCVR

SEQ ID NO: 164696 - protein, 127 aa, Zea Mays
MFSLCSLKQFGFDAPEIFAMILPRLWGPYLGATTHAIFGCALPSCRCRWSGTDTVRSPSPSAQHLLVLLMAENLSVQIQHWLQRQPYGGRRTSSGGRKCGSHYCCLVFYYYYYCLAIAHSWCFFPFN

SEQ ID NO: 164697 - protein, 163 aa, Zea Mays
MKERASENFRVDYAVSREQTNAAGERMYIQTRMAEYKEELWELLKKDNTYVYMCGLKGMENGIDDIMLDQESLKYNNVNGRSSRWSGTDTVRSPSPSAQHLLVLLMAENLSVQIQHWLQRQPYGGRRTSSGGRKCGSHYCCLVFYYYYYCLAIAHSWCFFPFN

SEQ ID NO: 164698 - protein, 255 aa, Zea Mays
MPRLSLTVTDDAAAMPFVLRLGGSPALRPGSQSPSWLRFGGRAGARKALFCSAEDARRCGSDDDAEAEECRRRGGSRVPSDRRIRGRNAAATVGDLQSGDNVQITGPVGKEMLMPKDPNATIIMLATGTVQRSGLALPGCSNEQLVALQGGQYIDLYKEEFRKMKERASENFRVDYAVSREQTNAAGERMYIQTRMAEYKEELWELLKKDNTYVYMCGLKGMENGIDDIMVSLAEKDGMQIIFNFEPLVPNKVDI

SEQ ID NO: 164699 - protein, 280 aa, Zea Mays
MQPISVLFPYLPIPAHKRRDRARARLAEIFATIIKSRKASGQSEEDMLQCFIDSKYKNGRSTSEGEVTGLLIAALFAGQHTSSITSTWTGAYMLRFKQYFAEAVEEQKDVMKRHGDKIDHDILAEMDVLYRCIKEALRLHPPLIMLLRQSHSDFTVTTKEGKVYDIPKGHIVATSPSFANRLPHIYKNPDSYDPDRFGPGREEDKAAGAFSYISFGGGRHGCLGEPFAYLQIKAIWTHLLRNFEFELVSPFPENDWNAMVVGIKGEVMVNYKRRKLVVDN

SEQ ID NO: 164700 - protein, 292 aa, Zea Mays
MSPGYFTNLLNREHDDVFILEENMRTENEVIEYPPVNELISQSKPKGRSKNFNEAEDILLISAYLNISKDAVVGKDQKDGRFWERVEKYFHDNKTFDSDRNWSSLKHRWSSTIHKEMSMFQGFVDAIERKNGSGKTMSDKLAEASTMFQELKGKTFSLFHAWNILKNEPKWAEEKIAKEDNGNGENHPNSERPLGRKAEKEKAKGKNRSEEEPDPFIEEVKKMRETREKIETERKERDDKFIELDTKKLNLEQDQHDKVIMTMDISSMDDQAKQYFRLLKDEILARRFGSQH

SEQ ID NO: 164701 - protein, 128 aa, Zea Mays
MASQAVDGEHDPLGLEDVGEEHGLPRHALIGAGPGLAGGWLWRCFLLAGGGPGPDAVLVLRLGFGLLLGHRHRLAGDSCTSSSPWPFEAQFFHHLTLFSVLALSNLSHVHKQLSTTLRNYCESSRPLW

SEQ ID NO: 164702 - protein, 627 aa, Zea Mays
MAQVIFLMACYGTKENCVYCLCHFTTAKICQNLLKKQGYELRQLKDLNELGGSLRVKNLENVIGKDEAVESKLYLKSRLKELALEWSSNNRMDAMDILEGLRPPPQLSKLTIEGYRSDTYPGWLLERSYFENLESFELSNCSLLEGLPPDTELLRNCSMLCINFVPNLKELSNLPASLAYLSIDRCPLLMFITNNELGQHDFRENIIMKAADLASKLALMWEVDSGKEFIRSVLSKDYSSLKQLMTLMMDDDISKHLQIIESGLEEREDKVWMKENIIKAWLFCHEQRIRFIYGRTMEMPLVLPSGLRRLSLSSCSITDEALAICLGGLTSPITVELEYNMALTTLPSEEVFEHLTKLDSLIVRGCWCLKSLGGLRAAPSLSYLNCLDCPSLELARGAELMPLNLARNLSIRGCILAVDSFINGLPHLKHLSIDVCRSSPSLSIGHLTSLQSLHLNGLPDLYFVEGLSSLHLKRLSLVDVANLTAKCISQFRVQESLTVSSSVLLNHMLMAEGFTAPPNLTLLDCKEPSVSFEEPANLSSVKHLKFSCCETESLPRNLKSVSSLESLSIEHCPNIASLPDLPSSLQRITILNCPVLMKNCQEPDGESWPKISHVRWKSFLPIPNWLP

SEQ ID NO: 164703 - protein, 1189 aa, Zea Mays
MADLALAGLRWAASPIVNELLTKASAYLSVDMVREIQRLEATVLPQFELVIQAAQKSPHRGILEAWLRRLKEAYYDAEDLLDEHEYNVLEGKAKSEKSLLLGEHGSSSTATTVMKPFHAAMSRARNLLPQNRRLISKMNELKAILTEAQQLRDLLGLPHGNTVEWPAAAPTSVPTTTSLPTSKVFGRDRDRDRIVDFLLGKTTTAEASSAKYSGLAIVGLGGMGKSTLAQYVYNDKRIEECFDIRMWVCISRKLDVHRHTREIIESAKKGECPRVDNLDTLQCKLRDILQESQKFLLVLDDVWFEKSHNETEWELFLAPLVSKQSGSKVLVTSRSKTLPAAICCEQEHVIHLKNMDDTEFLALFKHHAFSGAEIKDQVLRTKLEDTAVEIAKRLGQCPLAAKVLGSRLCRKKDIAEWKAALKIGDLSDPFTSLLWSYEKLDPRLQRCFLYCSLFPKGHRYESNELVHLWVAEGFVGSCNLSRRTLEEVGMDYFNDMVSVSFFQLVFHIYCDSYYVMHDILHDFAESLSREDCFRLEDDNVTEIPCTVRHLSIHVHSMQKHKQIICKLHHLRTIICIDPLMDGPSDIFDGMLRNQRKLRVLSLSFYNSKNLPESIGELKHLRYLNLIRTLVSELPRSLCTLYHLQLLWLNHMVENLPDKLCNLRKLRHLGAYSSYTHDFVNEKPICQILNIGKLTSLQHIYVFSVQKKQGYELRQLKDLNELGGSLRVKNLENVIGKDEAVESKLYLKSRLKELALEWSSNNRMDAMDILEGLRPPPQLSKLTIEGYRSDTYPGWLLERSYFENLESFELSNCSLLEGLPPDTELLRNCSMLCINFVPNLKELSNLPASLAYLSIDRCPLLMFITNNELGQHDFRENIIMKAADLASKLALMWEVDSGKEFIRSVLSKDYSSLKQLMTLMMDDDISKHLQIIESGLEEREDKVWMKENIIKAWLFCHEQRIRFIYGRTMEMPLVLPSGLRRLSLSSCSITDEALAICLGGLTSPITVELEYNMALTTLPSEEVFEHLTKLDSLIVRGCWCLKSLGGLRAAPSLSYLNCLDCPSLELARGAELMPLNLARNLSIRGCILAVDSFINGLPHLKHLSIDVCRSSPSLSIGHLTSLQSLHLNGLPDLYFVEGLSSLHLKRLSLVDVANLTAKCISQFRVQESLTIARSRQFHLKNLQISHPSST

SEQ ID NO: 164704 - protein, 763 aa, Zea Mays
MLATDRENRRARGTRWIWEEEQENCSCSLRFSRSVANIWYQIQSSWIHLLFCRGYPDLPRWSTKTPPSASCSMKCDSWRRVCPSASADAATTSSTTWTSTVKSPVTRRLASTRVPSSTRSPVSTATSLIRIRTLPATGSICSRSSVQWPRAPGICFLHRASLPCRAATSQAGIRRPQEDRELVQPPRRVESATCVESSVPRASSTELDREFIAASAFVTASVASSTSALEAGAHVDVAGEPEFPPRVTLDGHPDDELLHVEGAVVRPLLEEREQQHGTAQRVIVARGQSVLHRQYQLDSSPLDSCNIFAPERPADREMVEASAVMVVWAYDAACDRVGVQEVKHACEVGCSGGEMCLFTDLLGDLLCRIHRSPDSLMLVVETTIGTNSTEIAGIVRGCAKTAVSVGTTQQAKDDPIYTKVGSILGLRVSPSHWRKGMGKKLADREEDEVVQASYTYNIYNNWAPLEDALRLFDRMCMEHDSPRTSAVNLGSFNVMVDAYCHAGRGQYAIKVFGKMPRRGLCQMYSSNNLIDWLGKNKLVGKSEGWYMEEAARAVLELLGVQASVHQMTVKVTIGQTISCSHLLRSGKIATICHDASIAHSEHQYVATGMPTEVVLEVLVENMGLPGGYTPSFDSSDLRRSCQWWNNLAKRVATLEFDRTRKSMGVIVKANSGKNSLLVKGAVENLLERCTYIQLLDGSVVLLDDGAKALILFTLHDMSASALSCLGFAYKYELSAPREEVHKSIDTCYGCNKRQQRNNRGHLP

SEQ ID NO: 164705 - protein, 654 aa, Zea Mays
MCIILRLCSSIVSIGQMDEGRCQVLYNGIIICIHGYEHWPRAPGICFLHRASLPCRAATSQAGIRRPQEDRELVQPPRRVESATCVESSVPRASSTELDREFIAASAFVTASVASSTSALEAGAHVDVAGEPEFPPRVTLDGHPDDELLHVEGAVVRPLLEEREQQHGTAQRVIVARGQSVLHRQYQLDSSPLDSCNIFAPERPADREMVEASAVMVVWAYDAACDRVGVQEVKHACEVGCSGGEMCLFTDLLGDLLCRIHRSPDSLMLVVETTIGTNSTEIAGIVRGCAKTAVSVGTTQQAKDDPIYTKVGSILGLRVSPSHWRKGMGKKLADREEDEVVQASYTYNIYNNWAPLEDALRLFDRMCMEHDSPRTSAVNLGSFNVMVDAYCHAGRGQYAIKVFGKMPRRGLCQMYSSNNLIDWLGKNKLVGKSEGWYMEEAARAVLELLGVQASVHQMTVKVTIGQTISCSHLLRSGKIATICHDASIAHSEHQYVATGMPTEVVLEVLVENMGLPGGYTPSFDSSDLRRSCQWWNNLAKRVATLEFDRTRKSMGVIVKANSGKNSLLVKGAVENLLERCTYIQLLDGSVVLLDDGAKALILFTLHDMSASALSCLGFAYKYELSAPREEVHKSIDTCYGCNKRQQRNNRGHLP

SEQ ID NO: 164706 - protein, 1082 aa, Zea Mays
MLHSVGLGGMGKSTLAQYVYNDKRIEECFDVRMWICISRKLDVHRHTREIIESAKKGECPRVDNLDTLQCKLRDILQQSKKFLLVLDDVWFEKSDSETEWDLLLAPLVSKQPGSRVLVTSRREMLPAAVCCERVVRLENMDDTEFLALFKQHAFSGAKIKDQLLRTNLENTAAELAKRLGQCPLAAKVLGSQLCRKKDIDEWEAALELGDLSDPLTSLLWSYEKLDPCLQRCFLYCSLFPKGHRYRRGELVQLWVAEGFVCSCNLSRRTLEEVGMDYFTEMVSGSFFQLVPERLYSYYTMHDILHDLAESLSREDCFRLEDDNVTKIPGTVRYLSVHVESMQKHKKIICKLLHLRTIICINPLMDGASDLFDQMLHNQRKLRVLYLSFYTSSKLPESIGELKHLRYLNLVRTLISQMPRSLCTLYHLQLLWLNCMVERLPDKLCNLSKLRHLGAYPYYFHGFVDERPNYQVPNIGKLTSLQHIYVFSVQKKQGYELRQLRDLNELGGSLRVKNLENVIGKDEALESKLFLKRRLKELALEWSSENATDILHLDILEGLRPPPQLSKLTIEGYKSDTYPGWLLERSYFKNLECFELNNCSLLEGLPPDARLLRRCSRLHIKNVPNLKELSYLPAGLTELSIHKCPLLMFITNNELGQHGLEENVMKIDNLTSKLALMWDVDSGSCIRRALSEDCSSLKQIIMTLMDDDISKHLQIIESGLEEGGEKVWMKENIIKPWLFCHEQRISFIYGRAMEMPLVLPSGLCSLSLCSCSITNEALAICLGGLTSLRNLELKYNMELTTLPTKGVFEHLAKLDRLFVSGCLCLRSLGGLRAAPSLSFINCWDCPSLELARGAELVPSNLDRYLNIRGCILSADSFINGLLDLKYLSIDSCRSSPSLSIGHMTSLQSLHLVGLSDLYLVEGLSCLRLKFLQLVDVPNLTAKCISQFRVRVSLTVSSSVLLNHMLMAEGFRVPLNLYLLDCKEPSISFEDPANLSSVKCLQFLRCETESLPGNLKSLSSLESLHIGRCPNIASLPDLPSSLQRITIWDCPVLKKNCQEPDGESWPKISHVRWKSFLQIPHWLP

SEQ ID NO: 164707 - protein, 738 aa, Zea Mays
MQKHKQIICKLYHLRTIICIDPLMDGPSDIFDGMLRNQRKLRVLSLSFYSSSKLPESIGELKHLRYLNLVRTLVSELPTSLCTLYHLQLLWLNHMVENLPDKLCNLRKLRHLGAYVNDFAIEKPICQILNIGKLTSLQHIYVFSVQKKQGYELRQLKDLNELGGSLKVKNLENVIGKDEAVESKLYLKSRLKELAFEWSSENGMDAMDILEGLRPPPQLSKLRIKGYRSDTYPGWLLERSYFENLESFELSNCSLLEGLPPDTELLRNCSRLRINFVPNLKELSNLPAGLTDLSIDWCPLLMFITNNELGQHDLRENIIIKADDLASKLTLMWEVDSGKKVRSILSKDYSSLKQLMTLMMDDDISKHLQIIESGLEEREDKVWMKENIIKAWLFCHEQRIRFIYGRTMEMPLVLPSGLCELSLSSCSITDEALAICLGGLTSLRNLKLKYNMALTTLPSEKVFEHLTKLDRLVVIGCLCLKSLGGLRAAPSLSCFNCWDCPSLELARGAELMPLNLASNLSILGCILAADSFINGLPHLKHLSIDVCRCSPSLSIGHLTSLESLCLNGLPDLCFVEGLSSLHLKRLSLVDVANLTAKCISQFRVQESLRVSSSVLLNHMLMAEGFTAPPNLTLLDCKEPSVSFEEPANLSSVKHLHFSCCETESLPRNLKSVSSLESLSIEQCPNIASLPDLPSSLQRITILNCPVLMKNCQEPDGESWPKISHVRWKSFPPKSIWLP

SEQ ID NO: 164708 - protein, 677 aa, Zea Mays
MIYFTCFLESVAVFISCLPSAEEKEKKRTALLLLPIVHPFIFFFLVHKVRGSTNYSNFMADLALVGLRWAASPIVKELLTKASAYLSVDMVREIERLQDTVLPQFELVIQAAQKSPHRGKLESWLRRLKEAFYDAEDLLDEHEYNVLKAKAKSGKGPLLREDESSSTATTVMKPFHSAMNRARNLLPGNRRLISKMNELKAILTEAQQLRDLLGLPHGNTVECPAAAPTSVPTTTSLPTSKVFGRDRDRDRIVKFLLGKTTTAEASSTKYSGLAIVGLGGMGKSTLAQYVYNDKRIEECFDVRMWICISRKLDVHRHTREIIESAKKGECPRVDNLDTLQCKLRDILQESQKFLLVLDDVWFEKSHSETEWELFLAPLVSKQSGSKVLVTSQSGTLPAAICCEQEHVIHLENMDDTEFLALFKHHAFSGAEIKDQLLRTKLEDTAEEIAKRLGQCPLAAKVLGSRLCRKKDIAEWKAALKLGDLSDPFTSLLWSYEKLDPRLQRCFLYCSLLPKGHRYRPEELVHLWVAEGFVGSCNLSRRTLEEVGMDYFNDMVSVSFFQLVSQMYCDSYYVMHDILHDFAESLSREDCFRLEDDNVTEIPCTVRHLSVHVQSMQKHKQIICKLYHLRTIICIDPLMDGPSDIFDGMLRNQRKLRVLSLSFYSSSKLPESIEEARL

SEQ ID NO: 164709 - protein, 1318 aa, Zea Mays
MLTPSPQQLPIFPTLLPFPASSQQHHRSPPRQKTDILSSGINQQSCVACPTELLPSLLHCTAAASRLLSIPAPCAHDLLYLCFLESVAVFISCLPSAEEKKNSLVTTSHRSSIHFFFLVHKVRGSTNYSNFMADLALVGLRWAASPIVKELLTKASAYLSVDMVREIERLQDTVLPQFELVIQAAQKSPHRGKLESWLRRLKKAFYDAEDLLDEHEYNVLKAKAKSGKGPLLREDESSSTATTVMKPFNSAINMARNLLPGNKRLITKMNELKNILEDAKQLRELLGLPHGNIAEWPTAAPTGVATTTSLPNSKVFGRDGDRDRIVDFLLGKTTTAEASSAKYSGLAIVGLGGMGKSTLAQYVYNDKRIEECFDIRMWVCISRKLDVHRHTREIMESAKKGECPRVDNLDTLQCKLRDILQESQKFLLVLDDVWFEKSHNETEWELFLAPLVSKQSGSKVLVTSRSETLPAAICCEQEHVIQLQNMDDTEFLALFKHHAFSGAEIKDQLLRTKLEDTAEEIAKRLGQCPLAAKVLGSRLCRKKDIAEWKAALKLGDLSDPFTSLLWSYEKLDPRLQRCFLYCSLFPKGHRYESNELVHLWVAEGFVDSCNLSRRTLEEVGMDYFNDMVSGSFFQLVSQMYRGSYYVMHDILHDFAESLSREDCFRLEDDNVTEIPCTVRHLSVHVQSMQKHKQIICKLYHLRTIICLDPLMDGLSDIFDGMLRNQRKLRVLSLSFYNSSKLPESIGELKHLRYLNLIRTLVSELPTSLCTLYHLQLLWLNHMVENLPDKLCNLRNLRHLGAYSSDAYDFVNERPICQILNIGKLTSLQHIYVFSVQKKQGYELRQLKDLNELGGSLRVKNLENVIGKDEAVESKLYLKSRLKELALEWSSENGMDAMDILEGLRPPPQLSKLTIEGYRSDTYPGWLLERSYFENLESFELSNCSLLEGLPPDTELLRNCSRLRINSVPNLKELSNLPVGLTDLSIDCCPLLMFITNNELGQHDLRENIIMKADDLASKLALMWEVDSGVIRRVLSKDYSSLKQLVTLMMDDDISKHLQIIESGLEESEDKVWMKENIIKAWLFCHEQRIRFIYGRTMEIPLVLPSGLCELSLSSCSITDEALAICLGGLTSLRTLQLEYNMALTTLPSEKVFEHLTKLDRLVVIGCLCLKSLGGLRAAPSLSCFNCWGCPSLELARGAELMPLNLDMELSILGCILAADSFINGLPHLNHLSIYVCRSSPSLSIGHLTSLESLCLNGLPDLCFVEGLSSLHLKHLSLVDVANLTAKCISQFRVQESLTIARSRQFHLKNLQISHPSST

SEQ ID NO: 164710 - protein, 81 aa, Zea Mays
MLTPSPQQLPIFPTLLPFPASSQQHHRSPPRQKTDILSSGINQQSCVACPTELLPSLLHCTAAASRLLSIPAPCAHDLLYL

SEQ ID NO: 164711 - protein, 1278 aa, Zea Mays
MADLALAGLRWTASPIVNELLTKASAYLSVDMVREIQRLEATVLPQFELVIQAAQKSPHRGILEGWLRRLKEAYYDAEDLLDEHEYNVLEGKAKSGKSLLLGEHGSSSTATTVMKPFHAALSRARNLLPQNRRLLSKMNELKAILTEAQQLRDLLGLPHGNTVEWPAAAPTSVPTTTSLPTSKVFGRDRDRDHIVDFLLDKTTTAQASSAKYSGLAIVGVGGMGKSTLAQYVYNDKRIEECFDVRMWVCISRKLDVHRHTREIMESAKKGECPHVDNLDTLQCKLRDILQESHKFLLVLDDVWFEKSDTETEWELLLAPLVSKQSGSKVLVTTRCETLPAAVCCEQVVHLKNLDDTEFLALFKHHAFSGAEIKDKLLHTKLEHTTEEIAKRLGQCPLAAKVLGSRLCRKKDIAEWKAALKLGDLSDPFTSLLWSYEKLDPRLQRCFLYCSLFPKGHRYEPNELVHLWVAEGFVGSCNLSRRTLEEAGMDYFNDMVSGSFFQLVSKRHYSYYIMHDILHDLAESLSREDCFRLEDDNVTEIPCTVRYLSVRVESMQKHKEIIYKLHHLRTVICIDSLMDNASIIFDQMLWNLKKLRVLSLSFYNSNKLPKSVGELKHLRYLDLTRTSVFELPRSLCALWHLQLLQLNGMVERLPNKVCNLSKLRYLRGYKDQIPNIGKLTSLQQIYVFSVQKKQGYELRQLKDLNELGGSLHVQNLENVIGKDEALASKLYLKSRLKELTLEWSSENGMDAMNILHLDVLEGLRPPPQLSKLTIKGYKSDTYPGWLLERSYFKNLERFELNNCSLLEGLPPDTELLQHCSRLLLLDVPKLKTLPCLPPSLTKLSICGLPLLTFVTKNQLEQHDSRENIMMANHLASKLSLMWEVDSGSSVRSVLSKDYSSLKQLMTLMIDDDISKHLQIIESGLEEGDKVWMKENIIKAWLFCHEQRIRFTYGRAMELQVVLPLGLCKLSLSSCNIIDEALAICLEGLTSLATLELEYNMALTTLPSEEVFQHLTNLDMLILSGCWCLKSLGGLRVASSLSILHCWDCPSLELARGAELMPLNLASNLSIRGCILAADSFINGLPHLKHLSIDVCRSSPSLSIGHLTSLELLDLNGLPDLCFVEGLSSLHLKHLSLVDVANLTAKCISQFRVQESLTVSSSVLLNHMLMAEGFTAPPNLTLLDCKEPSFSFEEPANLSSVKRLDFSLCEMESLPRNLKSLSSLESLHIGRCPNVASLPDLPSSLQRIAIWCCPVLKKNCQEPDGESWPKISHLRWKHIY

SEQ ID NO: 164712 - protein, 84 aa, Zea Mays
MGALHCLCRPLLLQKQSEYGLFQPANPENRASPRQVTQFFQLVRTLIPWSIADCCTYGVPDAAVWAEQNSAEFITKNDQSLVAE

SEQ ID NO: 164713 - protein, 69 aa, Zea Mays
MVGLLNCIVIELLVQLSFSDLLEGSLESLEPDPLYSMVQLLLLYTKSRLPFYLYVCVDAYPSPQYAFNC

SEQ ID NO: 164714 - protein, 121 aa, Zea Mays
MSCQVFLMAWNISLFFTMKARASSEHCLLIHTVLCLARGIRFGSSTRLAYAIWPMINLLLPTPQKNKKKNCLGLLGLDVSPRLWISSWACLLANTPTPSPYSSPNTVALVYGLKEWLLRLR

SEQ ID NO: 164715 - protein, 875 aa, Zea Mays
MGMWSGEHTERSEATANESASLNGLVGDMVDDDVSHQLHAGIMKSARRVLIDEIFSSILPDLIVSKKTEKQLAAKLKNQVTKSGSVSNKKDSTAKVKVNTLSTIPKKGNSYNTSQVDCLAEIQSTAVHGKFADIVSAVWQTVYHESMNNVWDEILSERVMDYCDVWLQRNCILNLPSTSISVISDDNIKAQGSHELSPKDLDATECDMDFPPGFGPCWKSPESSLSPSLLEVNGSAKLDGKSESSTTLFSGPLAVVQRMLANELYISSKQSLFHYFEEVIADDITNCLCFGLESNIDQIGTPIHAPESPISAETSMHETANSIEMTGGDVLNIVEIATSTRTSPLEMTVDEKLNTVEATRTSRTEPTSVETSTVAEMATDKMTTYHVEEHLSMSYARVFEKMNICKTAELDEKFDEVPPGMETGLVPLPLMDKNIYQPSKSVNSIPLISRYITLALCRQKLHENVVREWTYLFSDTISKCLGSWYTRRNAVPKSADGSSKLKEKTYYRKRKFEKTCQAKSSKRPVEISMDEQLSKPLCQLVDRKIYVKNIQEPNKSLTSKRVSFVDKPSEKGAKTVANDAYDLNIQQDLTLLSSEVPKRARSSHPTKKHMVANRTPTVNDNVANNSMLTKHVKKKKGRNISSETSQKVKPVISCPESDGCARASINGWEWRNWARNATPSERARVRGYHVRTILSASNDNVWKNSQAKVSSARTNRVKLRNLLAAAEGSELLKITQMKARKKRLRFQRSKIHDWGLVALESIEAEDFVIEYVGQLIHRRVSDIRESQYEKSGIGSSYLFRLDDDFVVDATKRGGLARFINHSCEPNCYTKVITVDGQKKIFIYAKRRIYAGEEITYNYKFPLEEKKIPCHCGSRR

SEQ ID NO: 164716 - protein, 63 aa, Zea Mays
MCLTEAAGSEMVTIATQSESLDIGTPTFYHAGQHLQLLRHNFCLSARPFSFLVSHIILSTVHT

SEQ ID NO: 164717 - protein, 137 aa, Zea Mays
MAALRHLAAGPTCHHHHHHGVAAATASLRLHRLPLPFRPLRSRSGSFTRVYAISSNDIRVGTNVEVDGAPWKVLEFLHVKPGKGAAFVRTKLRNYVTGNTVEKTFRAGTTGTIPFKGDQAIYIQGWLPVRVHGSDNI

SEQ ID NO: 164718 - protein, 192 aa, Zea Mays
MAALRHLAAGPTCHHHHHHGVAAATASLRLHRLPLPFRPLRSRSGSFTRVYAISSNDIRVGTNVEVDGAPWKVLGDKTAFLSLPSFIRRLFIHPRLLKDMQHCTSISFMDTTHLVFIEKQKLRRCAKCTSLLCKICRLTSLHPTTEFLHVKPGKGAAFVRTKLRNYVTGNTVEKTFRAGSTVNHSHLKPHVF

SEQ ID NO: 164719 - protein, 204 aa, Zea Mays
MSPNITSGPLRRWATSVTGWSSPILQLPCEPQHLCHNSVPAPAPHLLIATRAAVALEARRSHAGAQGMAALRHLAAGPTCHHHHHHGVAAATASLRLHRLPLPFRPLRSRSGSFTRVYAISSNDIRVGTNVEVDGAPWKVLEFLHVKPGKGAAFVRTKLRNYVTGNTVEKTFRAGTTGTIPFKGDQAIYIQGWLPVRVHGSDNI

SEQ ID NO: 164720 - protein, 378 aa, Zea Mays
MYKLKAAIQGLAGSRSAAAEVYGGEYQFQRAVENLCEPRFPNPLTRAHRCGFLCCFPPSRALLLHGAMAGSGNRRFGRDMVSSSTHFSQWQMVWVGDHVPGGRVDLQCGGPIWPPMSARSGANSDSLAVTTFRCSFRCSDDLSLHPWISRQLGTRHQNEGNQESKRPRESQSTRRGTRELGIVKRARGDELLRFMDGASKEPLRKHCRSSHYSLIYTSWDLKVAKEEQDIGFYAGFVGATYFLGRAISAMPWGMFADKYGRKPCIVISILSVIVFNTLFGLSTTYWMAIVTRGLLGLLCGILGPIKAYASEVCRKEHQALGISLVTSSRAIALVIGPAIGGFLAQDSGSHQVTPFPHIDFADRCLNSSGGATNNNPMS

SEQ ID NO: 164721 - protein, 261 aa, Zea Mays
MPRAALSHLSHSHPRASLSHQQATPPLHHRSPDHRLSPSSSSSPTHRPSLLRCRAFKQEADDGDGDPTEADARKRRKGPMYKLKAAIQGLAGSRSAAAEVYGGEYQFQRAVENLCEPRFPNPLTRAHRCGFLCCFPPSRALLLHGAMAGSGNRRFGRDMVSSSTHFSQWQMVWVGDHVPGGRVDLQCGGPIWPPMSARSGANSDSLAVTTFRCSFRCSDDLSLHPWISRQLRTREPGIKMKGTRNRNGPENPKAREGEQGN

SEQ ID NO: 164722 - protein, 89 aa, Zea Mays
MSFWLFGLFLSSCGLYLFPCTLLPRIPTLNLYHACMFLMIHSPLFVCKLCYACAAGICDRVFHMSTRLFFMTRTTTRTACATRILQNLS

SEQ ID NO: 164723 - protein, 485 aa, Zea Mays
MHRNPDPAAATPTPAAPRQRQQLRLRPPRAHAHPPHLARRLRTACFQPQASAARRRPPQQRRRQGRRRRRRHRRHTAAASSTRRRREGYGRRGTVVRTAARRGGRGSAAALARRWPPPVAAQQEAPGEGPALRPQQTHQLISTLHLASYMMVASADEAVASELDSVAALQCLCSSRRGIGPLVDDRWSLVQRLEAEARGRDADIAALGRELRRLQHDNARLSRRVVRSRNDDERRRTRLLLSVPKELATPAALVSRFVAASRSVGEFAGLLHGAGTCASSSDDAVAEQARSWRRYAIEAHLWRAMLLAGTGGGDAGSSFHGIMKPRDALDALMQFPRSGLSAFCRAAYLAAVQPEAEAAACRNLDHRAFVSRGGHPRTRLYRAFAAAARSVWALRVLMAGCSESEQSGGGGDGVRMFYASRGSLYRAEFMESVPALGAEEDRRVETGEEKLSVAFTVTPGVKVGDTVVPCRVLLCRRREGFVRIR

SEQ ID NO: 164724 - protein, 66 aa, Zea Mays
MCPLRVILIFLSATVAGFFLVRGLNAEPDQFDADADADESGSPRAPLPLHSKYCLITTLKFARCNN

SEQ ID NO: 164725 - protein, 550 aa, Zea Mays
MCTLCAVQRWSRRVATMLPWLVVPLIVIWAATQLLLPAAYRFEVTSPRLACVSVLLLTLFWYEILLPRLSLWRARRSARLREERRAHALELHKLRKTATRRCRNCSNPYRDQNPGGGKFMCSYCGHVSKRPVLDLNSAGKAPTGWPCAQDCGYWLDLRCSSGNNSSFLGFSWRLLSSFCSTAMRWLLRNIFRLTSSGDGEGLSIDGKRLAKRGENGGKTEESKTEKARRKAEEKRLARLEREMLEEEERKQREEMAKLVEERRKLRDEKAEAEERSKSATPVGEKDAKREAEKRRQERKKKEDKGSSKSNSDCEDIDRRLVREGDRKRDFDRKSDLDRREGYKPHYFDSNNHSNKTGESRSKYFGRMTGGFLSSSRGFGSSSFFGRSAQAPAPQVSKANLLQLEKLEMHGLILIDLLVQMCIHTLLALKSHGISYLVVQHQCLLVLTLQLQLMIWFGRQNQMELKYTMLIHFSLSIRLWTTSQVQASLCNFQVFHRLMEHLPVTHYLIFLLDICLSMMMQNQHYLKNQSNLRTHAMIQMQLHYLGQFQNL

SEQ ID NO: 164726 - protein, 393 aa, Zea Mays
MCTLCAVQRWSRRVATMLPWLVVPLIVIWAATQLLLPAAYRFEVSPNVHPYPTGLKKSWHQLFSRSASVSPCPDVTTSAHDMVRKAEPNGAQIYNAHTFLSQYPPLDYKPSSSQSMQFPGFPPLNGAPPSNPLPHFPAGHMPFYDDAESTLLEEPEQFEDPCYDPDAIALLGPVSESLDNFPLDLDCGFFSSDVAKESHGRPSPIESPLSRSRTVEEKPIEPPHSSVARGPGGSILPESSSEQGTWQMWSTPLVQESLGLQGPQSQWLRQNTNQFNHSANLFSSGGGAISPLGTGLNDSDPWLQKAPFQQLPPDTPSLFLSHEMPGKLHNDLVFGSPNKSARERPFGPPGYLWPNATILEHMVLFMGNCCSIFCQGPLAQWESFSPLCQACPL

SEQ ID NO: 164727 - protein, 401 aa, Zea Mays
MALMMIHRFFSISLLAFFVLWYTSTPGQSGPTSQSSEGGSDKPAGWRNQSWFYIVVRISLFLWVALLNLITISSTWARVIDVMDSESGSRLFGFIGAGATLGQLFGSLFAASMAWLGPFLLLFSSLLMELAALSSKGICLDGNHASAELHQTGAGQAPNTMADDEISSLVTSPRQPVQSQESKPELFIMFEGFWLILRSPYLIYISLFLWLSAVVSSVFYFQKVTIVATTISSPTARRRTFALINSFIAVFILAGQLTLTGHILTVAGVTVAICASPFVAASNLVALAVWPTWVAVAVTETIRKVTTYVLTRPGRELLFTVVSQDEKYKAKVCIDVIVQRLGDATAAGIYRWLFSSLEKKTSKVTLFALPLCFLWLVIAFHLGRLQTNLARLQAASAPSYS

SEQ ID NO: 164728 - protein, 274 aa, Zea Mays
MELAALSSKGICLDGNHASAELHQTGAGQAPNTMADDEISSLVTSPRQPVQSQESKPELFIMFEGFWLILRSPYLIYISLFLWLSAVVSSVFYFQKVTIVATTISSPTARRRTFALINSFIAVFILAGQLTLTGHILTVAGVTVAICASPFVAASNLVALAVWPTWVAVAVTETIRKVTTYVLTRPGRELLFTVVSQDEKYKAKVCIDVIVQRLGDATAAGIYRWLFSSLEKKTSKVTLFALPLCFLWLVIAFHLGRLQTNLARLQAASAPSYS

SEQ ID NO: 164729 - protein, 359 aa, Zea Mays
MGQFKKEFGESDDEGIPEHSTKPADFDLLFAGDIDDHFVFGVKLTKKSIKLYSNFYSSDIIVASPLALKRKIDGGGHDKKDFDFLSSIEIVVVDHADVMSMQNWDHLEAVFEQLNQLPSKEHGTNVMRIRPWYLDQHAQYYRQTILLSSYLTPEINALFNGLCLNYEGKIKMVTEYAGVLPKIQLEVRQVYERFDASSIAEADGARFDYFCNKVYPKIQDLDEGGLLLFVSSYFEYIRISNFLKSKEASFCRIGEATSQQDISRARLWFFEGKKKILLYSERSHFYHRYKIRGTKHLLVYSLPGRKEFYPELVNMLGESENRKCNVLFSRLDLLKLERIVGKSSARRLISSEKGMFVFC

SEQ ID NO: 164730 - protein, 457 aa, Zea Mays
MGKRKPMPSAAAARGPKNRPKRPKSVKQGAELREQNLQLPEHDYENIDTESGAAETVHRDKKANGIFQDTSQSDEEEIEDEYDAPSNDTPGDATNNGNGCFDETEISCSFHRHVSHVITNEEVKMLMKKNYKFKWEMPAVGIPRSKWVGTGEKVQEACDDHLHDVKGKLRDHWQHTLSDHLNSRMSFYSLCNSYRDIMHCNKKPFYLKSNGPDSSTMDAYLMHALNHVHRTRDVVIRNDAKLRNDTDRDITDDKTYLDQGFTRPKVLFLLPLKSFARRIVKRLIQLSPLPQKDSAMGQFKKEFGESDDEGIPEHSTKPADFDLLFAGDIDDHFVFGVKLTKKSIKLYSNFYSSDIIVASPLALKRKIDGGGHDKKDFDFLSSIEIVVVDHADVMSMQNWDHLEAVFEQLNQLPSKEHGTNVMRIRPWYLDQHAQYYRQTILLSSYLTPGMDSAGKWL

SEQ ID NO: 164731 - protein, 530 aa, Zea Mays
MLMKKNYKFKWEMPAVGIPRSKWVGTGEKVQEACDDHLHDVKGKLRDHWQHTLSDHLNSRMSFYSLCNSYRDIMHCNKKPFYLKSNGPDSSTMDAYLMHALNHVHRTRDVVIRNDAKLRNDTDRDITDDKTYLDQGFTRPKVLFLLPLKSFARRIVKRLIQLSPLPQKDSAMGQFKKEFGESDDEGIPEHSTKPADFDLLFAGDIDDHFVFGVKLTKKSIKLYSNFYSSDIIVASPLALKRKIDGGGHDKKDFDFLSSIEIVVVDHADVMSMQNWDHLEAVFEQLNQLPSKEHGTNVMRIRPWYLDQHAQYYRQTILLSSYLTPEINALFNGLCLNYEGKIKMVTEYAGVLPKIQLEVRQVYERFDASSIAEADGARFDYFCNKVYPKIQDLDEGGLLLFVSSYFEYIRISNFLKSKEASFCRIGEATSQQDISRARLWFFEGKKKILLYSERSHFYHRYKIRGTKHLLVYSLPGRKEFYPELVNMLGESENRKCNVLFSRLDLLKLERIVGKSSARRLISSEKGMFVFC

SEQ ID NO: 164732 - protein, 426 aa, Zea Mays
MGKRKPMPSAAAARGPKNRPKRPKSVKQGAELREQNLQLPEHDYENIDTESGAAETVHRDKKANGIFQDTSQSDEEEIEDEYDAPSNDTPGDATNNGNGCFDETEISCSFHRHVSHVITNEEVKMLMKKNYKFKWEMPAVGIPRSKWVGTGEKVQEACDDHLHDVKGKLRDHWQHTLSDHLNSRMSFYSLCNSYRDIMHCNKKPFYLKSNGPDSSTMDAYLMHALNHVHRTRDVVIRNDAKLRNDTDRDITDDKTYLDQGFTRPKVLFLLPLKSFARRIVKRLIQLSPLPQKDSAMGQFKKEFGESDDEGIPEHSTKPADFDLLFAGDIDDHFVFGVKLTKKSIKLYSNFYSSDIIVASPLALKRKIDGGGHDKKDFDFLSSIEIVVVDHADVMSMQFMHGCRTGTIWRLCLNNLISCHQKNMEPM

SEQ ID NO: 164733 - protein, 651 aa, Zea Mays
MGKRKPMPSAAAARGPKNRPKRPKSVKQGAELREQNLQLPEHDYDTESGAAETVHRDKKANGIFQDTSQSDEEEIEDEYDAPSNDTPGDATNNGNGCFDETEISCSFHRHVSHVITNEEVKMLMKKNYKFKWEMPAVGIPRSKWVGTGEKVQEACDDHLHDVKGKLRDHWQHTLSDHLNSRMSFYSLCNSYRDIMHCNKKPFYLKSNGPDSSTMDAYLMHALNHVHRTRDVVIRNDAKLRNDTDRDITDDKTYLDQGFTRPKVLFLLPLKSFARRIVKRLIQLSPLPQKDSAMGQFKKEFGESDDEGIPEHSTKPADFDLLFAGDIDDHFVFGVKLTKKSIKLYSNFYSSDIIVASPLALKRKIDGGGHDKKDFDFLSSIEIVVVDHADVMSMQNWDHLEAVFEQLNQLPSKEHGTNVMRIRPWYLDQHAQYYRQTILLSSYLTPEINALFNGLCLNYEGKIKMVTEYAGVLPKIQLEVRQVYERFDASSIAEADGARFDYFCNKVYPKIQDLDEGGLLLFVSSYFEYIRISNFLKSKEASFCRIGEATSQQDISRARLWFFEGKKKILLYSERSHFYHRYKIRGTKHLLVYSLPGRKEFYPELVNMLGESENRKCNVLFSRLDLLKLERIVGKSSARRLISSEKGMFVFC

SEQ ID NO: 164734 - protein, 292 aa, Zea Mays
MTLAMSALACHRPLPFKSWKRKLRTSVATWKHMRPDRRNEAVAFAAKNTKRKRRSSPNESKDLLLVVSEEAASGSGGSAGTSLETNGEDVATDDEVSGAPRSAVLQACALTSGLLLAGGLLLREASHLASINGWPIADPTDVSFSFETWHLELVAGLVIVISSARYILLQTWPDFRDSSESANRQILASLEPLDYIVVACLPGISEELLFRGAMMPTLGLNWISALIIGTVFGVLHLGNGRKYSFAIWATFVGFAYGMGTIASSSIVVPIASHSINNIIGGLLWRLTKNSQK

SEQ ID NO: 164735 - protein, 79 aa, Zea Mays
MMPTLGLNWISALIIGTVFGVLHLGNGRKYSFAIWATFVGFAYGMGTIASSSIVVPIASHSINNIIGGLLWRLTKNSQK

SEQ ID NO: 164736 - protein, 180 aa, Zea Mays
MLAVFSGQVVEVFCLFEGVLDNLGRLSQQHGLSSKGANEVLLVIEAYKTLRDRAPYPASFMLAQLTGSYAFVLFDKSTNSLLVASGAALLGDHRRRLRRLLRRHRHAQRLMRQVARAVPARLLLLQRPRRAQVLREPQAQGHRCPRRRRRDLRCHFQGGGRLYCPDGAALIGHQLAEAMR

SEQ ID NO: 164737 - protein, 236 aa, Zea Mays
MLAVFSGQPDAVAQDEGVAAGGALPGRLRAGRVRAARRPRPPRLLPHQPGAPPPQVVRGQGRGVLPVRGGAGQPGSSEPAARAVKQGRQRGAPRHRGLQDAARPRALPGQLHARPAHRLLRLRPLRQVHQLPASRIRPRGQGAALLGDHRRRLRRLLRRHRHAQRLMRQVARAVPARLLLLQRPRRAQVLREPQAQGHRCPRRRRRDLRCHFQGGGRLYCPDGAALIGHQLAEAMR

SEQ ID NO: 164738 - protein, 152 aa, Zea Mays
MLAVFSGQVVEVPAELVAAGSRTPSPKTKASQLVGRFLAASEPAVSVQLGDHGHLAYSHTNQALLRPRTPRAGCRSSGGSPPTAASPSPTTSTCSKAHAASRSRRSRKAASTPTPSEGSSATRTPSTRSPLSPPTKKRSAVPLSRWWKALLS

SEQ ID NO: 164739 - protein, 289 aa, Zea Mays
MVIPRLERGGKREDCGVSTRRFCCASLALHEALTRVTEVWEWPIALVLKLTIPSTLPSEWSKVYISANIGLCPLLILYSFSSFIPLDTRIVFLLPQVRFPLWSVVLFASLCLALSHYLLEKEAPETETIASTIISFIMSVFWISTTAGELLSCLAAVGAIMDFPPAILGMTVLAWGNSVGDLVADVALARAGQPTIAVAGCFAGPMFNMLVGLGTALVVQTARVYPGAFVLEFHVGIVVAFVFLLLSLMGTLLVVTWARFRVPRFWGYCLMGMYILFTVVSIAIASYSG

SEQ ID NO: 164740 - protein, 442 aa, Zea Mays
MHSTNLLLEEPIRMASILEPSKTSFFPAMTKIVGTLGPKSRSVDTISSCLKAGMSVARFDFSWGDAAYHQETLENLKLAIKSTKKLCAVMLDTVGPELQVVNKSETPISLEENGTVVLTPHQGQEASSTLLPINFDGLAKALTPGATIFVGQYLFTGSETTSVWLEVSEVKGDDVVCIIKNTATLAGSLFTLHCSQIHIDLPTLSDEDKDVIKKWGAPNKIDFLSLSYTRHAEDVRQAREFLSKLGDLSQTQIFAKIENVEGLNHFDEILAEADGIILSRGNLGIDLPPEKVFLFQKSALHKCNMAGKPAVVTRVVDSMTDNLRPTRAEATDVANAVLDGSDAILLGAETLRGLYPVETISTVGRICAEAEKVFNQDLYYKRTVKYVGEPMTHLESIASSACELHSKLRHQSSFASPLLDELQGSLLSTGPACLFCLLSFLV

SEQ ID NO: 164741 - protein, 325 aa, Zea Mays
MHSTNLLLEEPIRMASILEPSKTSFFPAMTKIVGTLGPKSRSVDTISSCLKAGMSVARFDFSWGDAAYHQETLENLKLAIKSTKKLCAVMLDTVGPELQVVNKSETPISLEENGTVVLTPHQGQEASSTLLPINFDGLAKALTPGATIFVGQYLFTGSETTSVWLEVSEVKGDDVVCIIKNTATLAGSLFTLHCSQIHIDLPTLSDEDKDVIKKWGAPNKIDFLSLSYTRHAEDVRQAREFLSKLGDLSQTQIFAKIENVEGLNHFDEILAEADGIILSRGNLGIDLPPEKVLHIVGLFVSKVCASQVQHGWKACCCYSCRGQHD

SEQ ID NO: 164742 - protein, 185 aa, Zea Mays
MSSTNFGVIRSKTETHPAREISTSIIITSERAGRAAPMAAYMRVTHRDEEGKKVTEKMPVPETRRPDTAKHFERKLEEQGLHRFERHPANAPRGVGIGAPPPKSGRGGKYTWEGPGSVVEDQLDPAPPAIDPNDPNYEEGGAADEDDEAAREVVVGEVEVAKVAESRDGVARVDVAPGLLQDQKQ

SEQ ID NO: 164743 - protein, 103 aa, Zea Mays
MSAPSPATMILFLIASHSPSATVLLLTATAWCSRRVLPSPVHPILNVPTIPASDLDSVHILSPTGPIHLGPIHLGPIHLILFYTQMNFKNEVFLIHILYFGSP

SEQ ID NO: 164744 - protein, 335 aa, Zea Mays
MPSSSSGPPSNDVRLIPYLDECDAPRRKRRHSASAIYNPPNITATQARATRRHLLNQSRIARKGLAAKTLTNFHTGQFTTEYVEALKASYPNRSYYGTPDYECSYCHAVFWYAERVRSNQHDSSIRYNNCCKGGKISIPPFKPRPEPLASLARFDGDATSRKFIRNIRQYNCLFAFTSMGAQIDNSVNDGRGPPLFKICGQVHHRIGTLLPDDGSPPRFIQLYIYDTTNEVQNRINALDSGDRTQDNFDPVIIRNLIKMLDDHNPFVKKFRMARDRLADNPNEEFTIRLIGAKEGDPIQYNLPTTDELAMLVVGDFTLDTFKRDIIIETQNKELK

SEQ ID NO: 164745 - protein, 56 aa, Zea Mays
MVLQPTAEGYKLTRWRLITLLLPEKKFSHAWLDNKTAAAASASHGFFIINSQRQML

SEQ ID NO: 164746 - protein, 406 aa, Zea Mays
MRSHMDSVVVGSEETVSDHGGPVLEEFMPLKPTTLSSSSSQPHYQDEHDSAHYLEHRRGSAATANDVVDADKDGEAVGDLETAAASSSRPLPHPETKKAMPDWLQSVQLWSNQQQPSASPPQHQDELLLPCRPVALNACRKPGGAFQPFEKEKKKKDKEEKQRAELELPLPAAASSAVVGDSCDRAGATDTDTDTAENNKASSNKGGNDKEAQLSSQSQAPSRKARRCWAPELHRRFLQALQQLGGSHVATPKQIRELMNVDGLTNDEVKSHLQKYRLHTRRPNSAAAAVQSGGTSVVAPPAAPQFVVVGGIWVPPPEYAAAVAVAAAAAAQPQQVHLAGDASGTTTTAADKVYAPVATTLTPAPRPRPRPRPERQSSSCSGARRSGDACSGSPAVLSSSSHTASA

SEQ ID NO: 164747 - protein, 140 aa, Zea Mays
MFAAPATDRQSRVRVRDGRPTKTYSSNRRYFHNYPDRATRRTCCGVCPSAPASSSSSDDSVALGGGRTYVDVTARDAGSARTRSASASAAVAIDWHSSNLLSILLLPESRRLCSSTQAEMERGCGKLEWLALDGDGHGLT

SEQ ID NO: 164748 - protein, 74 aa, Zea Mays
MAMVIKFQVMTDPDVPGPSDPYLREHLHWIVTDIPGTTDASFGRQIISYESPRPSIEIISTPGSSLRKMTLASL

SEQ ID NO: 164749 - protein, 78 aa, Zea Mays
MLYIETADRPGLLLEIIKIIADTNIDVESAEIDTEGLVAKDKFHVSYRGAKLNSSSSQVLINCLRYYLRRPETDEDSY

SEQ ID NO: 164750 - protein, 278 aa, Zea Mays
MSSPRPPLGRILRLAVAVAACACFPSPVSGIRKGIDFIQPIVCRSTVQGRHLISDDNGYVCSALSINPWSHCCPTTGDRFSCQGCELDLQCCNSYEYCVSCCLNPSKIKKEDVLKLKVAKPVTAGTYTNVFDFCMGRCRHSSASVVHENAYASDFHHCFSVQQNSSGSTESSSVSKLLGINVVVGRPRESCSLVCKVRGQSCVPSRLSVLNKCEILQKYMRCKSGCFPSLGPDQPAEVVDEAPTSLEHAYTCRWMSGSHVMVRTIIPGGSVHAPEKGK

SEQ ID NO: 164751 - protein, 248 aa, Zea Mays
MVLHHTPMTNNLSTHRLRVSSTRTPYSPPVSGKDYGCKMKWSACKDLLRFLRSVVDAEGDAIPFKSLHGICSSVSLVLLLEGRVGEDVRQELRAPEGVGERQVSLGRVVRQLPQELVGEGPVVVLLHLRVQLPHPADPDEEAGEVAPRLLPEPPLHAVPEPAAAVLLPEPVDGGEVLGRDELDLGEEDVPSAPRGLAGEVDDQRPRGLVRLPVVARGELAAEEVERGAFFFFFVPCRWCRCRGNWSRS

SEQ ID NO: 164752 - protein, 530 aa, Zea Mays
MEATTALALSSSSLATARRSPEKATAASLSLRRFSATTSLHLRAARSPALRSHQSPFQGWRRRGRAGGLVVRAEMFGQLTTGLESAWNKLRGVDVLTKENIAEPMRDIRRALLEADVSLPVVRRFIESVSEKAVGTDVIRGVRPDQQLVKVVSDELVQLMGGEVSDLVFAKSGPTIILLAGLQGVGKTTVCAKLAFYLKKLVGVPVYSEGTEAKPSQIAKNGLKEAKVNKADVIIVDTAGRLQVDKAMMNELKEVKKAVNPTEVLLVVDAMTGQEAAGLVSSFNDEIGITGAILTKLDGDSRGGAALSVKEVSGKPIKFVGQGERIEDLEPFYPDRMAQRILGMGDVLSFVEKAQEVMRQEDADELQKKILSAKFNFNDFLKQTQMIAKMGSFSRLIGMIPGMNKVTPAQIREAEKNLKFMESMINVMTLEERERPELLAESRERRKRVAKDSGKTEQQVSQLVAQLFQMRAKMQKMMGAMQGKESPDMDELMGSMKAEEQSAAGTGRRRRKYGNLRQRQLDAMRGFRRR

SEQ ID NO: 164753 - protein, 227 aa, Zea Mays
MEATTALALSSSSLATARRSPEKATAASLSLRRFSATTSLHLRAARSPALRSHQSPFQGWRRRGRAGGLVVRAEMFGQLTTGLESAWNKLRGVDVLTKENIAEPMRDIRRALLEADVSLPVVRRFIESVSEKAVGTDVIRGVRPDQQLVKVVSDELVQLMGGEVSDLVFAKSGPTIILLAGLQGVGKTTVCAKLAFYLKKLGKSCMLVAADVYRPAAIDQLTILGKK

SEQ ID NO: 164754 - protein, 341 aa, Zea Mays
MQCSYDSRGNSVPTILLMMQRRLYEQGGLQAEGIFRINAENSQEEFVRDQLNSGIVPDGIDVHCLAGLIKAWFREMPRGVLDPIPPEQVMQCQSEEDCARVAKCLPPAEAALLDWAVNLMADVVQEEHINKMNDRNIAMVFAPNMTQMADPLTALMYAVQVMNFLKMLVQKTLKDREESTPEDALLPQKDPSDENGHQKPTVTLDSLLEEGSRRPSFAKEEPLLNSPGHSTDDKSNETNTDLGATAAFTAQTSEVATGVEDSTSSGSQPAPAGPAAIADASGTTATNSLQAGKGSRSLNRRRTRKGKGQSGTRTTPAAEKSRGASIVSRINSRVERIEAWR

SEQ ID NO: 164755 - protein, 280 aa, Zea Mays
MALMSTVWQAWFREMPRGVLDPIPPEQVMQCQSEEDCARVAKCLPPAEAALLDWAVNLMADVVQEEHINKMNDRNIAMVFAPNMTQMADPLTALMYAVQVMNFLKMLVQKTLKDREESTPEDALLPQKDPSDENGHQKPTVTLDSLLEEGSRRPSFAKEEPLLNSPGHSTDDKSNETNTDLGATAAFTAQTSEVATGVEDSTSSGSQPAPAGPAAIADASGTTATNSLQAGKGSRSLNRRRTRKGKGQSGTRTTPAAEKSRGASIVSRINSRVERIEAWR

SEQ ID NO: 164756 - protein, 266 aa, Zea Mays
MPRGVLDPIPPEQVMQCQSEEDCARVAKCLPPAEAALLDWAVNLMADVVQEEHINKMNDRNIAMVFAPNMTQMADPLTALMYAVQVMNFLKMLVQKTLKDREESTPEDALLPQKDPSDENGHQKPTVTLDSLLEEGSRRPSFAKEEPLLNSPGHSTDDKSNETNTDLGATAAFTAQTSEVATGVEDSTSSGSQPAPAGPAAIADASGTTATNSLQAGKGSRSLNRRRTRKGKGQSGTRTTPAAEKSRGASIVSRINSRVERIEAWR

SEQ ID NO: 164757 - protein, 138 aa, Zea Mays
MSLFFTREKYVATYEGMIMPVPDKRQWLSTDLPDVDPPLYHAQPGRPKKKRVRAKGEPHVEARASKRAAVKCSNCHTYGHNVKGCGVPLRADWEPRKGAKYTRASIGVPTSSQPDPPTFEGGSRIRPQKLSPIRKRNA

SEQ ID NO: 164758 - protein, 127 aa, Zea Mays
MSLFFTREKYVATYEGMIMPVPDKRQWLSTDLPDVDPPLYHAQPGRPKKKRVRAKGEPHVEARASKRAAVKCSNCHTYGHNVKGCGVPLRADWEPRKGAKYTRVRFVHVTSFIGLEPGAGFLAGRPD

SEQ ID NO: 164759 - protein, 70 aa, Zea Mays
MENLVYHGYEGNTTLYYLKPGHTAPKGLVLMDSAEHVQQLMKDHEGLKVCKLFILKPPRMSKTDGRKNII

SEQ ID NO: 164760 - protein, 81 aa, Zea Mays
MEPQPIGSNRQKENLVYHGYEGNTTLYYLKPGHTAPKGLVLMDSAEHVQQLMKDHEGLKVCKLFILKPPRMSKTDGRKNII

SEQ ID NO: 164761 - protein, 137 aa, Zea Mays
MRDKCRGGVRARQTVQRRDVEAVEEPVDLVLDGVLILSAACSSSQWRDHPPGGRCAMLVFLAACSSLLPVAWSPDGVLVQKISSGPTSCEGTSFCCPAHSENFYGVKCCMLRACCTTLGRCLMKRSSQHHSDFPIFL

SEQ ID NO: 164762 - protein, 287 aa, Zea Mays
MAAVAAGELAAFLTGANLIMEYVFSNAAVARSFTAYLGTAVGVDAPREWRIAVRGLPEGFNQVDLVAVAVILLVSVCICYSTKESSAVNLALTAVHVAFILFVIGMGFRHGDARNLTRPADPARSPGGFFPHGAAGVFNGAAMVYLSYIGYDAVSTMAEEVQRPARDIPAGVSGSVVVVTVLYCLMAASMSMLLPYDAIDPEAPFSGAFKGRERCAWVSNVVGAGASLGILTSLMVAMLGQARYLCVIGRSGVMPAWLARVNPRTATPVNASAFLGLFTAALAHVHG

SEQ ID NO: 164763 - protein, 212 aa, Zea Mays
MAAVAAGELAAFLTGANLIMEYVFSNAAVARSFTAYLGTAVGVDAPREWRIAVRGLPEGFNQVDLVAVAVILLVSVCICYSTKESSAVNLALTAVHVAFILFVIGMGFRHGDARNLTRPADPARSPGGFFPHGAAGVFNGAAMVYLSYIGYDAVSTMAEEVQRPARDIPAGVSGSVVVVTVLYCLMAASMSMLLPYDAVGTPSLCSVMLSET

SEQ ID NO: 164764 - protein, 400 aa, Zea Mays
MGNSQASPASASSSRFVMASRAFPKQELDGLRELFASLAAQSRTGGRAISRPVFLEYYQVRGRLGDRLFQLVAKESGGSDGVTFEDLIISKATYGRGTRDEVDEFIYQLCDVTGDGALTRSDLESVLASVHETVFAIKKEAVEVSNNRPFEEFLNSAVFSKDVEGVSGKSMSLSDFRNWCTLLPSLRKFLGNLLMPPDSEYAWHIGGGFSQHEVQEWKLLYHSSLHGQSFNTFLGKVTNGDAQTVLIVKDTEGSIYGGYASQPWERHSDFYGDMKTFLFKCYPQASIFRPTGANKNLQWCAVNFSSENIPNGIGFGGQPHHFGLFLSANFDQGHSFTCSTFTSPPLSKTNRFRPEVIECWGIQMRGAQDEKLELVKGTVLERFKEDRNMLKMVGLANASD

SEQ ID NO: 164765 - protein, 255 aa, Zea Mays
MSLSDFRNWCTLLPSLRKFLGNLLMPPDSGRPGFEVPLLHYPENICTDTLLLNKEYAWHIGGGFSQHEVQEWKLLYHSSLHGQSFNTFLGKVTNGDAQTVLIVKDTEGSIYGGYASQPWERHSDFYGDMKTFLFKCYPQASIFRPTGANKNLQWCAVNFSSENIPNGIGFGGQPHHFGLFLSANFDQGHSFTCSTFTSPPLSKTNRFRPEVIECWGIQMRGAQDEKLELVKGTVLERFKEDRNMLKMVGLANASD

SEQ ID NO: 164766 - protein, 113 aa, Zea Mays
MVIAVESVISWMPMYSEMKLAFFVYLWYPKTKGSDVVYDTFLRPIVMQYEPNIEQRLFHLRAKSGQLISFYMKNFADKGTAFFMDVLRYVVSEKPEGSNAEVGNDNFSMTYSV

SEQ ID NO: 164767 - protein, 656 aa, Zea Mays
MAAVLSPSPSILRLNAPSWDREEEEQQIPHVGSVEIEVPAENVVDKYALLAPKVGMTFDGEEKAYKMYNTYAGCVGFSVRKYRTTRRKLDDSLCQKYFVCSGEGQRKNEASQKDITRTGCDAHVQFSISKENVWTVQKVILDHNHYLASPNKTHKLRSQREIIEADRKLIGQARRSGMKPSQVFSFMKEHYGGEDKVPFTKMDCYNEIGRERTPYLEANDAQTLSEYLRNKQVEDPTFFYAVQVDKETGHIANFFWADGQSIMDYKCFGDAVSFDTTFQTNKFEMPFAPILGTNHHKQTIIFGCALMFNETIPSFVWLFQTFLTAMSGKHPSTIFTDQDAAMAAAIAHVFPNTAHRLCLWHIGQNAVKHLGPIIKATEDEVEDKSGNKFWADFKSCIYEDREEIYFTQKWHELLAKYNLEDNKWMSNLYDLRAKWAAVHRDSFTADIHSTQRSEGTEEGDLKTQAALISRQATTLALKCSSSKELLDKLQKAMYDLNLEADTYLSEMHEKSNEIPPTPNECVRQPLNGVISFKIPPVIKGPKQTRFKNVLEKNPGKKKKGARKKGDGLEHVDIETRDEHADANLIDFNVGASSTMNAPFVQGGYANVTMPQFNLFANPSAMAPPYIPGGYTSLLMGVDQDDTTQAAVRKLHFDESM

SEQ ID NO: 164768 - protein, 562 aa, Zea Mays
MKPSQVFSFMKEHYGGEDKVPFTKMDCYNEIGRERTPYLEANDAQTLSEYLRNKQVEDPTFFYAVQVDKETGHIANFFWADGQSIMDYKCFGDAVSFDTTFQTNKFEMPFAPILGTNHHKQTIIFGCALMFNETIPSFVWLFQTFLTAMSGKHPSTIFTDQDAAMAAAIAHVFPNTAHRLCLWHIGQNAVKHLGPIIKATEDEVEDKSGNKFWADFKSCIYEDREEIYFTQKWHELLAKYNLEDNKWMSNLYDLRAKWAAVHRDSFTADIHSTQRSEGMNNVFKKRFRRKLGLSELLVECEKVVVDLRSNETDPFRNPLLLCKHALRVYNMNGVYNLPSQYILPRWTKYAKSGFYIEKKQGTEEGDLKTQAALISRQATTLALKCSSSKELLDKLQKAMYDLNLEADTYLSEMHEKSNEIPPTPNECVRQPLNGVISFKIPPVIKGPKQTRFKNVLEKNPGKKKKGARKKGDGLEHVDIETRDEHADANLIDFNVGASSTMNAPFVQGGYANVTMPQFNLFANPSAMAPPYIPGGYTSLLMGVDQDDTTQAAVRKLHFDESM

SEQ ID NO: 164769 - protein, 465 aa, Zea Mays
MDRPINIRTSPRTPLSLSEQQTIKEFWRKKQEEIEAIEDFGEHTIPVTCLKKVICAKKGKMMMTSDTPTFMTKLKRKHNDRTENEAAESNDWMSPGYANAGSSPVPTPPSGKGLKASTKPKATKGQKSGPQTPLGFGSPGNPSTPVGGCRYDSSLGLLTKKFLNLLKGAPGGIVDLNNAAETLEVQKRRIYDITNVLEGIGLIEKKLKNNIRWKGVDDSRPGEVSDDMSILQADIDALTLQERNLDERISEMRDRLRGLTEDENNQKWLYVTEEDIKSLPCFQNQTLIAIKAPHGTTLEVPDPDEVNDYPQRRYRIVLRSTMGPIDVYLVSQFEEMSGMETPPRPTQTISMDSLENPRTPLAADCNKVTGMESNIHGGLILPSDAPSSSQDISGMMKIVPSELDADTDYWLLSDNTGVSMTNMWETGHEWDGIEKFNAEDFLEVGTPQQQDKPADVVDDDPSCII

SEQ ID NO: 164770 - protein, 489 aa, Zea Mays
MAIVLRYLNKQGLIIESLVGVVHVKETSAICLMEALQKLFTDIGLSIKQVRGQCYDGASNMRGEFNGLKAKILQANKSAYYVHCFAHQLQLVIVAVAKKHGDVADFFYMISILFNVVGGSCKRKDMIREKHRDDVTKAIGSGQLSTGKGLNQDQTLQRAGDTRWGSHYRTLSSIVKLFPSIISVLKYVEKEGKSDKKSQARGLIAYFETFDFVFYLHMMLHILGSANTLSQSLQRKDQDILNAMSCVRGTRNELQNLRENGWNSLMEKVHLFCDEHHIERENMHDEYVNRHAPRKKSNKTNLQHYQIEVLNYVIDWQLQEFDDRFSEVNSALLGHMAAFNPKNSFLAFDRETLVRLAEFYPDDFDSNKLDDLSLELVIYIDNVRADRRFDNLDGIVDLAKLMVQTNKHITFSLVYQLLKLVLILPVATASVERCFSAMNVVKKKLRNKMGDQFMSDCLICYVEKDMFSTISNDEVIDLFKKMKFRSGKL

SEQ ID NO: 164771 - protein, 455 aa, Zea Mays
MAIVLRYLNKQGLIIESLVGVVHVKETSAICLMEALQKLFTDIGLSIKQVRGQCYDGASNMRAKKHGDVADFFYMISILFNVVGGSCKRKDMIREKHRDDVTKAIGSGQLSTGKGLNQDQTLQRAGDTRWGSHYRTLSSIVKLFPSIISVLKYVEKEGKSDKKSQARGLIAYFETFDFVFYLHMMLHILGSANTLSQSLQRKDQDILNAMSCVRGTRNELQNLRENGWNSLMEKVHLFCDEHHIERENMHDEYVNRHAPRKKSNKTNLQHYQIEVLNYVIDWQLQEFDDRFSEVNSALLGHMAAFNPKNSFLAFDRETLVRLAEFYPDDFDSNKLDDLSLELVIYIDNVRADRRFDNLDGIVDLAKLMVQTNKHITFSLVYQLLKLVLILPVATASVERCFSAMNVVKKKLRNKMGDQFMSDCLICYVEKDMFSTISNDEVIDLFKKMKFRSGKL

SEQ ID NO: 164772 - protein, 154 aa, Zea Mays
MGISQDTHESMATDAANYLCHQLQHLLGPISSATSQSGPWEERSAMVRLTQKLQKSKRNKRWRQRRRKHVEELFQKERADYDRVDQEADEWRAKQIAKDIAKQRVESMQQIARKKTNVERKRLESEVDLDLENYECFIDVTLTRDNNITTRNIY

SEQ ID NO: 164773 - protein, 142 aa, Zea Mays
MGISQDTHESMATDAANYLCHQLQHLLGPISSATSQSGPWEERSAMVRLTQKLQKSKRNKRWRQRRRKHVEELFQKERADYDRVDQEADEWRAKQIAKDIAKQRVESMQQIARKKTNVERKRLESESVIEKERRGDYIGKTL

SEQ ID NO: 164774 - protein, 87 aa, Zea Mays
MYYLQDEFQLALFKTNRKDSMFADRVFDLFDTKHNGILEFEEFARALSVFHPSAPIDDKIDFAFKLYDLKQQGFIEKQEVPCTCLYS

SEQ ID NO: 164775 - protein, 148 aa, Zea Mays
MVDFVRRLASALLKCCDLDIPNRPKGLEDPERLARETVFNVNEIEALYELFKKISSAVVDDGLINKEEFQLALFKTNRKDSMFADRVFDLFDTKHNGILEFEEFARALSVFHPSAPIDFKIDFAFKLYDLKQQGFIEKQEVPCTCLYS

SEQ ID NO: 164776 - protein, 67 aa, Zea Mays
MSPDVLVARGVPCCRLVLYPGEFVVTFPRAYHIGFSHGCKEGVHRLRHASTSADHAYLAPPATACKH

SEQ ID NO: 164777 - protein, 332 aa, Zea Mays
MSSDGRLRRALAAFGGDVWDLVDAALAAAARDSPGDLRARRDGIVQRLYAGAARCRNCDADATPAPAQPRKANDAVAAAASPAAAASAFPASPEQEVDADGLDDVDDAADAGMESKILAIRDFLEDPDQDTDIGRHVNGLRKHPSSEVRQLVKLLVRKWKEIVDDWVRLHNSCGDGSGSIISDGDSPDKVQSKYHQNTHASDFKYPPSPQRHNVLSSERSSNHNLVESTMEKRRTSPAPAYNNTKQNNSNNYSSISSSAPARAIREQKNTLLDSEKLDSARKRLQENYQEAQNAKKQRTIQVMDIHDIPKPKNRNTFVRKSGSSAGFPAKHR

SEQ ID NO: 164778 - protein, 264 aa, Zea Mays
MNSENLSRSSKMYIGKLRSNLLGTKFAIYDTQPPCNAAEPGKTSRRFYSRKVSPKVSSSTYNIAQVSYELNVLGTRGPRRMNCVMHSIPTSCLEAGGTVPSQLDSILARSTDESFGSISFSKSSVVDRSMRFSSSRFSDISMSSSRRIGDTASGDNDECKERPLILRNKAPRWHEQLQCWCLNFRGRVTVASVKNFQLVAATQPAAGAPTPSQATPVPPEHEKVILQFGKVAKDMFTMDYRYPLSAFQAFAICLSSFDTKLACE

SEQ ID NO: 164779 - protein, 250 aa, Zea Mays
MSFRSIVRDVRDGFGSLSRRGFEVKFLGHRRGRSHGAVHELRDPAPVIQSSCWANLPPELLRDVIERLEASEATWPNRKSVVSCAAVCRTWREICKEIVKNPEFSGKITFPVSLKQPGPRDVTIQCFIKRDKSTQTYYLYLCLSTAVLVESGKFLLCAKRTSRPTCTEYTIFMNSENLSRSSKMYIGKLRSNLLGTKFAIYDTQPPCNAAEPGKTSRRFYSRKVSPKQLKILRHLNEQQPQDWRHGIGRQ

SEQ ID NO: 164780 - protein, 234 aa, Zea Mays
MSFRSIVRDVRDGFGSLSRRGFEVKFLGHRRGRSHGAVHELRDPAPVIQSSCWANLPPELLRDVIERLEASEATWPNRKSVVSCAAVCRTWREICKEIVKNPEFSGKITFPVSLKQPGPRDVTIQCFIKRDKSTQTYYLYLCLSTAVLVESGKFLLCAKRTSRPTCTEYTIFMNSENLSRSSKMYIGKLSGENYLTESPGREFEATSSHLRGEGLPWFIPSPDSTHVGASGTGS

SEQ ID NO: 164781 - protein, 75 aa, Zea Mays
MKLYCCLIPYKISEMLASHHLFSLVFFPSYSSLLAPYRLLLALIIEHSTAIRLTSATFVRYDFNTSGCGILSQAC

SEQ ID NO: 164782 - protein, 442 aa, Zea Mays
MEGNNLPSGSLMQGTPYSNVDLQHHKHMQMPAPSSGNQAFNHSQVPGNFPICLNQVTDSDQLPEFQFGEHGKVNHHHHPHHHKQHATNSMSDDEEHGVHEDATDSQIGKGKKGSTWHRMKWTDSMVRLLITAASYTGEDPGADLGGGRRSCAMMQKKGKWKAISKVMGERGCLVSPQQCEDKFNDLNKRYKRLTDILGRGTTCRVVANPELLDGMANLSDKMKDAARKILSSKHLFYEEMCSYHNNNWFSLPEDPALQRSLQLALKCKDEHDARKRASGDADEDDQSADTDYEEENDDEHPITHANKGTLLTRKRLRYMPADMEDVGFGNSSSSHDCSWRSDPHSIAVDINKASPDGTNLASVQKDLATQSAEIEKQRMEIEVEALELAKQRLKWEAFSKKKDRELEKMRLENEQMKIENKRLELEELGIHNYSRQSSMCCL

SEQ ID NO: 164783 - protein, 762 aa, Zea Mays
MDSKSFNYATNPYTYLGIWFNKVPKLTPLWSANGESPVMDPASPELAIAGDGNLVILDQATRSVIWSTHANTTTNDTVAVLQNNGNLVLRSSSNSSTVFWQSFDYPTDTFFAGAKIGWDKVTGLNRRLVSRKNLIDQAPGLYTGEIQKNGVGHLVWNSTVEIESTGLWNGQYFSSAPEMIGNTVSITTFEYVNNDKEVYFTWNLQDETAIVLSQLGVDGQGMVSLWIDKDWVVMYKQPVLQCDAYATCGPFTVCDEGENEGPICNCMKGFSVSSPRDWELGDRRDGCTRNTPLHCGRSRNTDKFYAPQNVMLPQDAMKMQAATSDEDDCSRACLGNCSCTGYSYGEGGCSVWHGKLTNVKKQQPDGNGETLYLRLAAKEVPGVPRKNSRIFRFGAAIIGASAAAVAALMILGLMMTWRRKGKLFTRTVGDAQVGIGITTFRYVDLQHATKNFSEKLGGGSFGSVFKGYLSDSLALAVKRLDGANQGEKQFRAEVSSVGIIQHINLVKLIGFCCQGDQRLLVYEYMPNHSLDAHLFKVGSDTVLEWNLRYQIAIGVARGLAYLHTGCRDCIIHCDIKPENILLDASFVPKIADFGMAKVLGREFSDAITTMRGTIGYLAPEWISGEAVTSKVDVYSYGSVLFEIVSGRRNSSQEYSKDGDYSAFFPVQVARKLLSGDIGSLVDASLHGNVNLEEVERVCKVACWCIQDSEFDRPTMTEVVQFLEGVSELHMPPVPRLLDAITGGATNTKIYSMLSVEGSPTSV

SEQ ID NO: 164784 - protein, 638 aa, Zea Mays
MGSLPNAEESPFGLESLFWQESIHESVEYGAPASATTHTENGFGESKGCHVKSALENTHVSEPFSHHDTEENISKIGGCMHTSQQDNGMEDAIENPLISLSTPGCKHEGALSEEAVHTMKDYAGTCSSNPRVPMQLHDDLAFPGPEKSGDESVNIEVKVHHGSNLSQLGSTDLLDDTELLHQGHNYKDRSNEDMLEQAASEPCTNGDDIVEAAAATKCLESGAMLVPSEERSNLNDRQLTPKLESPDIMESGLNCDKDARNTLDNGSVVAVAGKRTPSGSGHYEHNVYQVSGICATSEAAPVGVVETGIAVETSSLVDDQPNPVLDGDEVEKHSLNCEADTGRILGTGSVTSNTTLVPKDGHTICCQELELPNGLSSFLFPEESGICQYASVSGSGPCLQHVNESTSTQATYNIETLNQQHHEEYDQTARGILASSFPEAVGIEQSGLAPAAEAPVLAVPDGQPNSKLEGNEVDEHSCSYDAEFLNREASNLHKDLFSEDSHRSHLPSLRSPQRSAYFHNGNDSGSVDGLRAKRQSFKVSSSIKGSYVAKTSVPRPKPGDSLSQSAIALRGVRKNTTAVEVGGHPVSLKPNAVRSVAKDPSSSRGPPRDSLSQSAIALPKHRKDATAVKSKTNNKPWL

SEQ ID NO: 164785 - protein, 590 aa, Zea Mays
MGSVSIIYKHLNNLLYTIAFELMFIYSNDVPDAIENPLISLSTPGCKHEGALSEEAVHTMKDYAGTCSSNPRVPMQLHDDLAFPGPEKSGDESVNIEVKVHHGSNLSQLGSTDLLDDTELLHQGHNYKDRSNEDMLEQAASEPCTNGDDIVEAAAATKCLESGAMLVPSEERSNLNDRQLTPKLESPDIMESGLNCDKDARNTLDNGSVVAVAGKRTPSGSGHYEHNVYQVSGICATSEAAPVGVVETGIAVETSSLVDDQPNPVLDGDEVEKHSLNCEADTGRILGTGSVTSNTTLVPKDGHTICCQELELPNGLSSFLFPEESGICQYASVSGSGPCLQHVNESTSTQATYNIETLNQQHHEEYDQTARGILASSFPEAVGIEQSGLAPAAEAPVLAVPDGQPNSKLEGNEVDEHSCSYDAEFLNREASNLHKDLFSEDSHRSHLPSLRSPQRSAYFHNGNDSGSVGVCQSSRRGGVDGLRAKRQSFKVSSSIKGSYVAKTSVPRPKPGDSLSQSAIALRGVRKNTTAVEVGGHPVSLKPNAVRSVAKDPSSSRGPPRDSLSQSAIALPKHRKDATAVKSKTNNKPWL

SEQ ID NO: 164786 - protein, 1033 aa, Zea Mays
MSPTVVENKRRKNGDAQTNVELPTVSDVPRNDAPVTRSLRNRVVQVNNSVVDANKPATKEPVRGLRRRSVVSELHEKEKDVEKQLIVKQPVRRSSRKSVLPDMLENNIQSGKSQDNEKEQKLKEPIRRSRRSVATVLLEEQNSGLHEEKLSKLTMRRSTRKSVALNGVEKTSMDHTEIVVQSETLKGRSSKRRRTIDPVEMMPVKEANDDMIIREATIDTHKATHEYNKSTSRIQESCQSIHEVVPGSESGDNAKENLDKSKQPQEHHDIQAVDSHLSETRSGELDQSSCIAGLVPHNCVASDDKALISGDRVEQSPVSGEGRVGLEANAIESGEKNLTGIMSTALYTKSLQHDIDIVAEETAKGDLEKPSLCSLAQKCKHQCGLLEEIVLPSRNMGSLPNAEESPFGLESLFWQESIHESVEYGAPASATTHTENGFGESKGCHVKSALENTHVSEPFSHHDTEENISKIGGCMHTSQQDNGMEDAIENPLISLSTPGCKHEGALSEEAVHTMKDYAGTCSSNPRVPMQLHDDLAFPGPEKSGDESVNIEVKVHHGSNLSQLGSTDLLDDTELLHQGHNYKDRSNEDMLEQAASEPCTNGDDIVEAAAATKCLESGAMLVPSEERSNLNDRQLTPKLESPDIMESGLNCDKDARNTLDNGSVVAVAGKRTPSGSGHYEHNVYQVSGICATSEAAPVGVVETGIAVETSSLVDDQPNPVLDGDEVEKHSLNCEADTGRILGTGSVTSNTTLVPKDGHTICCQELELPNGLSSFLFPEESGICQYASVSGSGPCLQHVNESTSTQATYNIETLNQQHHEEYDQTARGILASSFPEAVGIEQSGLAPAAEAPVLAVPDGQPNSKLEGNEVDEHSCSYDAEFLNREASNLHKDLFSEDSHRSHLPSLRSPQRSAYFHNGNDSGSVDGLRAKRQSFKVSSSIKGSYVAKTSVPRPKPGDSLSQSAIALRGVRKNTTAVEVGGHPVSLKPNAVRSVAKDPSSSRGPPRDSLSQSAIALPKHRKDATAVKSKTNNKPWL

SEQ ID NO: 164787 - protein, 520 aa, Zea Mays
MKDYAGTCSSNPRVPMQLHDDLAFPGPEKSGDESVNIEVKVHHGSNLSQLGSTDLLDDTELLHQGHNYKDRSNEDMLEQAASEPCTNGDDIVEAAAATKCLESGAMLVPSEERSNLNDRQLTPKLESPDIMESGLNCDKDARNTLDNGSVVAVAGKRTPSGSGHYEHNVYQVSGICATSEAAPVGVVETGIAVETSSLVDDQPNPVLDGDEVEKHSLNCEADTGRILGTGSVTSNTTLVPKDGHTICCQELELPNGLSSFLFPEESGICQYASVSGSGPCLQHVNESTSTQATYNIETLNQQHHEEYDQTARGILASSFPEAVGIEQSGLAPAAEAPVLAVPDGQPNSKLEGNEVDEHSCSYDAEFLNREASNLHKDLFSEDSHRSHLPSLRSPQRSAYFHNGNDSGSVDGLRAKRQSFKVSSSIKGSYVAKTSVPRPKPGDSLSQSAIALRGVRKNTTAVEVGGHPVSLKPNAVRSVAKDPSSSRGPPRDSLSQSAIALPKHRKDATAVKSKTNNKPWL

SEQ ID NO: 164788 - protein, 649 aa, Zea Mays
MGSLPNAEESPFGLESLFWQESIHESVEYGAPASATTHTENGFGESKGCHVKSALENTHVSEPFSHHDTEENISKIGGCMHTSQQDNGMEDAIENPLISLSTPGCKHEGALSEEAVHTMKDYAGTCSSNPRVPMQLHDDLAFPGPEKSGDESVNIEVKVHHGSNLSQLGSTDLLDDTELLHQGHNYKDRSNEDMLEQAASEPCTNGDDIVEAAAATKCLESGAMLVPSEERSNLNDRQLTPKLESPDIMESGLNCDKDARNTLDNGSVVAVAGKRTPSGSGHYEHNVYQVSGICATSEAAPVGVVETGIAVETSSLVDDQPNPVLDGDEVEKHSLNCEADTGRILGTGSVTSNTTLVPKDGHTICCQELELPNGLSSFLFPEESGICQYASVSGSGPCLQHVNESTSTQATYNIETLNQQHHEEYDQTARGILASSFPEAVGIEQSGLAPAAEAPVLAVPDGQPNSKLEGNEVDEHSCSYDAEFLNREASNLHKDLFSEDSHRSHLPSLRSPQRSAYFHNGNDSGSVGVCQSSRRGGVDGLRAKRQSFKVSSSIKGSYVAKTSVPRPKPGDSLSQSAIALRGVRKNTTAVEVGGHPVSLKPNAVRSVAKDPSSSRGPPRDSLSQSAIALPKHRKDATAVKSKTNNKPWL

SEQ ID NO: 164789 - protein, 1044 aa, Zea Mays
MSPTVVENKRRKNGDAQTNVELPTVSDVPRNDAPVTRSLRNRVVQVNNSVVDANKPATKEPVRGLRRRSVVSELHEKEKDVEKQLIVKQPVRRSSRKSVLPDMLENNIQSGKSQDNEKEQKLKEPIRRSRRSVATVLLEEQNSGLHEEKLSKLTMRRSTRKSVALNGVEKTSMDHTEIVVQSETLKGRSSKRRRTIDPVEMMPVKEANDDMIIREATIDTHKATHEYNKSTSRIQESCQSIHEVVPGSESGDNAKENLDKSKQPQEHHDIQAVDSHLSETRSGELDQSSCIAGLVPHNCVASDDKALISGDRVEQSPVSGEGRVGLEANAIESGEKNLTGIMSTALYTKSLQHDIDIVAEETAKGDLEKPSLCSLAQKCKHQCGLLEEIVLPSRNMGSLPNAEESPFGLESLFWQESIHESVEYGAPASATTHTENGFGESKGCHVKSALENTHVSEPFSHHDTEENISKIGGCMHTSQQDNGMEDAIENPLISLSTPGCKHEGALSEEAVHTMKDYAGTCSSNPRVPMQLHDDLAFPGPEKSGDESVNIEVKVHHGSNLSQLGSTDLLDDTELLHQGHNYKDRSNEDMLEQAASEPCTNGDDIVEAAAATKCLESGAMLVPSEERSNLNDRQLTPKLESPDIMESGLNCDKDARNTLDNGSVVAVAGKRTPSGSGHYEHNVYQVSGICATSEAAPVGVVETGIAVETSSLVDDQPNPVLDGDEVEKHSLNCEADTGRILGTGSVTSNTTLVPKDGHTICCQELELPNGLSSFLFPEESGICQYASVSGSGPCLQHVNESTSTQATYNIETLNQQHHEEYDQTARGILASSFPEAVGIEQSGLAPAAEAPVLAVPDGQPNSKLEGNEVDEHSCSYDAEFLNREASNLHKDLFSEDSHRSHLPSLRSPQRSAYFHNGNDSGSVGVCQSSRRGGVDGLRAKRQSFKVSSSIKGSYVAKTSVPRPKPGDSLSQSAIALRGVRKNTTAVEVGGHPVSLKPNAVRSVAKDPSSSRGPPRDSLSQSAIALPKHRKDATAVKSKTNNKPWL

SEQ ID NO: 164790 - protein, 335 aa, Zea Mays
MSPTVVENKRRKNGDAQTNVELPTVSDVPRNDAPVTRSLRNRVVQVNNSVVDANKPATKEPVRGLRRRSVVSELHEKEKDVEKQLIVKQPVRRSSRKSVLPDMLENNIQSGKSQDNEKEQKLKEPIRRSRRSVATVLLEEQNSGLHEEKLSKLTMRRSTRKSVALNGVEKTSMDHTEIVVQSETLKGRSSKRRRTIDPVEMMPVKEANDDMIIREATIDTHKATHEYNKSTSRIQESCQSIHEVVPGSESGDNAKENLDKSKQPQEHHDIQAVDSHLSETRSGELDQSSCIAGLVPHNCVASDDKALISGGEASMCANGMTVVSLISLHCQICRI

SEQ ID NO: 164791 - protein, 98 aa, Zea Mays
MDRVGLQAFCKRHGLSARGSNADLIARLDAALGRAAGAEEAAAGVAARKACVRQTGGDADETKKVTFVEVGGDVPVKLSRRNSLGAHVPVRRSRRNSL

SEQ ID NO: 164792 - protein, 209 aa, Zea Mays
MLALRSTRRRRQPRLRSMVEEVVDISNWEKKGLQLFKVCGKKRKLQSFRDEEYYISSVPQNHHLEAGLSVRDNEGFVENRLDAAVLDLVDDEASGMQAQKTRYHWMKVISQAMFGSEGRRPESKNKVTQYGLDMTEQQYLEHSIPWIAANDAAWRALCHYWASPPPIPTSPSTEHQTPPATLPTHEQEDGLDFVETLFNSGGIDHHSSL

SEQ ID NO: 164793 - protein, 165 aa, Zea Mays
MLALRSTRRRRQPRLRSMHLEAGLSVRDNEGFVENRLDAAVLDLVDDEASGMQAQKTRYHWMKVISQAMFGSEGRRPESKNKVTQYGLDMTEQQYLEHSIPWIAANDAAWRALCHYWASPPPIPTSPSTEHQTPPATLPTHEQEDGLDFVETLFNSGGIDHHSSL

SEQ ID NO: 164794 - protein, 187 aa, Zea Mays
MVEEVVDISNWEKKEVCGKKRKLQSFRDEEYYISSVPQNHHLEAGLSVRDNEGFVENRLDAAVLDLVDDEASGMQAQKTRYHWMKVISQAMFGSEGRRPESKNKVTQYGLDMTEQQYLEHSIPWIAANDAAWRALCHYWASPPPIPTSPSTEHQTPPATLPTHEQEDGLDFVETLFNSGGIDHHSSL

SEQ ID NO: 164795 - protein, 136 aa, Zea Mays
MKSEYGYVRKVHASSPLPPLPLVLLAPTSRCSVSHNRWLSPNDSLDNAKVTEAIGIRLPDIGRAIRGDIALPIFGFVIGLTGGISGRDLKEHLGRLQQSSDSRRAAMNEMMRAAEVAADENMSTMHLINHRWGFFL

SEQ ID NO: 164796 - protein, 52 aa, Zea Mays
MFARFMPPPPSHPSRSYCLRLHPAAQFRTIAGARGLHGIVFESSAYGVLGSS

SEQ ID NO: 164797 - protein, 219 aa, Zea Mays
MAFFISCDPDDVMRQAEESTLRYQRGAPLSALDGVLVGVKDEIDCLPYPTTGGTRWLGAARRCEADAACVAQLRACGAVLAGKANMHELGAGTSGINPHHGSTRNPYNASTIAGGSSSGSAAIVCAGLCPVALGVDGGGSVRMPAALCGVVGFKPTAGRLSNAGVLPLNWTVGMPGILAGTVEDALIASVILIDRHARLVSFFLSSAVITESHRFHLKF

SEQ ID NO: 164798 - protein, 458 aa, Zea Mays
MGLFSSPAKVYKPAADVDLGPGSDELYISPNVKAPRVAGLLVKIFVWILEMPIVGQIVLYILKKDNLINKLVSDADIPEPPLFTASHSWEDTPEQSVRLTKPDLSAAERVQEAVGCLPARLEAALAADARGIRRWTVRDFSDAYRSGEVTPVQVAARFLAAVRESSGPGVSNMAFFISCDPDDVMRQAEESTLRYQRGAPLSALDGVLVGVKDEIDCLPYPTTGGTRWLGAARRCEADAACVAQLRACGAVLAGKANMHELGAGTSGINPHHGSTRNPYNASTIAGGSSSGSAAIVCAGLCPVALGVDGGGSVRMPAALCGVVGFKPTAGRLSNAGVLPLNWTVGMPGILAGTVEDALIAYSAIVDQSQPSYLRPELNLPQLGSTLSIGNIKLARYGKWFNDSAEDIRSCCDKALQALRANYGWQVRPAAARGWLWLWLIQFDHLMECLRACTCRPWT

SEQ ID NO: 164799 - protein, 605 aa, Zea Mays
MGLFSSPAKVYKPAADVDLGPGSDELYISPNVKAPRVAGLLVKIFVWILEMPIVGQIVLYILKKDNLINKLVSDADIPEPPLFTASHSWEDTPEQSVRLTKPDLSAAERVQEAVGCLPARLEAALAADARGIRRWTVRDFSDAYRSGEVTPVQVAARFLAAVRESSGPGVSNMAFFISCDPDDVMRQAEESTLRYQRGAPLSALDGVLVGVKDEIDCLPYPTTGGTRWLGAARRCEADAACVAQLRACGAVLAGKANMHELGAGTSGINPHHGSTRNPYNASTIAGGSSSGSAAIVCAGLCPVALGVDGGGSVRMPAALCGVVGFKPTAGRLSNAGVLPLNWTVGMPGILAGTVEDALIAYSAIVDQSQPSYLRPELNLPQLGSTLSIGNIKLARYGKWFNDSAEDIRSCCDKALQALRANYGWQTVDVTIPEVEEMRLAHYVTIGSECTTSLANKRSEIGWDARVALSVYGSFSSRAYLNAQRLRNRQMYFHKQIFKAADVIVSPMTGVTAYPLQDDALSTGELDYINGAALVRYSIAGNFLGLPAITVTVGYDRGGLPIGLQFIGRPWAEATLLHVAFATQQACAKGYKKPPVFYDLLGKQQD

SEQ ID NO: 164800 - protein, 925 aa, Zea Mays
MVMDRAGWLWRRKSSDKSPGGSDSSLSVSSHSEQCSDDQGQYQSPEAFSRSKYDYSQETGVARSLNGKLAAGVNMNNFNPEHGQSFEQHISSNVGDEEIKETLESLNYKLSAALSTIRAKEDLVKQHAKVTEEAVAGWEQAEAEVTTLKGLLEASCRKNASLQDQVSHMDEALKECVRQLRLAREEQEDKVREVVSNSLVPQSENPELQNHIAELKKRLEMTRLEASSSMILQHDLHERLRAIERENLDLKAKHQAIEKENIDLKAKLLVQSKDLKILMLERDLSNQVAETASKQHLESVKKIARVEAECRRLQHLTRKTTLINNSRSTQNNCCMESLTDSQSDHGEHMVGVDNDLQNSDSWALALIAELDQFKNGKDGSRNIVNNPVEIDIMDDFLEMERLAALPESDGTSSNFEMETDSDKAVTRNSSLKVKNEELQNKVANLQEKFEAIACEKRELELALVEVRDQLEISCDALVVAKNRLVEMQMQLDSANDSKLSALDDVERLDSERKALELQLESKSVEVEELLIAVASLEENAEQKELESQLELMSAQATELRLTVASLEERIQAERDLSVQQKQNAEAMLNAKEELEAQLCSANTEMGKLRDIIKALENEVKKERALCEELTAQLQIKVEAAVNAVKESLEAQLCSANTEAGKLRDVVKALQDEVEKEKALREELAANLEVKTRAARTAEVVKESLEAQLSSAHAEMHKLEEITKQLQNEVEKEKEFSAQLEMKIEVERARSIESAKESLEEQLLLVNSEAAKLHDMVSALEHDVEKEKFFSAELQMQLEALEVVKKVLESEAESAHQDAKILKQKVESLEAKLEEQMSSADEFTETLQSERMVIEHKLKTADGEILKLTNKVSLLHREIEQERLLSEEYEQKCQKLEAQMSRDSRDAKLWRLANSNGDLKVKKSKC

SEQ ID NO: 164801 - protein, 199 aa, Zea Mays
MAFLSPSVHGARFSLAPGQNFLRREACSLRPSPMALGRPAVSSSLRSDFLCSMANSPQPPARIPASARAGARPSAISMPELVLQVAPWRSASPPCPSAIGSPSSFNLAVGLVSVQAAIAPCQLSIFDPRLDVILPCNACLVLDKTPKSGPSSFSRSSSWFRYASWSRDAKVKSQVFPKRMQRVDISARRCHQSGQPEDG

SEQ ID NO: 164802 - protein, 133 aa, Zea Mays
MMSRHTAHDTQPTPDLSSQASQLETQLGGTQVEEIHERQHHIRRVLETCPDEADIDTVHQGGDMTADDIEHNDNGPVFDQTPTSHVASQDETFKWTTHSGTAPLLTELDCVCSLWDLLCSKDIDPSRYILHKL

SEQ ID NO: 164803 - protein, 147 aa, Zea Mays
MALSMYPVCSTNDNGTPHWWDHLHCAMSHYKFVLAIENTKTESYVTEKLFYALEAGSVPIYFGAPNVWDFVPPNSIIDASKFSSLRKLASYVKTLANDPVAYAEYHAWRRCGALGNFGRAREMSLDTLPCRLCEVVSKRGGKGADAL

SEQ ID NO: 164804 - protein, 265 aa, Zea Mays
MEACPWRGAIITTFIVCYALTSFISGYVSGGLYSRSGGKNWIKAMVLTASLFPFLCFSIGFALNTIAIFYRSLAAIPFGTMVVMFVLWAFISFPLVLLGTVVGRNWSGAPNNPCRVKTIPRPIPEKKWYLTPSVISLMGGLLPFGSIFIEMYFVFTSFWNYKVYYVYGFMLLVFVILLIVTICVTIVGTYFLLNAENYHWQWTSFSSAASTALYVYLYSIYYYHVKTKMSGFFQTSFYFGYTLMFCLGLGILCGFVEVSGTIGML

SEQ ID NO: 164805 - protein, 586 aa, Zea Mays
MLPSSGSGWGRGRGRHLLLSRALALAALLALASASESDHKYKTEEPVKLWVNKVGPYNNPQETYNYYSLPFCQPSENPTHKWGGLGEVLGGNELIDSQLEIKFLKNVEKGFICTLELDAKKVQQFADAIESSYWFEFFIDDLPLWGFVGESDKNSENKHYLYTHKNILVKYNDNRIIHVNLTQESPKLLEDGKKLEMTYSVKWVATDVSFARRFEVYLDYPFFEHQIHWFSIFNSFMMVIFLTGLVSMILMRTLRNDYAKYAREDDDLESLERDVNEESGWKLVHGDVFRPPRSLMFLSALVGIGTQLAALILLVIVLAIVGMLYIGRGAIITTFIVCYALTSFISGYVSGGLYSRSGGKNWIKAMVLTASLFPFLCFSIGFALNTIAIFYRSLAAIPFGTMVVMFVLWAFISFPLVLLGTVVGRNWSGAPNNPCRVKTIPRPIPEKKWYLTPSVISLMGGLLPFGSIFIEMYFVFTSFWNYKVYYVYGFMLLVFVILLIVTICVTIVGTYFLLNAENYHWQWTSFSSAASTALYVYLYSIYYYHVKTKMSGFFQTSFYFGYTLMFCLGLGILCGFVEVSGTIGML

SEQ ID NO: 164806 - protein, 323 aa, Zea Mays
MLPSSGSGWGRGRGRHLLLSRALALAALLALASASESDHKYKTEEPVKLWVNKVGPYNNPQETYNYYSLPFCQPSENPTHKWGGLGEVLGGNELIDSQLEIKFLKNVEKGFICTLELDAKKVQQFADAIESSYWFEFFIDDLPLWGFVGESDKNSENKHYLYTHKNILVKYNDNRIIHVNLTQESPKLLEDGKKLEMTYSVKWVATDVSFARRFEVYLDYPFFEHQIHWFSIFNSFMMVIFLTGLVSMILMRTLRNDYAKYAREDDDLESLERDVNEESGWKLVHGDVFRPPRSLMFLSALARGYHHNLHCVLCSYIVYFWIC

SEQ ID NO: 164807 - protein, 67 aa, Zea Mays
MLSIKRLWMLILMVVAELGHDPHAPRSFSLTTLPPSISRKATSPPSAIRSSAKPLQESFATGNCSRR

SEQ ID NO: 164808 - protein, 523 aa, Zea Mays
MATPFPLEADEGEARELLYEAYNELHALASELGGAAAAPAVVVVGHQTDGKSALVEALMGFQFNHVGGGTKTRRPVALHLRFNPRCDEPQCRLLSATGDAEEHDEAGVAARPMPLADIQAYIEAENLRLENDPCQFSEKEIIIKVEYKHSPNLTIIDTPGLILPAPGRKNRVLQSQASAVESLVRAKIQHKETIILCLEDCSDWSNATTRRVVMQVDPDLARTVLVSTKLDTKIPQFARPSDVEVFLHPPNCVLDVSLLGDSPFFTSVPSGRVGSCHEAVFRSNGEFKKAILSRELEDIASIEDKLGRSLTTMEKDRIGVGNLRLYLEELLQKRYIKSVPLIIPLLEKQHRNTTSKLREISHELSDLDETKLKEKAQLFHDTFLTKLSLLLKGMVVAPPDKFGETLVNERINGGTFTGSENFQLPNKMMPNGGMRLYGGAQYHRAMAEFRLVVGSTRCPPITRDEIVNACGVEDIHDGTNYSRKHSRGLLNPLSNHVVKGVWKIWRVPLVMSLGPFTTRTVLD

SEQ ID NO: 164809 - protein, 545 aa, Zea Mays
MQVDPDLARTVLVSTKLDTKIPQFARPSDVEVFLHPPNCVLDVSLLGDSPFFTSVPSGRVGSCHEAVFRSNGEFKKAILSRELEDIASIEDKLGRSLTTMEKDRIGVGNLRLYLEELLQKRYIKSVPLIIPLLEKQHRNTTSKLREISHELSDLDETKLKEKAQLFHDTFLTKLSLLLKGMVVAPPDKFGETLVNERINGGTFTGSENFQLPNKMMPNGGMRLYGGAQYHRAMAEFRLVVGSTRCPPITRDEIVNACGVEDIHDGTNYSRTACVIAVAKARDTFEPFLDQLGFRLLYILKRLIPISVYLLEKDGEHFSSHEVLIRRVQEAFKRFVESTEQSCRQRCMEDLESTTRYVTWSLHNKNRAGLRHFLDSFVAPEQLSVNTLNERFSGLNDNKQDKAKGDSKSNHSPDTNSSTAMPETRLVDLLDSTLWNRRLVPSSERLVYALVHQIFHGIKEHFLVTTELKFNCFLLMPIVDKLPALLRQDLESAFEEELDSIFDVTQLRQSLGQKKRELEIELKRIKRLKEKFGEINKKLNSLQVRQ

SEQ ID NO: 164810 - protein, 558 aa, Zea Mays
MDRRAGAILVFLLVVLVWDVAAVAETEPGSVRLVQEAPHRKVVEDGAKAGRVPVSTVAWSTLAMAAATGLGAVPFFFMELEAQWAGLCNGLAAGVMLAASFDLVQEGQVYGSGSWVVFGILSGGIFIWLCKKFLEQYGEVSMLDIKGADASKVILVVGIMTLHSFGEGSGVGVSFAGSKGFSQGLLVTIAIAVHNIPEGLAVSMVLASRGVSPQKAMMWSIITSLPQKVLPFCTGFAAGCMIWIVIAEVLPDAFKEATPSQVASAGTLAVAFMETLSTVLLGFTDGNNVEDASGFLVSLVFGLGPLIGGIILVTFSLGFSMPHPLLTGVASGIAFRLAAWRPVQLLMTSKMGLFTTLFLLIGGSLAYHAATSSILRLFNRKRSSVNVIASSSGLSLSALTVQSLLACGAVFLHAYAEGLALGVAARKAYGLGRYMVLPASLHGLPRGAAAASCVYGATDSWRGALAAAALTGLAAPSAAISAILAKIDYDGLDYWMVIACGALIPSFGRVFRRSLRLDVRKSVVGLLVGVAFASVCLMSTRFICLHTPYCNSAPEAVT

SEQ ID NO: 164811 - protein, 277 aa, Zea Mays
MASHNGTKHLAPMEVSVEAGNGGGAEWLDDDGRPRRTGTFWTASAHIITAVIGSGVLSLAWAIAQLGWVAGPAAMLLFAFVTYYTATLLAECYRTGDPDTGKRNYTYMDAVRSNLGGAKVAFCGAIQYANLVGVAIGYTIASSISMQAVSRAGCFHKRGHAVPCKSSSNPYMILFGAVQILFSQIPDFDQIWWLSIVAAVMSFTYSAIGLSLGIAQTQTVGSREASPASASAPTSPPRRKCGTACRPSATSRSPTPSPTSSSRSKTRSRRRRRRSRR

SEQ ID NO: 164812 - protein, 168 aa, Zea Mays
MPTARRTRIPAFGEWNHHHHSNGGGAWAPAVMTPSFDFGHAITTPHKAPQTQGRRRGAADGVVHAAKLAAAAAAAEPHQGHTQTTRRSKVADSGAYAQAAAAARRSCFALAKPVDDDLYGVPPDMLYGKPPPPGARVRSTYALTLITSHDLFAVHFASGKNEKKCMLP

SEQ ID NO: 164813 - protein, 445 aa, Zea Mays
MTCRRKLVGAIAKAARATSPNLFTPRRPRLIRRASDTPKAALSSCCESSSSKRVVTTISNLPLHAPFPFLYLPYPAAPQWPASSTSSPRFYPRHPLSAIALLAESEEEIPVAQSQAASFSSSSPSPPPPQETAQEASPSPPPPPPSAPVAVSAPALPSPATQGGGRVVASPYAKKLAKDLGVDLFSVTGSGPGGRIVAKDVEAALAAPKKAAPVTAARPDVPLGSTVPFTTMQGAVSKNMVESLAVPTFRVGYTITTDALDQLYKKIKSKGVTMTALLAKATAMALVQHPVVNCSCRDGKSFTYNKSINIAVAVAIDGGLITPVLQDADKLDIYSLSRKWKELVDKARAKQLQPHEYNSGTFTLSNLGMFGVDRFDAILPPGTGAIMAVGASEPTVVGTKDGRIGIKSQMQVNVTADHRVIYGADLAAFLQTLAKIIEDPKDLTF

SEQ ID NO: 164814 - protein, 1285 aa, Zea Mays
MAAYLTTFERKRARTLATEPGSRLTMYLAQRLETARRRARPPLRRGHHRQTAAVTTSWRWLPLSLGAAAAARSAHVLGRAGVRRSRMVAGFRRTILFPMPRSPLPPTRGAGPSGANKYGAYRARLASLPCRFHLLVLQLDDDVADLRELVGRLASKASAEAMAEAYEDYSSERAELLFKTCQVVLKFYPCGPHGPAFDGGFSGFQLPIASLFLFVAHWLSRSHTEAAGGVVRHRSVNAGPTQTQEKGHQKHLNKIVSSLGVSLKSEPHSTKPMVVSEQTNKHGSHGRAHPALKILERGRNISSSSSFPSYSSRWRSAGIEEEEGKRRGRKSSGNPRTVRMTVVERRYGPCTSHGSFLLRLLLLPFFFFLCFIDVPPAGAAATTQSPPLDNTQKAIMNDVASLVNSGSANTRWNTAESNPCNWEGITCTSNTSSSAVTRIALSNYGLANSSIFAPLCRLGTLRYLDLSRNFLADLSAPFFASSSSSCSMKEGLQSLNLSTNRLASPLGELAGFPQLQVLDLSFNSFASRNLSAELGYFPKLRSFNTSSNDLNGDVPTSMVGSLEELVLSSNNLSGPIPLRLFEYENLTLLDLSQNNLTGAIPDNFTSLSKLETLLLSGNKLIGEIPSSLSNVTTLSRFAANQNGLTGPIHSWITKHIGMLDLSYNKLNGTIPSDFLSHQGLQSVDLTSNLLNGAIPATLSQSLYRLRLGGNQLGENIPGSVCDTMGLTYLELDDNQLTGVIPSELSKCKNLTLLNLASNRLHGLVPSITGELDKLVVLKLQNNTLTGQVPSTFSELKSLITLNLSKNSLSGAIPSGIFELPKLSNLYLQGNQFSGFIPFSISSSKDLIELNLGDNALTGELEILDLSHNALSGAVPSSLWSLQSLTLLDLSYNNLSGSIPRFGPSQTVDIVGNPGLVIVNGTGNNNDTPTTGKKKRHYLVVIIFTIAGTLVGLCVLALIIVMSLSKRVYRVEDEGLPAGESVPQIISGRLITMNSIHTSAVDFVKAIEAVSNHQNIFLKTRFCTYYKAVMPNGSTYSVKKLNSSDKIFQIGSQEKFSHEIEVLGKLTNSNVMVPLAYILTADCAYLIYEHAYNGTVSDLLHGGKSEVIDWPSRYSVALGVAQGLTFLHGCTQPVLLLDLSTRTIHLKSKNEPQIGDIELYKIIDPSRSTGSFSTIAGTVGYIPPEYAYTMRLTMAGNVYSFGVILLELLTGKKSVSNGTELAKWALSLSGRPDEREQILDTRVSGTSIAVHSQMLSVLNIALSCVAFSPDARPKMRNVLRMLFNAK

SEQ ID NO: 164815 - protein, 661 aa, Zea Mays
MLDLSYNKLNGTIPSDFLSHQGLQSVDLTSNLLNGAIPATLSQSLYRLRLGGNQLGENIPGSVCDTMGLTYLELDDNQLTGVIPSELSKCKNLTLLNLASNRLHGLVPSITGELDKLVVLKLQNNTLTGQVPSTFSELKSLITLNLSKNSLSGAIPSGIFELPKLSNLYLQGNQFSGFIPFSISSSKDLIELNLGDNALTGNIPTMPTTVTTSLLNLSHNLLDGSIPSNINSLGELEILDLSHNALSGAVPSSLWSLQSLTLLDLSYNNLSGSIPRFGPSQTVDIVGNPGLVIVNGTGNNNDTPTTGKKKRHYLVVIIFTIAGTLVGLCVLALIIVMSLSKRVYRVEDEGLPAGESVPQIISGRLITMNSIHTSAVDFVKAIEAVSNHQNIFLKTRFCTYYKAVMPNGSTYSVKKLNSSDKIFQIGSQEKFSHEIEVLGKLTNSNVMVPLAYILTADCAYLIYEHAYNGTVSDLLHGGKSEVIDWPSRYSVALGVAQGLTFLHGCTQPVLLLDLSTRTIHLKSKNEPQIGDIELYKIIDPSRSTGSFSTIAGTVGYIPPEYAYTMRLTMAGNVYSFGVILLELLTGKKSVSNGTELAKWALSLSGRPDEREQILDTRVSGTSIAVHSQMLSVLNIALSCVAFSPDARPKMRNVLRMLFNAK

SEQ ID NO: 164816 - protein, 1137 aa, Zea Mays
MAAYLTTFERKRARTLATEPGSRLTMYLAQRLETARRRARPPLRRGHHRQTAAVTTSWRWLPLSLGAAAAARSAHVLGRAGVRRSRMVAGFRRTILFPMPRSPLPPTRGAGPSGANKYGAYRARLASLPCRFHLLVLQLDDDVADLRELVGRLASKASAEAMAEAYEDYSSERAELLFKTCQVVLKFYPCGPHGPAFDGGFSGFQLPIASLFLFVAHWLSRSHTEAAGGVVRHRSVNAGPTQTQEKGHQKHLNKIVSSLGVSLKSEPHSTKPMVVSEQTNKHGSHGRAHPALKILERGRNISSSSSFPSYSSRWRSAGIEEEEGKRRGRKSSGNPRTVRMTVVERSRNLSAELGYFPKLRSFNTSSNDLNGDVPTSMVGSLEELVLSSNNLSGPIPLRLFEYENLTLLDLSQNNLTGAIPDNFTSLSKLETLLLSGNKLIGEIPSSLSNVTTLSRFAANQNGLTGPIHSWITKHIGMLDLSYNKLNGTIPSDFLSHQGLQSVDLTSNLLNGAIPATLSQSLYRLRLGGNQLGENIPGSVCDTMGLTYLELDDNQLTGVIPSELSKCKNLTLLNLASNRLHGLVPSITGELDKLVVLKLQNNTLTGQVPSTFSELKSLITLNLSKNSLSGAIPSGIFELPKLSNLYLQGNQFSGFIPFSISSSKDLIELNLGDNALTGNIPTMPTTVTTSLLNLSHNLLDGSIPSNINSLGELEILDLSHNALSGAVPSSLWSLQSLTLLDLSYNNLSGSIPRFGPSQTVDIVGNPGLVIVNGTGNNNDTPTTGKKKRHYLVVIIFTIAGTLVGLCVLALIIVMSLSKRVYRVEDEGLPAGESVPQIISGRLITMNSIHTSAVDFVKAIEAVSNHQNIFLKTRFCTYYKAVMPNGSTYSVKKLNSSDKIFQIGSQEKFSHEIEVLGKLTNSNVMVPLAYILTADCAYLIYEHAYNGTVSDLLHGGKSEVIDWPSRYSVALGVAQGLTFLHGCTQPVLLLDLSTRTIHLKSKNEPQIGDIELYKIIDPSRSTGSFSTIAGTVGYIPPEYAYTMRLTMAGNVYSFGVILLELLTGKKSVSNGTELAKWALSLSGRPDEREQILDTRVSGTSIAVHSQMLSVLNIALSCVAFSPDARPKMRNVLRMLFNAK

SEQ ID NO: 164817 - protein, 71 aa, Zea Mays
MAMAHRRVCLHQEGEREGGCLRLRRGALGAHDRQERQRRRRPWFPGGLGGASVPVRGEHRYRHLRRVRGVR

SEQ ID NO: 164818 - protein, 585 aa, Zea Mays
MAPRPWLSPLALPLGPSVALLVLACCCVAEASIVEHTFNVGNLSVSQLCQPPRVITAVNGQLPGPAIHAREGDTVVVHLVNQSPYNITIHWHGIFQRGTPWADGPAMVTQCPVKPGGNYTYRFNATAQEGTLWWHAHISFLRATVYGALVLRPRAGADAYPFPKPHAEETVVLGEWWNDNVYDLQQMAFLTGLPARSADAYTINGKPGDLYNCSDGNQTYRFQVRSNETYLLRIINAALNTPLFFKVANHSFTVVGADAAYTTPYETDVVVVAPGQTVDALMVAARAGGRYYMAASPYDSAIPQGPPFSDTTATAVVEYLGSDTDPTTPPTLPPRPEVNDTATAFRFLSNLTALVRPGQPTVPLSVDTRMFVTVGLGVSDCQPTQLLCNRSATVFSSSMNNASFVLPAPGKPSMLQAHYGGDGETAGVYTRDFPDRPPLVFDYTADASDTAALQYTAKSTRVRTLRFNQTVEMVLQNTRLIARESHPMHLHGFNFYVLAQGFGNYDEATATPRFNLVNPQERNTVAVPTGGWAVIRFLANNPGMWFMHCHFDNHLDLGLAMVFEVPDGPTPETSVPPPPADLPQC

SEQ ID NO: 164819 - protein, 776 aa, Zea Mays
MVIMIQCHRPLIACVLNLYMSRSYARLPNSGRRLVCPVTKMELSNTELNPSIALRNTIDEWMNRNEAAKLDVARKSLTSDSTESDILQALQYVDEICQRSRSNRQVVRRDGLIIMIADLLKNSSTKVRQAALGTLCSIAKDDNENKVEIAAGDNIRTIVKFLNHGQTQEKEQAVSLLFELSENKALSERIGSVSGAILILVGLSSSKVENLLIVDRAEKTLENLESCEKNVRQMAENGRLQPLLRLLLDGSPGMQLPMAAYLGELVLSNDVKVLVAQKAGSTLVNIMKKGNREAREAALKALNQISSYDVSAKILIEAGILPPLITDLFTVGSNQLPMRLKEVSATILANVVASGARFESIPLDHNRQTLVSEDIVHNLLHLISNTGPAIECKLLQVFVGLTDSSTSVQNIVDAIKSSGAIVSLIQFVEAPQREVRMNSIKLLNNISPYMGQELADAFRGNFSQLSSLVKVIVDNNGISEEQAAAAGLVADLPMGDSVLTRRLLQDGAFAAIISKVLRIRQGEIRGGRFVNPFLEGLVRIVSRITFVLDDDPDIIAVARDYNLASLFTDLLQMNGLDVVQIVSAVSLEKLSQQSKHLTKILPAPSPGLCFSIFPCLSQKTVATGVCRVHCGICSARESFCLLEGKAVEKLVACLDNNNEKVVEAALAALSTLLEDGVDIEQGVMVLCDAEGINPILAVLCENRNEALRQRAVWAVERILRTDEIAYEISGNQNVGTALVEAFRHGDSRTRQVAERALKHVDKLPNFSGIFSKMGAQ

SEQ ID NO: 164820 - protein, 292 aa, Zea Mays
MAEVQDGHYDSMSQATDSLRVEPIYESFLCPLTKQVMRDPVSIDSGVTFERNAILNYFNECLSSGRRLVCPVTKMELSNTELNPSIALRNTIDEWMNRNEAAKLDVARKSLTSDSTESDILQALQYVDEICQRSRSNRQVVRRDGLIIMIADLLKNSSTKVRQAALGTLCSIAKDDNENKVEIAAGDNIRTIVKFLNHGQTQEKEQAVSLLFELSENKALSERIGSVSGAILILVGLSSSKVENLLIVDRAEKTLENLESCEKNVRQMAENGRLQPLLRLLLDDQQNTPITV

SEQ ID NO: 164821 - protein, 126 aa, Zea Mays
MVSIYITFVRFHRPLNLHDSEPLSSYVNVDVDCLICMLLCPLVIASQCSSKIWADKPVSSLTYCSFDPLKLPLAIMIISAPIVCLQFSLKFLFIQKLGPMNLINSEHVMALRNKCSFYNLSFMFIS

SEQ ID NO: 164822 - protein, 86 aa, Zea Mays
MLVSRRCLYSLLHPASARRPLRIRPPLRQHDVNRDTPPPMRPRHASASASVHWLRGIDYGVEVWDYCLLHPNFYTLYYVQIWSLDS

SEQ ID NO: 164823 - protein, 100 aa, Zea Mays
MIPVAANDVAFSLHAVALTAFTVFQVFIYERGTQKVSKVCISISAIVWIAALVCLIIAWPKSDWLWLIDVFNSIQVGMTAIKYIPQAEEHNWLERWQYIT

SEQ ID NO: 164824 - protein, 363 aa, Zea Mays
MGFDDKGSLSSSENHRNMSYEVIDMKRGKLEPKEKVCEEPEKAIHFTKLDETNIATQKGSKDKRKETFAEGNTQEECKYYSTPGGCKFGKTCKYLHREGNGGKTEVEKAELNFLGLPLRPGEKECPYYMRTGSCKFATNCKFHHPDPTNASSKEPGLEHENGDVPLQNVQGSSQPSLQMWPDQRALNEQHVPFLAPAPSYSGGMVPPQGMYPSSDWSGYHQVPLNPYYPPGVPFPHFPAAHMNHPMYKAADIPGHQPPPSDEYPERPGQPECQHFVKSGFCKYRMKCRYHHPRSRQSAPPPAGLSPIGLPIKPDQPVCTYYGRYGFCKYGPACMFNHPFNFGPPVPAAGPPLPGQYPTHGNFA

SEQ ID NO: 164825 - protein, 346 aa, Zea Mays
MVIDMKRGKLEPKEKVCEEPEKAIHFTKLDETNIATQKVLKGSKDKRKETFAEGNTQEECKYYSTPGGCKFGKTCKYLHREGNGGKTEVEKAELNFLGLPLRPGEKECPYYMRTGSCKFATNCKFHHPDPTNASSKEPGLEHENGDVPLQNVQGSSQPSLQMWPDQRALNEQHVPFLAPAPSYSGGMVPPQGMYPSSDWSGYHQVPLNPYYPPGVPFPHFPAAHMNHPMYKAADIPGHQPPPSDEYPERPGQPECQHFVKSGFCKYRMKCRYHHPRSRQSAPPPAGLSPIGLPIKPDQPVCTYYGRYGFCKYGPACMFNHPFNFGPPVPAAGPPLPGQYPTHGNFA

SEQ ID NO: 164826 - protein, 366 aa, Zea Mays
MGFDDKGSLSSSENHRNMSYEVIDMKRGKLEPKEKVCEEPEKAIHFTKLDETNIATQKVLKGSKDKRKETFAEGNTQEECKYYSTPGGCKFGKTCKYLHREGNGGKTEVEKAELNFLGLPLRPGEKECPYYMRTGSCKFATNCKFHHPDPTNASSKEPGLEHENGDVPLQNVQGSSQPSLQMWPDQRALNEQHVPFLAPAPSYSGGMVPPQGMYPSSDWSGYHQVPLNPYYPPGVPFPHFPAAHMNHPMYKAADIPGHQPPPSDEYPERPGQPECQHFVKSGFCKYRMKCRYHHPRSRQSAPPPAGLSPIGLPIKPDQPVCTYYGRYGFCKYGPACMFNHPFNFGPPVPAAGPPLPGQYPTHGNFA

SEQ ID NO: 164827 - protein, 343 aa, Zea Mays
MVIDMKRGKLEPKEKVCEEPEKAIHFTKLDETNIATQKGSKDKRKETFAEGNTQEECKYYSTPGGCKFGKTCKYLHREGNGGKTEVEKAELNFLGLPLRPGEKECPYYMRTGSCKFATNCKFHHPDPTNASSKEPGLEHENGDVPLQNVQGSSQPSLQMWPDQRALNEQHVPFLAPAPSYSGGMVPPQGMYPSSDWSGYHQVPLNPYYPPGVPFPHFPAAHMNHPMYKAADIPGHQPPPSDEYPERPGQPECQHFVKSGFCKYRMKCRYHHPRSRQSAPPPAGLSPIGLPIKPDQPVCTYYGRYGFCKYGPACMFNHPFNFGPPVPAAGPPLPGQYPTHGNFA

SEQ ID NO: 164828 - protein, 377 aa, Zea Mays
MPIALLSLLTLKDHTSSTFVELHFLRLPICFYPLQVIDMKRGKLEPKEKVCEEPEKAIHFTKLDETNIATQKGSKDKRKETFAEGNTQEECKYYSTPGGCKFGKTCKYLHREGNGGKTEVEKAELNFLGLPLRPGEKECPYYMRTGSCKFATNCKFHHPDPTNASSKEPGLEHENGDVPLQNVQGSSQPSLQMWPDQRALNEQHVPFLAPAPSYSGGMVPPQGMYPSSDWSGYHQVPLNPYYPPGVPFPHFPAAHMNHPMYKAADIPGHQPPPSDEYPERPGQPECQHFVKSGFCKYRMKCRYHHPRSRQSAPPPAGLSPIGLPIKPDQPVCTYYGRYGFCKYGPACMFNHPFNFGPPVPAAGPPLPGQYPTHGNFA

SEQ ID NO: 164829 - protein, 547 aa, Zea Mays
MADADAKSQPPDAAASPDASISSPSSLGGGGGDAADADAIEKQLAGLGIAVAGGFPEPSGWDDGPVPVPIPADVLVGGDEGAGEKPRAPAPAPTGAVDVKVRFPRRPGEPDCSYYLKFGTCRFGMKCKFNHPARKKKTSRVRGVGSNGSGSNSSSNKASSPDDDQAPKEEYEGLVPDISDSMGFDDKGSLSSSENHRNMSYEVIDMKRGKLEPKEKVCEEPEKAIHFTKLDETNIATQKVLKGSKDKRKETFAEGNTQEECKYYSTPGGCKFGKTCKYLHREGNGGKTEVEKAELNFLGLPLRPGEKECPYYMRTGSCKFATNCKFHHPDPTNASSKEPGLEHENGDVPLQNVQGSSQPSLQMWPDQRALNEQHVPFLAPAPSYSGGMVPPQGMYPSSDWSGYHQVPLNPYYPPGVPFPHFPAAHMNHPMYKAADIPGHQPPPSDEYPERPGQPECQHFVKSGFCKYRMKCRYHHPRSRQSAPPPAGLSPIGLPIKPDQPVCTYYGRYGFCKYGPACMFNHPFNFGPPVPAAGPPLPGQYPTHGNFA

SEQ ID NO: 164830 - protein, 346 aa, Zea Mays
MCEHIDKKLTFRSSQLEDGDIICFQKAPVPDGDAQVRYPDVPSFLEYVHNRSKLHTYDDVVERVAHQLGLDDPSKIRLTSHNCYSQQPKPQPIRYRGVAHLLDMLVHYNQTSDILYYEVLDIPLPDLQRLKTLKVAFHHATKDEVVVHSIRLPRNSTISDVITDLKTKVELSNPDAELRLLEVFYHKIYKIFPPHEKIENINDQYWTLRAEEIPEEEKNLGPHDRLIHVYHFMKDPNQNQQIQNFGDPFLMVIREGETAAEVMERIQRKLRVPDDEFSKWKLAFISMNRPEYLQDTDVVSARFQRRDVYGAWEQYLGLEHTDTTSKRSYTSNQNRHTYEKPVKIYN

SEQ ID NO: 164831 - protein, 538 aa, Zea Mays
MVYMYKFDDERVTKEDTKKALEEQYGGEEELPQINPGFNNTPFKFTKYSNAYMLVYIRESDKEKIMCNVDEKDIAEHLRIRLKKEQEEKEHKKKEKAEAHLYTIIKIARDEDLKEQIGKNIYFDLVDHEKVHSFRIQKQLPFTSFKEEVAKEFGIPVQFQRFWLWAKRQNHTYRPNRPLTPHEEAQSLEDGDIICFQKAPVPDGDAQVRYPDVPSFLEYVHNRQVVHFRCLDKPKDDDFSLELSKLHTYDDVVERVAHQLGLDDPSKIRLTSHNCYSQQPKPQPIRYRGVAHLLDMLVHYNQTSDILYYEVLDIPLPDLQRLKTLKVAFHHATKDEVVVHSIRLPRNSTISDVITDLKTKVELSNPDAELRLLEVFYHKIYKIFPPHEKIENINDQYWTLRAEEIPEEEKNLGPHDRLIHVYHFMKDPNQNQQIQNFGDPFLMVIREGETAAEVMERIQRKLRVPDDEFSKWKLAFISMNRPEYLQDTDVVSARFQRRDVYGAWEQYLGLEHTDTTSKRSYTSNQNRHTYEKPVKIYN

SEQ ID NO: 164832 - protein, 403 aa, Zea Mays
MVYMYKFDDERVTKEDTKKALEEQYGGEEELPQINPGFNNTPFKFTKYSNAYMLVYIRESDKEKIMCNVDEKDIAEHLRIRLKKEQEEKEHKKKEKAEAHLYTIIKIARDEDLKEQIGKNIYFDLVDHEKVHSFRIQKQLPFTSFKEEVAKEFGIPVQFQRFWLWAKRQNHTYRPNRPLTPHEEAQSVGQLREVSNKAHNAELKLFLEVELGPELCPIRPPEKSKEDILLFFKLYNAEKEELHFVGRLFVKALGKPSEILTKLNAMAGFSPNEEIELYEEIKFEPNVMCEHIDKKLTFRSSQLEDGDIICFQKAPVPDGDAQVRYPDVPSFLEYVHNRLCTFGVWTNQRMMIFLWNCRSFIHMMMLLRELHINLGWMIHQRYGLRLTIVILSNLNHSLLDIGG

SEQ ID NO: 164833 - protein, 366 aa, Zea Mays
MCEHIDKKLTFRSSQLEDGDIICFQKAPVPDGDAQVRYPDVPSFLEYVHNRQVVHFRCLDKPKDDDFSLELSKLHTYDDVVERVAHQLGLDDPSKIRLTSHNCYSQQPKPQPIRYRGVAHLLDMLVHYNQTSDILYYEVLDIPLPDLQRLKTLKVAFHHATKDEVVVHSIRLPRNSTISDVITDLKTKVELSNPDAELRLLEVFYHKIYKIFPPHEKIENINDQYWTLRAEEIPEEEKNLGPHDRLIHVYHFMKDPNQNQQIQNFGDPFLMVIREGETAAEVMERIQRKLRVPDDEFSKWKLAFISMNRPEYLQDTDVVSARFQRRDVYGAWEQYLGLEHTDTTSKRSYTSNQNRHTYEKPVKIYN

SEQ ID NO: 164834 - protein, 317 aa, Zea Mays
MVMHKCAIQMFLHSWSMFTIGRSKLHTYDDVVERVAHQLGLDDPSKIRLTSHNCYSQQPKPQPIRYRGVAHLLDMLVHYNQTSDILYYEVLDIPLPDLQRLKTLKVAFHHATKDEVVVHSIRLPRNSTISDVITDLKTKVELSNPDAELRLLEVFYHKIYKIFPPHEKIENINDQYWTLRAEEIPEEEKNLGPHDRLIHVYHFMKDPNQNQQIQNFGDPFLMVIREGETAAEVMERIQRKLRVPDDEFSKWKLAFISMNRPEYLQDTDVVSARFQRRDVYGAWEQYLGLEHTDTTSKRSYTSNQNRHTYEKPVKIYN

SEQ ID NO: 164835 - protein, 311 aa, Zea Mays
MTMMTPPPLEQGDEMLVPHQELPVAGPEPAPQPMEVVAQTEPANTAETQPPEDPQTSRFTWTIESFSRLNTKKHYSDAFVVGGYKWRVLIFPKGNNVDHLSLYLDVADSGSLPYGWSRYAQFSLAVVNQVHPKYTIRKDTQHQFNARESDWGFTSFMPLSDLYDPNRGYLVNDTVVIEAEVAVRRMVDYWTYDSKKETGFVGLKNQGATCYMNSLLQTLYHTPYFRKAVYHMPTTENDMPSGSIPLALQSLFYKLQYSDNSVATKELTKSFGWDTYDSFMQHDVQELNRVLCEKLEDKMKVNMKIMNYQYI

SEQ ID NO: 164836 - protein, 253 aa, Zea Mays
MTMMTPPPLEQQQGDEMLVPHQELPVAGPEPAPQPMEVVAQTEPANTAETQPPEDPQTSRFTWTIESFSRLNTKKHYSDAFVVGGYKWRVLIFPKGNNVDHLSLYLDVADSGSLPYGWSRYAQFSLAVVNQVHPKYTIRKGFVGLKNQGATCYMNSLLQTLYHTPYFRKAVYHMPTTENDMPSGSIPLALQSLFYKLQYSDNSVATKELTKSFGWDTYDSFMQHDVQELNRVLCEKLEDKMKVNMKIMNYQYI

SEQ ID NO: 164837 - protein, 331 aa, Zea Mays
MTLLSLVEAWWACLSLVHCVGTPPKGTTAWAPPPKPSDDSSRAKQREMGGQMKISAMWEEGGNKAPASTAKVVQYEASDVGVDDALGIWKIDDVDNSFHTQPFRINCGYHLRVVDVNMQVEVGSVSERYSSWNWNYRLQSTKRGFFVQWSTSWPAQAGLLRLRRRRQPPSPVPKLIFLESTLVQTLGPKRRVRVATLDEALQIPQELAAFVTCYGQSLHVLVGYIGWNYGSVIEDILTGFKMHCHGWRSIYCISKEELTEISFTVYHICRLHFVLKFFRDVKHVREQGAIDDRDTFLHAVRDLLCFHSTQRVGGNFMHEQCVMQEYYLLAW

SEQ ID NO: 164838 - protein, 85 aa, Zea Mays
MAITNFCNIRHLAGAAADELRDAVLLVFANKQDLPNAMNAAEITDKLGLHSLRQRHWYIQSTCATTGEGLYEGLDWLSSNIASKA

SEQ ID NO: 164839 - protein, 756 aa, Zea Mays
MNMELKAEPDTDEVYAQLTLLPDKKQDENTSARVENEEAEEEVVPHVPPATSEGLRIHSFCKTLTASDTSTHGGFSVLRRHADECLPPLDMSQHPPNQELVAKDLHGVEWRFRHIFRGQPRRHLLQSGWSVFVSAKRLVAGDAFIFLRGENGELRVGVRRALRHQTTIPSSVISSHSMHLGVLATAWHAVNTGSMFTVYYKPRTSPAEFVVSRARYCESLKRNYSIGMRFRMRFEGEEAAEQRFTGTIVGICVSDPSGWADSKWRSLKVRWDEASSVPRPERVSPWQIEPAVSPSPVNPLPVRFKRSRSSVNASPSDVSTVNREVASKVMVESQQNNLPRALHNQGRTQLTGRYRDSTDVKTAQDLTMWSSGTEQQRNNIAAQTKRCLEGWTQSRTPEGYNQLFSAFQPLKDAHNPLRPFPNKISGTRSSTWVTADARYPAQQANHNMLHGTLSFMPHSSGFRMIQQNNLVTPEAANFTGKSAFTSLQGHVTDQCSTGWFGSIESNSHTDHASSSLIRSQPLVIGNDVQKTKGTSFKLFGIPLGSPEKSEPLVSPPSVAYDGKLQTSPTDNNEPCSEATQNIQNKVQSSSTRSCKKVHKQGSALGRSIDLTKFACYDELIAELDQMFDFDGELKSPCRNWLVVYTDNEGDMMLVGDDPWNEFCDMVHKIFIYTREEVERMNPGALNARLEDCLSDSLGRGLASKEPRSGPSTSAVDSENRANLSSHPFESGEADKRPRVRVTGRTRKGCVSVVCSR

SEQ ID NO: 164840 - protein, 549 aa, Zea Mays
MHLGVLATAWHAVNTGSMFTVYYKPRTSPAEFVVSRARYCESLKRNYSIGMRFRMRFEGEEAAEQRFTGTIVGICVSDPSGWADSKWRSLKVRWDEASSVPRPERVSPWQIEPAVSPSPVNPLPVRFKRSRSSVNASPSDVSTVNREVASKVMVESQQNNLPRALHNQGRTQLTGRYRDSTDVKTAQDLTMWSSGTEQQRNNIAAQTKRCLEGWTQSRTPEGYNQLFSAFQPLKDAHNPLRPFPNKISGTRSSTWVTADARYPAQQANHNMLHGTLSFMPHSSGFRMIQQNNLVTPEAANFTGKSAFTSLQGHVTDQCSTGWFGSIESNSHTDHASSSLIRSQPLVIGNDVQKTKGTSFKLFGIPLGSPEKSEPLVSPPSVAYDGKLQTSPTDNNEPCSEATQNIQNKVQSSSTRSCKKVHKQGSALGRSIDLTKFACYDELIAELDQMFDFDGELKSPCRNWLVVYTDNEGDMMLVGDDPWNEFCDMVHKIFIYTREEVERMNPGALNARLEDCLSDSLGRGLASKEPRSGPSTSAVDSENRANLSSQ

SEQ ID NO: 164841 - protein, 99 aa, Zea Mays
MNGHTARYGVVFYFPRFIFFLKKINFNFAFICSDGLKQQFGQREPYRYCIGSHCVAQCSCSVPGAHCQRQFGANERNLSETAETKHGFDFCQMRGWFLL

SEQ ID NO: 164842 - protein, 51 aa, Zea Mays
MSSPLRLRGHFVMRLDASRLLMISPRGAMDTTCTKCRSKKWINSHLAMRTA

SEQ ID NO: 164843 - protein, 209 aa, Zea Mays
MAARPSCDPVAKLLRTRLLFPLPSSLVGRRPASSQTASSPAVEWSISSVPLHVRARPDLRVPGSRSLAGEFLRARSVFSYRHPAGFLYVVPCSPCSSSVATRARRGALRAKLLPGLPWRPAQISPCSSARSPLTRFPPCRARLELPPTLCPAVACPCPNAVPLLFTAVALLARPDLPASRPAVLPFPWPAIRFPLPAESHRHGASPCAR

SEQ ID NO: 164844 - protein, 241 aa, Zea Mays
MSLSKEDVLSAIDGGKSEGGPSGRHWILDPIDGTKGFIRGDQYAVALGLLDEGKVVLGVLGCPNLPLKSTNKNNSSSFGDRIGSLFFATIGCGAQVEALEGSEPQKISVCSTNNPVDASFFESFEASHSKRDLTSSIAEKLGVRAPPVRMDSQAKYGALARGDGAIFLRIPHKSYIETVWDHAAGSIIVTEAGGMVKDAAGNDLDFCKGRYLDRDRGIIATNKHLMPLVLKAVQEAMKEEQ

SEQ ID NO: 164845 - protein, 226 aa, Zea Mays
MSQATEVVGNPYAAELAAAKKAVALAARLCQRVQRSILHSDIQSKADKTPVTVADYGSQVLVCLVLKKELPSHSFSIIAEEDSKDLREDGAQEIIEHITTLINETIVNDGSYNMSLSKEDVLSAIDGGKSEGGPSGRHWILDPIDGTKGFIRGDQYAVALGLLDEGKVVLGVLGCPNLPLKSTNKNNSSSFGDRIGSLFFATIGCGAQVEALEGSEPQKHHTPSVI

SEQ ID NO: 164846 - protein, 254 aa, Zea Mays
MSQATEVVGNPYAAELAAAKKAVALAARLCQRVQRSILHSDIQSKADKTPVTVADYGSQVLVCLVLKKELPSHSFSIIAEEDSKDLREDGAQEIIEHITTLINETIVNDGSYNMSLSKEDVLSAIDGGKSEGGPSGRHWILDPIDGTKGFIRGDQYAVALGLLDEGKVVLGVLGCPNLPLKSTNKNNSSSFGDRIGSLFFATIGCGAQVEALEGSEPQKISVCSTNNPVDASFFESFEASHSKRDLTSSIAENG

SEQ ID NO: 164847 - protein, 268 aa, Zea Mays
MGLRIEDLTPHIFAIVPTRITNRRTVAEGIVEMAWIRDLRGTITWDVLSDFLTLSEVIADYSINVGVPDKHIWKFSPTGQYSSKSAYDMLFLGSTSLGAYERIWESWAPSKCSFFLWLVMHNRCWTADRLARRGLPHPSVCPLCDQEEETIQHLLISCVFARQFWYSLLSRSGLPNLSPDNASCSLDDWWSRAVEKIPRDLQSGFNSLVILGAWSLWRHRNDCVFNGRSPSLASALTLAGDELRMWCSAGAKGLNLLLTLMFMLDPGG

SEQ ID NO: 164848 - protein, 1127 aa, Zea Mays
MMLTRDRMATLPFPPDPSYPLTISSTPDASSHSSTSPTPETTPIPAANHLSSSPASAGPSACGGRSKAQRWCEDGAAGAAGVGAVPAHAAGAGVVPVGAGVVPAGAGVVPAAVGVAPSQNRRSYRDALVSSQRPVSRVAVVSAGGGWETVQSRRGRRLARRPPQPEPRPVPVDLRGRCFNCFSADHRAARCSNRVRCFFCRRRGHRVSECPRRQTNLVALQTNLAAPVAAPVRRLVWRPISKETSAAVSGADHAMAGAGGDHAMAGGSTLGGSDVAISGKRRTRRGQRKRRAGTGGGLGGDPLLLSSGNLSPAAQDGPRPVRFIGRSRMIDRAELELRHALIVSVVGQEGTGCATEVREALASRFGLDADALRLRRAAPGSFIVLFPSEELAGRVFSGGPSLFVPPLRLHIKRWTRQAFASGGSVLSSLIDVELRGIPAHLWGLETAEGLHPDSTSGEDLSVIRLSAWCRSPVELPEVLDLHAVEPAVPDEDEVWIPRSLVFPVFVKIIGPEGVLVEEQLQPPPSDPSDDEPEQSRRARRVQRLGDQASLPRTSVHSRLGPRLHSSSTRVGPSDDVELLDALMDNSDDVAASVSSDSLAEPVDAPTLPCAAVEKLAAPGVLALCDVVVPVYSPDGASADLAAELREDSLLAVSCVVNTSSARWNLKPPVFKVYSRRLRPSILDDQDGPLVQSGLDNSMVISSPLCEFQCLVTKPVDALLPTPQIPKRRKKPLPSNFIPRRSRRVAKFPPELGSEAAAQDGSNYAELFVSGLSSVHIAALAALFGWTVLVAFEPDCFEPAIELPVSEEQQDKDDDGYKKKSRMDDNGDQVIKKQTSAVNSSSSPSNQENGGPVPMQTTSFSLLASLSSVGVTNSPPRTEGLSATLSHLPLSLIGCHSVHLAGINPEHQKQGSDMIQEQVGTGAGTVIAEGVNNDVFAAATTTMEKLEVSKADQRIEGMGRCERDGRSEARGPGAARADLAWGRGRLFHQLAWDGTGSGVRRSGWGPWAAVSPRASHAKGMGAPLLAAATPAEKSSLPMRLSMDWLLTWRAMGARGGGEVWEGGAVVDGAGEEGAGGGGGRSRGLSKLGRGGGDELGHEWSEGRGWSRLEHHGDARRGHWPRQAPTLRT

SEQ ID NO: 164849 - protein, 60 aa, Zea Mays
MVLATDRLRFHRANKKGTLIYYLWNWRIELETETCGVEDDRMWRGLAAGYEPGTPLNLKT

SEQ ID NO: 164850 - protein, 139 aa, Zea Mays
MSVGFESERNLWNWNQISDKYSKLNHFTRMYCVETCSVSNYTLYIYEITFLALCVRGVLFRSISLTFQHFVLYHVQVYCMVLATDRLRFHRANKKGTLIYYLWNWRIELETETCGVEDDRMWRGLAAGYEPGTPLNLKT

SEQ ID NO: 164851 - protein, 593 aa, Zea Mays
MASAAAGTPKRCYYEVLGLSRDCSPTDIKLAFRRLALSLHPDKQPPGSDLAAATAAFQELQHAHSVLSDPQERAYYDSHRSQILFSDPASAGAKSASIVPDLFAFFSSSAFSGFSDTGRGFYKVYGDVFDKVFAQELAYARRMGVPDPAAPPVIGNLDSPYAQVTAFYSYWLGFGSVMDFGWAAEWDAARGESRRVRRLMEEDNKKAMRKARREYNDAVRGLAAFCKKRDKRVVDMVLKKKLEEEKRKAEEKERKKEEDKRKKERAMACQEPEWARAEEVEEGLYDEDEEEEMRAKKEELYCVACNKKFKSDKQWKNHEQSKKHRDKVSELRMAFREEESLKEAEEGEGDWNEVDVGFDFKPTQESDDESAFSDAAEELAEEFEEGLEVHDKENGDKDFDSAEQEVGSYDEASVLEAMLSSCKNRKGGYVAPPEEALSGTAEDDDHHRSSEVNNAKRKGRRRRAAKKEQDESNYAGNEHHGKCEVQPEGSVHGNDVDDIMEGPSSSNVNNGSVSKGDKQNGENTNPKKNKKGTKKKPTVSTDQKSMSKADQKSTSKGKKQKEVSKAPSNDCDTCGGTFESSCFLTWKKQVTQC

SEQ ID NO: 164852 - protein, 145 aa, Zea Mays
MHKAARQHLIFYSHCFYFVNSLTHVSVLVYSGDKSPRPELQEDQAWLWLQLCCLLLLDRREGGEKQLACRLLLRWSFILYGASRIHLLQKHHKSCLGHYTRASHSATWHSQSEVLEERQIQLPAYLGSEVMLMCKHLHLEFCLDP

SEQ ID NO: 164853 - protein, 138 aa, Zea Mays
MSKYYGESERLLGSIFYLANDLPEGDKSPRPELQEDQAWLWLQLCCLLLLDRREGGEKQLACRLLLRWSFILYGASRIHLLQKHHKSCLGHYTRASHSATWHSQSEVLEERQIQLPAYLGSEVMLMCKHLHLEFCLDP

SEQ ID NO: 164854 - protein, 132 aa, Zea Mays
MSKYYGESERLLGSIFYLANDLPEGELQEDQAWLWLQLCCLLLLDRREGGEKQLACRLLLRWSFILYGASRIHLLQKHHKSCLGHYTRASHSATWHSQSEVLEERQIQLPAYLGSEVMLMCKHLHLEFCLDP

SEQ ID NO: 164855 - protein, 67 aa, Zea Mays
MGLLGYIFSRSTISLVLGITPGLATLLLGTLSLKFWRSDRSSFLLILAQAEVMLMCKHLHLEFCLDP

SEQ ID NO: 164856 - protein, 146 aa, Zea Mays
MCHLKLLCQNIMVKASVYWDLFFILQMIFLKETNPHVQSYKKIKLGCGCSCVASSCWTEEREGRSSWRADFYSGGLLFSMGLLGYIFSRSTISLVLGITPGLATLLLGTLSLKFWRSDRSSFLLILAQAEVMLMCKHLHLEFCLDP

SEQ ID NO: 164857 - protein, 133 aa, Zea Mays
MSSYSAQIVCLYNLFLYYTVYVCSCFLRFGPVEGCKLIRKEKSYKKIKLGCGCSCVASSCWTEEREGRSSWRADFYSGGLLFSMGLLGYIFSRSTISLVLGITPGLATLLLGTLSLKFWRSDRSSFLLILAQR

SEQ ID NO: 164858 - protein, 150 aa, Zea Mays
MSSYSAQIVCLYNLFLYYTVYVCSCFLRFGPVEGCKLIRKEKSYKKIKLGCGCSCVASSCWTEEREGRSSWRADFYSGGLLFSMGLLGYIFSRSTISLVLGITPGLATLLLGTLSLKFWRSDRSSFLLILAQAEVMLMCKHLHLEFCLDP

SEQ ID NO: 164859 - protein, 156 aa, Zea Mays
MSSYSAQIVCLYNLFLYYTVYVCSCFLRFGPVEGCKLIRKEKTNPHVQSYKKIKLGCGCSCVASSCWTEEREGRSSWRADFYSGGLLFSMGLLGYIFSRSTISLVLGITPGLATLLLGTLSLKFWRSDRSSFLLILAQAEVMLMCKHLHLEFCLDP

SEQ ID NO: 164860 - protein, 325 aa, Zea Mays
MALASLAASLPVAATAAAVRFPFRFRIGRAMASAAAGASPARVAVVQMTSVGDVDANYATCSRLTKEAAASGVKFLCFPEVFSFIGSKDGEAMKLAEPLDGPIMQRYCSLAKESSMWLSLGGFQEKGPDDSHQYNTHVLIDDTGKVRSSYRKIHLFDVDVPGNMVYKESRFTAAGDTIVAVDSPFGRLGLTVCYDLRFPELYQILRFKHQAQVLLVPSAFTKITGEAHWEILLRARAIETQCYVIAAAQAGKHNEKRESYGDSIIIDPWGTVIARLPDRLSTGFAVADLDLSKVEAVRTRMPISEVSVGYKALNRCKRSEKGELV

SEQ ID NO: 164861 - protein, 202 aa, Zea Mays
MKLAEPLDGPIMQRYCSLAKESSMWLSLGGFQEKGPDDSHQYNTHVLIDDTGKVRSSYRKIHLFDVDVPGNMVYKESRFTAAGDTIVAVDSPFGRLGLTVCYDLRFPELYQILRFKHQAQVLLVPSAFTKITGEAHWEILLRARAIETQCYVIAAAQAGKHNEKRESYGDSIIIDPWGTVIARLPEKCGCRSALHWICSCRS

SEQ ID NO: 164862 - protein, 117 aa, Zea Mays
MVYKESRFTAAGDTIVAVDSPFGRLGLTVCYDLRFPELYQILRFKHQAQVLLVPSAFTKITGEAHWEILLRARAIETQCYVIAAAQAGKHNEKRESYGDSIIIDPWGTVIARLPEKC

SEQ ID NO: 164863 - protein, 157 aa, Zea Mays
MKLAEPLDGPIMQRYCSLAKESSMWLSLGGFQEKGPDDSHQYNTHVLIDDTGKVRSSYRKIHLFDVDVPGNMVYKESRFTAAGDTIVAVDSPFGRLGLTVCYDLRFPELYQILRFKHQAQVLLVPSAFTKITGEAHWEILLRARAIETQCYCSKPFA

SEQ ID NO: 164864 - protein, 233 aa, Zea Mays
MLASSIHAHIWVEVSDEYKLVADTLYLTVYLIDQFLSQNCIQTHKLQLLGITSMLIASKYEEYSAPSAEEFCNITAGTYAKAEVLEMEQQVLNDLGFHLSVPTTNTFLRRFLRAAQASRTAHLTTLNYLASYLAELTLISYDFMKFLPSEVAASSIFLAKWTLDQSDHPWNPTLEHYTSYKSFDIRTCVRALQELQHNTSNCPLNAIREKYGQQKFECVANLRSPELLRSLFS

SEQ ID NO: 164865 - protein, 152 aa, Zea Mays
MLASSIHAHIWVEVSDEYKLVADTLYLTVYLIDQFLSQNCIQTHKLQLLGITSMLIASKYEEYSAPSAEEFCNITAGTYAKAEVLEMEQQVLNDLGFHLSVPTTNTFLRRFLRAAQASRTVRSVPKPHCNESFQSICIVLNTKLASYISRLI

SEQ ID NO: 164866 - protein, 99 aa, Zea Mays
MLIASKYEEYSAPSAEEFCNITAGTYAKAEVLEMEQQVLNDLGFHLSVPTTNTFLRRFLRAAQASRTVRSVPKPHCNESFQSICIVLNTKLASYISRLI

SEQ ID NO: 164867 - protein, 367 aa, Zea Mays
MLNPPPLKVYMAARKKKPLLIACQATSARITRSQAAANSTRSGLAPSVPVPLKTEHNHAAKKKMKREASDENASADAGASAPLPKRRTVLKNVTNISCAKISKRCTAVTGLKLGPSQKAGQSINKQCTNKISMLLPLAVGGSSLVDDSNNAEETQMVDLLAQKEKQIVLLKEAQPLQNTEQNKGGACDEASVEERNAMNVHETAALKAGVSNGLNIVDIDKNNGDPQMCVTYVAEIYRNLMASEVSDEYKLVADTLYLTVYLIDQFLSQNCIQTHKLQLLGITSMLIASKYEEYSAPSAEEFCNITAGTYAKAEVLEMEQQVLNDLGFHLSVPTTNTFLRRFLRAAQASRTVRSVPKPHCNESFQSI

SEQ ID NO: 164868 - protein, 206 aa, Zea Mays
MCVTYVAEIYRNLMASELIRRPRSNYMETLQQDITASMRGVLIDWLVEVSDEYKLVADTLYLTVYLIDQFLSQNCIQTHKLQLLGITSMLIASKYEEYSAPSAEEFCNITAGTYAKAEVLEMEQQVLNDLGFHLSVPTTNTFLRRFLRAAQASRTAHLTTLNYLASYLAELTLISYDFMKFLPSEVAASSIFLAKWTLDQSDHPWV

SEQ ID NO: 164869 - protein, 171 aa, Zea Mays
MCVTYVAEIYRNLMASELIRRPRSNYMETLQQDITASMRGVLIDWLVEVSDEYKLVADTLYLTVYLIDQFLSQNCIQTHKLQLLGITSMLIASKYEEYSAPSAEEFCNITAGTYAKAEVLEMEQQVLNDLGFHLSVPTTNTFLRRFLRAAQASRTVRSVPKPHCNESFQSI

SEQ ID NO: 164870 - protein, 357 aa, Zea Mays
MAARKKKPLLIACQATSARITRSQAAANSTRSGLAPSVPVPLKTEHNHAAKKKMKREASDENASADAGASAPLPKRRTVLKNVTNISCAKISKRCTAVTGLKLGPSQKAGQSINKQCTNKISMLLPLAVGGSSLVDDSNNAEETQMVDLLAQKEKQIVLLKEAQPLQNTEQNKGGACDEASVEERNAMNVHETAALKAGVSNGLNIVDIDKNNGDPQMCVTYVAEIYRNLMASEVSDEYKLVADTLYLTVYLIDQFLSQNCIQTHKLQLLGITSMLIASKYEEYSAPSAEEFCNITAGTYAKAEVLEMEQQVLNDLGFHLSVPTTNTFLRRFLRAAQASRTVRSVPKPHCNESFQSI

SEQ ID NO: 164871 - protein, 237 aa, Zea Mays
MCVTYVAEIYRNLMASEVSDEYKLVADTLYLTVYLIDQFLSQNCIQTHKLQLLGITSMLIASKYEEYSAPSAEEFCNITAGTYAKAEVLEMEQQVLNDLGFHLSVPTTNTFLRRFLRAAQASRTAHLTTLNYLASYLAELTLISYDFMKFLPSEVAASSIFLAKWTLDQSDHPWNPTLEHYTSYKSFDIRTCVRALQELQHNTSNCPLNAIREKYGQQKFECVANLRSPELLRSLFS

SEQ ID NO: 164872 - protein, 272 aa, Zea Mays
MCVTYVAEIYRNLMASELIRRPRSNYMETLQQDITASMRGVLIDWLVEVSDEYKLVADTLYLTVYLIDQFLSQNCIQTHKLQLLGITSMLIASKYEEYSAPSAEEFCNITAGTYAKAEVLEMEQQVLNDLGFHLSVPTTNTFLRRFLRAAQASRTLHFQAHLTTLNYLASYLAELTLISYDFMKFLPSEVAASSIFLAKWTLDQSDHPWNPTLEHYTSYKSFDIRTCVRALQELQHNTSNCPLNAIREKYGQQKFECVANLRSPELLRSLFS

SEQ ID NO: 164873 - protein, 264 aa, Zea Mays
MHSGSLLCLSYVQLIRRPRSNYMETLQQDITASMRGVLIDWLVEVSDEYKLVADTLYLTVYLIDQFLSQNCIQTHKLQLLGITSMLIASKYEEYSAPSAEEFCNITAGTYAKAEVLEMEQQVLNDLGFHLSVPTTNTFLRRFLRAAQASRTAHLTTLNYLASYLAELTLISYDFMKFLPSEVAASSIFLAKWTLDQSDHPWNPTLEHYTSYKSFDIRTCVRALQELQHNTSNCPLNAIREKYGQQKFECVANLRSPELLRSLFS

SEQ ID NO: 164874 - protein, 388 aa, Zea Mays
MAARKKKPLLIACQATSARITRSQAAANSTRSGLAPSVPVPLKTEHNHAAKKKMKREASDENASADAGASAPLPKRRTVLKNVTNISCAKISKRCTAVTGLKLGPSQKAGQSINKQCTNKISMLLPLAVGGSSLVDDSNNAEETQMVDLLAQKEKQIVLLKEAQPLQNTEQNKGGACDEASVEERNAMNVHETAALKAGVSNGLNIVDIDKNNGDPQMCVTYVAEIYRNLMASELIRRPRSNYMETLQQDITASMRGVLIDWLVEVSDEYKLVADTLYLTVYLIDQFLSQNCIQTHKLQLLGITSMLIASKYEEYSAPSAEEFCNITAGTYAKAEVLEMEQQVLNDLGFHLSVPTTNTFLRRFLRAAQASRTVRSVPKPHCNESFQSI

SEQ ID NO: 164875 - protein, 201 aa, Zea Mays
MLTENTTEYIWPRIHTASHGGGGHKLAPLVGVAVRLIVLEEIIHDFIILVTVTRCAGREPISATGTTHCAKATSRVFTKTTVSKVTAAKAVATSSSKTAFSPTCNSIITTTTIATTSPVAVVATISTAAATIVTTAAAAIATATTTIAATIATATIATTTTTIAATTITTAAAEATCPLVSMINPYVPSIQSLVQARKSQV

SEQ ID NO: 164876 - protein, 558 aa, Zea Mays
MIVRQPKTVVLHEWTWLVDAFILWDTYGYPIDLTEVMAIDYGLTVDKKGFNASMEEARQKARNARNKSGGNSIAMDANATAQLRKLGLASTDDSPKFLWPKEHESVVKAIYTGSEYITTATGDGDFGLVLESTSFYAEQGGQIFDTGSIEGSFGTFNVNNVQVFAGYVLHIGSFTKGSKVLSLGDSVICKVDYNRRTLIAPNHTCTHMLNFALREVLGDHVDQKGSIVLPEKLRFDFSHGKPVQPEDLRKIEFIVNQQIKDELGVYALEIKLEDAKRINGLRAVFGEIYPDPVRVVSVGRKVEDLLADPDSKEWLSISTELCGGTHITNTRDAKAFALLSEEGIAKGVRRITAVTAGCATQAMELASSIDSDINKASQLEGALLEKKIASIKSGLDAAAIPAARKADLRGKVSKLEDELRKAKKKMGEQNIQKAVKSAMDAAEAALSGNKPFCVTHVDVGLDTTAVREAVIKVMDQKGLPIMLFSTDEASNKAVIYAGVPPNAPSGFKVLDWLTPSIAPLKGRGGGGKNGVAQGQGSDASQLKEAMALANSIASMKLC

SEQ ID NO: 164877 - protein, 595 aa, Zea Mays
MGDVFPELKDNEKKIKCIIRDEEESFENTLAKGYEKFKKAADAVKDNGGTILSGQDAFILWDTYGYPIDLTEVMAIDYGLTVDKKGFNASMEEARQKARNARNKSGGNSIAMDANATAQLRKLGLASTDDSPKFLWPKEHESVVKAIYTGSEYITTATGDGDFGLVLESTSFYAEQGGQIFDTGSIEGSFGTFNVNNVQVFAGYVLHIGSFTKGSKVLSLGDSVICKVDYNRRTLIAPNHTCTHMLNFALREVLGDHVDQKGSIVLPEKLRFDFSHGKPVQPEDLRKIEFIVNQQIKDELGVYALEIKLEDAKRINGLRAVFGEIYPDPVRVVSVGRKVEDLLADPDSKEWLSISTELCGGTHITNTRDAKAFALLSEEGIAKGVRRITAVTAGCATQAMELASSIDSDINKASQLEGALLEKKIASIKSGLDAAAIPAARKADLRGKVSKLEDELRKAKKKMGEQNIQKAVKSAMDAAEAALSGNKPFCVTHVDVGLDTTAVREAVIKVMDQKGLPIMLFSTDEASNKAVIYAGVPPNAPSGFKVLDWLTPSIAPLKGRGGGGKNGVAQGQGSDASQLKEAMALANSIASMKLC

SEQ ID NO: 164878 - protein, 872 aa, Zea Mays
MLTVPTLPRACRLLRLFTRLEARVLPAATILVSFSSSFSSSPAAAPPQMDPSPAWPSRRIRQEFLTFFESKAHTRWPSSPVVPVDDPTLLFANAGMNQFKPVFLGTAAPDSPLGRLHRACNTQKCIRAGGKHNDLDDVGNDTYHHTFFEMLGNWSFGDYFKEEAIRWAWELLTQVYKLPTDRIYATYFGGDVKSGLGADDESKDIWLKYLPKEKVLPFGCKDNFWEMGDTGPCGPCTEIHFDRIGNRDAASLVNNDDPTCIEIWNLVFIQFNREADGTLRPLPAKHVDTGLGFERLTSILQNKMSNYDTDIFMPIFDAIHQLAGDGIQPYSGKLGSDDIGKVDMAYRVVADHIRTLSFAIADGSQPGNEGREYVLRRILRRAVHFGHQKLKAKQSFFSSLVNVFVQLMGDVFPELKDNEKKIKCIIRDEEESFENTLAKGYEKFKKAADAVKDNGGTILSGQDAFILWDTYGYPIDLTEVMAIDYGLTVDKKGFNASMEEARQKARNARNKSGGNSIAMDANATAQLRKLGLASTDDSPKFLWPKEHESVVKAIYTGSEYITTATGDGDFGLVLESTSFYAEQGGQIFDTGSIEGSFGTFNVNNVQVFAGYVLHIGSFTKGSKVLSLGDSVICKVDYNRRTLIAPNHTCTHMLNFALREVLGDHVDQKGSIVLPEKLRFDFSHGKPVQPEDLRKIEFIVNQQIKDELGVYALEIKLEDAKRINGLRAVFGEIYPDPVRVVSVGRKVEDLLADPDSKEWLSISTELCGGTHITNTRDAKAFALLSEEGIAKGVRRITAVTAGCATQAMELASSIDSDINKASQLEGALLEKKIASIKSGLDAAAIPAARKADLRGKVSKLETARALTKKQPLF

SEQ ID NO: 164879 - protein, 569 aa, Zea Mays
MHTQGKQCSFVISTLLRHFMWIATCSSQLWDYAAIVHRQQGGEVDAGTETNINLNHQIYYHVLGSDQSEDILCWKDPEHPKYSFGASVTEDGKYIILGIYEGCDPVNKLYYCEISSLPQGIEGFRGTQDLLPFVKLIDNFDAQYQVVANDGDEFTFLTNKSAPKNKLVRVNIKNPELWTDVLSEHEKDVLESADAVNNNQLLVNYMSDVKHILQIRDLRTGNFIHQLPLEIGSVSEISCRREDKEVFIGFTSFLSPGIIFRCNLASTIPEMKMFREISVPGFDRTSFQVKQVFVPSKDGTKIPMFIMSKKDIDLNGSHPTLLYGYGGFNISITPSFSVGRVVLCKNMGFVVCVANIRGGGEYGEEWHKAGALAMKQNCFDDFAACAEFLISNGYTSSRRLCIEGGSNGGLLVAASINQRPDLFGCALAHVGVMDMLRFHKFTIGHAWTTDYGCSDKEEEFQWLIKYSPLHNVRRPWEQSSGNNCQYPATMLLTADHDDRVVPLHSLKLLATLQHVLCTSTEDSPQTNPIIGRIDRKSGHGAGRPTQKMIDEAADRYSFMAKMLGASWTE

SEQ ID NO: 164880 - protein, 302 aa, Zea Mays
MLLLHKSVPLRLLLPRRPLKTFLLPPPSRPRCLSLLPRAAMGSVAGDTAARLAYPPARRDDSVVDDYHGVRIPDPYRWLEDPDSEETKEFVARQAELAETVLAGCPDRENLRREVTRLFDHPRHAAPFRRGNKYFYFHNSGLQAQSVLYMLDDLDGKAEVLLDPNTLSKDGTVALSTYSISEDGNYIAYGLSESGSDWVSIHVMSITNKQPMPDKLSWVKFSSISWTHDGKGFFYGRYPAPRGGEVDAGTETNINLNHQIYYHVLGSDQSEDILCWKDPEHPKYSFGASVTEDGKALFSGVT

SEQ ID NO: 164881 - protein, 376 aa, Zea Mays
MLLLHKSVPLRLLLPRRPLKTFLLPPPSRPRCLSLLPRAAMGSVAGDTAARLAYPPARRDDSVVDDYHGVRIPDPYRWLEDPDSEETKEFVARQAELAETVLAGCPDRENLRREVTRLFDHPRHAAPFRRGNKYFYFHNSGLQAQSVLYMLDDLDGKAEVLLDPNTLSKDGTVALSTYSISEDGNYIAYGLSESGSDWVSIHVMSITNKQPMPDKLSWVKFSSISWTHDGKGFFYGRYPAPRGGEVDAGTETNINLNHQIYYHVLGSDQSEDILCWKDPEHPKYSFGASVTEDGKYIILGIYEGCDPVNKLYYCEISSLPQGIEGFRGTQDLLPFVKLIDNFDAQYQVVANDGDEFTFLTNKSAPKNKLMLSIFCR

SEQ ID NO: 164882 - protein, 196 aa, Zea Mays
MGVVEDCSAVPPPRSMEDKFKALRAYRRAKGLCDRCAEKWFKGHTCAASVQLHAMQEVFELLPIEETEGELHSDEAVEEQLFLAISSQAVSGGTAKRSLQMLGVMQQQMINILIDSGNTHSFISQNLVDKLSNLTLLPAAVSVTVADGSAMQCVSMVSQVVWTIQHREFSLDLKVLPLPTFDLILGMDWLGNTSGY

SEQ ID NO: 164883 - protein, 518 aa, Zea Mays
MQVVLQVNVSVNKLEDPVLEVLQFEKSISNNCMPGNLVDGQCDSNDDPCQELLSWLLPLDRTLPPRSLAPPTLNPSVSHKQSYSASGSQIFNFRSYSMPSASSVQTPNNIRPPPISESQEFMPEKPAKTPDIINDGQLSFRGVPLEPERYSVRCGLEGVYLPGKRWRRKVEIIQPIEVQSFAAKCTVENLLCVTVKNIAPTHAKDIVVFIDAITIVFEEASKGGAPLSLPIASIEVGHGHSLPNLALRRGEEHSFILKPATMSSRERKTNSHAPLALSLPTMTGATLNTHTPKAGEPYADLSDQYAVLVSYRCNYTESKLFFKQATSWRPSAASDLMISVSSELSLRNPSLGARVPQLPVQILTLEATNMTSENLTLTVLAPEASGSSSVVSLNSSPTTPNGSFDGVNESAKRSGVGKDGIGFRRLNSVLATPKEGDNGGNRMSNASGCTHLWLQSAVPLGCVPARSSTTVKLELLPLSDGIITLDTLQITAREKGLAYIPEHSLEIHATSGMSSGRS

SEQ ID NO: 164884 - protein, 134 aa, Zea Mays
MNFLYRTTQPAAPELPRISEQDHRNALQKTTSTLEGLIADDSHHQPSSAHSEDGAANNGSRDISGDSSSVDLKSPVPLGTHADVMEDERWITIPCKALPESWNDISEMGSVAGSGPFLPFSRRAGSYTGVPVSF

SEQ ID NO: 164885 - protein, 111 aa, Zea Mays
MNFLYRTTQPAAPELPRISEQDHRNALQKTTSTLEGLIADDSHHQPSSAHSEDGAANNGSRDISGDSSSVDLKSPVPLGTHADVMEDERWITIPCSLVPLTCLSLFLLYII

SEQ ID NO: 164886 - protein, 166 aa, Zea Mays
MGLEFVATFSSSIWWEMNIRKERFKQEWDLVIVNALTASCCNLMVLGLLAPCRSYGSTSRFEFQNAIEKLPSNIFEKSYPLREFDLPKRISAFFYKAAELSLVGFVAGSVQGGMSKVLSVRKERRLSVTIPSISTNALGYGAFLGLYVNLRYQIALWTRPIYGQAL

SEQ ID NO: 164887 - protein, 357 aa, Zea Mays
MRWLWLHKIDPGRPWANLTMQVPKKARSFFSTVLVSEVGNGARTLSWTDKWLLGQNVSNLAPRLFAIIPKRIANRRTVLEALANIKWISDIKGALSVGAIVDYLNLWEILSDIVLHPVVEDKHVFSIAADGKYSAKLAYEGLFVGSTSFGHYHLVWKTWAPPKCQFFLWLATNKRCWTADRLAKRGLFHPARCLLCDQEAETLDHILVSCVFTRVFWFNHLKPFGFERLTPQLGLTSFMIWWEQISEMVSGLSGKGLNSLFFLEHAGDLRIIPLIDRRRYNTTQHTELNPHDTTQPPHTTTLNKALGYHPGSSINTRVESKFNPLAPARHHILSSSLARVRALARLGDLPLNTQSLL

SEQ ID NO: 164888 - protein, 165 aa, Zea Mays
MFGEHVGIIGSTKELGSWKSQVDMDWTPNGWVCQLDVPGEALLEFKFVIILNKGKDKIWEDGDNRVVNLPKNGSFDMPCHWNKTKEPLDLLGSSEIKLSGDTEVIGEDAKLSENIALEEMGSICNAGVGDLTPKHESSTLGGQWQVSLKLVEGDKASRNWWRKNL

SEQ ID NO: 164889 - protein, 77 aa, Zea Mays
MLRKRKRSSGDACVSDRKIEVKTIDVFAPTKESQDDVEKQAPGRCPQVLGKRPEQGSSSFIRIASRYGNRTLIRYSS

SEQ ID NO: 164890 - protein, 71 aa, Zea Mays
MLRKRKRSSGDACVSDRKIEVKTIDVFAPTKESQDDVEKQAPGRCPQVLGKRPEQGSSSFIRIASRYDEPS

SEQ ID NO: 164891 - protein, 2914 aa, Zea Mays
MAAAAAAMAAHRASFPLRLQQILAGSRAVSPAIKIESEPPANIKAFIDRVVNIPLHDIAIPLSGFCWEFNKGNFHHWRPLFIHFDTYFKTYISSRKDLLLSDDMTEADPMPKNAILKILRVMQIILENCQNRSSFTGLAHLKLLLASSDPEIVVAALETLVALVKINPSKLHMNGKLISCGPINTHLLSLAQGWGSKEEGLGIYSCVVANEGNHQGGLSLFPVDLENKYGGTQHRLGSTLHFEYNLGPAQYPGQTSDKGKSSNLCVIHIPDMHLQKEDDLSILKQCVDKFNVPPEHRFALLTRIRYARAFNSARTCRIYSRISLLSFIVLVQSSDAHDELTYFFTNEPEYINELIRLVRSEDSVPGSIRALAMLALGAQLAAYASSHERARILSGSSIISAGGNRMVLLSVLQKAISSLNSLNDTSSPLIVDALLQFFLLHVLSSSSSGTTVRGSGMVPPLLPLLRDNDPSHMHLVCLAVKTLQKLMEYSSPAVSLFKDLGGVELLSQRLHVEVQRVIGTADGHNSMVTDAVKSDDNHMYSQKRLIKALLKALGSATYSPGNPARSQSSQDNSLPVSLSLIFQNVDKFGGDIYFSAVTVMSEIIHKDPTCFITLKELGVPDAFISSVTAGVIPSCKALICVPNGLGAICLNNQGLEAVRETSALRFLVDTFTSRKYLIPMNEGVVLLANAVEELLRHVQSLRSIGVDIIIEIINKLSSSQEYKNNETATLQEKTDMETDVEGRDLVSAMDSSVDGSNDEQFSHLSIFHVMVLVHRTMENSETCRLFVEKGGLHALLTLLLRPSITQSSGGMPIALHSTMVFKGFTQHHSTPLARAFCSSLKEHLKSALKELDKVSNSFDMTKIEKGAIPSLFVVEFLLFLAASKDNRWMNALLSEFGDASREVLEDVGQVHREVLWKISLFEKNKIVAETSSSSSTSEAQQPDMSASDIGDSRYTSFRQYLDPILRRRGSGWNIESQVSDLINMYRDIGRAASDSQRVGSDRYSSLGLPSSSQDQFSSSSDANASTRSEEDKKKSEHSSCFDMMRSLSYHINHLFLELGKAMLFASRRENSPVNLSPAVISVANNIASIVLEHLNFEGHSVSFERDMTVTTKCRYLGKVVEFVDGMLLDRPESCNSIMVNSFYCRGVIQAILTTFQATSELLFTMSRPPSSPMETDSKTGKDGKEMDSSWIYGPLTSYGAIMDHLVTSSFILSSSTRQLLEQPIFNGSVRFPQDAETFMKLLQSKVLKTVLPIWAHPQFPECNIELISSVMSIMRHVCSGVEVKDTVGNGGARLAGPPPDESAISLIVEMGFSRARAEEALRQVGTNSVEIATDWLFAHPEEPQEEDDELARALAMSLGNSVTPAQEGDSRSNDLELEEATVQPPPIDEMLRSCLQLLQRKEALAFSVRDMLVTISSQNDGQNRVKVLTYLIDNLKQCVVASEPSNDTALSALLHVLALILHGDTAAREVASKAGLVKVALDLLCSWEVQIRESSMIEVPNWVISCFLSVDQMLQLEPKLPDVTELHVLKRDNSNIKTSLVIDDSKRKDSESLPNVGLLDMEDQFQLLKICCKCIGKQLPSASMHAILQLSATLTKVHAAAICFLESGGLNALLSLPTSSLFSGFNNMASTIIRHILEDPHTLQQAMELEIRHSLVTAANRHANPRVTPRNFIQNLAFVVYRDPVIFMKAAQSVCQIEMVGDRPYVVLLKDREKERIKEKDKDKSVDKDKATVAVTKVVSGDTAAGSPANSHGKQSDLNSRNVKSHRKPPQSFVTVIEHLLDLLMSFVPPPRPEDQVDVSGTALSSDMDIDCSSAKGKGKAVSVPPEESKHAIQESTASLAKTAFFLKLLTDVLLTYASSIHVVLRHDAELSNMHGPNRTSARLTSGGIFNHILQHFLPHATRQKKERKNDGDWMYKLATRANQFLVASSIRSAEARKRIFSEICSIFLDFTDSSAGYNAPVPRMNVYVDLLNDILSARSPTGSSLSAESAVIFVEAGLVHSLSTMLQVLDLDHPDSAKIVTAVVKALELVSKEHIHSADNAKGVNSSKIASDSNNVNSSSNRFQALDMTSQPTEMVTDHRETFNAVRTSQISDSVADEMDHDRDMDGGFARDGEDDFMHEMAEDGTGDGSTMEIRIEIPRNREDDMAPAADDTDEDISAEDGEDDEDEDEENNNLEEDDAHRMSHPDTDQEDREMDEEEFDEDLLEEDDEDEDEEGVILRLEEGINGINVLDHVEVFGGSNNLSGDTLRVMPLDIFGTRRQGRSTSIYNLLGRASDHGVLDHPLLEEPSSTTNFSDQGHPENLVEMAFSDRNHESSSSRLDAIFRSLRSGRNGHRFNMWLDDGPQRNGSAAPAVPEGIEELLISHLRRPTPQPDGQRTPVGGAQENDQPNHGSDAEAREVAPAQQNENSESTLNPLDLSECAGPAPPDSDALQRDVSNASELATEMQYERSDAITRDVEAVSQASSGSGATLGESLRSLEVEIGSVEGHDDGDRHGTSGTSERLPLGDIQAAARSRRPSGNAVPVSSRDMSLESVSEVPQNPDQEPDQNASEGNQEPTRAAGADSIDPTFLEALPEDLRAEVLSSRQNQVTQTSNDQPQDDGDIDPEFLAALPPDIREEVLAQQRTQRMQQQSQELEGQPVEMDAVSIIATFPSEIREEVLLTSPDTLLATLTPALVAEANMLRERFAHRYHSSSLFGMNSRNRRGESSRRDIMAAGLDRNTGDPSRSTSKPIETEGAPLVDEDGLKALIRLLRVVQPLYKGQLQKLLVNLCTHRGSRQALVQILVDMLMLDLQGFSKKSIDAPEPPFRLYGCHANIAYSRPQSSDGLPPLVSRRVLETLTNLARSHPNVAKLLLFLEFPCPSRCFPEAHDHRHGKAVLLDDGEEQKTFALVLLLNLLDQPLYMRSVAHLEQS

SEQ ID NO: 164892 - protein, 1336 aa, Zea Mays
MAFSDRNHESSSSRLDAIFRSLRSGRNGHRFNMWLDDGPQRNGSAAPAVPEGIEELLISHLRRPTPQPDGQRTPVGGAQENDQPNHGSDAEAREVAPAQQNENSESTLNPLDLSECAGPAPPDSDALQRDVSNASELATEMQYERSDAITRDVEAVSQASSGSGATLGESLRSLEVEIGSVEGHDDGDRHGTSGTSERLPLGDIQAAARSRRPSGNAVPVSSRDMSLESVSEVPQNPDQEPDQNASEGNQEPTRAAGADSIDPTFLEALPEDLRAEVLSSRQNQVTQTSNDQPQDDGDIDPEFLAALPPDIREEVLAQQRTQRMQQQSQELEGQPVEMDAVSIIATFPSEIREEVLLTSPDTLLATLTPALVAEANMLRERFAHRYHSSSLFGMNSRNRRGESSRRDIMAAGLDRNTGDPSRSTSKPIETEGAPLVDEDGLKALIRLLRVVQPLYKGQLQKLLVNLCTHRGSRQALVQILVDMLMLDLQGFSKKSIDAPEPPFRLYGCHANIAYSRPQSSDGLPPLVSRRVLETLTNLARSHPNVAKLLLFLEFPCPSRCFPEAHDHRHGKAVLLDDGEEQKTFALVLLLNLLDQPLYMRSVAHLEQLLNLLDVVMHNAENEIKQAKLEASSEKPSAPDNAVQDGKNNSDISVSYGSELNPEDGSKAPAVDNRSNLQAVLRSLPQPELRLLCSLLAHDGLSDSAYLLVGEVLKKIVALAPFFCCHFINELARSMQNLTLRAMKELHLYENSEKALLSSSSANGTAVLRVVQALSSLVNTLQERKDPEQPAEKDHSDAVSQISEINTALDSLWLELSNCISKIESSSEYASNLSPASASAAMLTTGVAPPLPAGTQNLLPYIESFFVTCEKLRPGQPDAVQDASTSDMEDASTSSGGQRSSACQASLDEKQNAFVKFSEKHRRLLNAFIRQNSGLLEKSFSLMLKIPRLIDFDNKRAYFRSKIKHQYDHHHHSPVRISVRRPYILEDSYNQLRMRSPQDLKGRLTVQFQGEEGIDAGGLTREWYQSISRVIVDKSALLFTTVGNDLTFQPNPNSVYQTEHLSYFKFVGRVVGKALFDGQLLDAHFTRSFYKHILGVKVTYHDIEAIDPSYYKNLKWMLENDISDVLDLTFSMDADEEKLILYEKAEVTDCELIPGGRNIRVTEENKHEYVDRVAEHRLTTAIRPQINAFLEGFNELIPRELISIFNDKELELLISGLPDIDLDDLKTNTEYSGYSIASPVVQWFWEIVQGFSKEDKARFLQFVTGTSKVPLEGFSELQGISGPQRFQIHKAYGSTNHLPSAHTCFNQLDLPEYTSKEQLQERLLLAIHEANEGFGFG

SEQ ID NO: 164893 - protein, 1943 aa, Zea Mays
MAAAAAAMAAHRASFPLRLQQILAGSRAVSPAIKIESEPMLQLEPKLPDVTELHVLKRDNSNIKTSLVIDDSKRKDSESLPNVGLLDMEDQFQLLKICCKCIGKQLPSASMHAILQLSATLTKVHAAAICFLESGGLNALLSLPTSSLFSGFNNMASTIIRHILEDPHTLQQAMELEIRHSLVTAANRHANPRVTPRNFIQNLAFVVYRDPVIFMKAAQSVCQIEMVGDRPYVVLLKDREKERIKEKDKDKSVDKDKATVAVTKVVSGDTAAGSPANSHGKQSDLNSRNVKSHRKPPQSFVTVIEHLLDLLMSFVPPPRPEDQVDVSGTALSSDMDIDCSSAKGKGKAVSVPPEESKHAIQESTASLAKTAFFLKLLTDVLLTYASSIHVVLRHDAELSNMHGPNRTSARLTSGGIFNHILQHFLPHATRQKKERKNDGDWMYKLATRANQFLVASSIRSAEARKRIFSEICSIFLDFTDSSAGYNAPVPRMNVYVDLLNDILSARSPTGSSLSAESAVIFVEAGLVHSLSTMLQVLDLDHPDSAKIVTAVVKALELVSKEHIHSADNAKGVNSSKIASDSNNVNSSSNRFQALDMTSQPTEMVTDHRETFNAVRTSQISDSVADEMDHDRDMDGGFARDGEDDFMHEMAEDGTGDGSTMEIRIEIPRNREDDMAPAADDTDEDISAEDGEDDEDEDEENNNLEEDDAHRMSHPDTDQEDREMDEEEFDEDLLEEDDEDEDEEGVILRLEEGINGINVLDHVEVFGGSNNLSGDTLRVMPLDIFGTRRQGRSTSIYNLLGRASDHGVLDHPLLEEPSSTTNFSDQGHPVPEGIEELLISHLRRPTPQPDGQRTPVGGAQENDQPNHGSDAEAREVAPAQQNENSESTLNPLDLSECAGPAPPDSDALQRDVSNASELATEMQYERSDAITRDVEAVSQASSGSGATLGESLRSLEVEIGSVEGHDDGDRHGTSGTSERLPLGDIQAAARSRRPSGNAVPVSSRDMSLESVSEVPQNPDQEPDQNASEGNQEPTRAAGADSIDPTFLEALPEDLRAEVLSSRQNQVTQTSNDQPQDDGDIDPEFLAALPPDIREEVLAQQRTQRMQQQSQELEGQPVEMDAVSIIATFPSEIREEVLLTSPDTLLATLTPALVAEANMLRERFAHRYHSSSLFGMNSRNRRGESSRRDIMAAGLDRNTGDPSRSTSKPIETEGAPLVDEDGLKALIRLLRVVQPLYKGQLQKLLVNLCTHRGSRQALVQILVDMLMLDLQGFSKKSIDAPEPPFRLYGCHANIAYSRPQSSDGLPPLVSRRVLETLTNLARSHPNVAKLLLFLEFPCPSRCFPEAHDHRHGKAVLLDDGEEQKTFALVLLLNLLDQPLYMRSVAHLEQLLNLLDVVMHNAENEIKQAKLEASSEKPSAPDNAVQDGKNNSDISVSYGSELNPEDGSKAPAVDNRSNLQAVLRSLPQPELRLLCSLLAHDGLSDSAYLLVGEVLKKIVALAPFFCCHFINELARSMQNLTLRAMKELHLYENSEKALLSSSSANGTAVLRVVQALSSLVNTLQERKDPEQPAEKDHSDAVSQISEINTALDSLWLELSNCISKIESSSEYASNLSPASASAAMLTTGVAPPLPAGTQNLLPYIESFFVTCEKLRPGQPDAVQDASTSDMEDASTSSGGQRSSACQASLDEKQNAFVKFSEKHRRLLNAFIRQNSGLLEKSFSLMLKIPRLIDFDNKRAYFRSKIKHQYDHHHHSPVRISVRRPYILEDSYNQLRMRSPQDLKGRLTVQFQGEEGIDAGGLTREWYQSISRVIVDKSALLFTTVGNDLTFQPNPNSVYQTEHLSYFKFVGRVVGKALFDGQLLDAHFTRSFYKHILGVKVTYHDIEAIDPSYYKNLKWMLENDISDVLDLTFSMDADEEKLILYEKAEVFAVLVSQEFVVLIFSML

SEQ ID NO: 164894 - protein, 3650 aa, Zea Mays
MAAAAAAMAAHRASFPLRLQQILAGSRAVSPAIKIESEPPANIKAFIDRVVNIPLHDIAIPLSGFCWEFNKFTLHTWKQGNFHHWRPLFIHFDTYFKTYISSRKDLLLSDDMTEADPMPKNAILKILRVMQIILENCQNRSSFTGLAHLKLLLASSDPEIVVAALETLVALVKINPSKLHMNGKLISCGPINTHLLSLAQGWGSKEEGLGIYSCVVANEGNHQGGLSLFPVDLENKYGGTQHRLGSTLHFEYNLGPAQYPGQTSDKGKSSNLCVIHIPDMHLQKEDDLSILKQCVDKFNVPPEHRFALLTRIRYARAFNSARTCRIYSRISLLSFIVLVQSSDAHDELTYFFTNEPEYINELIRLVRSEDSVPGSIRALAMLALGAQLAAYASSHERARILSGSSIISAGGNRMVLLSVLQKAISSLNSLNDTSSPLIVDALLQFFLLHVLSSSSSGTTVRGSGMVPPLLPLLRDNDPSHMHLVCLAVKTLQKLMEYSSPAVSLFKDLGGVELLSQRLHVEVQRVIGTADGHNSMVTDAVKSDDNHMYSQKRLIKALLKALGSATYSPGNPARSQSSQDNSLPVSLSLIFQNVDKFGGDIYFSAVTVMSEIIHKDPTCFITLKELGVPDAFISSVTAGVIPSCKALICVPNGLGAICLNNQGLEAVRETSALRFLVDTFTSRKYLIPMNEGVVLLANAVEELLRHVQSLRSIGVDIIIEIINKLSSSQEYKNNETATLQEKTDMETDVEGRDLVSAMDSSVDGSNDEQFSHLSIFHVMVLVHRTMENSETCRLFVEKGGLHALLTLLLRPSITQSSGGMPIALHSTMVFKGFTQHHSTPLARAFCSSLKEHLKSALKELDKVSNSFDMTKIEKGAIPSLFVVEFLLFLAASKDNRWMNALLSEFGDASREVLEDVGQVHREVLWKISLFEKNKIVAETSSSSSTSEAQQPDMSASDIGDSRYTSFRQYLDPILRRRGSGWNIESQVSDLINMYRDIGRAASDSQRVGSDRYSSLGLPSSSQDQFSSSSDANASTRSEEDKKKSEHSSCFDMMRSLSYHINHLFLELGKAMLFASRRENSPVNLSPAVISVANNIASIVLEHLNFEGHSVSFERDMTVTTKCRYLGKVVEFVDGMLLDRPESCNSIMVNSFYCRGVIQAILTTFQATSELLFTMSRPPSSPMETDSKTGKDGKEMDSSWIYGPLTSYGAIMDHLVTSSFILSSSTRQLLEQPIFNGSVRFPQDAETFMKLLQSKVLKTVLPIWAHPQFPECNIELISSVMSIMRHVCSGVEVKDTVGNGGARLAGPPPDESAISLIVEMGFSRARAEEALRQVGTNSVEIATDWLFAHPEEPQEEDDELARALAMSLGNSVTPAQEGDSRSNDLELEEATVQPPPIDEMLRSCLQLLQRKEALAFSVRDMLVTISSQNDGQNRVKVLTYLIDNLKQCVVASEPSNDTALSALLHVLALILHGDTAAREVASKAGLVKVALDLLCSWEVQIRESSMIEVPNWVISCFLSVDQMLQLEPKLPDVTELHVLKRDNSNIKTSLVIDDSKRKDSESLPNVGLLDMEDQFQLLKICCKCIGKQLPSASMHAILQLSATLTKVHAAAICFLESGGLNALLSLPTSSLFSGFNNMASTIIRHILEDPHTLQQAMELEIRHSLVTAANRHANPRVTPRNFIQNLAFVVYRDPVIFMKAAQSVCQIEMVGDRPYVVLLKDREKERIKEKDKDKSVDKDKATVAVTKVVSGDTAAGSPANSHGKQSDLNSRNVKSHRKPPQSFVTVIEHLLDLLMSFVPPPRPEDQVDVSGTALSSDMDIDCSSAKGKGKAVSVPPEESKHAIQESTASLAKTAFFLKLLTDVLLTYASSIHVVLRHDAELSNMHGPNRTSARLTSGGIFNHILQHFLPHATRQKKERKNDGDWMYKLATRANQFLVASSIRSAEARKRIFSEICSIFLDFTDSSAGYNAPVPRMNVYVDLLNDILSARSPTGSSLSAESAVIFVEAGLVHSLSTMLQVLDLDHPDSAKIVTAVVKALELVSKEHIHSADNAKGVNSSKIASDSNNVNSSSNRFQALDMTSQPTEMVTDHRETFNAVRTSQISDSVADEMDHDRDMDGGFARDGEDDFMHEMAEDGTGDGSTMEIRIEIPRNREDDMAPAADDTDEDISAEDGEDDEDEDEENNNLEEDDAHRMSHPDTDQEDREMDEEEFDEDLLEEDDEDEDEEGVILRLEEGINGINVLDHVEVFGGSNNLSGDTLRVMPLDIFGTRRQGRSTSIYNLLGRASDHGVLDHPLLEEPSSTTNFSDQGHPENLVEMAFSDRNHESSSSRLDAIFRSLRSGRNGHRFNMWLDDGPQRNGSAAPAVPEGIEELLISHLRRPTPQPDGQRTPVGGAQENDQPNHGSDAEAREVAPAQQNENSESTLNPLDLSECAGPAPPDSDALQRDVSNASELATEMQYERSDAITRDVEAVSQASSGSGATLGESLRSLEVEIGSVEGHDDGDRHGTSGTSERLPLGDIQAAARSRRPSGNAVPVSSRDMSLESVSEVPQNPDQEPDQNASEGNQEPTRAAGADSIDPTFLEALPEDLRAEVLSSRQNQVTQTSNDQPQDDGDIDPEFLAALPPDIREEVLAQQRTQRMQQQSQELEGQPVEMDAVSIIATFPSEIREEVLLTSPDTLLATLTPALVAEANMLRERFAHRYHSSSLFGMNSRNRRGESSRRDIMAAGLDRNTGDPSRSTSKPIETEGAPLVDEDGLKALIRLLRVVQPLYKGQLQKLLVNLCTHRGSRQALVQILVDMLMLDLQGFSKKSIDAPEPPFRLYGCHANIAYSRPQSSDGLPPLVSRRVLETLTNLARSHPNVAKLLLFLEFPCPSRCFPEAHDHRHGKAVLLDDGEEQKTFALVLLLNLLDQPLYMRSVAHLEQLLNLLDVVMHNAENEIKQAKLEASSEKPSAPDNAVQDGKNNSDISVSYGSELNPEDGSKAPAVDNRSNLQAVLRSLPQPELRLLCSLLAHDGLSDSAYLLVGEVLKKIVALAPFFCCHFINELARSMQNLTLRAMKELHLYENSEKALLSSSSANGTAVLRVVQALSSLVNTLQERKDPEQPAEKDHSDAVSQISEINTALDSLWLELSNCISKIESSSEYASNLSPASASAAMLTTGVAPPLPAGTQNLLPYIESFFVTCEKLRPGQPDAVQDASTSDMEDASTSSGGQRSSACQASLDEKQNAFVKFSEKHRRLLNAFIRQNSGLLEKSFSLMLKIPRLIDFDNKRAYFRSKIKHQYDHHHHSPVRISVRRPYILEDSYNQLRMRSPQDLKGRLTVQFQGEEGIDAGGLTREWYQSISRVIVDKSALLFTTVGNDLTFQPNPNSVYQTEHLSYFKFVGRVVGKALFDGQLLDAHFTRSFYKHILGVKVTYHDIEAIDPSYYKNLKWMLENDISDVLDLTFSMDADEEKLILYEKAEVTDCELIPGGRNIRVTEENKHEYVDRVAEHRLTTAIRPQINAFLEGFNELIPRELISIFNDKELELLISGLPDIDLDDLKTNTEYSGYSIASPVVQWFWEIVQGFSKEDKARFLQFVTGTSKVPLEGFSELQGISGPQRFQIHKAYGSTNHLPSAHTCFNQLDLPEYTSKEQLQERLLLAIHEANEGFGFG

SEQ ID NO: 164895 - protein, 3589 aa, Zea Mays
MAAAAAAMAAHRASFPLRLQQILAGSRAVSPAIKIESEPPANIKAFIDRVVNIPLHDIAIPLSGFCWEFNKGNFHHWRPLFIHFDTYFKTYISSRKDLLLSDDMTEADPMPKNAILKILRVMQIILENCQNRSSFTGLAHLKLLLASSDPEIVVAALETLVALVKINPSKLHMNGKLISCGPINTHLLSLAQGWGSKEEGLGIYSCVVANEGNHQGGLSLFPVDLENKYGGTQHRLGSTLHFEYNLGPAQYPGQTSDKGKSSNLCVIHIPDMHLQKEDDLSILKQCVDKFNVPPEHRFALLTRIRYARAFNSARTCRIYSRISLLSFIVLVQSSDAHDELTYFFTNEPEYINELIRLVRSEDSVPGSIRALAMLALGAQLAAYASSHERARILSGSSIISAGGNRMVLLSVLQKAISSLNSLNDTSSPLIVDALLQFFLLHVLSSSSSGTTVRGSGMVPPLLPLLRDNDPSHMHLVCLAVKTLQKLMEYSSPAVSLFKDLGGVELLSQRLHVEVQRVIGTADGHNSMVTDAVKSDDNHMYSQKRLIKALLKALGSATYSPGNPARSQSSQDNSLPVSLSLIFQNVDKFGGDIYFSAVTVMSEIIHKDPTCFITLKELGVPDAFISSVTAGVIPSCKALICVPNGLGAICLNNQGLEAVRETSALRFLVDTFTSRKYLIPMNEGVVLLANAVEELLRHVQSLRSIGVDIIIEIINKLSSSQEYKNNETATLQEKTDMETDVEGRDLVSAMDSSVDGSNDEQFSHLSIFHVMVLVHRTMENSETCRLFVEKGGLHALLTLLLRPSITQSSGGMPIALHSTMVFKGFTQHHSTPLARAFCSSLKEHLKSALKELDKVSNSFDMTKIEKGAIPSLFVVEFLLFLAASKDNRWMNALLSEFGDASREVLEDVGQVHREVLWKISLFEKNKIVAETSSSSSTSEAQQPDMSASDIGDSRYTSFRQYLDPILRRRGSGWNIESQVSDLINMYRDIGRAASDSQRVGSDRYSSLGLPSSSQDQFSSSSDANASTRSEEDKKKSEHSSCFDMMRSLSYHINHLFLELGKAMLFASRRENSPVNLSPAVISVANNIASIVLEHLNFEGHSVSFERDMTVTTKCRYLGKVVEFVDGMLLDRPESCNSIMVNSFYCRGVIQAILTTFQATSELLFTMSRPPSSPMETDSKTGKDGKEMDSSWIYGPLTSYGAIMDHLVTSSFILSSSTRQLLEQPIFNGSVRFPQDAETFMKLLQSKVLKTVLPIWAHPQFPECNIELISSVMSIMRHVCSGVEVKDTVGNGGARLAGPPPDESAISLIVEMGFSRARAEEALRQVGTNSVEIATDWLFAHPEEPQEEDDELARALAMSLGNSVTPAQEGDSRSNDLELEEATVQPPPIDEMLRSCLQLLQRKEALAFSVRDMLVTISSQNDGQNRVKVLTYLIDNLKQCVVASEPSNDTALSALLHVLALILHGDTAAREVASKAGLVKVALDLLCSWEVQIRESSMIEVPNWVISCFLSVDQMLQLEPKLPDVTELHVLKRDNSNIKTSLVIDDSKRKDSESLPNVGLLDMEDQFQLLKICCKCIGKQLPSASMHAILQLSATLTKVHAAAICFLESGGLNALLSLPTSSLFSGFNNMASTIIRHILEDPHTLQQAMELEIRHSLVTAANRHANPRVTPRNFIQNLAFVVYRDPVIFMKAAQSVCQIEMVGDRPYVVLLKDREKERIKEKDKDKSVDKDKATVAVTKVVSGDTAAGSPANSHGKQSDLNSRNVKSHRKPPQSFVTVIEHLLDLLMSFVPPPRPEDQVDVSGTALSSDMDIDCSSAKGKGKAVSVPPEESKHAIQESTASLAKTAFFLKLLTDVLLTYASSIHVVLRHDAELSNMHGPNRTSARLTSGGIFNHILQHFLPHATRQKKERKNDGDWMYKLATRANQFLVASSIRSAEARKRIFSEICSIFLDFTDSSAGYNAPVPRMNVYVDLLNDILSARSPTGSSLSAESAVIFVEAGLVHSLSTMLQVLDLDHPDSAKIVTAVVKALELVSKEHIHSADNAKGVNSSKIASDSNNVNSSSNRFQALDMTSQPTEMVTDHRETFNAVRTSQISDSVADEMDHDRDMDGGFARDGEDDFMHEMAEDGTGDGSTMEIRIEIPRNREDDMAPAADDTDEDISAEDGEDDEDEDEENNNLEEDDAHRMSHPDTDQEDREMDEEEFDEDLLEEDDEDEDEEGVILRLEEGINGINVLDHVEVFGGSNNLSGDTLRVMPLDIFGTRRQGRSTSIYNLLGRASDHGVLDHPLLEEPSSTTNFSDQGHPVPEGIEELLISHLRRPTPQPDGQRTPVGGAQENDQPNHGSDAEAREVAPAQQNENSESTLNPLDLSECAGPAPPDSDALQRDVSNASELATEMQYERSDAITRDVEAVSQASSGSGATLGESLRSLEVEIGSVEGHDDGDRHGTSGTSERLPLGDIQAAARSRRPSGNAVPVSSRDMSLESVSEVPQNPDQEPDQNASEGNQEPTRAAGADSIDPTFLEALPEDLRAEVLSSRQNQVTQTSNDQPQDDGDIDPEFLAALPPDIREEVLAQQRTQRMQQQSQELEGQPVEMDAVSIIATFPSEIREEVLLTSPDTLLATLTPALVAEANMLRERFAHRYHSSSLFGMNSRNRRGESSRRDIMAAGLDRNTGDPSRSTSKPIETEGAPLVDEDGLKALIRLLRVVQPLYKGQLQKLLVNLCTHRGSRQALVQILVDMLMLDLQGFSKKSIDAPEPPFRLYGCHANIAYSRPQSSDGLPPLVSRRVLETLTNLARSHPNVAKLLLFLEFPCPSRCFPEAHDHRHGKAVLLDDGEEQKTFALVLLLNLLDQPLYMRSVAHLEQLLNLLDVVMHNAENEIKQAKLEASSEKPSAPDNAVQDGKNNSDISVSYGSELNPEDGSKAPAVDNRSNLQAVLRSLPQPELRLLCSLLAHDGLSDSAYLLVGEVLKKIVALAPFFCCHFINELARSMQNLTLRAMKELHLYENSEKALLSSSSANGTAVLRVVQALSSLVNTLQERKDPEQPAEKDHSDAVSQISEINTALDSLWLELSNCISKIESSSEYASNLSPASASAAMLTTGVAPPLPAGTQNLLPYIESFFVTCEKLRPGQPDAVQDASTSDMEDASTSSGGQRSSACQASLDEKQNAFVKFSEKHRRLLNAFIRQNSGLLEKSFSLMLKIPRLIDFDNKRAYFRSKIKHQYDHHHHSPVRISVRRPYILEDSYNQLRMRSPQDLKGRLTVQFQGEEGIDAGGLTREWYQSISRVIVDKSALLFTTVGNDLTFQPNPNSVYQTEHLSYFKFVGRVVGKALFDGQLLDAHFTRSFYKHILGVKVTYHDIEAIDPSYYKNLKWMLENDISDVLDLTFSMDADEEKLILYEKAEVTDCELIPGGRNIRVTEENKHEYVDRVAEHRLTTAIRPQINAFLEGFNELIPRELISIFNDKELELLISGLPDIDLDDLKTNTEYSGYSIASPVVQWFWEIVQGFSKEDKARFLQFVTGTSKVPLEGFSELQGISGPQRFQIHKAYGSTNHLPSAHTCFNQLDLPEYTSKEQLQERLLLAIHEANEGFGFG

SEQ ID NO: 164896 - protein, 3428 aa, Zea Mays
MAAAAAAMAAHRASFPLRLQQILAGSRAVSPAIKIESEPPANIKAFIDRVVNIPLHDIAIPLSGFCWEFNKGNFHHWRPLFIHFDTYFKTYISSRKDLLLSDDMTEADPMPKNAILKILRVMQIILENCQNRSSFTGLAHLKLLLASSDPEIVVAALETLVALVKINPSKLHMNGKLISCGPINTHLLSLAQGWGSKEEGLGIYSCVVANEGNHQGGLSLFPVDLENKYGGTQHRLGSTLHFEYNLGPAQYPGQTSDKGKSSNLCVIHIPDMHLQKEDDLSILKQCVDKFNVPPEHRFALLTRIRYARAFNSARTCRIYSRISLLSFIVLVQSSDAHDELTYFFTNEPEYINELIRLVRSEDSVPGSIRALAMLALGAQLAAYASSHERARILSGSSIISAGGNRMVLLSVLQKAISSLNSLNDTSSPLIVDALLQFFLLHVLSSSSSGTTVRGSGMVPPLLPLLRDNDPSHMHLVCLAVKTLQKLMEYSSPAVSLFKDLGGVELLSQRLHVEVQRVIGTADGHNSMVTDAVKSDDNHMYSQKRLIKALLKALGSATYSPGNPARSQSSQDNSLPVSLSLIFQNVDKFGGDIYFSAVTVMSEIIHKDPTCFITLKELGVPDAFISSVTAGVIPSCKALICVPNGLGAICLNNQGLEAVRETSALRFLVDTFTSRKYLIPMNEGVVLLANAVEELLRHVQSLRSIGVDIIIEIINKLSSSQEYKNNETATLQEKTDMETDVEGRDLVSAMDSSVDGSNDEQFSHLSIFHVMVLVHRTMENSETCRLFVEKGGLHALLTLLLRPSITQSSGGMPIALHSTMVFKGFTQHHSTPLARAFCSSLKEHLKSALKELDKVSNSFDMTKIEKGAIPSLFVVEFLLFLAASKDNRWMNALLSEFGDASREVLEDVGQVHREVLWKISLFEKNKIVAETSSSSSTSEAQQPDMSASDIGDSRYTSFRQYLDPILRRRGSGWNIESQVSDLINMYRDIGRAASDSQRVGSDRYSSLGLPSSSQDQFSSSSDANASTRSEEDKKKSEHSSCFDMMRSLSYHINHLFLELGKAMLFASRRENSPVNLSPAVISVANNIASIVLEHLNFEGHSVSFERDMTVTTKCRYLGKVVEFVDGMLLDRPESCNSIMVNSFYCRGVIQAILTTFQATSELLFTMSRPPSSPMETDSKTGKDGKEMDSSWIYGPLTSYGAIMDHLVTSSFILSSSTRQLLEQPIFNGSVRFPQDAETFMKLLQSKVLKTVLPIWAHPQFPECNIELISSVMSIMRHVCSGVEVKDTVGNGGARLAGPPPDESAISLIVEMGFSRARAEEALRQVGTNSVEIATDWLFAHPEEPQEEDDELARALAMSLGNSVTPAQEGDSRSNDLELEEATVQPPPIDEMLRSCLQLLQRKEALAFSVRDMLVTISSQNDGQNRVKVLTYLIDNLKQCVVASEPSNDTALSALLHVLALILHGDTAAREVASKAGLVKVALDLLCSWEVQIRESSMIEVPNWVISCFLSVDQMLQLEPKLPDVTELHVLKRDNSNIKTSLVIDDSKRKDSESLPNVGLLDMEDQFQLLKICCKCIGKQLPSASMHAILQLSATLTKVHAAAICFLESGGLNALLSLPTSSLFSGFNNMASTIIRHILEDPHTLQQAMELEIRHSLVTAANRHANPRVTPRNFIQNLAFVVYRDPVIFMKAAQSVCQIEMVGDRPYVVLLKDREKERIKEKDKDKSVDKDKATVAVTKVVSGDTAAGSPANSHGKQSDLNSRNVKSHRKPPQSFVTVIEHLLDLLMSFVPPPRPEDQVDVSGTALSSDMDIDCSSAKGKGKAVSVPPEESKHAIQESTASLAKTAFFLKLLTDVLLTYASSIHVVLRHDAELSNMHGPNRTSARLTSGGIFNHILQHFLPHATRQKKERKNDGDWMYKLATRANQFLVASSIRSAEARKRIFSEICSIFLDFTDSSAGYNAPVPRMNVYVDLLNDILSARSPTGSSLSAESAVIFVEAGLVHSLSTMLQVLDLDHPDSAKIVTAVVKALELVSKEHIHSADNAKGVNSSKIASDSNNVNSSSNRFQALDMTSQPTEMVTDHRETFNAVRTSQISDSVADEMDHDRDMDGGFARDGEDDFMHEMAEDGTGDGSTMEIRIEIPRNREDDMAPAADDTDEDISAEDGEDDEDEDEENNNLEEDDAHRMSHPDTDQEDREMDEEEFDEDLLEEDDEDEDEEGVILRLEEGINGINVLDHVEVFGGSNNLSGDTLRVMPLDIFGTRRQGRSTSIYNLLGRASDHGVLDHPLLEEPSSTTNFSDQGHPENLVEMAFSDRNHESSSSRLDAIFRSLRSGRNGHRFNMWLDDGPQRNGSAAPAVPEGIEELLISHLRRPTPQPDGQRTPVGGAQENDQPNHGSDAEAREVAPAQQNENSESTLNPLDLSECAGPAPPDSDALQRDVSNASELATEMQYERSDAITRDVEAVSQASSGSGATLGESLRSLEVEIGSVEGHDDGDRHGTSGTSERLPLGDIQAAARSRRPSGNAVPVSSRDMSLESVSEVPQNPDQEPDQNASEGNQEPTRAAGADSIDPTFLEALPEDLRAEVLSSRQNQVTQTSNDQPQDDGDIDPEFLAALPPDIREEVLAQQRTQRMQQQSQELEGQPVEMDAVSIIATFPSEIREEVLLTSPDTLLATLTPALVAEANMLRERFAHRYHSSSLFGMNSRNRRGESSRRDIMAAGLDRNTGDPSRSTSKPIETEGAPLVDEDGLKALIRLLRVVQPLYKGQLQKLLVNLCTHRGSRQALVQILVDMLMLDLQGFSKKSIDAPEPPFRLYGCHANIAYSRPQSSDGLPPLVSRRVLETLTNLARSHPNVAKLLLFLEFPCPSRCFPEAHDHRHGKAVLLDDGEEQKTFALVLLLNLLDQPLYMRSVAHLEQLLNLLDVVMHNAENEIKQAKLEASSEKPSAPDNAVQDGKNNSDISVSYGSELNPEDGSKAPAVDNRSNLQAVLRSLPQPELRLLCSLLAHDGLSDSAYLLVGEVLKKIVALAPFFCCHFINELARSMQNLTLRAMKELHLYENSEKALLSSSSANGTAVLRVVQALSSLVNTLQERKDPEQPAEKDHSDAVSQISEINTALDSLWLELSNCISKIESSSEYASNLSPASASAAMLTTGVAPPLPAGTQNLLPYIESFFVTCEKLRPGQPDAVQDASTSDMEDASTSSGGQRSSACQASLDEKQNAFVKFSEKHRRLLNAFIRQNSGLLEKSFSLMLKIPRLIDFDNKRAYFRSKIKHQYDHHHHSPVRISVRRPYILEDSYNQLRMRSPQDLKGRLTVQFQGEEGIDAGGLTREWYQSISRVIVDKSALLFTTVGNDLTFQPNPNSVYQTEHLSYFKFVGRVVGKALFDGQLLDAHFTRSFYKHILGVKVTYHDIEAIDPSYYKNLKWMLETKRN

SEQ ID NO: 164897 - protein, 3608 aa, Zea Mays
MAAAAAAMAAHRASFPLRLQQILAGSRAVSPAIKIESEPPANIKAFIDRVVNIPLHDIAIPLSGFCWEFNKGNFHHWRPLFIHFDTYFKTYISSRKDLLLSDDMTEADPMPKNAILKILRVMQIILENCQNRSSFTGLAHLKLLLASSDPEIVVAALETLVALVKINPSKLHMNGKLISCGPINTHLLSLAQGWGSKEEGLGIYSCVVANEGNHQGGLSLFPVDLENKYGGTQHRLGSTLHFEYNLGPAQYPGQTSDKGKSSNLCVIHIPDMHLQKEDDLSILKQCVDKFNVPPEHRFALLTRIRYARAFNSARTCRIYSRISLLSFIVLVQSSDAHDELTYFFTNEPEYINELIRLVRSEDSVPGSIRALAMLALGAQLAAYASSHERARILSGSSIISAGGNRMVLLSVLQKAISSLNSLNDTSSPLIVDALLQFFLLHVLSSSSSGTTVRGSGMVPPLLPLLRDNDPSHMHLVCLAVKTLQKLMEYSSPAVSLFKDLGGVELLSQRLHVEVQRVIGTADGHNSMVTDAVKSDDNHMYSQKRLIKALLKALGSATYSPGNPARSQSSQDNSLPVSLSLIFQNVDKFGGDIYFSAVTVMSEIIHKDPTCFITLKELGVPDAFISSVTAGVIPSCKALICVPNGLGAICLNNQGLEAVRETSALRFLVDTFTSRKYLIPMNEGVVLLANAVEELLRHVQSLRSIGVDIIIEIINKLSSSQEYKNNETATLQEKTDMETDVEGRDLVSAMDSSVDGSNDEQFSHLSIFHVMVLVHRTMENSETCRLFVEKGGLHALLTLLLRPSITQSSGGMPIALHSTMVFKGFTQHHSTPLARAFCSSLKEHLKSALKELDKVSNSFDMTKIEKGAIPSLFVVEFLLFLAASKDNRWMNALLSEFGDASREVLEDVGQVHREVLWKISLFEKNKIVAETSSSSSTSEAQQPDMSASDIGDSRYTSFRQYLDPILRRRGSGWNIESQVSDLINMYRDIGRAASDSQRVGSDRYSSLGLPSSSQDQFSSSSDANASTRSEEDKKKSEHSSCFDMMRSLSYHINHLFLELGKAMLFASRRENSPVNLSPAVISVANNIASIVLEHLNFEGHSVSFERDMTVTTKCRYLGKVVEFVDGMLLDRPESCNSIMVNSFYCRGVIQAILTTFQATSELLFTMSRPPSSPMETDSKTGKDGKEMDSSWIYGPLTSYGAIMDHLVTSSFILSSSTRQLLEQPIFNGSVRFPQDAETFMKLLQSKVLKTVLPIWAHPQFPECNIELISSVMSIMRHVCSGVEVKDTVGNGGARLAGPPPDESAISLIVEMGFSRARAEEALRQVGTNSVEIATDWLFAHPEEPQEEDDELARALAMSLGNSVTPAQEGDSRSNDLELEEATVQPPPIDEMLRSCLQLLQRKEALAFSVRDMLVTISSQNDGQNRVKVLTYLIDNLKQCVVASEPSNDTALSALLHVLALILHGDTAAREVASKAGLVKVALDLLCSWEVQIRESSMIEVPNWVISCFLSVDQMLQLEPKLPDVTELHVLKRDNSNIKTSLVIDDSKRKDSESLPNVGLLDMEDQFQLLKICCKCIGKQLPSASMHAILQLSATLTKVHAAAICFLESGGLNALLSLPTSSLFSGFNNMASTIIRHILEDPHTLQQAMELEIRHSLVTAANRHANPRVTPRNFIQNLAFVVYRDPVIFMKAAQSVCQIEMVGDRPYVVLLKDREKERIKEKDKDKSVDKDKATVAVTKVVSGDTAAGSPANSHGKQSDLNSRNVKSHRKPPQSFVTVIEHLLDLLMSFVPPPRPEDQVDVSGTALSSDMDIDCSSAKGKGKAVSVPPEESKHAIQESTASLAKTAFFLKLLTDVLLTYASSIHVVLRHDAELSNMHGPNRTSARLTSGGIFNHILQHFLPHATRQKKERKNDGDWMYKLATRANQFLVASSIRSAEARKRIFSEICSIFLDFTDSSAGYNAPVPRMNVYVDLLNDILSARSPTGSSLSAESAVIFVEAGLVHSLSTMLQVLDLDHPDSAKIVTAVVKALELVSKEHIHSADNAKGVNSSKIASDSNNVNSSSNRFQALDMTSQPTEMVTDHRETFNAVRTSQISDSVADEMDHDRDMDGGFARDGEDDFMHEMAEDGTGDGSTMEIRIEIPRNREDDMAPAADDTDEDISAEDGEDDEDEDEENNNLEEDDAHRMSHPDTDQEDREMDEEEFDEDLLEEDDEDEDEEGVILRLEEGINGINVLDHVEVFGGSNNLSGDTLRVMPLDIFGTRRQGRSTSIYNLLGRASDHGVLDHPLLEEPSSTTNFSDQGHPENLVEMAFSDRNHESSSSRLDAIFRSLRSGRNGHRFNMWLDDGPQRNGSAAPAVPEGIEELLISHLRRPTPQPDGQRTPVGGAQENDQPNHGSDAEAREVAPAQQNENSESTLNPLDLSECAGPAPPDSDALQRDVSNASELATEMQYERSDAITRDVEAVSQASSGSGATLGESLRSLEVEIGSVEGHDDGDRHGTSGTSERLPLGDIQAAARSRRPSGNAVPVSSRDMSLESVSEVPQNPDQEPDQNASEGNQEPTRAAGADSIDPTFLEALPEDLRAEVLSSRQNQVTQTSNDQPQDDGDIDPEFLAALPPDIREEVLAQQRTQRMQQQSQELEGQPVEMDAVSIIATFPSEIREEVLLTSPDTLLATLTPALVAEANMLRERFAHRYHSSSLFGMNSRNRRGESSRRDIMAAGLDRNTGDPSRSTSKPIETEGAPLVDEDGLKALIRLLRVVQPLYKGQLQKLLVNLCTHRGSRQALVQILVDMLMLDLQGFSKKSIDAPEPPFRLYGCHANIAYSRPQSSDGLPPLVSRRVLETLTNLARSHPNVAKLLLFLEFPCPSRCFPEAHDHRHGKAVLLDDGEEQKTFALVLLLNLLDQPLYMRSVAHLEQLLNLLDVVMHNAENEIKQAKLEASSEKPSAPDNAVQDGKNNSDISVSYGSELNPEDGSKAPAVDNRSNLQAVLRSLPQPELRLLCSLLAHDGLSDSAYLLVGEVLKKIVALAPFFCCHFINELARSMQNLTLRAMKELHLYENSEKALLSSSSANGTAVLRVVQALSSLVNTLQERKDPEQPAEKDHSDAVSQISEINTALDSLWLELSNCISKIESSSEYASNLSPASASAAMLTTGVAPPLPAGTQNLLPYIESFFVTCEKLRPGQPDAVQDASTSDMEDASTSSGGQRSSACQASLDEKQNAFVKFSEKHRRLLNAFIRQNSGLLEKSFSLMLKIPRLIDFDNKRAYFRSKIKHQYDHHHHSPVRISVRRPYILEDSYNQLRMRSPQDLKGRLTVQFQGEEGIDAGGLTREWYQSISRVIVDKSALLFTTVGNDLTFQPNPNSVYQTEHLSYFKFVGRVVGKALFDGQLLDAHFTRSFYKHILGVKVTYHDIEAIDPSYYKNLKWMLENDISDVLDLTFSMDADEEKLILYEKAEVTDCELIPGGRNIRVTEENKHEYVDRVAEHRLTTAIRPQINAFLEGFNELIPRELISIFNDKELELLISGLPDIDLDDLKTNTEYSGYSIASPVVQWFWEIVQGFSKEDKARFLQFVTGTSKVLVNFKGSLGHKGFRYTRHTAARTICLQLILALTN

SEQ ID NO: 164898 - protein, 3586 aa, Zea Mays
MAAAAAAMAAHRASFPLRLQQILAGSRAVSPAIKIESEPPANIKAFIDRVVNIPLHDIAIPLSGFCWEFNKGNFHHWRPLFIHFDTYFKTYISSRKDLLLSDDMTEADPMPKNAILKILRVMQIILENCQNRSSFTGLAHLKLLLASSDPEIVVAALETLVALVKINPSKLHMNGKLISCGPINTHLLSLAQGWGSKEEGLGIYSCVVANEGNHQGGLSLFPVDLENKYGGTQHRLGSTLHFEYNLGPAQYPGQTSDKGKSSNLCVIHIPDMHLQKEDDLSILKQCVDKFNVPPEHRFALLTRIRYARAFNSARTCRIYSRISLLSFIVLVQSSDAHDELTYFFTNEPEYINELIRLVRSEDSVPGSIRALAMLALGAQLAAYASSHERARILSGSSIISAGGNRMVLLSVLQKAISSLNSLNDTSSPLIVDALLQFFLLHVLSSSSSGTTVRGSGMVPPLLPLLRDNDPSHMHLVCLAVKTLQKLMEYSSPAVSLFKDLGGVELLSQRLHVEVQRVIGTADGHNSMVTDAVKSDDNHMYSQKRLIKALLKALGSATYSPGNPARSQSSQDNSLPVSLSLIFQNVDKFGGDIYFSAVTVMSEIIHKDPTCFITLKELGVPDAFISSVTAGVIPSCKALICVPNGLGAICLNNQGLEAVRETSALRFLVDTFTSRKYLIPMNEGVVLLANAVEELLRHVQSLRSIGVDIIIEIINKLSSSQEYKNNETATLQEKTDMETDVEGRDLVSAMDSSVDGSNDEQFSHLSIFHVMVLVHRTMENSETCRLFVEKGGLHALLTLLLRPSITQSSGGMPIALHSTMVFKGFTQHHSTPLARAFCSSLKEHLKSALKELDKVSNSFDMTKIEKGAIPSLFVVEFLLFLAASKDNRWMNALLSEFGDASREVLEDVGQVHREVLWKISLFEKNKIVAETSSSSSTSEAQQPDMSASDIGDSRYTSFRQYLDPILRRRGSGWNIESQVSDLINMYRDIGRAASDSQRVGSDRYSSLGLPSSSQDQFSSSSDANASTRSEEDKKKSEHSSCFDMMRSLSYHINHLFLELGKAMLFASRRENSPVNLSPAVISVANNIASIVLEHLNFEGHSATSELLFTMSRPPSSPMETDSKTGKDGKEMDSSWIYGPLTSYGAIMDHLVTSSFILSSSTRQLLEQPIFNGSVRFPQDAETFMKLLQSKVLKTVLPIWAHPQFPECNIELISSVMSIMRHVCSGVEVKDTVGNGGARLAGPPPDESAISLIVEMGFSRARAEEALRQVGTNSVEIATDWLFAHPEEPQEEDDELARALAMSLGNSVTPAQEGDSRSNDLELEEATVQPPPIDEMLRSCLQLLQRKEALAFSVRDMLVTISSQNDGQNRVKVLTYLIDNLKQCVVASEPSNDTALSALLHVLALILHGDTAAREVASKAGLVKVALDLLCSWEVQIRESSMIEVPNWVISCFLSVDQMLQLEPKLPDVTELHVLKRDNSNIKTSLVIDDSKRKDSESLPNVGLLDMEDQFQLLKICCKCIGKQLPSASMHAILQLSATLTKVHAAAICFLESGGLNALLSLPTSSLFSGFNNMASTIIRHILEDPHTLQQAMELEIRHSLVTAANRHANPRVTPRNFIQNLAFVVYRDPVIFMKAAQSVCQIEMVGDRPYVVLLKDREKERIKEKDKDKSVDKDKATVAVTKVVSGDTAAGSPANSHGKQSDLNSRNVKSHRKPPQSFVTVIEHLLDLLMSFVPPPRPEDQVDVSGTALSSDMDIDCSSAKGKGKAVSVPPEESKHAIQESTASLAKTAFFLKLLTDVLLTYASSIHVVLRHDAELSNMHGPNRTSARLTSGGIFNHILQHFLPHATRQKKERKNDGDWMYKLATRANQFLVASSIRSAEARKRIFSEICSIFLDFTDSSAGYNAPVPRMNVYVDLLNDILSARSPTGSSLSAESAVIFVEAGLVHSLSTMLQVLDLDHPDSAKIVTAVVKALELVSKEHIHSADNAKGVNSSKIASDSNNVNSSSNRFQALDMTSQPTEMVTDHRETFNAVRTSQISDSVADEMDHDRDMDGGFARDGEDDFMHEMAEDGTGDGSTMEIRIEIPRNREDDMAPAADDTDEDISAEDGEDDEDEDEENNNLEEDDAHRMSHPDTDQEDREMDEEEFDEDLLEEDDEDEDEEGVILRLEEGINGINVLDHVEVFGGSNNLSGDTLRVMPLDIFGTRRQGRSTSIYNLLGRASDHGVLDHPLLEEPSSTTNFSDQGHPENLVEMAFSDRNHESSSSRLDAIFRSLRSGRNGHRFNMWLDDGPQRNGSAAPAVPEGIEELLISHLRRPTPQPDGQRTPVGGAQENDQPNHGSDAEAREVAPAQQNENSESTLNPLDLSECAGPAPPDSDALQRDVSNASELATEMQYERSDAITRDVEAVSQASSGSGATLGESLRSLEVEIGSVEGHDDGDRHGTSGTSERLPLGDIQAAARSRRPSGNAVPVSSRDMSLESVSEVPQNPDQEPDQNASEGNQEPTRAAGADSIDPTFLEALPEDLRAEVLSSRQNQVTQTSNDQPQDDGDIDPEFLAALPPDIREEVLAQQRTQRMQQQSQELEGQPVEMDAVSIIATFPSEIREEVLLTSPDTLLATLTPALVAEANMLRERFAHRYHSSSLFGMNSRNRRGESSRRDIMAAGLDRNTGDPSRSTSKPIETEGAPLVDEDGLKALIRLLRVVQPLYKGQLQKLLVNLCTHRGSRQALVQILVDMLMLDLQGFSKKSIDAPEPPFRLYGCHANIAYSRPQSSDGLPPLVSRRVLETLTNLARSHPNVAKLLLFLEFPCPSRCFPEAHDHRHGKAVLLDDGEEQKTFALVLLLNLLDQPLYMRSVAHLEQLLNLLDVVMHNAENEIKQAKLEASSEKPSAPDNAVQDGKNNSDISVSYGSELNPEDGSKAPAVDNRSNLQAVLRSLPQPELRLLCSLLAHDGLSDSAYLLVGEVLKKIVALAPFFCCHFINELARSMQNLTLRAMKELHLYENSEKALLSSSSANGTAVLRVVQALSSLVNTLQERKDPEQPAEKDHSDAVSQISEINTALDSLWLELSNCISKIESSSEYASNLSPASASAAMLTTGVAPPLPAGTQNLLPYIESFFVTCEKLRPGQPDAVQDASTSDMEDASTSSGGQRSSACQASLDEKQNAFVKFSEKHRRLLNAFIRQNSGLLEKSFSLMLKIPRLIDFDNKRAYFRSKIKHQYDHHHHSPVRISVRRPYILEDSYNQLRMRSPQDLKGRLTVQFQGEEGIDAGGLTREWYQSISRVIVDKSALLFTTVGNDLTFQPNPNSVYQTEHLSYFKFVGRVVGKALFDGQLLDAHFTRSFYKHILGVKVTYHDIEAIDPSYYKNLKWMLENDISDVLDLTFSMDADEEKLILYEKAEVTDCELIPGGRNIRVTEENKHEYVDRVAEHRLTTAIRPQINAFLEGFNELIPRELISIFNDKELELLISGLPDIDLDDLKTNTEYSGYSIASPVVQWFWEIVQGFSKEDKARFLQFVTGTSKVPLEGFSELQGISGPQRFQIHKAYGSTNHLPSAHTCFNQLDLPEYTSKEQLQERLLLAIHEANEGFGFG

SEQ ID NO: 164899 - protein, 106 aa, Zea Mays
MAIQPSVCPEECLLTVPNNDVHCNVEEGLSIARDLSGEACPKPTRISFLSPQPANLQRAAKQIQIMNSKTTIFQRLLHPFPRDQTVTSLSLFLALPEETPPFVDGF

SEQ ID NO: 164900 - protein, 164 aa, Zea Mays
MTRRRCPCVDRMAQIGRRRGHGRRRHTARGRGGRDPAATVVGGEDVQNHRHKGMEVLYAHGLHVEVGGGSGLIIEIFTSVGVIIRVVVERREGSVTSSGLSTLETGSSLAFPRESVLGCAATILGGSDGLDSLIGSNDKDLAGLLLCGCILGMLLVTGKRAEGH

SEQ ID NO: 164901 - protein, 1178 aa, Zea Mays
MPLSPSPRRSRSPAWETYHKRNNSFGNVLPVKSKDDELALFSDMQKVETENFLLEPSEDFDDSIAAKLSYFPEVKLGVNIPAHGESHNLLNADDNKNDYEWLLTPPETPLFRSLDDEENQSITQVSRGRAQSKPVQTSRSSTMDNSQRASRSSASPSRLSPSPRSMGRTRSSSSASRSSPPLAVQTQMPSQRSSAPPIAKTLTPPRRSPSPVSRRMSTGSSRPTLNETRGASPVKPNHRSSQKLHGWQSNVPGFPYDAPSNLRTSLTDRPVCRSRGGSPSSFSGLEKGSRSRRQSMSPTPPRRASSSHSIERDRMSSYSKASATSSGEDDLDSMQSVPISYSSSPVVKKSLVVMKTRTMAPSKNLSKNFTPSSVPKRTFDSALWLMDHRKAPQDRFRPLLSGAPASTFGSGNGNDVHKPMFSHNSSLTTSSNASSYHGATFGSYMHGSQEQHDLVGEWEADDSSRGHEDIFMFDKLDELNKEDIHYKSTGSTDNSLVIVKHLVSSRHDLEGSSRPNQSLCHSADSSQVGNSKNANCSRCGKFFDAMDVDEEGVYCDVCASMIGNILTSPIVQPIGEENQQFDKTTNLKHCIASDPPIPTGCIGYSKEVSLDHQLVNSESYTDCLDQVPPIHSMGHTPQEMLLGREEKIDAEHRKKHVGDSLGNTNDIVFHQSNVTECEQIEPTSVGHDLFIRDQMDNHNHGSSQYNETISETVTSDSSHQPGSTTYQNPKLETTEGTGISVLLVPKSNSNKWPIVEGRALAATNMLCSEPYYARDGVSMMKRSFGLDSTSAASSSDLGSSRQSIICFERLRSGKRGDFEKSQISSTMSRQSIASVSDMSICSSSASLCPQIGAVGDSCFPIDTLESSTSRTLISSEENDAFCKDALPSDMECLSPQVIADDDSHVDLKIQSYLSEVGDTTVENHSAGRMPDMDHTSTNMYSLDTEMPSDTRESSGLEESCLPETEEDAYAINQCNKGSAREHSSDENNFDDIQMQSEIVQGLAEENRLDDCCMSAISEEDVLISGREADIRELPNDEEFCAEVEGSRKQIQRCFTLEEAADTILFCSSIVHDLAYKAATIALENEKESEFVDPIRPTVRIVGGSFSKDESLPKLTHRRTPNRKVKRKRLEGETTTTETTEKDAVAKDSSPVCSASGITRNSDNMKPPKLESKCNCIIM

SEQ ID NO: 164902 - protein, 1177 aa, Zea Mays
MPLSPSPRRSRSPAWETYHKRNNSFGNVLPVKSKDDELALFSDMQKVETENFLLEPSEDFDDSIAKLSYFPEVKLGVNIPAHGESHNLLNADDNKNDYEWLLTPPETPLFRSLDDEENQSITQVSRGRAQSKPVQTSRSSTMDNSQRASRSSASPSRLSPSPRSMGRTRSSSSASRSSPPLAVQTQMPSQRSSAPPIAKTLTPPRRSPSPVSRRMSTGSSRPTLNETRGASPVKPNHRSSQKLHGWQSNVPGFPYDAPSNLRTSLTDRPVCRSRGGSPSSFSGLEKGSRSRRQSMSPTPPRRASSSHSIERDRMSSYSKASATSSGEDDLDSMQSVPISYSSSPVVKKSLVVMKTRTMAPSKNLSKNFTPSSVPKRTFDSALWLMDHRKAPQDRFRPLLSGAPASTFGSGNGNDVHKPMFSHNSSLTTSSNASSYHGATFGSYMHGSQEQHDLVGEWEADDSSRGHEDIFMFDKLDELNKEDIHYKSTGSTDNSLVIVKHLVSSRHDLEGSSRPNQSLCHSADSSQVGNSKNANCSRCGKFFDAMDVDEEGVYCDVCASMIGNILTSPIVQPIGEENQQFDKTTNLKHCIASDPPIPTGCIGYSKEVSLDHQLVNSESYTDCLDQVPPIHSMGHTPQEMLLGREEKIDAEHRKKHVGDSLGNTNDIVFHQSNVTECEQIEPTSVGHDLFIRDQMDNHNHGSSQYNETISETVTSDSSHQPGSTTYQNPKLETTEGTGISVLLVPKSNSNKWPIVEGRALAATNMLCSEPYYARDGVSMMKRSFGLDSTSAASSSDLGSSRQSIICFERLRSGKRGDFEKSQISSTMSRQSIASVSDMSICSSSASLCPQIGAVGDSCFPIDTLESSTSRTLISSEENDAFCKDALPSDMECLSPQVIADDDSHVDLKIQSYLSEVGDTTVENHSAGRMPDMDHTSTNMYSLDTEMPSDTRESSGLEESCLPETEEDAYAINQCNKGSAREHSSDENNFDDIQMQSEIVQGLAEENRLDDCCMSAISEEDVLISGREADIRELPNDEEFCAEVEGSRKQIQRCFTLEEAADTILFCSSIVHDLAYKAATIALENEKESEFVDPIRPTVRIVGGSFSKDESLPKLTHRRTPNRKVKRKRLEGETTTTETTEKDAVAKDSSPVCSASGITRNSDNMKPPKLESKCNCIIM

SEQ ID NO: 164903 - protein, 1040 aa, Zea Mays
MPLSPSPRRSRSPAWETYHKRNNSFGNVLPVKSKDDELALFSDMQKVETENFLLEPSEDFDDSIAKLSYFPEVKLGVNIPAHGESHNLLNADDNKNDYEWLLTPPETPLFRSLDDEENQSITQVSRGRAQSKPVQTSRSSTMDNSQRASRSSASPSRLSPSPRSMGRTRSSSSASRSSPPLAVQTQMPSQRSSAPPIAKTLTPPRRSPSPVSRRMSTGSSRPTLNETRGASPVKPNHRSSQKLHGWQSNVPGFPYDAPSNLRTSLTDRPVCRSRGGSPSSFSGLEKGSRSRRQSMSPTPPRRASSSHSIERDRMSSYSKASATSSGEDDLDSMQSVPISYSSSPVVKKSLVVMKTRTMAPSKNLSKNFTPSSVPKRTFDSALWLMDHRKAPQDRFRPLLSGAPASTFGSGNGNDVHKPMFSHNSSLTTSSNASSYHGATFGSYMHGSQEQHDLVGEWEADDSSRGHEDIFMFDKLDELNKEDIHYKSTGSTDNSLVIVKHLVSSRHDLEGSSRPNQSLCHSADSSQVGNSKNANCSRCGKFFDAMDVDEEGVYCDVCASMIGNILTSPIVQPIGEENQQFDKTTNLKHCIASDPPIPTGCIGYSKEVSLDHQLVNSESYTDCLDQVPPIHSMGHTPQEMLLGREEKIDAEHRKKHVGDSLGNTNDIVFHQSNVTECEQIEPTSVGHDLFIRDQMDNHNHGSSQYNETISETVTSDSSHQPGSTTYQNPKLETTEGTGISVLLVPKSNSNKWPIVEGRALAATNMLCSEPYYARDGVSMMKRSFGLDSTSAASSSDLGSSRQSIICFERLRSGKRGDFEKSQISSTMSRQSIASVSDMSICSSSASLCPQIGAVGDSCFPIDTLESSTSRTLISSEENDAFCKDALPSDMECLSPQVIADDDSHVDLKIQSYLSEVGDTTVENHSAGRMPDMDHTSTNMYSLDTEMPSDTRESSGLEESCLPETEEDAYAINQCNKGSAREHSSDENNFDDIQMQSEIVQGLAEENRLDDCCMSAISEEDVLISGREADIRELPNDVWLSQ

SEQ ID NO: 164904 - protein, 152 aa, Zea Mays
MVGTCKTYMVFLVYYLINFGCCTVDILKQLSGQEISRKPPGGKPGDRIGRLASHILKQQSYYPLYPPAPGVPLDLSLAKEALEIPSAPDVLLLPSDLAPFVKVLSLGEGSDDDRRFICVNPGRLAKGIGGGTFVELYYNEGIDKTNASIIRI

SEQ ID NO: 164905 - protein, 527 aa, Zea Mays
MLLSNSHVDEAAFHDTPGYEQEKAPEGSSISELTPLASDRPSSSRVAKTNADRITPFATRVNKFTQQYVLNADNAVGVPSKSAEITEDEIIRRVQPSQRCYLQVQRSQPEPGCRFMYDRMEDRFNYLEDRIRKSASLFSASGFCGQPADATLASEEKMFAVGTVACDGEGHLNEKSILLQGSVEHSRGQCVRLDLKDLDHFSLFPGQVVGIEGHNPSGHCFVASKLFDSIPVSVDAQLPSAKKQAIDNESNQNSDAGTLSRALSSIIAAGPYTTTDNMLFEPLQELLSYACRKPPQLLILMGPFIDSDHPDIKKGTIDQSFHDIFHFEVLRKIQDFTQYLGNTVRVILIPSVRDAHHDFVFPQPAFDLNLLEDTTHQITSLANPCLFGSNEINFGCCTVDILKQLSGQEISRKPPGGKPGDRIGRLASHILKQQSYYPLYPPAPGVPLDLSLAKEALEIPSAPDVLLLPSDLAPFVKVLSLGEGSDDDRRFICVNPGRLAKGIGGGTFVELYYNEGIDKTNASIIRI

SEQ ID NO: 164906 - protein, 595 aa, Zea Mays
MEEEIRKEFQSNGFSIGGAGPEDAAQILSTLLTYCINYKMSPADLVSNWEVYYLNRQLDGLKLESSYLDGFLSHLQNEVKDRIIKEEANLHIYSSNDVDMLLSNSHVDEAAFHDTPGYEQEKAPEGSSISELTPLYVLNADNAVGVPSKSAEITEDEIIRRVQPSQRCYLQVQRSQPEPGCRFMYDRMEDRFNYLEDRIRKSASLFSASGFCGQPADATLASEEKMFAVGTVACDGEGHLNEKSILLQGSVEHSRGQCVRLDLKDLDHFSLFPGQVVGIEGHNPSGHCFVASKLFDSIPVSVDAQLPSAKKQAIDNESNQNSDAGTLSRALSSIIAAGPYTTTDNMLFEPLQELLSYACRKPPQLLILMGPFIDSDHPDIKKGTIDQSFHDIFHFEVLRKIQDFTQYLGNTVRVILIPSVRDAHHDFVFPQPAFDLNLLEDTTHQITSLANPCLFGSNEINFGCCTVDILKQLSGQEISRKPPGGKPGDRIGRLASHILKQQSYYPLYPPAPGVPLDLSLAKEALEIPSAPDVLLLPSDLAPFVKVLSLGEGSDDDRRFICVNPGRLAKGIGGGTFVELYYNEGIDKTNASIIRI

SEQ ID NO: 164907 - protein, 281 aa, Zea Mays
MEEEIRKEFQSNGFSIGGAGPEDAAQILSTLLTYCINYKMSPADLVSNWEVYYLNRQLDGLKLESSYLDGFLSHLQNEVKDRIIKEEANLHIYSSNDVDMLLSNSHVDEAAFHDTPGYEQEKAPEGSSISELTPLASDRPSSSRVAKTNADRITPFATRVNKFTQQYVLNADNAVGVPSKSAEITEDEIIRRVQPSQRCYLQVQRSQPEPGCRFMYDRMEDRFNYLEDRIRKSASLFSASGFCGQPADATLASEEKMFAVGTVACDGEGHLNEKSILLQGR

SEQ ID NO: 164908 - protein, 373 aa, Zea Mays
MEEEIRKEFQSNGFSIGGAGPEDAAQILSTLLTYCINYKMSPADLVSNWEVYYLNRQLDGLKLESSYLDGFLSHLQNEVKDRIIKEEANLHIYSSNDVDMLLSNSHVDEAAFHDTPGYEQEKAPEGSSISELTPLASDRPSSSRVAKTNADRITPFATRVNKFTQQYVLNADNAVGVPSKSAEITEDEIIRRVQPSQRCYLQVQRSQPEPGCRFMYDRMEDRFNYLEDRIRKSASLFSASGFCGQPADATLASEEKMFAVGTVACDGEGHLNEKSILLQGRWWVLKATIPVDTVLLHQNYLIPYRSLWMLNFPVLRNKLLIMKATKILTLALCQEHCHRSSQQVPIQQPIICCLSHFKNFFHMLVESRLSFSY

SEQ ID NO: 164909 - protein, 358 aa, Zea Mays
MAMAAATGTVVLVDAALAPYEHPDLRWLVRKHVLAVLQDFPTLSPSVDTYTSDSGASAVLLNARGLLTVSPALPPVLLTLWLPLEYPYLPPLVYVFPAAPPASLARDHPFVDHRTGRVRQTLPYLEDWAVPRSSVAGLVRSLVGALRMCHPLTSRFGSVVHATATARATTTTTPTPEEEEQERMHAALLDELVSRLGRDAAAFRGHVDEDIHALSSSQGNLRARADAMDRAVRDLEGERMRLERAVTASLSHRGELLSWLHKTSCAPDDAGAALLLAPHGAAGGDAPRWLESKASELAMDDTVDALGRALEDGERVIGFHEYIKRVKVLAREQFFHCYAASTSMSKRSPPPDATSPLI

SEQ ID NO: 164910 - protein, 339 aa, Zea Mays
MAMAAATGTVVLVDAALAPYEHPDLRWLVRKHVLAVLQDFPTLSPSVDTYTSDSGASAVLLNARGLLTVSPALPPVLLTLWLPLEYPYLPPLVYVFPAAPPASLARDHPFVDHRTGRVRQTLPYLEDWAVPRSSVAGLVRSLVGALRMCHPLTSRFGSVVHATATARATTTTTPTPEEEEQERMHAALLDELVSRLGRDAAAFRGHVDEDIHALSSSQGNLRARADAMDRAVRDLEGERMRLERAVTASLSHRGELLSWLHKTSCAPDDAGAALLLAPHGAAGGDAPRWLESKASELAMDDTVDALGRALEDGERVIGFHEYIKRVKRSPPPDATSPLI

SEQ ID NO: 164911 - protein, 59 aa, Zea Mays
MEGAPVAAMHATGQGEGARAATRADSLRLCTAHPARRSLPLFSVCRATLHAVHSNPPEG

SEQ ID NO: 164912 - protein, 239 aa, Zea Mays
MARLVALASMVAVLVLGLACAEAEPQCTRRRPPAPPRPHSVTITEFGAVGDGVTLNTVSFQNAVFYLRSFADKGGAQLYIPRGRWLTGSFNLTSHLTLFLESGAVIVGTQDVSQWPVVEPLPSYGRGMDLPGSRHRSLINGQNLVDVVITGNNGTIDGQGSTWWNWFRSNKLNYSRPHLVEFVDSEQIVISNITFLNSPAWSIHPVYCSNVVVHSVTIQTSLDAPLNHGIVPGDECEGL

SEQ ID NO: 164913 - protein, 941 aa, Zea Mays
MASTPPAPAVAPSLVDTLFQRSLNDLVKFLRADPSSTGEAAAVARALSEIHREIRAPDAATKSVALQKLTYLSSLHFAPIASHPLAFLAIELLASPHLPHKRLAYLAASLSLHPVSLSLLPLATHQLHKDLSPSAGVHHHVSALALQLLASPAAAAAPDLPVHLAQDLVPHLARGCPRAIAAAARVIAASPSAAVPVLFKPLAACLASPDPRASTAAVAAFCDLSAPPADATPFLPLAPDLYNLLTTSRSNWALIKVLKLFARLAPLESRLAARIVDPVCQLLTRSAAMSLTFECIRTVLTALPAHDAAVRLAIGKAMEFIAAADDSNLRYLGLLALGMLGPAYASTVNDCREAIAKSLGDADTNIRQEALRLIMGMVNENNIMDIAALLISHVAKSDPEFANDILGAVLAACGHNVYEMVVDFDWYVSLLAHMARTLHCAQGDEIGRQLVDVGLRVQDARPELVRSARTLLIDPALLGNHFLFPVLSAAAWISGEYVDLTKDPVELVEALLQPRTSLLPISVRAVYIHAVFKVITWCFSAYIGRLGDSDLAMDVMFDRLAADETVNLESNAALGSGDEQDIGASTVQKDPFSHESILYMINLIQTTVGPLINCNEVEVQERAHNLIGFVHLVREIQGLNKRKVADGDKSSRLKELVKTMRAVFCQELGPVYVNAQMKVSPPDGLILNENLVELAGMVSEDDTTPSTSIFFYPRSRHSVDTRDEPAVSIGLSSLSEHRKRHGLFYLQTGKAEDEPNDYPQANDSLPSSSNNSANDDKWKTAERVFAGKKSTATKTRPKVVKLDTEDFLSSMMPSAIVPKEDPLSGALRDVLLGSDAKALSSQKASDMNLEVMLNKANSNESSSQQIENLGSHPASHSRTSKQQNHDKEKVTDRPESDGKEPRKHRSSGRSGHRQGKNKHREKSSAQPDIVPQTPVIQDFLL

SEQ ID NO: 164914 - protein, 327 aa, Zea Mays
MSREAQKLDCAAGAGGIGVLSLDLLGQVLEHLREPRDRKTCRLVSRAFERAEAAHRRALRVLRREPLPRLLRAFPALERLDLSACASLDDASLAAAVADAGGGLAGLRSVCLARANGVGWRGLEALVAACPKLAAVDLSHCVTAGDREAAALAAASELRDLRLDKCLAVTDMGLAKVAVGCPKLEKLSLKWCREISDIGIDLLAKKCPELRSLNISYLKVGNGSLGSISSLERLEELAMVCCSGIDDEGLELLSKGSDSLQSVDVSRCDHVTSEGLASLIDGRNFLQKLYAADCLHEIGQRFLSKLARLKETLTLLKLDGLELGVVT

SEQ ID NO: 164915 - protein, 151 aa, Zea Mays
MPVLIQSPHHKVITPTLLPVGEIISRFEKKGFLLKGLKLFQCPKDLAQEHYKDLKDKPFFPKLIDYITSGPVVCMAWEGDGVVASARKLIGATNPLQAEPGTIRGDLAVQTGRNVVHGSDSPDNGKREIELWFKEGEVCQWESVQAPWLIE

SEQ ID NO: 164916 - protein, 200 aa, Zea Mays
METMSALARTAPPLAGTIRRPSCALRPTASLSFAAASTTPRGRLGLGLSTAPAGSGRAARARAVPRRIVASSEVEQSYIMIKPDGVQRGLCPKDLAQEHYKDLKDKPFFPKLIDYITSGPVVCMAWEGDGVVASARKLIGATNPLQAEPGTIRGDLAVQTGRNVVHGSDSPDNGKREIELWFKEGEVCQWESVQAPWLIE

SEQ ID NO: 164917 - protein, 74 aa, Zea Mays
MILKVLWPECGWQPVSLTDLITAAAVKKVYRKATLCIHPDKVQQKGANLQQKYIAEKVFDLLKAWNKFNSEELF

SEQ ID NO: 164918 - protein, 851 aa, Zea Mays
MDDFQGLLARDFGLRPQGKAAPMSAARSSSPSGSAWTNTRSAVGSAAPSAPSYDELFGSAPPPPPKATPSLDNIFNSFKEPASTAPPPKPKHSSAPVFDKPVYDDDLLGGFGKSSQVREEVDDKRKPEAPTAVAATGFDYLIPSFGGRSSPRQRDAIGAKQKKVSMSTSKQSASLSDPFVVLETTSSSAHPFADPLDESGKAAKYQGKNRESTSVGSSLFEDSSTFNQAPKFEPFFTPEVDNGSKDRNESSRAQNSNPVQDFSKRNSSQQPSVEDFENIFPKSQSARYSDVHVDIGSEKYSGNGINDQSPRSDESEDEIWLTASEIPLFTQPTSAPPPSRPPPPLAVKQKHGSRSTRKDEHLRRSRKNNDHQRSFSNQAGVSTVDGLEDFTMGKSQNVHTFNEEEFERSTAAAAMKEAMDKAEAKFKHAKEVRERERDAKLRNREQQERDNVIRSYAQDREDKERNERLEQEREMKQKEEKEREQRRLEEERELERHRERERARQAVERATKEARERAASEARAKAEREARKRSERAAVQRAQQEARERAAADAKDRAERATAEANERAATEAKEKAASQARDRAAAEKAAVERAQQEVRKRAERAAVERAAAEARERQAAAAAAAREKTSKPDDLESLFGMGARANSAPKQRAPTVDSMFDSQTQNRGTSTSTSMKKASSTANVADDLSALFGGAPTSSNEFQEVDGESEERRRARLERHQRTRERAAKALAEKNERDMQQQRDQAERHRLAETLDFEIKRWAAGKEGNLRALLSTLQYVLWPECGWQPVSLTDLITAAAVKKVYRKATLCIHPDKVQQKGANLQQKYIAEKVFDLLKEAWNKFNSEELF

SEQ ID NO: 164919 - protein, 790 aa, Zea Mays
MDDFQGLLARDFGLRPQGKAAPMSAARSSSPSGSAWTNTRSAVGSAAPSAPSYDELFGSAPPPPPKATPSLDNIFNSFKEPASTAPPPKPKHSSAPVFDKPVYDDDLLGGFGKSSQVREEVDDKRKPEAPTAVAATGFDYLIPSFGGRSSPRQRDAIGAKQKKVSMSTSKQSASLSDPFVVLETTSSSAHPFADPLDESGKAAKYQGKNRESTSVGSSLFEDSSTFNQAPKFEPFFTPEVDNGSKDRNESSRAQNSNPVQDFSKRNSSQQPSVEDFENIFPKSQSARYSDVHVDIGSEKYSGNGINDQSPRSDESEDEIWLTASEIPLFTQPTSAPPPSRPPPPLAVKQKHGSRSTRKDEHLRRSRKNNDHQRSFSNQAGVSTVDGLEDFTMGKSQNVHTFNEEEFERSTAAAAMKEAMDKAEAKFKHAKEVRERERDAKLRNREQQERDNVIRSYAQDREDKERNERLEQEREMKQKEEKEREQRRLEEERELERHRERERARQAVERATKEARERAASEARAKAEREARKRSERAAVQRAQQEARERAAADAKDRAERATAEANERAATEAKEKAASQARDRAAAEKAAVERAQQEVRKRAERAAVERAAAEARERQAAAAAAAREKTSKPDDLESLFGMGARANSAPKQRAPTVDSMFDSQTQNRGTSTSTSMKKASSTANVADDLSALFGGAPTSSNEFQEVDGESEERRRARLERHQRTRERAAKALAEKNERDMQQQRDQAERHRLAETLDFEIKRWAAGKEGSLARMWMATCIPYRFDHCCCC

SEQ ID NO: 164920 - protein, 857 aa, Zea Mays
MDDFQGLLARDFGLRPQGKAAPMSAARSSSPSGSAWTNTRSAVGSAAPSAPSYDELFGSAPPPPPKATPSLDNIFNSFKEPASTAPPPKPKHSSAPVFDKPVYDDDLLGGFGKSSQVREEVDDKRKPEAPTAVAATGFDYLIPSFGGRSSPRQRDAIGAKQKKVSMSTSKQSASLSDPFVVLETTSSSAHPFADPLDESGKAAKYQGKNRESTSVGSSLFEDSSTFNQAPKFEPFFTPEVDNGSKDRNESSRAQNSNPVQDFSKRNSSQQPSVEDFENIFPKSQSARYSDVHVDIGSEKYSGNGINDQSPRSDESEDEIWLTASEIPLFTQPTSAPPPSRPPPPLAVKQKHGSRSTRKDEHLRRSRKNNDHQRSFSNQAGVSTVDGLEDFTMGKSQNVHTFNEEEFERSTAAAAMKEAMDKAEAKFKHAKEVRERERDAKLRNREQQERDNVIRSYAQDREDKERNERLEQEREMKQKEEKEREQRRLEEERELERHRERERARQAVERATKEARERAASEARAKAEREARKRSERAAVQRAQQEARERAAADAKDRAERATAEANERAATEAKEKAASQARDRAAAEKAAVERAQQEVRKRAERAAVERAAAEARERQAAAAAAAREKTSKPDDLESLFGMGARANSAPKQRAPTVDSMFDSQTQNRGTSTSTSMKKASSTANVADDLSALFGGAPTSSNEFQEVDGESEERRRARLERHQRTRERAAKALAEKNERDMQQQRDQAERHRLAETLDFEIKRWAAGKEGNLRALLSTLQYVLWPECGWQPVSLTDLITAAAVKKVYRKATLCIHPDKVQQKGANLQQKYIAEKVFDLLKLKYPTKSIYKSFQNPLLI

SEQ ID NO: 164921 - protein, 867 aa, Zea Mays
MDDFQGLLARDFGLRPQGKAAPMSAARSSSPSGSAWTNTRSAVGSAAPSAPSYDELFGSAPPPPPKATPSLDNIFNSFKEPASTAPPPKPKHSSAPVFDKPVYDDDLLGGFGKSSQVREEVDDKRKPEAPTAVAATGFDYLIPSFGGRSSPRQRDAIGAKQKKVSMSTSKQSASLSDPFVVLETTSSSAHPFADPLDESGKAAKYQGKNRESTSVGSSLFEDSSTFNQAPKFEPFFTPEVDNGSKDRNESSRAQNSNPVQDFSKRNSSQQPSVEDFENIFPKSQSARYSDVHVDIGSEKYSGNGINDQSPRSDESEDEIWLTASEIPLFTQPTSAPPPSRPPPPLAVKQKHGSRSTRKDEHLRRSRKNNDHQRSFSNQAGVSTVDGLEDFTMGKSQNVHTFNEEEFERSTAAAAMKEAMDKAEAKFKHAKEVRERERDAKLRNREQQERDNVIRSYAQDREDKERNERLEQEREMKQKEEKEREQRRLEEERELERHRERERARQAVERATKEARERAASEARAKAEREARKRSERAAVQRAQQEARERAAADAKDRAERATAEANERAATEAKEKAASQARDRAAAEKAAVERAQQEVRKRAERAAVERAAAEARERQAAAAAAAREKTSKPDDLESLFGMGARANSAPKQRAPTVDSMFDSQTQNRGTSTSTSMKKASSTANVADDLSALFGGAPTSSNEFQEVDGESEERRRARLERHQRTRERAAKALAEKNERDMQQQRDQAERHRLAETLDFEIKRWAAGKEGNLRALLSTLQYVLWPECGWQPVSLTDLITAAAVKKVYRKATLCIHPDKVQQKGANLQQKYIAEKVFDLLKVCIALKTFVAAYCLHANMVSRQQKLLFF

SEQ ID NO: 164922 - protein, 892 aa, Zea Mays
MDADEMDLDSPSSASPAPASGSLPTVLSELAALHRRASSSSVTSPPLSLPSITFLSSSPAAVASIFPRLAEAGVPASSLLPPLEASLSAHPLPAAVAYLRLLLAPASPLLTLFSPLPFLSLLLVIRKAASSFSGAGSAASNPSSVSGGAANPRKRKNQRQKPAAAPPAAPSLLPKALSLLADAAGRLPLGAHPDARRSLVDTAAELTAFDVLTAVLGSDYHAGAVQDVIRALAPVVLSAAKSAARVAAVQFIVRNLVPLGAEEGEEAVRKAVGYLPRYLAVKAPDKAEARALAVEAIVEVVRALEADGREGFAGYVVAMARGKAKGRLLAVDLVLALLPVLLPFEGDACDMEEGSWGLKCLRVLVEKCSDSVGGVRARALINAAQALDILSERGVEVDRLQEVMRIGDMKLGELLRRRCTDDKAAVRKAALVLITKAIGLIGRPIDDSLLCAMGAACSDPLVSIRKAALAAISEVFRKFPDEKVMKEWLQSVPPLVIDSETSIQEECENLFLELVLNRICQAANVSLDDDFITLEEVFPEGTLDLLKSICDGEVAPCIKKICASLGKKRKLKPLLASSLQNIITLSESLWLRRCKPIENWTAPIGSWWLLSEVSSFAPKSVNWKFLSHHWKLLDNVGKDERGKACSQVEPNSALWAVNRVSLLQTISNVSMELPVEPAAELAHSLLTRIEDFDMNLSEVDAHVKSLKTLCKRKAKTAKEGDALILKWAQQLIRSAFDILDQYIKEASESARGHSFITPMTGKCKGMKQTSASKSTSQAVVAVFTVGSLILACPIANVKDITPLLHTIVTSGNSEPRPKNLVGGTISFKELAPSLYIQSWDTLAKICLVDEKVAKRYIPIFVQELERSDMATLRNNIMIAMADFYVRYTALVD

SEQ ID NO: 164923 - protein, 869 aa, Zea Mays
MDADEMDLDSPSSASPAPASGSLPTVLSELAALHRRASSSSVTSPPLSLPSITFLSSSPAAVASIFPRLAEAGVPASSLLPPLEASLSAHPLPAAVAYLRLLLAPASPLLTLFSPLPFLSLLLVIRKAASSFSGAGSAASNPSSVSGGAANPRKRKNQRQKPAAAPPAAPSLLPKALSLLADAAGRLPLGAHPDARRSLVDTAAELTAFDVLTAVLGSDYHAGAVQDVIRALAPVVLSAAKSAARVAAVQFIVRNLVPLGAEEGEEAVRKAVGYLPRYLAVKAPDKAEARALAVEAIVEVVRALEADGREGFAGYVVAMARGKAKGRLLAVDLVLALLPVLLPFEGDACDMEEGSWGLKCLRVLVEKCSDSVGGVRARALINAAQALDILSERGVEVDRLQEVMRIGDMKLGELLRRRCTDDKAAVRKAALVLITKAIGLIGRPIDDSLLCAMGAACSDPLVSIRKAALAAISEVFRKFPDEKVMKEWLQSVPPLVIDSETSIQEECENLFLELVLNRICQAANVSLDDDFITLEEVFPEGTLDLLKSICDGEVAPCIKKICASLGKKRKLKPLLASSLQNIITLSESLWLRRCKPIENWTAPIGSWWLLSEVSSFAPKSVNWKFLSHHWKLLDNVGKDERGKACSQVEPNSALWAVNRVSLLQTISNVSMELPVEPAAELAHSLLTRIEDFDMNLSEVDAHVKSLKTLCKRKAKTAKEGDALILKWAQQLIRSAFDILDQYIKEASESARGHSFITPMTGKCKGMKQTSASKSTSQAVVAVFTVGSLILACPIANVKDITPLLHTIVTSGNSEPRPKNLVGGTISFKELAPSLYIQSWDTLAKICLVDEKVAKRSLRGVIWLPFVIIS

SEQ ID NO: 164924 - protein, 1264 aa, Zea Mays
MDADEMDLDSPSSASPAPASGSLPTVLSELAALHRRASSSSVTSPPLSLPSITFLSSSPAAVASIFPRLAEAGVPASSLLPPLEASLSAHPLPAAVAYLRLLLAPASPLLTLFSPLPFLSLLLVIRKAASSFSGAGSAASNPSSVSGGAANPRKRKNQRQKPAAAPPAAPSLLPKALSLLADAAGRLPLGAHPDARRSLVDTAAELTAFDVLTAVLGSDYHAGAVQDVIRALAPVVLSAAKSAARVAAVQFIVRNLVPLGAEEGEEAVRKAVGYLPRYLAVKAPDKAEARALAVEAIVEVVRALEADGREGFAGYVVAMARGKAKGRLLAVDLVLALLPVLLPFEGDACDMEEGSWGLKCLRVLVEKCSDSVGGVRARALINAAQALDILSERGVEVDRLQEVMRIGDMKLGELLRRRCTDDKAAVRKAALVLITKAIGLIGRPIDDSLLCAMGAACSDPLVSIRKAALAAISEVFRKFPDEKVMKEWLQSVPPLVIDSETSIQEECENLFLELVLNRICQAANVSLDDDFITLEEVFPEGTLDLLKSICDGEVAPCIKKICASLGKKRKLKPLLASSLQNIITLSESLWLRRCKPIENWTAPIGSWWLLSEVSSFAPKSVNWKFLSHHWKLLDNVGKDERGKACSQVEPNSALWAVNRVSLLQTISNVSMELPVEPAAELAHSLLTRIEDFDMNLSEVDAHVKSLKTLCKRKAKTAKEGDALILKWAQQLIRSAFDILDQYIKEASESARGHSFITPMTGKCKGMKQTSASKSTSQAVVAVFTVGSLILACPIANVKDITPLLHTIVTSGNSEPRPKNLVGGTISFKELAPSLYIQSWDTLAKICLVDEKVAKRYIPIFVQELERSDMATLRNNIMIAMADFYVRYTALVDCYMPKITKSLRDPCEVVRRQTFILLSKLLQWRGVLFLRFLPSLVDESEKIRHLADYLFGNILKAKAPLLAYNSFIEAIYVLNDCTGHGVYSDSQSQGSLDRRPALFAIRGTDESTRSKRMHIYVSLLKQMAPEHLLATSAKLCAEILAAVCDGLLSVDDAGGRAVLQDALQILACKEMRIHPNILSENSEMDEEGGEGGGTASALLAAKGRAVTQVAKKNLIQIAVPIFIELKRLLESKNSPLIGCLMECLRALLKDYKNEMEEILVADKQLQRELLYDMHKYEAGKGKGKAAAQAEAEAGAGAGLSGIGRSPAVRSVLKEVNRKTTPTQPLHSMSVPKVKSILGSAGPGSGRPDVLQSVRRLQPFESDDES

SEQ ID NO: 164925 - protein, 448 aa, Zea Mays
MFLNGLRPVYTMTKLEPDDGKALKVAVVERLENGRTDIVRYGPLSSARVEVVALHGNFNAKDEESWSPEEFQKHIVSGREKSAQLLTGNLALKLSGGEAVLENATFTDNSSFTSTKMFRLGLRLVGSSGERVLEGVTKPFRVKERRVEGFEKHYPPMLDDEVWRLKKIGKIGAYHQALSDNGIDSVQEFLRAYMKDEQKLIKIFNKMPQSTWKSIVEHAMTCRVGDSLYLYEAQDKDAGLFFDELYQLVGAKFGDCYKPIDQLNEIEKNLVEALKHGAYQNIDGLQPNYKMVNNYPVLSSFPAAQGTSLFSALHPNQQALSYGDSSTGVGFGTRPSRETFNTSLGSSNEPQTSNYMELRHEQTINRVLPYDPSNGTLLPRPRITQLQIPNSERTFFGPPAVIPNNILVGHGVALSEGSHSGFPVHSLSSTDVVMSLMQSPFQLPTNNF

SEQ ID NO: 164926 - protein, 557 aa, Zea Mays
MAPPSSARRFPWSGTTDDTGGSELSLPRRRWQSVGLQVRRTRRKPTEGLFGFRRIMEAEFMGMFLPVFGSMLRRVVSEEVEKAMFRQFSAQPAPRRLLVDRNQHPRYQLMFLNGLRPVYTMTKLEPDDGKALKVAVVERLENGRTDIVRYGPLSSARVEVVALHGNFNAKDEESWSPEEFQKHIVSGREKSAQLLTGNLALKLSGGEAVLENATFTDNSSFTSTKMFRLGLRLVGSSGERVLEGVTKPFRVKERRVEGFEKHYPPMLDDEVWRLKKIGKIGAYHQALSDNGIDSVQEFLRAYMKDEQKLIKIFNKMPQSTWKSIVEHAMTCRVGDSLYLYEAQDKDAGLFFDELYQLVGAKFGDCYKPIDQLNEIEKNLVEALKHGAYQNIDGLQPNYKMVNNYPVLSSFPAAQGTSLFSALHPNQQALSYGDSSTGVGFGTRPSRETFNTSLGSSNEPQTSNYMELRHEQTINRVLPYDPSNGTLLPRPRITQLQIPNSERTFFGPPAVIPNNILVGHGVALSEGSHSGFPVHSLSSTDVVMSLMQSPFQLPTNNF

SEQ ID NO: 164927 - protein, 151 aa, Zea Mays
MILATSTVSTFVKYIFYVSDMLMEDYVRYRKITSNMNERFPDATSEELDVSNATCIICREEMATAKKLLDGHLFHVHCLREIGEQAEEEVPLRLLHGSFSSTGRILSTGTVPCCLPQCARPHFAINHEDLTLLFPNMYYANSSVEGAQDDV

SEQ ID NO: 164928 - protein, 95 aa, Zea Mays
MSAEELAAKRASGELYHCNEKFTPEHKCASTGVFLLALDDDEEEDIAAANLGILHALVGIDVGVTMWLKVCISSASLVALVDSESMHSFLQEDIT

SEQ ID NO: 164929 - protein, 193 aa, Zea Mays
MGEYFCDICKFYDDDTDKGQYHCIDCGICRVGGKENFFHCVKCGSCYSVILRDNHQCVENSMRQNCPICYEYLFDSLQGTRVLNCGHTMHLTCFEEMVAHNKYTCPICSKTALDLTHHWEMLDQEIEATIMPLVYRYKIWVLCNDCNKVSEVNFHVIGHKCSHCRSYNTRTTSRPADLSGSSSPSTDSSDNNI

SEQ ID NO: 164930 - protein, 346 aa, Zea Mays
MKLEYATEHRCGVVVKGPKLSGNISGTDPLKDNRLHLKAEPLDDSQEAKNSAAVINELSKEITHILVSHPINAQRAAEGKNIANVVLLRGCGIRIEVPAFETKHGLAPCMVAPTKIIAGLGLSLGIDILEAPGATGDYRTLLTSKAKAIAKALSSPMGTPPRVFVPGEDEYKAGKENGYDFGFLHIKAIDDAGHDKAVKLKVRGLEAVDRAFGQLARLLWEAENAGHYQYFLCVTGDHSTPVEYGDHSFEPVPFAICRLRDYAGAVGVDNIINTQLDAFPLPSVKSGEDLLDNIESLDHKPDQLKAFSGDTVCEFNEIATARGCLGRFPGSEMMGIIKKFIKAKND

SEQ ID NO: 164931 - protein, 334 aa, Zea Mays
MSKSDLDDLLLQAAGRTGKNQSRPSNPRWNSGGSGSDGFDDDDDDDSDAAPTYSRKKPSSQVPLKKRHKPEKGGRRGGGGWNDEDDEDEDGRRSGGEDSDSAPSVGSDLYKDEDDKERLENMSELQRELILAERGTRLDDYKLKQRARASSSKTDKVGAPKDSSPPPPPSRMRSSTRTDKSGSAAKSALDELRAKQRMRQQAPEARRITDLLPHSGSSIRRRAGSPPSDGSNDGNNRGRMNDHGRIAGDGRDDEFDESPSRLDPLKFDDVKSITLRRSKLVKWFMEPFFDDLISGCFVRLGIGKTKNGTPSYRLCCTTDAAREISCETTYQYCC

SEQ ID NO: 164932 - protein, 115 aa, Zea Mays
MSFSIRSAASCTVAMSCALVSSTVMLNASSRPITISTLSSESAPSSANFDSAVMAVPSGRASCSFTILQTLSTVSFLAEQQILNPRDLCLERMDTEVILWLWKETEVQLGITFVT

SEQ ID NO: 164933 - protein, 90 aa, Zea Mays
MILANTTAIGMHPNVNETPLSKQALRSYAVVFDAVYTPKETRLLREAAECGATVVSGLEMFIRQAMGQFEHFTGMPAPDSLMRDIVLTKT

SEQ ID NO: 164934 - protein, 356 aa, Zea Mays
MLEVLSQEKQVPIIGLVMNDRGFISRVLCPKYGGFLTFGSLKKGKESAPAQPTAADLINLYNIRQIGPDTKVFGIIGKPVGHSKSPILHNEAFRSVGFNAVYVPFLVDDLAKFLDTYSSPDFAGFSCTIPHKEAAVRCCDEVDPVARDIGAVNTIVRRPDGKLVGYNTDYVGAISAIEDGIKESEPTDPDKSPLAGRLFVVIGAGGAGKALAYGAKEKGARVVIANRTFARAQELANLIGGPALTLADLENYHPEEGMILANTTAIGMHPNVNETPLSKQALRSYAVVFDAVYTPKETRLLREAAECGATVVSGLEMFIRQAMGQFEHFTGMPVDDYKFRAIASSLDNPNTMKPRL

SEQ ID NO: 164935 - protein, 358 aa, Zea Mays
MLEVLSQEKQVPIIGLVMNDRGFISRVLCPKYGGFLTFGSLKKGKESAPAQPTAADLINLYNIRQIGPDTKVFGIIGKPVGHSKSPILHNEAFRSVGFNAVYVPFLVDDLAKFLDTYSSPDFAGFSCTIPHKEAAVRCCDEVDPVARDIGAVNTIVRRPDGKLVGYNTDYVGAISAIEDGIKASESEPTDPDKSPLAGRLFVVIGAGGAGKALAYGAKEKGARVVIANRTFARAQELANLIGGPALTLADLENYHPEEGMILANTTAIGMHPNVNETPLSKQALRSYAVVFDAVYTPKETRLLREAAECGATVVSGLEMFIRQAMGQFEHFTGMPVDDYKFRAIASSLDNPNTMKPRL

SEQ ID NO: 164936 - protein, 529 aa, Zea Mays
MATAMSVSAVSPPAAAVTRPRTMVCVPATARAPREMAAELAAAAALGADVAELRLDCLAGFAPRRDLPVILAKPRPLPALVTYRPKWEGGEYEGDDESRFEALLLAMELGAEYVDVELKVADKFMKLISGRKPDNCKLIVSSHNYETTPSSEELANLVAQIQATGADIVKIATTATEIVDVAKMFQILVHCQVPIIGLVMNDRGFISRVLCPKYGGFLTFGSLKKGKESAPAQPTAADLINLYNIRQIGPDTKVFGIIGKPVGHSKSPILHNEAFRSVGFNAVYVPFLVDDLAKFLDTYSSPDFAGFSCTIPHKEAAVRCCDEVDPVARDIGAVNTIVRRPDGKLVGYNTDYVGAISAIEDGIKASESEPTDPDKSPLAGRLFVVIGAGGAGKALAYGAKEKGARVVIANRTFARAQELANLIGGPALTLADLENYHPEEGMILANTTAIGMHPNVNETPLSKQALRSYAVVFDAVYTPKETRLLREAAECGATVVSGLEMFIRQAMGQFEHFTGMPDSLMRDIVLTKT

SEQ ID NO: 164937 - protein, 149 aa, Zea Mays
MQQRNYGREGFSHITVTGALAHGTKEVEVWLQTFGPGQRTPIHRHSCEEVFIVLKGKGTLLLGSSSLKYPGQPQEVPVFQNTTFSIPVNDPHQVWNSNEHEDLQVLVIISRPPVKIFIYDDWSMPHTAAKLKFPYFWDEDCLPAPKDEL

SEQ ID NO: 164938 - protein, 179 aa, Zea Mays
MVRRRPATGAAPRPHLAAVGRGLLLASVLAAAASSLPVAESSCPRDNSLVRDISRMQQRNYGREGFSHITVTGALAHGTKEVEVWLQTFGPGQRTPIHRHSCEEVFIVLKGKGTLLLGSSSLKYPGQPQEVPVFQNTTFSIPVNDPHQVWNSNEHEDLQVLVIISRPPVKINFDCTVNN

SEQ ID NO: 164939 - protein, 66 aa, Zea Mays
MVRRRPATGAAQRPQLAAVGRGLLLASVLAAAASSLPVAESSCPRGGSVATNIWSRSKDPNPQAFL

SEQ ID NO: 164940 - protein, 181 aa, Zea Mays
MVRRRPATGAAQRPQLAAVGRGLLLASVLAAAASSLPVAESSCPRDNSLVRDISRMQQSNYGREGFSHITVTGALAHGTKEVEVWLQTFGPGQRTPIHRHSCEEVFIVLKGKGTLLLGSSSLKYPGQPQEVPVFQNTTFSIPVNDPHQVWNSNEHEDLQVLVIISRPPVKINFDCTANNSL

SEQ ID NO: 164941 - protein, 171 aa, Zea Mays
MVRRRPATGAAQRPQLAAVGRGLLLASVLAAAASSLPVAESSCPRDNSLVRDISRMQQSNYGREGFSHITVTGALAHGTKEVEVWLQTFGPGQRTPIHRHSCEEVFIVLKGKGTLLLGSSSLKYPGQPQEVPVFQNTTFSIPVNDPHQVWNSNEHEDLQVLVIISRPPVKI

SEQ ID NO: 164942 - protein, 712 aa, Zea Mays
MTLIMLFTEGDEDEWDREDQGNAAVKVMCRLCFSGENEGSTKAAKMLPCKLCSKRYHRNCLKSWGEHRDLFHWSSWVCPSCRSCEVCRRPGDPNKLMFCKRCDDPYHCYCQQPSHKNVTHGPYLCPKHTRCHSCGSGVPGSGHSTRWFLGYTCCDACGRLFVKGNYCPVCLKVYRDSEVIPMVCCDVCEKWVHIECDGISEEKYQQFQADQNLQYTCAACRGECSQIRDTEDAIRELWKRRDVADHELMITLRAAAKLPSLEDVSPLYPNSDDEKLGAYVLKSESRNTLKFSLKSNSSKPPPDTPEQEKVVFKSSGSNKKPSKKKGGQGNKTNDGHDEIFLERRHDVKSSNSRLGDQSIDGNHDMSPFKNDDNAYISSSTRSSEKNLKSPSMKAVTNNADMIPKVKIKGSKVSSLHYKDGEENTSKADTGKATKLVIHLGSRHKTRSGSPKSELSNYQREQDLGSIHGRKLDVTSQLKGSRSEVKERSVMKLVRETGVQQRNSLLGDLGTSKKHATGKRSNALISGMENGNETGTRNRPFAQKQSHSSQVDENQGTADSPDNLKPSLLKLKFKRPHYEQLNTQASQPEEPTSWVSQQEDQFNVAKGQRSKRKRPSMEKADGLDGTTPAKRHHQSTDDEVMDANWILRKLGKDAIGKRIEVHLTSDGKWHQGMVSNVMGGTLCIQLDNGRSENVELGKQAIRLIASRSKGRKR

SEQ ID NO: 164943 - protein, 685 aa, Zea Mays
MCRLCFSGENEGSTKAAKMLPCKLCSKRYHRNCLKSWGEHRDLFHWSSWVCPSCRSCEVCRRPGDPNKLMFCKRCDDPYHCYCQQPSHKNVTHGPYLCPKHTRCHSCGSGVPGSGHSTRWFLGYTCCDACGRLFVKGNYCPVCLKVYRDSEVIPMVCCDVCEKWVHIECDGISEEKYQQFQADQNLQYTCAACRGECSQIRDTEDAIRELWKRRDVADHELMITLRAAAKLPSLEDVSPLYPNSDDEKLGAYVLKSESRNTLKFSLKSNSSKPPPDTPEQEKVVFKSSGSNKKPSKKKGGQGNKTNDGHDEIFLERRHDVKSSNSRLGDQSIDGNHDMSPFKNDDNAYISSSTRSSEKNLKSPSMKAVTNNADMIPKVKIKGSKVSSLHYKDGEENTSKADTGKATKLVIHLGSRHKTRSGSPKSELSNYQREQDLGSIHGRKLDVTSQLKGSRSEVKERSVMKLVRETGVQQRNSLLGDLGTSKKHATGKRSNALISGMENGNETGTRNRPFAQKQSHSSQVDENQGTADSPDNLKPSLLKLKFKRPHYEQLNTQASQPEEPTSWVSQQEDQFNVAKGQRSKRKRPSMEKADGLDGTTPAKRHHQSTDDEVMDANWILRKLGKDAIGKRIEVHLTSDGKWHQGMVSNVMGGTLCIQLDNGRSENVELGKQAIRLIASRSKGRKR

SEQ ID NO: 164944 - protein, 531 aa, Zea Mays
MVCCDVCEKWVHIECDGISEEKYQQFQADQNLQYTCAACRGECSQIRDTEDAIRELWKRRDVADHELMITLRAAAKLPSLEDVSPLYPNSDDEKLGAYVLKSESRNTLKFSLKSNSSKPPPDTPEQEKVVFKSSGSNKKPSKKKGGQGNKTNDGHDEIFLERRHDVKSSNSRLGDQSIDGNHDMSPFKNDDNAYISSSTRSSEKNLKSPSMKAVTNNADMIPKVKIKGSKVSSLHYKDGEENTSKADTGKATKLVIHLGSRHKTRSGSPKSELSNYQREQDLGSIHGRKLDVTSQLKGSRSEVKERSVMKLVRETGVQQRNSLLGDLGTSKKHATGKRSNALISGMENGNETGTRNRPFAQKQSHSSQVDENQGTADSPDNLKPSLLKLKFKRPHYEQLNTQASQPEEPTSWVSQQEDQFNVAKGQRSKRKRPSMEKADGLDGTTPAKRHHQSTDDEVMDANWILRKLGKDAIGKRIEVHLTSDGKWHQGMVSNVMGGTLCIQLDNGRSENVELGKQAIRLIASRSKGRKR

SEQ ID NO: 164945 - protein, 128 aa, Zea Mays
MRERGTETEEQIQKRLRNAQAELDQSNEPGLFHHLLVNDDLETCYENLKKLLSLDDDQEDSDDFFNKEDKETASYSIVSKTDSEILLQSETNEGKNGAIHLLALDLSSLSGGAPGRTRGLKIGSVNSF

SEQ ID NO: 164946 - protein, 232 aa, Zea Mays
MSLQGEEAVHFSVVDAKDCKQSAFEVGDKTYVICRSDDDLKTSAVKIHDKLTQTWLSPTILGEQPLLTKSQSVIPVSDEKILVIEKGVPLNESIWFLEIDTPFVKQQRKIKETEVVSWSKGVIGVGQKPVVISGPSGVGKGTLIAKLMKDYPSKFGFSVSHTTRSPREKEIDGVHYHFTERIKIEKDISEGKFLEFAHVHGNVYGTSIEAVESVTDEGKVRLIQSLIKLSER

SEQ ID NO: 164947 - protein, 85 aa, Zea Mays
MKDYPSKFGFSVSHTTRSPREKEIDGVHYHFTERIKIEKDISEGKFLEFAHVHGNVYGTSIEAVESVTDEGKVRLIQSLIKLSER

SEQ ID NO: 164948 - protein, 168 aa, Zea Mays
MTPVCWRAWHVMATLIRCAGAAVLLLALFLCQWCRTHRSNVHRVPVGGECPGHPVAFRCHGSFIPLEPHGRDHPLRHRLCSRLLRRRVCPIGSVVGLWVCHLRCKHHHLARGGRLLVEDNRAVVSREQHINCDIPFVFLLFFCRVGGGKLFPEFAVLQMPLSTVLSST

SEQ ID NO: 164949 - protein, 213 aa, Zea Mays
MSALQKHATDTLAVSLLRLATTRCSTLLNRPLLTSWRRSPTFTRSAPATGGTSSHLDARSACRPPCACESCSSTVRKLGSECLLQPRELAGNAVVHQLEEPHRLGCSLQLGDHLLPCDCVRRREVDDRDNAKTSTAATARGRYLRPFLKEMAAEDGRDGRDASVHEALDAGLAVVERLQLAQAVIVVATTTSGFFRGGHGYRPAIEAKLDGSR

SEQ ID NO: 164950 - protein, 159 aa, Zea Mays
MARGGGDRSREDDPFSDGGTTETDSDESSPRGVGARGPGSTSNPILTRLAVSRNSSPLAAATAAPGVCLLRFAWESAAGSLVGAVVGYGFMAHRWRGNVWLWRHFEDLRCGLGMMGLDSVRLRLCSPDSSVTICLISIVLLWTLFCCSPWGVANYLCLV

SEQ ID NO: 164951 - protein, 255 aa, Zea Mays
MASSAAARRLLLLRHRHGNLLPKRHFSSSSAPDGLDDGGGRVKIFDRDLKRRHRDRAAWVMRETDGLVDAVAENLLDRLEDCRKAFPSALCLGGSAGAVRRLLRGRGGIERLIMMDMSADMVKKWRESENATGDGPETHFVIGDEEFLPIKESSQDLIMSCLGLHWTNDLPGAMIQCRLALQPDGLFLAAILGGETLKELRIACTVAQMEREGGISPRMSPLAQVRDAGNLLTRAGFTLPGVDVDQYTVRYNNGL

SEQ ID NO: 164952 - protein, 294 aa, Zea Mays
MASSAAARRLLLLRHRHGNLLPKRHFSSSSAPDGLDDGGGRVKIFDRDLKRRHRDRAAWVMRETDGLVDAVAENLLDRLEDCRKAFPSALCLGGSAGAVRRLLRGRGGIERLIMMDMSADMVKKWRESENATGDGPETHFVIGDEEFLPIKESSQDLIMSCLGLHWTNDLPGAMIQCRLALQPDGLFLAAILGGETLKELRIACTVAQMEREGGISPRMSPLAQVRDAGNLLTRAGFTLPGVDVDQYTVRYNNALELVEHLRAMGETNALFQRNPVLKRDTALATAAIYQSMFG

SEQ ID NO: 164953 - protein, 211 aa, Zea Mays
MSEKDNLCLYGLPNETWEVNLPAEEVPPELPEPALGINFARDGMNEKDWLSLVAVHSDSWLMSVAFYFGARFGFDKESRKRLFTMINNLPSIYEVVTGTAKKESKEKTPKSSNKTNKSGSKPSRQVEPNSRVPKMPPPKDEESEGEEGEPQEDHESALCGACGLGYDDFWICCDLCETWFHGKCVKITPNKAEHIKQYKCPSCTGSKRAKA

SEQ ID NO: 164954 - protein, 150 aa, Zea Mays
MSVAFYFGARFGFDKESRKRLFTMINNLPSIYEVVTGTAKKESKEKTPKSSNKTNKSGSKPSRQVEPNSRVPKMPPPKDEESEGEEGEPQEDHESALCGACGLGYDDFWICCDLCETWFHGKCVKITPNKAEHIKQYKCPSCTGSKRAKA

SEQ ID NO: 164955 - protein, 266 aa, Zea Mays
MAKNPKAPDTRSGRSPTRRPRPRRAKAVPEASSAADIEDLAPSVPGAAAPGAAAPTALRAQLLRWYDAHRRDLPWRCVSGSEEERAYAVWVSEVMLQQTRVPVVVAYYERWMARWPTVRSLAAATQEEVNEMWAGLGYYRRARFLLEGAKQIIEKGLFPCTALALREVRGIGDYTAGAIASIAFNEVVPVVDGNVIRVISRLYTIADNPKESSTVKRFWDLVGQMVDPLRPGDFNQAMMELGATLCSKTKPDCTRLGGRGGRPKGK

SEQ ID NO: 164956 - protein, 450 aa, Zea Mays
MAKNPKAPDTRSGRSPTRRPRPRRAKAVPEASSAADIEDLAPSVPGAAAPGAAAPTALRAQLLRWYDAHRRDLPWRCVSGSEEERAYAVWVSEVMLQQTRVPVVVAYYERWMARWPTVRSLAAATQEEVNEMWAGLGYYRRARFLLEGAKQIIEKGLFPCTALALREVVPVVDGNVIRVISRLYTIADNPKESSTVKRFWDLVGQMVDPLRPGDFNQAMMELGATLCSKTKPGCSQCPVSSHCQALALSREKSSVQVTDFPRVVPKAKPRSDFAAVCVVQIAQGLEEEAADPKGNDHLFLLIKRPEEGLLAGLWEFPLVLVDQGKTDLLNRRKAMDKYLSKLLSIDMVRKPDVILREDVGEHVHIFSHIRLTMHVELMVINLKDGVDRLCKKGADSTKLKLVNESCVESMGLTSGIRKVYNMVRAFKEKSLAVSEIGHVPTRKRTRRLKR

SEQ ID NO: 164957 - protein, 522 aa, Zea Mays
MDLVGSLLLSMARLLDPSGLHFVGWLVTAGSIGLAALIYALLRLQREAALYWTKATREKRAAWRRLRCPSSCHSWSEDYFHGGQPSTCCVCLSSLGSTQGVDMVHRCSVCGVAAHSNCSPRAEKDCKCVAQAGASPLLHHWSERWVELDDNPEISSSCYYCDEPCGVPFLGVSPIWRCLWCQRQIHVDCHAKLLKETGNTCDLGLLRRLIVPPQSVKEIGQGSGISGMLNSIKDGFANSTVGNRRRSRNKKRMNNHPGGKINSIPTKFSVIDSVLEGFARLKGLDGKYALAKPLSQHSVKQTYRSVIPNGRVRKYELVDLPQDSRPLLVFINGKSGGRNGPSLRRRLNMLLNPIQIFELSASQAPEVGLQLFHNVKHFRILVCGGDGTVAWVLDAIEKQNYESPPPVAILPLGTGNDLSRVMRWGGGLSSVERQGGIYALLNDVDHAAVTVLDRWNVTIKEKNGTEGECTKQIKFMTNYLGIGCDAKVAYDFHTTREEKPDKFCSQVGMYFLFYFTVYARTL

SEQ ID NO: 164958 - protein, 548 aa, Zea Mays
MDLVGSLLLSMARLLDPSGLHFVGWLVTAGSIGLAALIYALLRLQREAALYWTKATREKRAAWRRLRCPSSCHSWSEDYFHGGQPSTCCVCLSSLGSTQGVDMVHRCSVCGVAAHSNCSPRAEKDCKCVAQAGASPLLHHWSERWVELDDNPEISSSCYYCDEPCGVPFLGVSPIWRCLWCQRQIHVDCHAKLLKETGNTCDLGLLRRLIVPPQSVKEIGQGSGISGMLNSIKDGFANSTVGNRRRSRNKKRMNNHPGGKINSIPTKFSVIDSVLEGFARLKGLDGKYALAKPLSQHSVKQTYRSVIPNGRVRKYELVDLPQDSRPLLVFINGKSGGRNGPSLRRRLNMLLNPIQIFELSASQAPEVGLQLFHNVKHFRILVCGGDGTVAWVLDAIEKQNYESPPPVAILPLGTGNDLSRVMRWGGGLSSVERQGGIYALLNDVDHAAVTVLDRWNVTIKEKNGTEGECTKQIKFMTNYLGIGCDAKVAYDFHTTREEKPDKFCSQFVNKLIYAREGAKDMMDRSCSDLPWHVSLEVDGKNIEIPEKV

SEQ ID NO: 164959 - protein, 657 aa, Zea Mays
MDLVGSLLLSMARLLDPSGLHFVGWLVTAGSIGLAALIYALLRLQREAALYWTKATREKRAAWRRLRCPSSCHSWSEDYFHGGQPSTCCVCLSSLGSTQGVDMVHRCSVCGVAAHSNCSPRAEKDCKCVAQAGASPLLHHWSERWVELDDNPEISSSCYYCDEPCGVPFLGVSPIWRCLWCQRQIHVDCHAKLLKETGNTCDLGLLRRLIVPPQSVKEIGQGSGISGMLNSIKDGFANSTVGNRRRSRNKKRMNNHPGGKINSIPTKFSVIDSVLEGFARLKGLDGKYALAKPLSQHSVKQTYRSVIPNGRVRKYELVDLPQDSRPLLVFINGKSGGRNGPSLRRRLNMLLNPIQIFELSASQAPEVGLQLFHNVKHFRILVCGGDGTVAWVLDAIEKQNYESPPPVAILPLGTGNDLSRVMRWGGGLSSVERQGGIYALLNDVDHAAVTVLDRWNVTIKEKNGTEGECTKQIKFMTNYLGIGCDAKVAYDFHTTREEKPDKFCSQDAEGVIVMNIPSYMGGVDLWQNDNDHNDDFRLQSIHDKILEVVCISGTWHLGKLQVGLSRAHRLAQGKVIRLHLHSSFPVQVDGEPWIQPPGCLEISHRGQMFMLRRTSEEPTGHAAAIMSEVLVNAECNGVIDASQKRLLLHEIALRLSS

SEQ ID NO: 164960 - protein, 79 aa, Zea Mays
MRLKLGYQVMRCSTNRVKAATVPTKVVVAMVIVLRLVVLVVLVIVMVIVILMVATPMPSATATAPFAALGNFLVEILIK

SEQ ID NO: 164961 - protein, 153 aa, Zea Mays
MFISCALLFFLPGARSLLSGLHAHRVQLPPPAVSAARPSLELRSASNSGARPSSLILLYNFDGGTICSVVILKEWLGIHRVAAAEISKVCGLPIFGIGVGHSTYDKASVITLMLAICLVGYSYSQNHKSAWFEAISTKPNKGFRLSSSDSPSC

SEQ ID NO: 164962 - protein, 143 aa, Zea Mays
MFISCALLFFLPGARSLLSGLHAHRVQLPPPAVSAARPSLELRSASNSGARPSSLILLYNFDGGTICSVVILKEWLGIHRVAAAEISKGLPIFGIGVGHSTYDKASDSGSHQVTPPHVDFADVSILVVELRTTIRCPDRERWS

SEQ ID NO: 164963 - protein, 165 aa, Zea Mays
MFISCALLFFLPGARSLLSGLHAHRVQLPPPAVSAARPSLELRSASNSGARPSSLILLYNFDGGTICSVVILKEWLGIHRVAAAEISKGLPIFGIGVGHSTYDKASAIATAKIIKVPGLKLSALSQIKDSGSHQVTPPHVDFADVSILVVELRTTIRCPDRERWS

SEQ ID NO: 164964 - protein, 210 aa, Zea Mays
MFISCALLFFLPGARSLLSGLHAHRVQLPPPAVSAARPSLELRSASNSGARPSSLLPLFITLYGWSLENMHQGYPKETLVRFLKAREWNVAKAHKMIVECLNWRIQNEIDSVLEILLYNFDGGTICSVVILKEWLGIHRVAAAEISKGLPIFGIGVGHSTYDKASVITLMLAICLVGYSYSQNHKSAWFEAISTKPNKGFRLSSSDSPSC

SEQ ID NO: 164965 - protein, 250 aa, Zea Mays
MFISCALLFFLPGARSLLSGLHAHRVQLPPPAVSAARPSLELRSASNSGARPSSLLPLFITLYGWSLENMHQGYPKETLVRFLKAREWNVAKAHKMIVECLNWRIQNEIDSVLERPIAPVDLYKSIRDSQLIGLSRYTKEILLYNFDGGTICSVVILKEWLGIHRVAAAEISKGLPIFGIGVGHSTYDKASAIATAKIIKVPGLKLSALSQIKDSGSHQVTPPHVDFADVSILVVELRTTIRCPDRERWS

SEQ ID NO: 164966 - protein, 237 aa, Zea Mays
MFISCALLFFLPGARSLLSGLHAHRVQLPPPAVSAARPSLELRSASNSGARPSSLNMHQGYPKETLVRFLKAREWNVAKAHKMIVECLNWRIQNEIDSVLERPIAPVDLYKSIRDSQLIGLSRYTKEILLYNFDGGTICSVVILKEWLGIHRVAAAEISKGLPIFGIGVGHSTYDKASAIATAKIIKVPGLKLSALSQIKDSGSHQVTPPHVDFADVSILVVELRTTIRCPDRERWS

SEQ ID NO: 164967 - protein, 232 aa, Zea Mays
MFISCALLFFLPGARSLLSGLHAHRVQLPPPAVSAARPSLELRSASNSGARPSSLLPLFITLYGWSLENMHQGYPKETLVRFLKAREWNVAKAHKMIVECLNWRIQNEIDSVLERPIAPVDLYKSIRDSQLIGLSRYTKEILLYNFDGGTICSVVILKEWLGIHRVAAAEISKAIATAKIIKVPGLKLSALSQIKDSGSHQVTPPHVDFADVSILVVELRTTIRCPDRERWS

SEQ ID NO: 164968 - protein, 177 aa, Zea Mays
MFISCALLFFLPGARSLLSGLHAHRVQLPPPAVSAARPSLELRSASNSGARPSSLRPIAPVDLYKSIRDSQLIGLSRYTKEILLYNFDGGTICSVVILKEWLGIHRVAAAEISKGLPIFGIGVGHSTYDKASVITLMLAICLVGYSYSQNHKSAWFEAISTKPNKGFRLSSSDSPSC

SEQ ID NO: 164969 - protein, 150 aa, Zea Mays
MFISCALLFFLPGARSLLSGLHAHRVQLPPPAVSAARPSLELRSASNSGARPSSLILLYNFDGGTICSVVILKEWLGIHRVAAAEISKGLPIFGIGVGHSTYDKASAIATAKIIKVPGLKLSALSQIKVAEFSDLEQRLSLNFQSSFLDS

SEQ ID NO: 164970 - protein, 154 aa, Zea Mays
MFISCALLFFLPGARSLLSGLHAHRVQLPPPAVSAARPSLELRSASNSGARPSSLNMHQGYPKETLVRFLKAREWNVAKAHKMIVECLNWRIQNEIDSVLEILLYNFDGGTICSVVILKEWLGIHRVAAAEISKVWVSQFLALVLGIAHMTKLR

SEQ ID NO: 164971 - protein, 196 aa, Zea Mays
MFISCALLFFLPGARSLLSGLHAHRVQLPPPAVSAARPSLELRSASNSGARPSSLNMHQGYPKETLVRFLKAREWNVAKAHKMIVECLNWRIQNEIDSVLEILLYNFDGGTICSVVILKEWLGIHRVAAAEISKGLPIFGIGVGHSTYDKASAIATAKIIKVPGLKLSALSQIKVAEFSDLEQRLSLNFQSSFLDS

SEQ ID NO: 164972 - protein, 124 aa, Zea Mays
MFISCALLFFLPGARSLLSGLHAHRVQLPPPAVSAARPSLELRSASNSGARPSSLIICSRSITQDYLPDHLLQLPISGLNVFLDYCEVARVQSQVLLYLLQLPLFITLYGWSLEVVFGLKTLAA

SEQ ID NO: 164973 - protein, 669 aa, Zea Mays
MGIEVLPPSKVVNSRHQEFKDVFEVSEEPPEAVAKEKSQGLPSLKRRALSLKKLMPSKTLYRDDTHDCYVDCVAGLGRLNSVEINNPLFEKHLHDMNYSANYQYVKDTSSVCRTYPVGLANSSLSNFSLLSRGKNKDFNSIVVLEPPCLEKGHDPENIFSIPYLSPVNKNCSRGMKHKKFEFPVMENGRVREHILGTEANNVLRIRKERPLTSDSIDPLQIGQEASVHQFGNTDVSCSGSSQRYSCGNDSFRKTNRSSSSRICRHAESAVGSKTLAEMFALSDSERLKLNSDSNAPVLCNMIDRDNGHSKDGCFIVLPKHAPVLSIRSSMDMPSCLEGSSQGKNNLNISNIYNNAHLSSAHCFQNLTGDNFSTPDCLNDKVLLTTDEDVVRQSAESEPSRFNLQVSRKQRVTVLPFHCHEDESISVSDHTDGTKFCKGSKEVEQPSPVSILEPPINEDICFPRCFNYDLQGMANKQRGCHQYHNESEVNMSSDDEDHSFYQSLEAFQVEENWDFSYLLDILICSGIIVVDWQLICKSWYLPGYPVGPHVFDRLERKYNKIATWAKPERRLLFDLVNSILSEVLAPCVDVHPWVQPSRHCVAFWGPEGPVEKVWQTIVRLQEDCVTRHPDEMVLDTNWLEVGTDINMVGKQIARMLHGDLLEEVIVDFLG

SEQ ID NO: 164974 - protein, 691 aa, Zea Mays
MEQISLGNRYKECRTQRTTSCQTKILVGKDVLNEIEQRRSSPSVIAKLMGIEVLPPSKVVNSRHQEFKDVFEVSEEPPEAVAKEKSQGLPSLKRRALSLKKLMPSKTLYRDDTHDCYVDCVAGLGRLNSVEINNPLFEKHLHDMNYSANYQYVKDTSSVCRTYPVGLANSSLSNFSLLSRGKNKDFNSIVVLEPPCLEKGHDPENIFSIPYLSPVNKNCSRGMKHKKFEFPVMENGRVREHILGTEANNVLRIRKERPLTSDSIDPLQIGQEASVHQFGNTDVSCSGSSQRYSCGNDSFRKTNRSSSSRICRHAESAVGSKTLAEMFALSDSERLKLNSDSNAPVLCNMIDRDNGHSKDGCFIVLPKHAPVLSIRSSMDMPSCLEGSSQGDNFSTPDCLNDKVLLTTDEDVVRQSAESEPSRFNLQVSRKQRVTVLPFHCHEDESISVSDHTDGTKFCKGSKEVEQPSPVSILEPPINEDICFPRCFNYDLQGMANKQRGCHQYHNESEVNMSSDDEDHSFYQSLEAFQVEENWDFSYLLDILICSGIIVVDWQLICKSWYLPGYPVGPHVFDRLERKYNKIATWAKPERRLLFDLVNSILSEVLAPCVDVHPWVQPSRHCVAFWGPEGPVEKVWQTIVRLQEDCVTRHPDEMVLDTNWLEVGTDINMVGKQIARMLHGDLLEEVIVDFLG

SEQ ID NO: 164975 - protein, 686 aa, Zea Mays
MEQISLGNRYKECRTQRTTSCQTKILVGKDVLNEIEQRRSSPSVIAKLMGIEVLPPSKVVNSRHQEFKDVFEVSEEPPEAVAKEKSQGLPSLKRRALSLKKLMPSKTLYRDDTHDCYVDCVAGLGRLNSVEINNPLFEKHLHDMNYSANYQYVKDTSSVCRTYPVGLANSSLSNFSLLSRGKNKDFNSIVVLEPPCLEKGHDPENIFSIPYLSPVNKNCSRGMKHKKFEFPVMENGRVREHILGTEANNVLRIRKERPLTSDSIDPLQIGQEASVHQFGNTDVSCSGSSQRYSCGNDSFRKTNRSSSSRICRHAESAVGSKTLAEMFALSDSERLKLNSDSNAPVLCNMIDRDNGHSKDGCFIVLPKHAPVLSIRSSMDMPSCLEGSSQGKNNLNISNIYNNDEDVVRQSAESEPSRFNLQVSRKQRVTVLPFHCHEDESISVSDHTDGTKFCKGSKEVEQPSPVSILEPPINEDICFPRCFNYDLQGMANKQRGCHQYHNESEVNMSSDDEDHSFYQSLEAFQVEENWDFSYLLDILICSGIIVVDWQLICKSWYLPGYPVGPHVFDRLERKYNKIATWAKPERRLLFDLVNSILSEVLAPCVDVHPWVQPSRHCVAFWGPEGPVEKVWQTIVRLQEDCVTRHPDEMVLDTNWLEVGTDINMVGKQIARMLHGDLLEEVIVDFLG

SEQ ID NO: 164976 - protein, 395 aa, Zea Mays
MEQISLGNRYKECRTQRTTSCQTKILVGKDVLNEIEQRRSSPSVIAKLMGIEVLPPSKVVNSRHQEFKDVFEVSEEPPEAVAKEKSQGLPSLKRRALSLKKLMPSKTLYRDDTHDCYVDCVAGLGRLNSVEINNPLFEKHLHDMNYSANYQYVKDTSSVCRTYPVGLANSSLSNFSLLSRGKNKDFNSIVVLEPPCLEKGHDPENIFSIPYLSPVNKNCSRGMKHKKFEFPVMENGRVREHILGTEANNVLRIRKERPLTSDSIDPLQIGQEASVHQFGNTDVSCSGSSQRYSCGNDSFRKTNRSSSSRICRHAESAVGSKTLAEMFALSDSERLKLNSDSNAPVLCNMIDRDNGHSKDGCFIVLPKHAPVLSIRSSMDMPSCLEGSSQVALKLT

SEQ ID NO: 164977 - protein, 704 aa, Zea Mays
MEQISLGNRYKECRTQRTTSCQTKILVGKDVLNEIEQRRSSPSVIAKLMGIEVLPPSKVVNSRHQEFKDVFEVSEEPPEAVAKEKSQGLPSLKRRALSLKKLMPSKTLYRDDTHDCYVDCVAGLGRLNSVEINNPLFEKHLHDMNYSANYQYVKDTSSVCRTYPVGLANSSLSNFSLLSRGKNKDFNSIVVLEPPCLEKGHDPENIFSIPYLSPVNKNCSRGMKHKKFEFPVMENGRVREHILGTEANNVLRIRKERPLTSDSIDPLQIGQEASVHQFGNTDVSCSGSSQRYSCGNDSFRKTNRSSSSRICRHAESAVGSKTLAEMFALSDSERLKLNSDSNAPVLCNMIDRDNGHSKDGCFIVLPKHAPVLSIRSSMDMPSCLEGSSQGKNNLNISNIYNNGDNFSTPDCLNDKVLLTTDEDVVRQSAESEPSRFNLQVSRKQRVTVLPFHCHEDESISVSDHTDGTKFCKGSKEVEQPSPVSILEPPINEDICFPRCFNYDLQGMANKQRGCHQYHNESEVNMSSDDEDHSFYQSLEAFQVEENWDFSYLLDILICSGIIVVDWQLICKSWYLPGYPVGPHVFDRLERKYNKIATWAKPERRLLFDLVNSILSEVLAPCVDVHPWVQPSRHCVAFWGPEGPVEKVWQTIVRLQEDCVTRHPDEMVLDTNWLEVGTDINMVGKQIARMLHGDLLEEVIVDFLG

SEQ ID NO: 164978 - protein, 74 aa, Zea Mays
MAPSLLPRANSPSHSPPLQHVVPAQPRQQHPPLRRTIDPLNRMPQQALPDLQRLRAVVEIPTTVLVRNSMSSTP

SEQ ID NO: 164979 - protein, 270 aa, Zea Mays
MVTDNVSRWNIECQCAPDAQLTGDNRATIPDKAQVVEPAHAEQVPVQSERAVEKTWQVRLDQLSLSPSFAPGEQLTDEKVVEPAHAEQVHLARLSPSPSRERARLSQFAPGAQLTDEEAATLEEEDRPQIDLLDGLPQLAEAVARTPVRSASDGRFWSNEHMDLYNSIYSKKKCADNKWIDWKNIKRLPKMPYVEKASRDISLHELMAIKQNWYEEPIKQFYSTLSINQSRTSLTWMTGINKKITVTKRFCQKVLHVPSEHNIKIKRQLM

SEQ ID NO: 164980 - protein, 427 aa, Zea Mays
MWILGHETTHLDSNSTWSDYVKDAKDRECFLKTRDDDFLARTMDQFRLMQNSQVTDNVSRWNIECQCAPDAQLTGDNRATIPDKAQVVEPAHAEQVPVQSERAVEKTWQVRLDQLSLSPSFAPGEQLTDEKVVEPAHAEQVHLARLSPSPSRERARLSQFAPGAQLTDEEAATLEEEDRPQIDLLDGLPQLAEAVARTPVRSASDGRFWSNEHMDLYNSIYSKKKCADNKWIDWKNIKRLPKMPYVEKASRDISLHELMAIKQNWYEEPIKQFYSTLSINQSRTSLTWMTGINKKITVTKRFCQKVLHVPSEHNIKIKRQLTDAQEKELMSADGNQVYSLNRIITKTINPLIGDKSKVHESSRVLLYHILFGKPFDIVDMLEEMENNHMHTSKRMSYAPYIMLLINSATKEKFVPGSGENKCVEHEK

SEQ ID NO: 164981 - protein, 226 aa, Zea Mays
MPQPEPQPKTKPEPHMQPLPQPEPKPKPMPHPEPKPEPQPKPNPEPQPMPKPQPKSKPEPLPTPKPEPKPEPKPEPKPEPKIKPKPKPEPKPEPKPEPKPEPKPEPQPKPEPKPEPKPEPKPEPQPKPEPKPEPKPEPKPEPKPEPKPEPKPEPKPEPRPEPKPEPKPEPKPKPDPKPEPQPKPEPKPEPKPKPEPEPQPKPEPKPDPKPEPKPEPKPEPPTKTRT

SEQ ID NO: 164982 - protein, 240 aa, Zea Mays
MKDLTRGSGEQKEKALSADEEALKKATPEPKALAPKKRKLEEIPSAEPKVDEAPEKTLSPSLPSTVEVSEILKKKKMPSVTEEKVGGKRKQRIMNVIQAIEQTPPSASLVKAAIPVNAESAGGAEAKEFVATMSEIDKLISDVVEEKPDVVVEKSMAAVPDKGKKIYDAPSEEKDFDLRHLGGQELSEEDKLELKEFAMSCGYQLGSILFGGVDEKILGCIHDRAGAKIVGTLSKSVGFL

SEQ ID NO: 164983 - protein, 149 aa, Zea Mays
MIQSMLHLLLLDDDQQLHVKRNQTPKYGSCLCKATNFKQDAGTLEILIVTQHCSDFRVLYWLINASERKWLLIQIATICTHSYIHVSYVLMRSKTLCGLDSTTYTPGSAFLVLILPLHSRSLTNQLPETKSSQFFTRWFLITVTYQLRP

SEQ ID NO: 164984 - protein, 63 aa, Zea Mays
MRRRQITTMTMKKARLRIGGLGPQLLKTLTQTEPEMRIEDAPFFALWILFVYLFVLCLCCIVL

SEQ ID NO: 164985 - protein, 89 aa, Zea Mays
METLRPLPPLTASPARSLSSTSLPPHKSPSFPQSHARNLTRNPSAAEPHCRLLNRHRLRRVPPRVGHHREAQADAPLEPRGRGTRQRQD

SEQ ID NO: 164986 - protein, 255 aa, Zea Mays
MVSPQVHRVMESLLKGIFAVTLNTLYSCVHPSLSISVNELLFLFVVAKVAVTVQAKGVKEILTMIHITRKVDRNTMGVYVRSSRNGVSRLQSEGKLNQAMAILPIPSSGPATDPTTNLNIGMDYWANTASSAPAIHGKATSTTVPGAVVPAEQWTQDEHELKKQRRKQSNRESARRSRLRKQAECEELAQRADVLKQENASLRDEVNRIRKEYEELLSRNNSLKEKLEGKQHKTDEAGLNNKLQHSGDDSQKKGN

SEQ ID NO: 164987 - protein, 361 aa, Zea Mays
MGSSGADTPSKEQQPPATSGAAIPPVYPDWSSFQAYPPIPPHGFFPSPVASSPQGHPFMWGAQAMIPPYGTPPPYVMYPPGVYAHPSMPPGAHPFTPYAITSPNGNADATGTTVAAGNTDGKPSEGKDKSPTKRSKGSLGSLNMLTGKNPSEHGKSSGASGNGVTSQSGESGSDSSSEGSEGNSHNDSHHKESGQEHDGDVRSSRNGVSRLQSEGKLNQAMAILPIPSSGPATDPTTNLNIGMDYWANTASSAPAIHGKATSTTVPGAVVPAEQWTQDEHELKKQRRKQSNRESARRSRLRKQENASLRDEVNRIRKEYEELLSRNNSLKEKLEGKQHKTDEAGLNNKLQHSGDDSQKKGN

SEQ ID NO: 164988 - protein, 380 aa, Zea Mays
MGSSGADTPSKEQQPPATSGAAIPPVYPDWSSFQAYPPIPPHGFFPSPVASSPQGHPFMWGAQAMIPPYGTPPPYVMYPPGVYAHPSMPPGAHPFTPYAITSPNGNADATGTTVAAGNTDGKPSEGKDKSPTKRSKGSLGSLNMLTGKNPSEHGKSSGASGNGVTSQSGESGSDSSSEGSEGNSHNDSHHKESGQEHDGDVRSSRNGVSRLQSEGKLNQAMAILPIPSSGPATDPTTNLNIGMDYWANTASSAPAIHGKATSTTVPGAVVPAEQWTQDEHELKKQRRKQSNRESARRSRLRKQAECEELAQRADVLKQENASLRDEVNRIRKEYEELLSRNNSLKEKLEGKQHKTDEAGLNNKLQHSALFDCEPWRWRYF

SEQ ID NO: 164989 - protein, 80 aa, Zea Mays
MRLHMARRCLVSTDQTMTGGPHLLILRLCMQVVEKHMEGVDSTYLILFFWLSAIHVFLICRDVTCFVGTQCLLTSSTRAR

SEQ ID NO: 164990 - protein, 66 aa, Zea Mays
MFAYVIDSSQVRVRRGGSSRSAARSSRRSTQDPAEVEQPREELRRHQDYLKQQATQHEYYATQIQQ

SEQ ID NO: 164991 - protein, 69 aa, Zea Mays
MRKAADVAMIIFWFGQCKRMVKQHGELPTKHPSVCNHWETDVFISKSSRQLLRYPSPASPGPVSVGRTA

SEQ ID NO: 164992 - protein, 184 aa, Zea Mays
MAMQAARRLASLKLQRRLLLPSQAESPSISIPTAAAAAAFLHSHATSFGYKQVREEDKSKLVGNVFSSVASSYDLMNDLMSVGLHRLWKDRLISKLNPFSGMKHLDVAGGTGYSEEHCLSWIQGDAEALSFEDGSMDGYTIAFGIRNVTHIEKALSEAYRVLKQGGRFLCLELSHVDVPIFKEM

SEQ ID NO: 164993 - protein, 281 aa, Zea Mays
MMFRAQCSLVVDCGFSFTHASPVLQNFTLNYGVRRMDLGGKALTNYLKELVSYRSLNVMDETLLIDDAKEKLCFVSLDVPGDLHLARLSFKDNPFRCSYILPDGITYKKGFVKDMDEALRYRTLPQVSDSKDHGMDTNKSEDRKKAELSQNEFVLTNERFLVPEMLFHPIDLGINQAGLAECIVRAVQACHPYLQPVLFESIILTGGSTLFPRFTERLERELRPLVPDDYKVKITRQENPIFGVWRGGSILASSPDFESMCITKSEYEEMGSARCRRRFFH

SEQ ID NO: 164994 - protein, 301 aa, Zea Mays
MTGGSGVVVIDNGGGLLKAGFGGDNDPIAVVPNCMAKPPGGNASSKKWLVADQLQAEDVDVTGMTLKRPIDRGYLINTEVQRDVWERVLRNLLQVDPTNSSLLLVEPMFNPPAIQHATDELVFEEFGFNSLYVADGPSLVHLYEASRQPMMFRAQCSLVVDCGFSFTHASPVLQNFTLNYGVRRMDLGGKALTNYLKELVSYRSLNVMDETLLIDDAKEKLCFVSLDVPGDLHLARLSFKDNPFRCSYILPDGITYKKGFVKDMDEALRYRTLPQVSDSKDHGICLDKREVPCPRDAFSSH

SEQ ID NO: 164995 - protein, 396 aa, Zea Mays
MTGGSGVVVIDNGGGLLKAGFGGDNDPIAVVPNCMAKPPGGNASSKKWLVADQLQAEDVDVTGMTLKRPIDRGYLINTEVQRDVWERVLRNLLQVDPTNSSLLLVEPMFNPPAIQHATDELVFEEFGFNSLYVADGPSLVHLYEASRQPMMFRAQCSLVVDCGFSFTHASPVLQNFTLNYGVRRMDLGGKALTNYLKELVSYRSLNVMDETLLIDDAKEKLCFVSLDVPGDLHLARLSFKDNPFRCSYILPDGITYKKGFVKDMDEALRYRTLPQVSDSKDHGMDTNKSEDRKKAELSQNEFVLTNERFLVPEMLFHPIDLGINQAGLAECIVRAVQACHPYLQPVLFESIILTGGSTLFPRFTERLERELRPLVPDDYKPNFWCLERRIYSSIKS

SEQ ID NO: 164996 - protein, 149 aa, Zea Mays
MGGFGTSRPASVALCAFLTFLNLFAVLLAVGAERRRSTGKVMPDEYDERSYCLYDTDASTVYGVSAFFVLLLQQAIVNVATWCLCFGPVLSSRGCAVTAFVLSWLGIVYQTTGFTSSISDNIPRRRSLSHRRIGEECKAHQVFRLLHEA

SEQ ID NO: 164997 - protein, 59 aa, Zea Mays
MNAMNVSYCTCSIMFCDLANLGLVDLWLLNFMMNLLYYVLVFFVINLSYCELVIYVINL

SEQ ID NO: 164998 - protein, 159 aa, Zea Mays
MKKMYQYYVSTTPSASSVTPSSTSAVDMIKSSIEEELDSYIFDGQGHDDSIDTSDLEKYLADPILKVGKSNQHTFDILAWWKAHKEEYPLLGQLAHDVLAMKVSTVASESAFSAGGRVLDPFCTRLDPTMVEALVYTKDWIARARKGYIAVPYIYLQFN

SEQ ID NO: 164999 - protein, 68 aa, Zea Mays
MIKSSIEEELDSYIFDGQGHDDSIDTSDLEKYLADPILKVGKSNQHTFDILAWWKAHKEDGLHQRLDS

SEQ ID NO: 165000 - protein, 63 aa, Zea Mays
MIKSSIEEELDSYIFDGQGHDDSIDTSDLEKYLADPILKVGKSNQHTFDILAWWKAHKEDGLH

SEQ ID NO: 165001 - protein, 71 aa, Zea Mays
MPHYPGPCRNGIEGLFPRAYQVHHVHILNPSEILGVRGAKYIGHEGEDVGLDARDSICADPCTSDFFFPGC

SEQ ID NO: 165002 - protein, 55 aa, Zea Mays
MFLLTKMRTSATLLILVAASGPQQSHVGWSSVPSHSLPFTVRCHNPGTVERKPPS

SEQ ID NO: 165003 - protein, 257 aa, Zea Mays
MEISSLNRRLLAVHATGDDPLSPAVDLPWLRKLAKSGVASRRNASLPAAHLEELCSELDVVVDTDADKKRVGDRRPARTVSDIGEVISREKEWATRPNQTAPTPRLYRSASHSHGLPRRATCCSAQCGVRSAGRASPEIIAEEDEKSCKSNAALEADIEQIKATVLSLHTDLTKLRESTLSMADAHSQILAEIHAKLDGVTPRRQTNFEPRSELLLKKATRGGSSNSSSSSKEQSYQYQWQADVLMNHFIEAVMCIT

SEQ ID NO: 165004 - protein, 346 aa, Zea Mays
MAGVEEEGEVAALREALRQQVQAVEELRAELEEERQAAASGADEALAMILRLQAEKAAERMEAEQFHRVAKERIQYDEDTLAFLRAVVFHQEMEISSLNRRLLAVHATGDDPLSPAVDLPWLRKLAKSGVASRRNASLPAAHLEELCSELDVVVDTDADKKRVGDRRPARTVSDIGEVISREKEWATRPNQTAPTPRLYRSASHSHGLPRRATCCSAQCGVRSAGRASPEIIAEEDEKSCKSNAALEADIEQIKATVLSLHTDLTKLRESTLSMADAHSQILAEIHAKLDGVTPRRQTNFEPRSELLLKKATRGGSSNSSSSSKEQSYQYQWQADVLMNHFIEAMR

SEQ ID NO: 165005 - protein, 354 aa, Zea Mays
MAGVEEEGEVAALREALRQQVQAVEELRAELEEERQAAASGADEALAMILRLQAEKAAERMEAEQFHRVAKERIQYDEDTLAFLRAVVFHQEMEISSLNRRLLAVHATGDDPLSPAVDLPWLRKLAKSGVASRRNASLPAAHLEELCSELDVVVDTDADKKRVGDRRPARTVSDIGEVISREKEWATRPNQTAPTPRLYRSASHSHGLPRRATCCSAQCGVRSAGRASPEIIAEEDEKSCKSNAALEADIEQIKATVLSLHTDLTKLRESTLSMADAHSQILAEIHAKLDGVTPRRQTNFEPRSELLLKKATRGGSSNSSSSSKEQSYQYQWQADVLMNHFIEVPLDFGLGRRD

SEQ ID NO: 165006 - protein, 73 aa, Zea Mays
MCSRPPLLLSPWPPPPCPSPPLSIVAATKTLAPPQSPPPKVLLRAARIIVSWCESPIVLVEGRREEGKVENPR

SEQ ID NO: 165007 - protein, 96 aa, Zea Mays
MPALGSAHLPLPRAHFSVRLCAQLSKLHGRFPARVVVSQLVSTCSVVSARSASNSSASPCSRGSATAGANLTVVVLWHGDVVRVATAVLVVKQSAP

SEQ ID NO: 165008 - protein, 178 aa, Zea Mays
MGLLEFSTSSHLASPTSPMGQRSSPLHTPPAAGERKRGRASAGQAGARNVPHLVHPILLAFRLYFLSSPSSVLSPRLLRLSSSVHPPVSSPRLLRPFSWGLEVRLSRPWRPSRRPRSSWRSQRLGLSRRGRRSFLARPARCEAPGTRRLTGPASGTGPSTRTTRTSSRKSKQRRKGCT

SEQ ID NO: 165009 - protein, 238 aa, Zea Mays
MYLDYIYPSRKQGKKRKTAASAISVVPKGKKIKVLTHRPRYIETATMPKFGEGTSSTVEAEQVAPAGRSAKESVAVPKVFATGSAEVLIQTAEAEGKTAEKPDREETTGPSEPELPKVTKTPAITPKRRRMACVLDDVMETTRALTSAPAKKVVEAAAARAEAEAEPSVPTEAEPAATERAEQESPDAGMALEKDAPGKAKSSIPEASSEDFDFIIRHALEKYYLKKKLQKPDTTPEN

SEQ ID NO: 165010 - protein, 181 aa, Zea Mays
MLYIVKREKKLKKIGKYLSPTARHHSISLIQLSSYPLQPSTSSVAGFFLPRRSSAVLIPTPLSSEEKSRRSSTWILQPSHWIFLPRGASSASPPVRLLYLSLSALPGRALLVPRPAPWLAGAPSPLKLANANGAGPSLPCFSLSSPKRPRFLPLSARQAPNPWRTQSRPCPSARPRASLLP

SEQ ID NO: 165011 - protein, 250 aa, Zea Mays
MTDIFSVLKYPAVILFDSGASHSFISTEFSAKCQLPFHHTNGAIMIATPGGSVATYQLNRQVPIKLSSIIFRTTLLIMGLESVDIILGTDWLSRHHALIDVVARAFEIHSPICGEITLYLPNQGCTHSCALTRIESPVERIPVVCEYPDVFPDELPGMPPDRDIEFAIELQPGTAHISKRPYRMPPAELAELKKQLQELLDKGFMCTKYFTMGMFRPCCKEEGMRVLRLCVEYCPLNAVTIKNKVSFTPH

SEQ ID NO: 165012 - protein, 115 aa, Zea Mays
MPLFVLDLVVVRLSNSPPFCSPALAPDVLRPCSSPRRRLQPPVSLSTYCSSRCAVEYCLASLFLILAFLSFGKPSSYCVVVWCSRRRPKHTPHVVTSQSSPSYRDIWHEDESSRP

SEQ ID NO: 165013 - protein, 132 aa, Zea Mays
MPSADAGDADAMPAPPPQTRAAISHVIFDMDGLLLDTEGFYTTVQEKILMRFGKVFDWSVKAKMMGKTTAESTRILFEEFGLAGLLTPEQFLEERETMLKKLLPTCVAMPGLLRLINLLHTNGIPIAVATGR

SEQ ID NO: 165014 - protein, 131 aa, Zea Mays
MPSADAGDADAMPAPPPQTRAAISHVIFDMDGLLLDTEGFYTTVQEKILMRFGKVFDWSVKAKMMGKTTAESTRILFEEFGLAGLLTPEQFLEERETMLKKLLPTCVAMPGLLRLINLLHTNGIPIAVATG

SEQ ID NO: 165015 - protein, 181 aa, Zea Mays
MIVGTADRHLVVFNLQNPQTEFKRIQSPLKYQTRCLAAFPDQQGFLVGSIEGRVGVHHIDDAQQSKNFTFKCHREGNDIFSVNSLNFHPVHHTFATAGSDGAFNFWDKDSKQRLKAFSRCPLPIPCSTFNSDGSIFAYAVCYDWSRGAENHNPAAAKTSIYLHSPQETEVKGKPRIATGRK

SEQ ID NO: 165016 - protein, 319 aa, Zea Mays
MASLTGLTANPNPNKSFEILPNPGDSVSSLSFSPKSNLLVATSWDNQVRCWEIVGGNSQPKASISHDQPVLCSAWKDDGTTVFSGGCDKQVAWIPQMNLLVSGSWDKTLRYWDTRQSNPVHIQQLPERCYALTVNYPLMIVGTADRHLVVFNLQNPQTEFKRIQSPLKYQTRCLAAFPDQQGFLVGSIEGRVGVHHIDDAQQSKNFTFKCHREGNDIFSVNSLNFHPVHHTFATAGSDGAFNFWDKDSKQRLKAFSRCPLPIPCSTFNSDGSIFAYAVCYDWSRGAENHNPAAAKTSIYLHSPQETEVKGKPRIATGRK

SEQ ID NO: 165017 - protein, 519 aa, Zea Mays
MVRRLFLHHARRRLHSGTASSIPLSTPIFAIFGANTGVGKTLVSAGLATALLSSPSPAVSSVAYLKPLQTGYPVDSDASFVFSRTPALLRAFPPCRATRLIASCRTFFQSPAVEAKAESLHESQEKVVTYGAGAAEQTKVLACCTAYAWREPVSPHLAAEREGMAAGDDEVKGCVEQWLLEEGIGEGGEVWKILETAGGVASPSASGTLQCDLYRPFRLPAILVGDGRLGGISSTLSAYETLLLRGYDVSAVILEDRELSNDKFLLSYLRNRVHVLILPQIPEDPLDDLTDWFSESSSIFIFLKDELQSFHSRRIERLNSMQRKSKALLWWPFTQHNLVPQDSVTVIDSRYGENFSVYKIKDKMLIPQFDACASWWTQGPDSNLQIELARDMGYAAARYGHVMFPENVHEPALHSAEVLLGGVGKGWASRVYYSDNGSTAIEIALKMAFRKFSLDHGIMASSENSTRNERNIQLKVLALNGSYHGDTLGAMEAQAPSAYTSFLQQPWSGTFSRSSNCVY

SEQ ID NO: 165018 - protein, 134 aa, Zea Mays
MQFVEDGKERLVVGSLDLNQCLWLPDELTGKRPGVNEDIQTRAYLSNVCVAKELQKKGLGYTLVDKSKKLALEWGITDLYVHVAINNVAGQKLYKKCGFVYEGEEPAWKGRFLGRPRRLLLWLDMSKVLVRSCM

SEQ ID NO: 165019 - protein, 131 aa, Zea Mays
MINFRRVSCINGTVPLSPSLMSAEELCSMCKVNEDIQTRAYLSNVCVAKELQKKGLGYTLVDKSKKLALEWGITDLYVHVAINNVAGQKLYKKCGFVYEGEEPAWKGRFLGRPRRLLLWLDMSKVLVRSCM

SEQ ID NO: 165020 - protein, 175 aa, Zea Mays
MVAPPGSLPARAPCSPWLSASPTSSSSREHGLPPLMRSGAELLLQHRPRGLPCTNSGRAPVLMKVVFPTRPPSVPCSLCDALLCVVLARSGLASSICATPVRLSVPPPSISSMHEQQQPRASSASCHRPARWNAAASSTRSAALARYRRNPRNRVGPQQHVVDLQSLALWSTLVR

SEQ ID NO: 165021 - protein, 76 aa, Zea Mays
MRKFYEGGFQPTMTRREAALILGVRETASAEKVKEAHKRVMVANHPDAGGSHYLASKINEAKDVMTGKTKGGGSAF

SEQ ID NO: 165022 - protein, 99 aa, Zea Mays
MATPLIAGLAVAAAALAGRYSIQAWNAYKARPVVPRMRKFYEGGFQPTMTRREAALILGVRTRPQETVKSLGLITIDCGSSEGKGKLPVQRRSKKHTRE

SEQ ID NO: 165023 - protein, 67 aa, Zea Mays
MATPLIAGLAVAAAALAGRYSIQAWNAYKARPVVPRMRKFYEGGFQPTMTRREAALILGVRWYTRQA

SEQ ID NO: 165024 - protein, 76 aa, Zea Mays
MFVTGCSRGPLLGFQYLEPKFCIQRAGVPGLEEHADRLPTSATCMNLLKLPPYKSKEQMQTKLLYAINSEAGFDLS

SEQ ID NO: 165025 - protein, 599 aa, Zea Mays
MDVDIKINLDVDLERQITAAIDPKLLQHLVNALFRGTLSINDSDLSEPSDAEVDAVGCICAFLHVTFNTFPLERIMTVLAYRTEIVPALWNFIKRCHANRRWPFFSKFASSLPADAPGWLLPMSVFCPIYKHMLKIIDNGEFYEQEKPLSLKDLKSLVLILKQALWQLLWIIPSSSTQKVSSNPSGLKKLSVENVKIRARVGLSELLTQLQDWNNRLPFTSASDFYSQEATSENFVSQAILGNTRASEIIKLAPFLAPFTSRVKIFTSQLTSSRQSISHSALTRQRFKIRRNRLLEDAFDQLSLLSEEDLKGPIRVSFINEHGEEEAGIDGGGIFKDFMENITRAAFDVQYGLFKETADHLLYPNPGSGLVHELHLQYFNFLGSLLGKAMYEGILVDLPFATFFLSKVKQKYNFLNDLPSLDPELYRHLLFLKHYNGDISELELYFVIVNNEYGEQCEEELLPGGRDMRVTNDNVITFIHLVANHRLNYQIRAQSTHFLRGFQQLIPKDWIDMFNEHEIQVLISGSLESLDIDDLRSNTNYSAGYHPVCDWMFSWPPPWISVSRTEILHSESWCSRSGGACRPLADISYLHEPSEAPPL

SEQ ID NO: 165026 - protein, 250 aa, Zea Mays
MDVDIKINLDVDLERQITAAIDPKLLQHLVNALFRGTLSINDSDLSEPSDAEVDAVGCICAFLHVTFNTFPLERIMTVLAYRTEIVPALWNFIKRCHANRRWPFFSKFASSLPADAPGWLLPMSVFCPIYKHMLKIIDNGEFYEQEKPLSLKDLKSLVLILKQALWQLLWIIPSSSTQKVSSNPSGLKKLSVENVKIRARVGLSELLTQLQDWNNRLPFTSASDFYSQEATSENFVSQRQYLVILEHQRS

SEQ ID NO: 165027 - protein, 393 aa, Zea Mays
MDVDIKINLDVDLERQITAAIDPKLLQHLVNALFRGTLSINDSDLSEPSDAEVDAVGCICAFLHVTFNTFPLERIMTVLAYRTEIVPALWNFIKRCHANRRWPFFSKFASSLPADAPGWLLPMSVFCPIYKHMLKIIDNGEFYEQEKPLSLKDLKSLVLILKQALWQLLWIIPSSSTQKVSSNPSGLKKLSVENVKIRARVGLSELLTQLQDWNNRLPFTSASDFYSQEATSENFVSQAILGNTRASEIIKLAPFLAPFTSRVKIFTSQLTSSRQSISHSALTRQRFKIRRNRLLEDAFDQLSLLSEEDLKGPIRVSFINEHGEEEAGIDGGGIFKDFMENITRAAFDVQYGLFKDQDWFMNYICNISIFLEVYLGRQCMKAYLLTCHLQRSS

SEQ ID NO: 165028 - protein, 227 aa, Zea Mays
MDVDIKINLDVDLERQITAAIDPKLLQHLVNALFRGTLSINDSDLSEPSDAEVDAVGCICAFLHVTFNTFPLERIMTVLAYRTEIVPALWNFIKRCHANRRWPFFSKFASSLPADAPGWLLPMSVFCPIYKHMLKIIDNGEFYEQEKPLSLKDLKSLVLILKQALRSCQWRMSRSELGLGCLNCSHSCKTGTTDFHSLLQVISIPKKQQAKILCLRQYLVILEHQRS

SEQ ID NO: 165029 - protein, 250 aa, Zea Mays
MDVDIKINLDVDLERQITAAIDPKLLQHLVNALFRGTLSINDSDLSEPSDAEVDAVGCICAFLHVTFNTFPLERIMTVLAYRTEIVPALWNFIKRCHANRRWPFFSKFASSLPADAPGWLLPMSVFCPIYKHMLKIIDNGEFYEQEKPLSLKDLKSLVLILKQALWQLLWIIPSSSTQKVSSNPSGLKKLSVENVKIRARVGLSELLTQSCKTGTTDFHSLLQVISIPKKQQAKILCLRQYLVILEHQRS

SEQ ID NO: 165030 - protein, 697 aa, Zea Mays
MCDLFVSKYFPCIFFPNQAADIIAVSTSLLDTLPAVTTPTERADDDDETPMDVDIKINLDVDLERQITAAIDPKLLQHLVNALFRGTLSINDSDLSEPSDAEVDAVGCICAFLHVTFNTFPLERIMTVLAYRTEIVPALWNFIKRCHANRRWPFFSKFASSLPADAPGWLLPMSVFCPIYKHMLKIIDNGEFYEQEKPLSLKDLKSLVLILKQALWQLLWIIPSSSTQKVSSNPSGLKKLSVENVKIRARVGLSELLTQLQDWNNRLPFTSASDFYSQEATSENFVSQAILGNTRASEIIKLAPFLAPFTSRVKIFTSQLTSSRQSISHSALTRQRFKIRRNRLLEDAFDQLSLLSEEDLKGPIRVSFINEHGEEEAGIDGGGIFKDFMENITRAAFDVQYGLFKETADHLLYPNPGSGLVHELHLQYFNFLGSLLGKAMYEGILVDLPFATFFLSKVKQKYNFLNDLPSLDPELYRHLLFLKHYNGDISELELYFVIVNNEYGEQCEEELLPGGRDMRVTNDNVITFIHLVANHRLNYQIRAQSTHFLRGFQQLIPKDWIDMFNEHEIQVLISGSLESLDIDDLRSNTNYSAGYHPDHELVEMFWEVLKSLSSDNQKKFLKFVTGCSRGPLLGFQYLEPKFCIQRAGVPGLEEHADRLPTSATCMNLLKLPPYKSKEQMQTKLLYAINSEAGFDLS

SEQ ID NO: 165031 - protein, 180 aa, Zea Mays
MRVTNDNVITFIHLVANHRLNYQIRAQSTHFLRGFQQLIPKDWIDMFNEHEIQVLISGSLESLDIDDLRSNTNYSAGYHPDHELVEMFWEVLKSLSSDNQKKFLKFVTGCSRGPLLGFQYLEPKFCIQRAGVPGLEEHADRLPTSATCMNLLKLPPYKSKEQMQTKLLYAINSEAGFDLS

SEQ ID NO: 165032 - protein, 455 aa, Zea Mays
MAPVFGSSSGGGASREKASGRGAAAAIEDSSIDIGDFFKGPLPGKFLKLLGFLALSRLGVYIPLGGVNREAFAGNLDQNSLLGTLDSFSGGGIGRLGICSLGIVPFINAQIVFQLLAQLYPKLQDLQRKEGEAGRKKVLQYTRYASVGFAIVQAIGQVLYLRPYVNDFSTEWVLTSVTLLTLGSVFTTFIGERISDLKLGNGTSLLIFTSIISYLPASFGRTVAQAFQDGNYVGLLTIILSFLLLVLGIVYVQEAERKIPLNYASRYSSRTGELQRSAYLPFKVNSSGVMPIIFSTSSLALPGTLARFSGLDFLKKAAIALNPGGALYLPTNVLLIAFFNYYYTFLQLDPDDLSEQLKRQGASIPLVRPGKSTAAYIKTVLSRISVLGSAFLAVLAAGPSLVEQTSHLTAFRGFAGTSVLILVGCATDTARKVQAEIISQKYKNIEFYDVNRFGQ

SEQ ID NO: 165033 - protein, 642 aa, Zea Mays
MAKSLEQRLHHSSPWRFHACVQRNRRIHVGAPRRAWPGARHLHRPPRPGRPRLTHERGAPPCRGLHPLLRALAQVPPRYHHFRALRAGHPPVVKSLAHHSILGRTCCEDDEVFHTSAPKCSTECLIQDIDLLKPISVAPMSTLVPATPRAAVELANSVFTRYIPIDSLASSGAVLLRYAIEVHGPPEGLVEMAIQCLVIPALNSTHHIPAASCNMSTCKFVADREFLTLPSFDLVVGKYYIFPRQPPWPPPVQFVLHGEIEQEYIWRVEELLFQVAVHEDDGNMIIQYMQLHDVFYRLHWLDSYASGMYYNYRDYTWLQVSIPELDDADNGYTNCMNVKRTVKGFSNAGFAEIGIILEDWVSPKVCEHTQEMKVVSREVSVIPMKVVVDARHKSDSDLVIVARTDSRQAGSLTEALCSVRTFADVGADVIFIDTLASREDMKALFSMGMAAQVQSMVSPMAFQVTHNEGVRLLSIQSVATMVLMYRPDPAVPSDPPTKTTTEEHKDNLAALMFLIMLKSMVWRQLNVVPCSPTEQEVFHVPVQMLNTLIIQRGGSTGTRHPRALLPQLENNKLDHWLWHVRVARRRAVVLAAHRDVPNLSRRTRISPIDPAILVPSGCDRIRFHQVVGRCSQLAIGLAELAP

SEQ ID NO: 165034 - protein, 67 aa, Zea Mays
MLVYDLCLHNLVILVVSGLSGVLGTLRRILLIYPMHMHSRLRSVRRGQVHVDPITWEVLPQPVSKQD

SEQ ID NO: 165035 - protein, 50 aa, Zea Mays
MSAHGYRCSNDFCLHFSEDMKLHHTHHRRRTGGSGGATQRGVRLDLGGVS

SEQ ID NO: 165036 - protein, 82 aa, Zea Mays
MPRQLWIRPPIVRELVGAMGDRTALPGKRGRPNLLLRSSCSNDFCLHFSEDMKLHHTHHRRRTGGSGGATQRGVRLDLGGVS

SEQ ID NO: 165037 - protein, 169 aa, Zea Mays
MKKSSGSGSVSLARSIPELYEERGASSLREFGFQELRAATSDFSRLLKVGEVALGAFTRASSAFLAGPPAARSSRLSHSGISHLPADEVKPLVKYDNDEDAHSPSGRGRGRGGRGRGRGRGRGGRGNGFNEYVDAGWEDDHAPAYMGNGYARGRGRSFRGRGRRGDDDN

SEQ ID NO: 165038 - protein, 242 aa, Zea Mays
MCHKHEMLPVEYQCFIAVFLLVCPNVGKSALFNRIIASLRANQFCERLPSPNGESIVDCHQISKMPNLAFTIANKIFTLTPEQYIVKLEQAGQTICISGFMAFDVPPPCGPLCYAKHICTTLKCAMRASTEGITVPPLAPPRPRLSVSAPFVSPQWPRPYLMSTTTTRVNMKKSSGSGSVSLARSIPELYEERGASSLREFGFQELRAATSDFSRLLKVGEVALGAFTRASSAFLAGPPAAR

SEQ ID NO: 165039 - protein, 69 aa, Zea Mays
MPLSLVLRPMVTGMISISIGLVQFPNSYIPYLQAGEIETFFITSYLLKLHVVCSTRGFQCAFFPRSRVI

SEQ ID NO: 165040 - protein, 50 aa, Zea Mays
MRERFSCSSEFLSLGSISSSSHFCSSNTCNQSKRHQVVVVLVRGLSDPFD

SEQ ID NO: 165041 - protein, 105 aa, Zea Mays
MRLSPRKLQAGEDEVMDWQWSTTRLRLDGGGPRGRRRHRRDVVQCSSLELSVVSRVTSHHTDATYRIRGGVVMLCSLLVTFVTYVHVTCWSIARLGLGIMGRCGL

SEQ ID NO: 165042 - protein, 181 aa, Zea Mays
MDDATRGADNIRSDIGALAQRYTVIDREQDCGVCRRKILTVGGLHQVGRSYTSVGHMAPFYVFPCGHAFHANCLIGHVTRCSNQAERILDLQKRLSLMDRKAAKDNGASVNGEPITSTTPVDKLRSQLDDAVASECPFCGDLMIKEISQPFILPQESDEKASWEIKPQPTPQKILPMTMSI

SEQ ID NO: 165043 - protein, 134 aa, Zea Mays
MDDATRGADNIRSDIGALAQRYTVIDREQDCGVCRRKILTVGGLHQVGRSYTSVGHMAPFYVFPCGHAFHANCLIGHVTRCSNQVQAERILDLQKRLSLMDRKAAKDNGASVNGEPITSTTPVDKQASAPSAVI

SEQ ID NO: 165044 - protein, 433 aa, Zea Mays
MKHSYFQVFDLSKEAPDKVLHRLYANLERLKMEGDILAVQIWRTLRLIVAGGDGTASWLLGVVSDLKLSHPPPVATVPLGTGNNLPFSFGWGKKNPSTDQEAVKSFLGLVKHAKEIKIDSWHIILRMRVPEEGPCDPIAPLDLPHSLHAFHRVSSSDSLNMEGYHTFRGGFWNYFSMGMDAEVSYAFHSERKKNPEKFKNQLTNQGTYAKLGLKQGWFCASLSQPSSRNLAQIAKVKIMKRAGSLWEELHIHHSIRSIVCLNLPSFSGGLNPWGTPGTRRAEDREFTAPFVDDGLLEVVGFRDAWHGLVLLAPNGHGTRIAQAHRIRFEFHKGAAEHTFMRVDGEPWKQPLPKDDDTVVVEISHLGQVTMLANEPCRSKSVNDQSSLSPAHDSHGDYNDIAEEDEDEWEDGRRKFGAADTFKIPDEIDIAHFS

SEQ ID NO: 165045 - protein, 260 aa, Zea Mays
MDAEVSYAFHSERKKNPEKFKNQLTNQGTYAKLGLKQGWFCASLSQPSSRLLCFRNLAQIAKVKIMKRAGSLWEELHIHHSIRSIVCLNLPSFSGGLNPWGTPGTRRAEDREFTAPFVDDGLLEVVGFRDAWHGLVLLAPNGHGTRIAQAHRIRFEFHKGAAEHTFMRVDGEPWKQPLPKDDDTVVVEISHLGQVTMLANEPCRSKSVNDQSSLSPAHDSHGDYNDIAEEDEDEWEDGRRKFGAADTFKIPDEIDIAHFS

SEQ ID NO: 165046 - protein, 257 aa, Zea Mays
MGMDAEVSYAFHSERKKNPEKFKNQLTNQGTYAKLGLKQGWFCASLSQPSSRNLAQIAKVKIMKRAGSLWEELHIHHSIRSIVCLNLPSFSGGLNPWGTPGTRRAEDREFTAPFVDDGLLEVVGFRDAWHGLVLLAPNGHGTRIAQAHRIRFEFHKGAAEHTFMRVDGEPWKQPLPKDDDTVVVEISHLGQVTMLANEPCRSKSVNDQSSLSPAHDSHGDYNDIAEEDEDEWEDGRRKFGAADTFKIPDEIDIAHFS

SEQ ID NO: 165047 - protein, 240 aa, Zea Mays
MEGEAETVVGSCSKPCGPLEDYYIPDYILKPGAQQVLVDHAAPCPVVVFINSRSGGQLGSSLIKTYRELLNEAQVFDLSKEAPDKVLHRLYANLERLKMEGDILAVQIWRTLRLIVAGGDGTASWLLGVVSDLKLSHPPPVATVPLGTGNNLPFSFGWGKKNPSTDQEAVKSFLGLVKHAKEIKIDSWHIILRMRVPEEGPCDPIAPLDLPHSLHAFHRVSSSDSLNMVVHSFYCNFFLL

SEQ ID NO: 165048 - protein, 342 aa, Zea Mays
MEGEAETVVGSCSKPCGPLEDYYIPDYILKPGAQQVLVDHAAPCPVVVFINSRSGGQLGSSLIKTYRELLNEAQVFDLSKEAPDKVLHRLYANLERLKMEGDILAVQIWRTLRLIVAGGDGTASWLLGVVSDLKLSHPPPVATVPLGTGNNLPFSFGWGKKNPSTDQEAVKSFLGLVKHAKEIKIDSWHIILRMRVPEEGPCDPIAPLDLPHSLHAFHRVSSSDSLNMEGYHTFRGGFWNYFSMGMDAEVSYAFHSERKKNPEKFKNQLTNQGTYAKLGLKQGWFCASLSQPSSRNLAQIAKVKIMKRAGSLWEELHIHHRTKPAHICAQGSPPRHHDAYHP

SEQ ID NO: 165049 - protein, 404 aa, Zea Mays
MADHQMIHPPAAATTGSKTHGHAGDWWTTTVSCSPDQLPDGFGGAGWSSAAATTAAEGNRSRSGNAAASSESPGSIHSLPTAGSSITFQESAVGAAVGDQGVVAMPPHPVASGHAGSSWNQPSYYFDQQAHHLSLRSPSSNNTSTMVPDSHHDDPNHQFLSNLGLELLSSSPTSSSGGFRTSSSLLRSLTEPSAVATGFQQYQQQAVNQAPPESIRDDALQFVNSTPFWSASAVFASAAEGATSRLPASAAGPPSAQSMPANFAVKSALLEGARGDSSSITANKTSTDPTPRLKKSRTGTPSPLPATFKVRKEKLGDRITALQQLVSPFGKSLSVPYLKKNRQQEVPPHKVLWDGGGEAAGANGELTGRGLCLVPISSTFAVASETTTTPPLDFWTPFGGPAFR

SEQ ID NO: 165050 - protein, 76 aa, Zea Mays
MAHKGKATSDVTYNPDDGPEAYSNPAVYSRLSEYTAMVSLPVLEGKPNANHVCAEIRNSRTHRLHSWTSSHIAQNK

SEQ ID NO: 165051 - protein, 56 aa, Zea Mays
MDFQTGDSYIDLLIVVHFLKLVELCKGFVVLPCLVSSVEMNGKVAIPWQMGNTTCG

SEQ ID NO: 165052 - protein, 155 aa, Zea Mays
MSKVKSNVTLINVMKLAGLNTLGISMARIDYAPQGQNPPHTHPRATEILTVLEGSLYVGFVTSNPDNKFISKLLNKGDVFVFPQGLIHFQFNPSHDKPAVAIAALNSQNPGAITISNAVFGSKPPIADDVLAKAFQVDKKVVDWLQAQFWEDNHN

SEQ ID NO: 165053 - protein, 124 aa, Zea Mays
MFSIYRRHCPMWIHSGSHSEQPEGVLAAVRHVEEAVLVLVLLVDGGHQSSCRDNNVTGGGHRGRFCFIFPQHWYDNRRNYCPVPVGGRVFFTKMKIAFSALSLIRFRTTYTNCPTVRSAGTRYS

SEQ ID NO: 165054 - protein, 236 aa, Zea Mays
MATGSEASKAAEAVVDWHKHDSKRMLHAVYRVGDLDRTIKYYTECFGMKLLRKRDVPDEKYTNAFLGFGPENTNFAVELTYNYGVDKYDIGTGFGHFAIANDDVMLRVGDLERSIKFYEKALGMKLLRKKDVPDYKYTIAMLGYADEDKTTVLELTYNYGVTEYSKGNAYAQVAIGTNDVYKSAEAVDLATKELGGKILRQPGPLPGINTKIASFVDPDGWKVVLVDNTDFLKELH

SEQ ID NO: 165055 - protein, 66 aa, Zea Mays
MARVLGIYDLIIAAIISVGINPKAKPKPYFLDGYAHLSFELACSLAVLAVGMAISIVRDTRVSDCI

SEQ ID NO: 165056 - protein, 248 aa, Zea Mays
METISEELRLKDIEFMKKKLEDLDKSMKRSNDKQLKIEHELCERVIGHLEEGKDVRLGDWKAADIEILNTFQLLSAKPVVYLVNMSEKDFQRKKNKFLPKIHAWVQEHGGETILPFSCAFEQKLVDMPEDEAAKYCAENQITSMIPKIIKTGFAAIHLIYFFTAGPDEVKCWQIRRQTKAPQAAGAIHTDFERGFICAEVMKFEDLKELGSESAVKAAGKYKQEGKTYVVQDGDIIFFKFNVSGGGKK

SEQ ID NO: 165057 - protein, 224 aa, Zea Mays
METISEELRLKDIEFMKKKLEDLDKSMKRSNDKQLKIEHELCERVIGHLEEGKDVRLGDWKAADIEILNTFQLLSAKPVVYLEHGGETILPFSCAFEQKLVDMPEDEAAKYCAENQITSMIPKIIKTGFAAIHLIYFFTAGPDEVKCWQIRRQTKAPQAAGAIHTDFERGFICAEVMKFEDLKELGSESAVKAAGKYKQEGKTYVVQDGDIIFFKFNVSGGGKK

SEQ ID NO: 165058 - protein, 215 aa, Zea Mays
MISSSKLSMNYVIGHLEEGKDVRLGDWKAADIEILNTFQLLSAKPVVYLVNMSEKDFQRKKNKFLPKIHAWVQEHGGETILPFSCAFEQKLVDMPEDEAAKYCAENQITSMIPKIIKTGFAAIHLIYFFTAGPDEVKCWQIRRQTKAPQAAGAIHTDFERGFICAEVMKFEDLKELGSESAVKAAGKYKQEGKTYVVQDGDIIFFKFNVSGGGKK

SEQ ID NO: 165059 - protein, 130 aa, Zea Mays
MLDECDTLGCCSSQQLTEKSDAYSIGVLMLEEWRWSRRGSRWRAATGRYIVRDEGGAGPDQGSVRPARAAGPGGGGLEQYMDLVLRCVEEAGADRPSMGEVDGEIEQVLKMAGGTGLHPYAESAASIPTP

SEQ ID NO: 165060 - protein, 351 aa, Zea Mays
MGEKLSATLHASGRDDMSILAMQRLNEHQPNGPATPVDMVVDYYKFDYEFAEPPRVTSLQNTVPLATFSDFGDDVYFVADQRGYEAVVYYLAGQYLKTDDKSGKIVDPRLQLNKVVREIKYSPGGVTVKTEDNSVYSADYVMVSASLGVLQSDLIQFKPKLPTWKVRAIYQFDMAVYTKIFLKFPRKFWPEGKGREFFLYASSRRGYYGVWQEFEKQYPDANVLLVTVTDEESRRIEQQSDEQTKAEIMQVLRKMFPGKDVPDATDILVPRWWSDRFYKGTFSNWPVGVNRYEYDQLRAPVGRVYFTGEHTSEHYNGYVHGAYLSGIDSAEILINCAQKKMCKYHVQGKYD

SEQ ID NO: 165061 - protein, 142 aa, Zea Mays
MHQPAIKSPPVVDDSSHRRRRGERRSRLPLHAELPGRVARVAAGNIAAVPTPALPLSDVAWLGHHLRHLDVSGEHLHYTRHRWPLVRRTLRAEERNIDDSDDCLFTVGFFDPCVQDAKCLVPLVQLPGLQTIERFSRFTRMN

SEQ ID NO: 165062 - protein, 183 aa, Zea Mays
MRLHGVGTRSLDGAAQVSVADNEGERCSSSGCERCWSSFEQVHTKRHNKLLHDRMKDLVFVKFNSRLKQKKDDMDKDPIEKRVHYVVLEDEDNKWITGIEPTKGDEEQEEETETSSQGVAAASQREIEERTKRVNWQKLRSRKRNRLIPSFPTFEEEESSPSSDEEDENDIDMLSRSDSEAEP

SEQ ID NO: 165063 - protein, 294 aa, Zea Mays
MSESELAVIKPEALKTYIWLQCFDGSIQQVEEEVAMFCPMICREIMKNGTGSSKNHAIVLPERVNPASLSLILDYCRFHQVPGRSNKERKSFDEKFVRIDTEKLCKLASAALGLQLRPLVDLTCGALARIIGGKTPDEVRDIFHLPDDLTEEEKLEPLKNLNDDPTIRLLNRLYAKKRKELQERQKLKDVQTQEEQKDERSLDELLCFINGDGDSRGGKASKSKKKNKRRKDQAKNPTKANSEPVNKFRRELPVWFRAKQIMVTFLGILAKVKICKIPSTPSTMLTLTMDLILQ

SEQ ID NO: 165064 - protein, 455 aa, Zea Mays
MVVEANSGSTLAAVGVAGTGSSMAVHGHQLSTVVPSSVTGEEVNYELADADLLHKLHYVRAVHVFRAPTGVAAPPLTIRELKEPMFPWLDMYFPVSGRLRRRQAAEGEEAAAAAVGRPYVRCNDCGVRIVEVTCGATVEQWLEAEAERGGLCKALAYDKVTSFKCGGMALGFTWAHLIGDIPSAVASFRKWAQVLGGNKAPAPTLRDPLAVPPSAPPTSVTVPPSVKATAAPVGDHWVVPTTHDMVSFSFHVTEQQLQGLQLSATKGHHRREVVGPFELVSALMWRALAAIRGPEEEEATRMVTVVKTGPAPTSGGGPRPALTNEHRIGHVVFATGGSSPATADVAKLAALLAGAHLEEASAVAAAAFAGADDADVVVYGANLTFVEAEGLEVYELELAGRRPAHVEYAVDGVGDGGAAVVHRDAGGRGRTVAAVLRRGEAGRLRAAIRDALRVA

SEQ ID NO: 165065 - protein, 253 aa, Zea Mays
MAEATAYEEQRRRQVEANKRKLEELQLHYLSAAVREAAAAAKPSPVKKRKARVPLDAADSVMEPLRRSGRLANLPDKSVHREEVPTFWRKIRRTYGSVRKDLENRVYATDEARSYAICKAEEVEQELDSSFPVFIKPMTQSHVTGGFWLGLPNHFCRKYLPKRDETITLLDEDDNESYTLYLALKRGLSAGWRGFAIQHKLVDGDCLVFQLTERTKFKKELKLVSSTAFLQDEIHMCTKVIIIRASSYYESED

SEQ ID NO: 165066 - protein, 229 aa, Zea Mays
MAEATAYEEQRRRQVEANKRKLEELQLHYLSAAVREAAAAAKPSPVKKRKARVPLDAADSVMEPLRRSGRLANLPDKSVHREEVPTFWRKIRRTYGSVRKDLENRVYATDEARSYAICKAEEVEQELDSSFPVFIKPMTQSHVTGGFWLGLPNHFCRKYLPKRDETITLLDEDDNESYTLYLALKRGLSAGWRGFAIQHKLVDGDCLVFQLTERTKFKLCCAVPPVPAL

SEQ ID NO: 165067 - protein, 325 aa, Zea Mays
MIGGGRAADSHPASCSSSSSSSSSPSGPSTGGSRLHRSKRRPDILNMLMSAACLSSSSSDTGKGQSKFSSNKVTHGFHLVEGRSGHDMEDYHVAEYRYENDHELGLFAIYDGHLGDSVASYLKANLFDNILKEPLFWSDPQEAIKNAYSSTNKYILENTRQLGPGGSTAVTAIVVDGTDMWIANIGDSRAVLSETGTASQVTVDHEPHTTNERKRIEEKGGFVSTFPGDVPRVNGQLAVARAFGDQSLKAHLSSEPDVKHIKINSSTEFVILASDGLWKVMKNQEAVDLVKSTKDPQTAAKRLTSEALGRMSKDDISCIVIRFRC

SEQ ID NO: 165068 - protein, 322 aa, Zea Mays
MIGGGRAADSHPASCSSSSSSSSSPSGPSTGGSRLHRSKRRPDILNMLMSAACLSSSSSDTGKGQSKFSSNKVTHGFHLVEGRSGHDMEDYHVAEYRYENDHELGLFAIYDGHLGDSVASYLKANLFDNILKEPLFWSDPQEAIKNAYSSTNKYILENTRQLGPGGSTAVTAIVVDGTDMWIANIGDSRAVLSETGTASQVTVDHEPHTTNERKRIEEKGGFVSTFPGDVPRVNGQLAVARAFGDQSLKAHLSSEPDVKHIKINSSTEFVILASDGLWKNQEAVDLVKSTKDPQTAAKRLTSEALGRMSKDDISCIVIRFRC

SEQ ID NO: 165069 - protein, 89 aa, Zea Mays
MHGPKCKLGSNCTVGRRLQEINILGGLILPVWGAVAKALAKQARQIHRRIRVVRLETTTENKRFVGLIIPNSAVESVLEGLQWVQDIDE

SEQ ID NO: 165070 - protein, 187 aa, Zea Mays
MFSIANVQLANSILEERLKDKAGSSSDGFYESRKEWAGRRHFLLAFEGSAEGLYIVIRPAVGEASREMSLVELKSKYRKVSSVDKISKGWQEEYDSSSKQCMHGPKCKLGSNCTVGRRLQEINILGGLILPVWGAVAKALAKQIHRRIRVVRLETTTENKRFVGLIIPNSAVESVLEGLQWVQDIDE

SEQ ID NO: 165071 - protein, 100 aa, Zea Mays
MFSIANVQLANSILEERLKDKAGSSSDGFYESRKEWAGRRHFLLAFEGSAEGLYIVIRPAVGEASREMSLVELKSKYRKVSSVDKISKGWQEEYDSSSKQ

SEQ ID NO: 165072 - protein, 661 aa, Zea Mays
MLIWPPSKGHTLQDIPNLKNMYRKAAALWVELRVELLSAIEYYAEDKVNSAQIWRLYWASHQRFFRHMCMSAKVPAVVRLAKEALAEEKCVVIGLQSTGEARTEEAVAKYGIELEDFVSGPRELLLKLVEDNYPLPPKPDCFEQGEEKVQEFQHKRHYGSDMSLKGRVSKLGKKEDVSEDGGDEYPPHSDHESTESDEDFYMCQICNTEEEKNSLFCCCICASRVHPGCLTPPSTDIVNDDWSCYGCKEKVKSYLKERDAYLTELSKRYDAALDRKSKILDIIRSLDLPSNPLDDIIDQLGGPDNVAEITGRRGMLIRASDGKGVIYQARNTKEVALDMINMHEKQQFMDGEKNVAIISEAGSAGVSLHADRRAKNQRRRVHITLELPWSADRAIQQFGRTHRSNQTSAPEYRLLFTNLGGEKRFASIVAKRLESLGALTQGDRRAGPSLSAFNYDSNYGKKALTMMYRGIMEQDAFPVVPFECSENQATLEEFITKAKAALVSVGIIRDPIMCNGKNGGKLTGRIIDSDMHDVARFLNRILGLFPDIQNRLFDLFTSILDIVIQNARIEGQLDSGIVDIKAKSVEMKESPKTVHVDTVSGASTILYTFTVDRGVSWEVTFILKPLSVSPKNLCDMKCIYISVLFYITFFSRNAGELCIIL

SEQ ID NO: 165073 - protein, 710 aa, Zea Mays
MLEDIGKIGEFKKCISHARQVTTFIYMHGKLLDATREKIWGDLVRPAVTKFVTSFLTLQSIYKHKQSLRCLFVSDDWTRSKLSSIEAGKKVTEILLSTNFWNSVQDCIRASQPLIVLPEVAAAMDMAKAKITSGFEGREAMKRKLLAIINRRWQDQMEVKLYGAALFLNPNKFFELQKKDPTKREVGKLRATFNEVLWKMVEDYDLQAIISKQADEWKKTKVDMNMYRKAAALWVELRVELLSAIEYYAEDKVNSAQIWRLYWASHQRFFRHMCMSAKVPAVVRLAKEALAEEKCVVIGLQSTGEARTEEAVAKYGIELEDFVSGPRELLLKLVEDNYPLPPKPDCFEQGEEKVQEFQHKRHYGSDMSLKGRVSKLGKKEDVSEDGGDEYPPPDSDHESTESDEDFYMCQICNTEEEKNSLFCCCICASRVHPGCLTPPSTDIVNDDWSCYGCKEKVKSYLKERDAYLTELSKRYDAALDRKSKILDIIRSLDLPSNPLDDIIDQLGGPDNVAEITGRRGMLIRASDGKGVIYQARNTKEVALDMINMHEKQQFMDGEKNVAIISEAGSAGVSLHADRRAKNQRRRVHITLELPWSADRAIQQFGRTHRSNQTSAPEYRLLFTNLGGEKRFASIVAKRLESLGALTQGDRRAGPSLSAFNYDSNYGKKALTMMYRGIMEQVTRMPFLLCLSNALRIKLPLKSSSLKQKLL

SEQ ID NO: 165074 - protein, 712 aa, Zea Mays
MLEDIGKIGEFKKCISHARQVTTFIYMHGKLLDATREKIWGDLVRPAVTKFVTSFLTLQSIYKHKQSLRCLFVSDDWTRSKLSSIEAGKKVTEILLSTNFWNSVQDCIRASQPLIVLPEVAAAMDMAKAKITSGFEGREAMKRKLLAIINRRWQDQMEVKLYGAALFLNPNKFFELQKKDPTKREVGKLRATFNEVLWKMVEDYDLQAIISKQADEWKKTKVDMNMYRKAAALWVELRVELLSAIEYYAEDKVNSAQIWRLYWASHQRFFRHMCMSAKVPAVVRLAKEALAEEKCVVIGLQSTGEARTEEAVAKYGIELEDFVSGPRELLLKLVEDNYPLPPKPDCFEQDEGEEKVQEFQHKRHYGSDMSLKGRVSKLGKKEDVSEDGGDEYPPPDSDHESTESDEDFYMCQICNTEEEKNSLFCCCICASRVHPGCLTPPSTDIVNDDWSCYGCKEKVKSYLKERDAYLTELSKRYDAALDRKSKILDIIRSLDLPSNPLDDIIDQLGGPDNVAEITGRRGMLIRASDGKGVIYQARNTKEVALDMINMHEKQQFMDGEKNVAIISEAGSAGVSLHADRRAKNQRRRVHITLELPWSADRAIQQFGRTHRSNQTSAPEYRLLFTNLGGEKRFASIVAKRLESLGALTQGDRRAGPSLSAFNYDSNYGKKALTMMYRGIMEQVTRMPFLLCLSNALRIKLPLKSSSLKQKLL

SEQ ID NO: 165075 - protein, 528 aa, Zea Mays
MLEDIGKIGEFKKCISHARQVTTFIYMHGKLLDATREKIWGDLVRPAVTKFVTSFLTLQSIYKHKQSLRCLFVSDDWTRSKLSSIEAGKKVTEILLSTNFWNSVQDCIRASQPLIVLPEVAAAMDMAKAKITSGFEGREAMKRKLLAIINRRWQDQMEVKLYGAALFLNPNKFFELQKKDPTKREVGKLRATFNEVLWKMVEDYDLQAIISKQADEWKKTKVDMNMYRKAAALWVELRVELLSAIEYYAEDKVNSAQIWRLYWASHQRFFRHMCMSAKVPAVVRLAKEALAEEKCVVIGLQSTGEARTEEAVAKYGIELEDFVSGPRELLLKLVEDNYPLPPKPDCFEQGEEKVQEFQHKRHYGSDMSLKGRVSKLGKKEDVSEDGGDEYPPPDSDHESTESDEDFYMCQICNTEEEKNSLFCCCICASRVHPGCLTPPSTDIVNDDWSCYGCKEKVKSYLKERDAYLTELSKRYDAALDRKSKILDIIRSLDLPSNPLDDIIDQLIFISHNLTLQEDDVNPNLVKTC

SEQ ID NO: 165076 - protein, 413 aa, Zea Mays
MLEDIGKIGEFKKCISHARQVTTFIYMHGKLLDATREKIWGDLVRPAVTKFVTSFLTLQSIYKHKQSLRCLFVSDDWTRSKLSSIEAGKKVTEILLSTNFWNSVQDCIRASQPLIVLPEVAAAMDMAKAKITSGFEGREAMKRKLLAIINRRWQDQMEVKLYGAALFLNPNKFFELQKKDPTKREVGKLRATFNEVLWKMVEDYDLQAIISKQADEWKKTKVDMNMYRKAAALWVELRVELLSAIEYYAEDKVNSAQIWRLYWASHQRFFRHMCMSAKVPAVVRLAKEALAEEKCVVIGLQSTGEARTEEAVAKYGIELEDFVSGPRELLLKLVEDNYPLPPKPDCFEQGEEKVQEFQHKRHYGSDMSLKGRVSKLGKKEDPSSSMVINWVKDESHLWCRAGASDLSSILMLQ

SEQ ID NO: 165077 - protein, 194 aa, Zea Mays
MHHGSMYGPGSYKGRQQGSKFGGSTTSWSSAGRRFGTIDLSGNQQRGSMPFGSHNGSLEFMNEQNRGPRATKPKIQGTENTSGDERSEKIVPLIDSELYNRSDFITEYKDAKFFVIKSYTEDHVHRSIKYKVWASTASGNRKLDSAYHAAKEKEEHCPIFLFFSVRTTHLLWFFAFPFEEKKRVTVHSGCLILY

SEQ ID NO: 165078 - protein, 593 aa, Zea Mays
MRVVASECLGLRSYSVIPLQSEPALDNNPSKSANARDQILSGTENVTTGNARGGSSLKSQKGPPEKASSVGKPGEQPFPYHQNVYAPQPQPLYPGGYMNPSGQWEEYPHYVSMEGLHSVSPGIYNDNQSLMLSPGYANNPQMMYGAYSPVSTVGDGQQYLPMHFPFSSPYYQPPASPSMGYSSSATGISQGDPMLQQEYFLPDGLLYSPTQGYHQPFSSFDRAPTQLNNAPGLFGQGNLPLASGMHHGSMYGPGSYKGRQQGSKFGGSTTSWSSAGRRFGTIDLSGNQQRGSMPFGSHNGSLEFMNEQNRGPRATKPKIQGTENTSGDERSEKIVPLIDSELYNRSDFITEYKDAKFFVIKSYTEDHVHRSIKYKVWASTASGNRKLDSAYHAAKEKEEHCPIFLFFSVNGSGQFCGVAEMIGPVDFDRSVDYWQQDKWSGQFPVKWHIIKDVPNNLLRHIILENNDSKPVTNSRDTQEVKLEQGLQMLTIFKNHEAETTIVEDFDFYEQREKALQENRRQQQPPTTYPQKLVDTNAQGPVADISDAFAKAVQLKDTANSGTTPKAEGASAENGSAATAKVEGSANLNTGPVE

SEQ ID NO: 165079 - protein, 621 aa, Zea Mays
MLKPSPGGGFQSRRTSPRPPPTAAPGSPPWPPRRTRPRAPQDSVIPLQSEPALDNNPSKSANARDQILSGTENVTTGNARGGSSLKSQKGPPEKASSVGKPGEQPFPYHQNVYAPQPQPLYPGGYMNPSGQWEEYPHYVSMEGLHSVSPGIYNDNQSLMLSPGYANNPQMMYGAYSPVSTVGDGQQYLPMHFPFSSPYYQPPASPSMGYSSSATGISQGDPMLQQEYFLPDGLLYSPTQGYHQPFSSFDRAPTQLNNAPGLFGQGNLPLASGMHHGSMYGPGSYKGRQQGSKFGGSTTSWSSAGRRFGTIDLSGNQQRGSMPFGSHNGSLEFMNEQNRGPRATKPKIQGTENTSGDERSEKIVPLIDSELYNRSDFITEYKDAKFFVIKSYTEDHVHRSIKYKVWASTASGNRKLDSAYHAAKEKEEHCPIFLFFSVNGSGQFCGVAEMIGPVDFDRSVDYWQQDKWSGQFPVKWHIIKDVPNNLLRHIILENNDSKPVTNSRDTQEVKLEQGLQMLTIFKNHEAETTIVEDFDFYEQREKALQENRRQQQPPTTYPQKLVDTNAQGPVADISDAFAKAVQLKDTANSGTTPKAEGASAENGSAATAKVEGSANLNTGPVE

SEQ ID NO: 165080 - protein, 593 aa, Zea Mays
MAAAPHQAQGPAVDSVIPLQSEPALDNNPSKSANARDQILSGTENVTTGNARGGSSLKSQKGPPEKASSVGKPGEQPFPYHQNVYAPQPQPLYPGGYMNPSGQWEEYPHYVSMEGLHSVSPGIYNDNQSLMLSPGYANNPQMMYGAYSPVSTVGDGQQYLPMHFPFSSPYYQPPASPSMGYSSSATGISQGDPMLQQEYFLPDGLLYSPTQGYHQPFSSFDRAPTQLNNAPGLFGQGNLPLASGMHHGSMYGPGSYKGRQQGSKFGGSTTSWSSAGRRFGTIDLSGNQQRGSMPFGSHNGSLEFMNEQNRGPRATKPKIQGTENTSGDERSEKIVPLIDSELYNRSDFITEYKDAKFFVIKSYTEDHVHRSIKYKVWASTASGNRKLDSAYHAAKEKEEHCPIFLFFSVNGSGQFCGVAEMIGPVDFDRSVDYWQQDKWSGQFPVKWHIIKDVPNNLLRHIILENNDSKPVTNSRDTQEVKLEQGLQMLTIFKNHEAETTIVEDFDFYEQREKALQENRRQQQPPTTYPQKLVDTNAQGPVADISDAFAKAVQLKDTANSGTTPKAEGASAENGSAATAKVEGSANLNTGPVE

SEQ ID NO: 165081 - protein, 426 aa, Zea Mays
MAAAPHQAQGPADSVIPLQSEPALDNNPSKSANARDQILSGTENVTTGNARGGSSLKSQKGPPEKASSVGKPGEQPFPYHQNVYAPQPQPLYPGGYMNPSGQWEEYPHYGIYNDNQSLMLSPGYANNPQMMYGAYSPVSTVGDGQQYLPMHFPFSSPYYQPPASPSMGYSSSATGISQGDPMLQQEYFLPDGLLYSPTQGYHQPFSSFDRAPTQLNNAPGLFGQGNLPLASGMHHGSMYGPGSYKGRQQGSKFGGSTTSWSSAGRRFGTIDLSGNQQRGSMPFGSHNGSLEFMNEQNRGPRATKPKIQGTENTSGDERSEKIVPLIDSELYNRSDFITEYKDAKFFVIKSYTEDHVHRSIKYKVWASTASGNRKLDSAYHAAKEKEEHCPIFLFFSVRTTHLLWFFAFPFEEKKRVTVHSGCLILY

SEQ ID NO: 165082 - protein, 154 aa, Zea Mays
MADLVAVGIKRRDAEVGSHGFPILLGPKRIKLEDEAEIPEPMEEEEPLADVDADAGAAAPVVVQAQPAVSVSMPSPSPLQPAQGHEEAAVLREPQPGLQQAAPMDVEEDFRQPQPQPGLHPRFWSVLMAGAPVCASVQQPKSGAPLFQAAFVTC

SEQ ID NO: 165083 - protein, 142 aa, Zea Mays
MAGGKRSKLLQGAPPPPPPPQWSDVRGLLHMRLTDAAAELNVSITYLRRLCRQNGFAQWPGKKIRYMNSTGKKVMLEADDALLDASPSAGLAGTSGLRQAMSAETRNEEEDDEPVANQELTTLNLIDKVGSSSSPSRSDGRS

SEQ ID NO: 165084 - protein, 83 aa, Zea Mays
MESKTEDCTPAGIAQRCNWPGTPDAEQDPVQTKSRGIITESLPATYTCNSWQQYLITRLHPCPRLQLSYACILYKKIVGYLNT

SEQ ID NO: 165085 - protein, 153 aa, Zea Mays
MLIRKLMKVPLKFYDSGLLLIISHFDCLFYYCSNTTLNNLPICVCLYSKIHFLFLINVCTVHLQRPIAPVDLYRSICDSQLIGLSGYTKEGLPIFGIGVGHSTYDKASVITLMLAICLVGYNYSQNHKSVWFEAISTKPNKGFRLSSSDSPSR

SEQ ID NO: 165086 - protein, 149 aa, Zea Mays
MLIRKLMKVPLKFYDSGLLLIISHFDCLFYYCSNTTLNNLPICVCLYSKIHFLFLINVCTVHLQRPIAPVDLYRSICDSQLIGLSGYTKEATTTAKIIKVSGLKLSALSQIKDSGSHQVTPPHVDFADVSILVVELRTTIRCPDRERWS

SEQ ID NO: 165087 - protein, 132 aa, Zea Mays
MCLLRNYNWSVSKVHDEWFADEERVRKVVGLPEKHIEMPNDRERPIAPVDLYRSICDSQLIGLSGYTKEGLPIFGIGVGHSTYDKASVITLMLAICLVGYNYSQNHKSVWFEAISTKPNKGFRLSSSDSPSR

SEQ ID NO: 165088 - protein, 108 aa, Zea Mays
MHQGYPKETLVHFLKAREWNVAKAHKMIVECLNWRIQNEIDSVLERPIAPVDLYRSICDSQLIGLSGYTKEDSGSHQVTPPHVDFADVSILVVELRTTIRCPDRERWS

SEQ ID NO: 165089 - protein, 130 aa, Zea Mays
MHQGYPKETLVHFLKAREWNVAKAHKMIVECLNWRIQNEIDSVLERPIAPVDLYRSICDSQLIGLSGYTKEATTTAKIIKVSGLKLSALSQIKDSGSHQVTPPHVDFADVSILVVELRTTIRCPDRERWS

SEQ ID NO: 165090 - protein, 145 aa, Zea Mays
MLIRKLMKVPLKFYDSGLLLIISHFDCLFYYCSNTTLNNLPICVCLYSKIHFLFLINVCTVHLQRPIAPVDLYRSICDSQLIGLSGYTKEGLPIFGIGVGHSTYDKASVITLMLAICLVGYNYSQNHKSVWFEAISTKPNKGTCY

SEQ ID NO: 165091 - protein, 97 aa, Zea Mays
MERVLKINGVKLIGINNRSLETFVVDTSNTKMLLEKHGDIIREKGILVVGESGLFTPDDVAYVQNAGVSAVLVGESLVKQECPGRAIVGLFGKELLH

SEQ ID NO: 165092 - protein, 333 aa, Zea Mays
MAAPAPSGAASAAASPSPLMQLPSPFAELVKGPSGLEKVVLRGARNCCAEIYLYGGQVTSWKNDNGEDLLFLSSKAIFKPPKAIRGGIPICFPQFGSHGNLEQHGFARNRFWTIDNNPPPLPLNPAIKAFVDLILKPSEEDLKIWPHSFEFRLRVALGPSGDLSLTSRIRNNNPDGRPFSYTFAYHTYFSVSDISEVRVEGLETMDYLDNLKAKERFTEQGDAIVFESEVDKVYLAAPSKIAIIDHEKKRTFVVTKEGLPDAVVWNPWDKKAKAMQDFGDAEYKSMLCVEPASVERPITLKPGEEWKGRLVLSAVPSSYCSGQLDPLKEKNRW

SEQ ID NO: 165093 - protein, 256 aa, Zea Mays
MDNGGQGLNWVKLDDEERDDLVAFLSAPAEFYSEMKSTDISDRVLSRQKNVPVGRNDQSDPPLIIKDIYEVARTEISTVKSDVCGLAEELHGLRRNLSSGNDHWKIDIGNKMDDDRKLSTGVQAASQTTPSSSIRRSAESITRVRWFWNSLWKSKRDEQRPLRYDMSYNLDLRVVSLLTQRFNGLAERSRNYLTSWKENSRTSGRTGGLHIQGQQQNIQFGRSIRITLLLVLSIFLIGQCPTCLVLNCGKSDKLLT

SEQ ID NO: 165094 - protein, 351 aa, Zea Mays
MAASGGLEQWQKDGFFQAAEEVQESADLMESVYRTWMRERSNGSGSEEVDDLQRELQTALGTAKWQLEQFERAVSSSNDKYSLEEGTVARRRQFVVAIEDQISRVEKEINGSLMDNGGQGLNWVKLDDEERDDLVAFLSAPAEFYSEMKSTDISDRVLSRQKNVPVGRNDQSDPPLIIKDIYEVARTEISTVKSDVCGLAEELHGLRRNLSSGNDHWKIDIGNKMDDDRKLSTGVQAASQTTPSSSIRRSAESITRVRWFWNSLWKSKRDEQRPLRYDMSYNLDLRVRFNGLAERSRNYLTSWKENSRTSGRTGGLHIQGQQQNIQFGRSIRITLLLVLSIFLIVPFLASA

SEQ ID NO: 165095 - protein, 321 aa, Zea Mays
MRERSNGSGSEEVDDLQRELQTALGTAKWQLEQFERAVSSSNDKYSLEEGTVARRRQFVVAIEDQISRVEKEINGSLMDNGGQGLNWVKLDDEERDDLVAFLSAPAEFYSEMKSTDISDRVLSRQKNVPVGRNDQSDPPLIIKDIYEVARTEISTVKSDVCGLAEELHGLRRNLSSGNDHWKIDIGNKMDDDRKLSTGVQAASQTTPSSSIRRSAESITRVRWFWNSLWKSKRDEQRPLRYDMSYNLDLRVVSLLTQRFNGLAERSRNYLTSWKENSRTSGRTGGLHIQGQQQNIQFGRSIRITLLLVLSIFLIVPFLASA

SEQ ID NO: 165096 - protein, 695 aa, Zea Mays
MGKPPGARNPAEAEADGDDAVFLELSRELKEEGTRLFNRRDFEGAAFKYDKAVQLLPAGRRVEAAHLRASIAHCYMRMSPAEFHHAIHECNLALEAVPRYSRALLRRAACFEALGRPDLAWGDIRTVLRWEPGNRAARQISDRVRTALEDKGISVALDVLPEDENEIASAKGEERKKSRNKRFDSVAGGREGENGIALLESASTEKQAGPRQTNGTGNHQDHTEDSESNGLEKLEQSTETGEKDMGKKRGAHAAGKKPRCGESKQQKHSAVNHCQDNIGAKEEVMKDVKLVFGEDIRCAQMPANCSLPQLREIVQNKFPSLKAFLIKYKDKEEDLVTITLSEELSWASNLAVSQVPIRFYVVEVNHVQELGVDGVRRRPSFATLERNRDIMLDNGTIGHDVEHKHYADDWMVQFAQIFKNHVGFSSDAYLDLHDLGLRLHYEAMEDTIQREEAQEIFEVAESKFKEMAALALFNCGNVHMSRARRRPCLAEDPLQEFILEKVNVSYDWACTEYAKAGAMFEEAVKTKSDFFEGLIALGQQKFEQAKLSWYYALACKINMETEVLELFNHAEDNMEKGMDMWERMETLRLKGLSKPSKEKVVLEKMVLEGFVKDISADEAFEQASSIRSHINILWGTILYERSVVEFNLGLPSWEESLTVAMEKFKIGGASQADINVIVKNHCANETTQEVSRLRR

SEQ ID NO: 165097 - protein, 228 aa, Zea Mays
MLSDVHNNWKTCEAVRIKCLGVPTVDMQNVCHQLEDKTGGLIIHRHGSLLILYRGRHYNPKKRPVVPLMLWKPAEPVYPRLIKTTIEGLTVEETKQMRKKGLHVPVLTKLAKNGYYASLVPMVRDAFLTDELVRIDCKGLPKSDYKKIGVKLRDLVPCILVSFDKEQIIVWRGNEDGSLQDRTQKSFLSFIDSDVASVKDETGDQEQIPSDLSYDGCSEMKCQITKVI

SEQ ID NO: 165098 - protein, 276 aa, Zea Mays
MISMAVHRNLLRLRGFCMTPTERLLVYPYMANGSVASRLRDRPPAEPPLDWQTRQRIALGSARGLSYLHDHCDPKIIHRDVKAANILLDEDFEAVVGDFGLAKLMDYKDTHVTTAVRGTIGHIAPEYLSTGKSSEKTDVFGYGITLLELITGQRAFDLARLANDDDVMLLDWVKGLLKEKKLESLVDEDLDHNYIDVEVESLIQVALLCTQSNPMERPKMSEVVRMLEGDGLAERWEEWQKVEVVRQEVELGPHRTSEWILDSTDNLHAEQLSGPR

SEQ ID NO: 165099 - protein, 583 aa, Zea Mays
MAAAEARRRSAVWALLPLLLRLLHPAALVLANTEGDALHSLRTNLNDPNNVLQSWDPTLVNPCTWFHVTCNNDNSVIRVDLGNAALSGTLVPQLGQLKNLQYLELYSNNISGTIPSELGNLTNLVSLDLYLNNFTGPIPDSLGKLLKLRFLRLNNNSLSGSIPKSLTAITALQVLDLSNNNLSGEVPSTGSFSLFTPISFGNNPNLCGPGTTKPCPGAPPFSPPPPYNPTTPVQSPGSSSSSTGAIAGGVAAGAALLFAIPAISFAYWRRRKPQEHFFDVPAEEDPEVHLGQLKRFSLRELQVATDGFSNKNILGRGGFGKVYKGRLADGSLVAVKRLKEERTPGGELQFQTEVEMISMAVHRNLLRLRGFCMTPTERLLVYPYMANGSVASRLRDRPPAEPPLDWQTRQRIALGSARGLSYLHDHCDPKIIHRDVKAANILLDEDFEAVVGDFGLAKLMDYKDTHVTTAVRGTIGHIAPEYLSTGKSSEKTDVFGYGITLLELITGQRAFDLARLANDDDVMLLDWVKGLLKEKKLESLVDEDLDHNYIDVEVESLIQVALPLILVRRSILQGHNRDVYQSS

SEQ ID NO: 165100 - protein, 145 aa, Zea Mays
MGTQRAEEPRDEKTIPRAISHPAHKTNIFIMMPAMRAHPTWQRPSRCHISQLFNHALEARRRLPFVQSVKIQIPPERHSSEGRQISIRRIRNLQAQKQGSLVSLRALFDRTKHLILKPRGGSDLDEKRISSGKRNAATFLHQGPR

SEQ ID NO: 165101 - protein, 1101 aa, Zea Mays
MVGCWLAMKEFHAIVALQVSLLFGTIIRKIPLPGCSHSASSQNGLPDSIEETSISEEILDVGQLKMMGDHFLQVLLKMKHNGAIDKTRAGFTALCNRLLCSNDSRLCKMTESWMVLLMDRTIAKGQTVDDLIRRSAGIPAAFIALFLAEPEGTPKKLLPRALEWLIEFAKNSLANFQKDSNQRSGVMKELLESQSETTSVYSNGNLSKGRDEGVVPTVHVFNVLKAAFNDANLATDTSGFSAEATIVAIRAFSSPYWEVRNAACLAYTALVRRMVGFLNVQKRESARRSLTGLEFFHRYPALHPFLSSELQTTTEQLADGVSSNLESHITKAIHPSLCPILILLSRLKPSPISCGTDDSLDPFLLLPFIQRCATQSNYRVRILASRALTCLVSNERLQYVISDILDNLPRGSHKAMAHSVQHTDPAISANMGKANVLLLSKSFNSIHGLLLQLASLLDNNFRGLTDGSMKDQIIGLLLEVLSRCSWLGCTKLCSCPIVITSYLRVLDLMLDVARTGKSRHTEVIQALLLELTSQCLSNTASTQYAFHDPTRIELKQQATESFLSCVGLSKKTDETNDDDVQLQILGEPTLEMPRVDYSLHEVHKEILSCLTDPSYDVRITVLKRILWLTKSIRHGYADNILHQWAGVNLQPALMERLFVEEHPKCLYYNLKIIFSWNMEFPFNNGEDSSTLLSLWDRLVHLNSTMSHAKTREIVLCCMGMCMKLFTKQSRGGISMDCLKTSEISASFVRINEGDGLSDAMLRLNLFVTLVKNQSEPSESMNARRAAAEAIVASGLLEEASYVASSVSNMYSPSEFDEDHTKEKCMEDSVFEFVSLYTCKILDLWFVCIQLLEDEDAYLRQKLAKDIQKIIAKGSANTFCDDSTPLQVDRVIELSLDYLTSLFGLWLKYVEFLLRIVLGTGNALNSRGDLVRQIFDKEIDNHHEEKLLICQICCSNIQKLLNSKCQMEAGAETKLFLQNWREIFLKQLTSLTGGYIEKEGKNDWIGGIGNHKDVFISVYAVLLGLYALTQSGSLDQLEDHCAVYLQEFANLERSITPFLKNPLISNLYALVKLSHERFISSDKPEDQVGDSGSSFDPYFLIR

SEQ ID NO: 165102 - protein, 2186 aa, Zea Mays
MSSKWRSLQHRHRYTYTSIVFPKHYLEALTLVPAEISSSNFFVRLSNLISLTSTYSQVVVVKDLASAYVQFLSTTGTPDEAVLAATKLYLEILFLENSLPLHRTLISVLAKCKKFSTVISGCFALLCEEYGGSGSKAKKRFMVSRAALSLIGYPKLGFLDEAVERCAEIMALDVVDGLDGVTKDIGEGSRPSPVVMEQCQEAMSCMYYLLQRYPYKFIGLDKASSVFKSAVRTILSVLKSSAFSRDCLVASGVSFCAAIQVFMSTEEISWFISQGLFGIYANHEDRKNQSVHNVFSDFDLCEQIRDLSVLSRLCLLRGILTSIPRTVLNMHQLHSSGPLWTVLYDGILPELCKHCENPVDSHFNFHALTVTQICLQQIKTSVSSDITDFSGDYKPFSRDVVNRILGIIWRNLEDPLSQTVKQVHLIFDLLLDIELCIASEDREHNNNLFLCNVANDLLRLGPRCKGRYVPLASLTKRLGAKSLLTLKSNLLSETAYAYIDDDVCCAVTTFLKSFLETLRGECWNDDGVELGYDAFRALCLPPFMRGLVSGNSKLRSNLNTYALPALIEVDAESIFTMLGFISIGPSTNETKLDVVLKNDQCIAALVSLLKVSRNLALVEGDIDLDPDELSQIQQMDSKGAAVISVKGIKVTVPFNWFALALTHSDESLRIDAAESLFLNPKTSSLPSSLELSLLKEAVPLNMRCSSTAFQMKWTSLFRKFFARVRTALDRQVKQGSWIPSLTSSVKGAGSIDTSKATVVKRAEDLFQFMKWLSSFLFNSCYPSGPYERKTIAMELILTLLDVWPICRSEGKIDLYPYNDSIILPDSTISFVGSIIDSWDRLRENSFRILLQFPTPLPGISLSTSINDVIRWAKKLVLSPRVRESDAGALTFRLIFRKYVLQLGCILVFSKESDCLECYTQSMNGDTEVTSQNPVAQYISSLIQWLCIVVEEGERDLSEACKKSFVHGVLLTLRYTFDEMDWNSEVVQSCISEMRYLVEKLLQLIMRVTSVALWVVSSDALSLPYDMDDMIDDGSFLSDIYDDQPTTTSEREEKNAKPGSNGKPAEQVVMVGCWLAMKEVSLLFGTIIRKIPLPGCSHSASSQNGLPDSIEETSISEEILDVGQLKMMGDHFLQVLLKMKHNGAIDKTRAGFTALCNRLLCSNDSRLCKMTESWMVLLMDRTIAKGQTVDDLIRRSAGIPAAFIALFLAEPEGTPKKLLPRALEWLIEFAKNSLANFQKDSNQRSGVMKELLESQSETTSVYSNGNLSKGRDEGVVPTVHVFNVLKAAFNDANLATDTSGFSAEATIVAIRAFSSPYWEVRNAACLAYTALVRRMVGFLNVQKRESARRSLTGLEFFHRQQLSIFYMIHGQIDQNFFSIVAALRYPALHPFLSSELQTTTEQLADGVSSNLESHITKAIHPSLCPILILLSRLKPSPISCGTDDSLDPFLLLPFIQRCATQSNYRVRILASRALTCLVSNERLQYVISDILDNLPRGSHKAMAHSVQHTDPAISANMGKANVLLLSKSFNSIHGLLLQLASLLDNNFRGLTDGSMKDQIIGLLLEVLSRCSWLGCTKLCSCPIVITSYLRVLDLMLDVARTGKSRHTEVIQALLLELTSQCLSNTASTQYAFHDPTRIELKQQATESFLSCVGLSKKTDETNDDDVQLQILGEPTLEMPRVDYSLHEVHKEILSCLTDPSYDVRITVLKRILWLTKSIRHGYADNILHQWAGVNLQPALMERLFVEEHPKCLYYNLKIIFSWNMEFPFNNGEDSSTLLSLWDRLVHLNSTMSHAKTREIVLCCMGMCMKLFTKQSRGGISMDCLKTSEISASFVRINEGDGLSDAMLRLNLFVTLVKNQSEPSESMNARRAAAEAIVASGLLEEASYVASSVSNMYSPSEFDEDHTKEKCMEDSVFEFVSLYTCKILDLWFVCIQLLEDEDAYLRQKLAKDIQKIIAKGSANTFCDDSTPLQVDRVIELSLDYLTSLFGLWLKYVEFLLRIVLGTGNALNSRGDLVRQIFDKEIDNHHEEKLLICQICCSNIQKLLNSKCQMEAGAETKLFLQNWREIFLKQLTSLTGGYIEKEGKNDWIGGIGNHKDVFISVYAVLLGLYALTQSGSLDQLEDHCAVYLQEFANLERSITPFLKNPLISNLYALVKLSHERFISSDKPEDQVGDSGSSFDPYFLIR

SEQ ID NO: 165103 - protein, 1118 aa, Zea Mays
MVGCWLAMKEVSLLFGTIIRKIPLPGCSHSASSQNGLPDSIEETSISEEILDVGQLKMMGDHFLQVLLKMKHNGAIDKTRAGFTALCNRLLCSNDSRLCKMTESWMVLLMDRTIAKGQTVDDLIRRSAGIPAAFIALFLAEPEGTPKKLLPRALEWLIEFAKNSLANFQKDSNQRSGVMKELLESQSETTSVYSNGNLSKGRDEGVVPTVHVFNVLKAAFNDANLATDTSGFSAEATIVAIRAFSSPYWEVRNAACLAYTALVRRMVGFLNVQKRESARRSLTGLEFFHRQQLSIFYMIHGQIDQNFFSIVAALRYPALHPFLSSELQTTTEQLADGVSSNLESHITKAIHPSLCPILILLSRLKPSPISCGTDDSLDPFLLLPFIQRCATQSNYRVRILASRALTCLVSNERLQYVISDILDNLPRGSHKAMAHSVQHTDPAISANMGKANVLLLSKSFNSIHGLLLQLASLLDNNFRGLTDGSMKDQIIGLLLEVLSRCSWLGCTKLCSCPIVITSYLRVLDLMLDVARTGKSRHTEVIQALLLELTSQCLSNTASTQYAFHDPTRIELKQQATESFLSCVGLSKKTDETNDDDVQLQILGEPTLEMPRVDYSLHEVHKEILSCLTDPSYDVRITVLKRILWLTKSIRHGYADNILHQWAGVNLQPALMERLFVEEHPKCLYYNLKIIFSWNMEFPFNNGEDSSTLLSLWDRLVHLNSTMSHAKTREIVLCCMGMCMKLFTKQSRGGISMDCLKTSEISASFVRINEGDGLSDAMLRLNLFVTLVKNQSEPSESMNARRAAAEAIVASGLLEEASYVASSVSNMYSPSEFDEDHTKEKCMEDSVFEFVSLYTCKILDLWFVCIQLLEDEDAYLRQKLAKDIQKIIAKGSANTFCDDSTPLQVDRVIELSLDYLTSLFGLWLKYVEFLLRIVLGTGNALNSRGDLVRQIFDKEIDNHHEEKLLICQICCSNIQKLLNSKCQMEAGAETKLFLQNWREIFLKQLTSLTGGYIEKEGKNDWIGGIGNHKDVFISVYAVLLGLYALTQSGSLDQLEDHCAVYLQEFANLERSITPFLKNPLISNLYALVKLSHERFISSDKPEDQVGDSGSSFDPYFLIR

SEQ ID NO: 165104 - protein, 1376 aa, Zea Mays
MSSKWRSLQHRHRYTYTSIVFPKHYLEALTLVPAEISSSNFFVRLSNLISLTSTYSQVVVVKDLASAYVQFLSTTGTPDEAVLAATKLYLEILFLENSLPLHRTLISVLAKCKKFSTVISGCFALLCEEYGGSGSKAKKRFMVSRAALSLIGYPKLGFLDEAVERCAEIMALDVVDGLDGVTKDIGEGSRPSPVVMEQCQEAMSCMYYLLQRYPYKFIGLDKASSVFKSAVRTILSVLKSSAFSRDCLVASGVSFCAAIQVFMSTEEISWFISQGLFGIYANHEDRKNQSVHNVFSDFDLCEQIRDLSVLSRLCLLRGILTSIPRTVLNMHQLHSSGPLWTVLYDGILPELCKHCENPVDSHFNFHALTVTQICLQQIKTSVSSDITDFSGDYKPFSRDVVNRILGIIWRNLEDPLSQTVKQVHLIFDLLLDIELCIASEDREHNNNLFLCNVANDLLRLGPRCKGRYVPLASLTKRLGAKSLLTLKSNLLSETAYAYIDDDVCCAVTTFLKSFLETLRGECWNDDGVELGYDAFRALCLPPFMRGLVSGNSKLRSNLNTYALPALIEVDAESIFTMLGFISIGPSTNETKLDVVLKNDQCIAALVSLLKVSRNLALVEGDIDLDPDELSQIQQMDSKGAAVISVKGIKVTVPFNWFALALTHSDESLRIDAAESLFLNPKTSSLPSSLELSLLKEAVPLNMRCSSTAFQMKWTSLFRKFFARVRTALDRQVKQGSWIPSLTSSVKGAGSIDTSKATVVKRAEDLFQFMKWLSSFLFNSCYPSGPYERKTIAMELILTLLDVWPICRSEGKIDLYPYNDSIILPDSTISFVGSIIDSWDRLRENSFRILLQFPTPLPGISLSTSINDVIRWAKKLVLSPRVRESDAGALTFRLIFRKYVLQLGCILVFSKESDCLECYTQSMNGDTEVTSQNPVAQYISSLIQWLCIVVEEGERDLSEACKKSFVHGVLLTLRYTFDEMDWNSEVVQSCISEMRYLVEKLLQLIMRVTSVALWVVSSDALSLPYDMDDMIDDGSFLSDIYDDQPTTTSEREEKNAKPGSNGKPAEQVVMVGCWLAMKEFHAIVALQVSLLFGTIIRKIPLPGCSHSASSQNGLPDSIEETSISEEILDVGQLKMMGDHFLQVLLKMKHNGAIDKTRAGFTALCNRLLCSNDSRLCKMTESWMVLLMDRTIAKGQTVDDLIRRSAGIPAAFIALFLAEPEGTPKKLLPRALEWLIEFAKNSLANFQKDSNQRSGVMKELLESQSETTSVYSNGNLSKGRDEGVVPTVHVFNVLKAAFNDANLATDTSGFSAEATIVAIRAFSSPYWEVRNAACLAYTALVRRMVGFLNVQKRESARRSLTGLEFFHRQVSSPSSFPF

SEQ ID NO: 165105 - protein, 1061 aa, Zea Mays
MMGDHFLQVLLKMKHNGAIDKTRAGFTALCNRLLCSNDSRLCKMTESWMVLLMDRTIAKGQTVDDLIRRSAGIPAAFIALFLAEPEGTPKKLLPRALEWLIEFAKNSLANFQKDSNQRSGVMKELLESQSETTSVYSNGNLSKGRDEGVVPTVHVFNVLKAAFNDANLATDTSGFSAEATIVAIRAFSSPYWEVRNAACLAYTALVRRMVGFLNVQKRESARRSLTGLEFFHRQQLSIFYMIHGQIDQNFFSIVAALRYPALHPFLSSELQTTTEQLADGVSSNLESHITKAIHPSLCPILILLSRLKPSPISCGTDDSLDPFLLLPFIQRCATQSNYRVRILASRALTCLVSNERLQYVISDILDNLPRGSHKAMAHSVQHTDPAISANMGKANVLLLSKSFNSIHGLLLQLASLLDNNFRGLTDGSMKDQIIGLLLEVLSRCSWLGCTKLCSCPIVITSYLRVLDLMLDVARTGKSRHTEVIQALLLELTSQCLSNTASTQYAFHDPTRIELKQQATESFLSCVGLSKKTDETNDDDVQLQILGEPTLEMPRVDYSLHEVHKEILSCLTDPSYDVRITVLKRILWLTKSIRHGYADNILHQWAGVNLQPALMERLFVEEHPKCLYYNLKIIFSWNMEFPFNNGEDSSTLLSLWDRLVHLNSTMSHAKTREIVLCCMGMCMKLFTKQSRGGISMDCLKTSEISASFVRINEGDGLSDAMLRLNLFVTLVKNQSEPSESMNARRAAAEAIVASGLLEEASYVASSVSNMYSPSEFDEDHTKEKCMEDSVFEFVSLYTCKILDLWFVCIQLLEDEDAYLRQKLAKDIQKIIAKGSANTFCDDSTPLQVDRVIELSLDYLTSLFGLWLKYVEFLLRIVLGTGNALNSRGDLVRQIFDKEIDNHHEEKLLICQICCSNIQKLLNSKCQMEAGAETKLFLQNWREIFLKQLTSLTGGYIEKEGKNDWIGGIGNHKDVFISVYAVLLGLYALTQSGSLDQLEDHCAVYLQEFANLERSITPFLKNPLISNLYALVKLSHERFISSDKPEDQVGDSGSSFDPYFLIR

SEQ ID NO: 165106 - protein, 2161 aa, Zea Mays
MSSKWRSLQHRHRYTYTSIVFPKHYLEALTLVPAEISSSNFFVRLSNLISLTSTYSQVVVVKDLASAYVQFLSTTGTPDEAVLAATKLYLEILFLENSLPLHRTLISVLAKCKKFSTVISGCFALLCEEYGGSGSKAKKRFMVSRAALSLIGYPKLGFLDEAVERCAEIMALDVVDGLDGVTKDIGEGSRPSPVVMEQCQEAMSCMYYLLQRYPYKFIGLDKASSVFKSAVRTILSVLKSSAFSRDCLVASGVSFCAAIQVFMSTEEISWFISQGLFGIYANHEDRKNQSVHNVFSDFDLCEQIRDLSVLSRLCLLRGILTSIPRTVLNMHQLHSSGPLWTVLYDGILPELCKHCENPVDSHFNFHALTVTQICLQQIKTSVSSDITDFSGDYKPFSRDVVNRILGIIWRNLEDPLSQTVKQVHLIFDLLLDIELCIASEDREHNNNLFLCNVANDLLRLGPRCKGRYVPLASLTKRLGAKSLLTLKSNLLSETAYAYIDDDVCCAVTTFLKSFLETLRGECWNDDGVELGYDAFRALCLPPFMRGLVSGNSKLRSNLNTYALPALIEVDAESIFTMLGFISIGPSTNETKLDVVLKNDQCIAALVSLLKVSRNLALVEGDIDLDPDELSQIQQMDSKGAAVISVKGIKVTVPFNWFALALTHSDESLRIDAAESLFLNPKTSSLPSSLELSLLKEAVPLNMRCSSTAFQMKWTSLFRKFFARVRTALDRQVKQGSWIPSLTSSVKGAGSIDTSKATVVKRAEDLFQFMKWLSSFLFNSCYPSGPYERKTIAMELILTLLDVWPICRSEGKIDLYPYNDSIILPDSTISFVGSIIDSWDRLRENSFRILLQFPTPLPGISLSTSINDVIRWAKKLVLSPRVRESDAGALTFRLIFRKYVLQLGCILVFSKESDCLECYTQSMNGDTEVTSQNPVAQYISSLIQWLCIVVEEGERDLSEACKKSFVHGVLLTLRYTFDEMDWNSEVVQSCISEMRYLVEKLLQLIMRVTSVALWVVSSDALSLPYDMDDMIDDGSFLSDIYDDQPTTTSEREEKNAKPGSNGKPAEQVVMVGCWLAMKEVSLLFGTIIRKIPLPGCSHSASSQNGLPDSIEETSISEEILDVGQLKMMGDHFLQVLLKMKHNGAIDKTRAGFTALCNRLLCSNDSRLCKMTESWMVLLMDRTIAKGQTVDDLIRRSAGIPAAFIALFLAEPEGTPKKLLPRALEWLIEFAKNSLANFQKDSNQRSGVMKELLESQSETTSVYSNGNLSKGRDEGVVPTVHVFNVLKAAFNDANLATDTSGFSAEATIVAIRAFSSPYWEVRNAACLAYTALVRRMVGFLNVQKRESARRSLTGLEFFHRYPALHPFLSSELQTTTEQLADGVSSNLESHITKAIHPSLCPILILLSRLKPSPISCGTDDSLDPFLLLPFIQRCATQSNYRVRILASRALTCLVSNERLQYVISDILDNLPRGSHKAMAHSVQHTDPAISANMGKANVLLLSKSFNSIHGLLLQLASLLDNNFRGLTDGSMKDQIIGLLLEVLSRCSWLGCTKLCSCPIVITSYLRVLDLMLDVARTGKSRHTEVIQALLLELTSQCLSNTASTQYAFHDPTRIELKQQATESFLSCVGLSKKTDETNDDDVQLQILGEPTLEMPRVDYSLHEVHKEILSCLTDPSYDVRITVLKRILWLTKSIRHGYADNILHQWAGVNLQPALMERLFVEEHPKCLYYNLKIIFSWNMEFPFNNGEDSSTLLSLWDRLVHLNSTMSHAKTREIVLCCMGMCMKLFTKQSRGGISMDCLKTSEISASFVRINEGDGLSDAMLRLNLFVTLVKNQSEPSESMNARRAAAEAIVASGLLEEASYVASSVSNMYSPSEFDEDHTKEKCMEDSVFEFVSLYTCKILDLWFVCIQLLEDEDAYLRQKLAKDIQKIIAKGSANTFCDDSTPLQVDRVIELSLDYLTSLFGLWLKYVEFLLRIVLGTGNALNSRGDLVRQIFDKEIDNHHEEKLLICQICCSNIQKLLNSKCQMEAGAETKLFLQNWREIFLKQLTSLTGGYIEKEGKNDWIGGIGNHKDVFISVYAVLLGLYALTQSGSLDQLEDHCAVYLQEFANLERSITPFLKNPLISNLYALVKLSHERFISSDKPEDQVGDSGSSFDPYFLIR

SEQ ID NO: 165107 - protein, 198 aa, Zea Mays
MPIELTKLNDSHTDQAALTKPHLMATSPLSCFSARPRPRSPGTAVWLLPAAVLLLLLNRWSHMASYPSVSPRGSGSVQVGRAELYSKMARDLDERGAAFLKGGETSQSLTLSDLFDTADDGAVVPRLKAADPPVRANVLYMDPKFAAVISKAVKDVFLPYFDQAIWFQNTSMYHFSMFHASHHLEPIVATEDEPKWRQ

SEQ ID NO: 165108 - protein, 148 aa, Zea Mays
MLGQSLLGTHQCRSMLRLSPVIFSKFHSLKEYSLSFTAPSKRFRPLYLYPLQQRPLYQVNDLFPSLFSQTFHRTRGVHSSGRSSEHTPIANRSKQIMIEQRHPKLSLTLRLTCYIQPVNSSDRSNIHMHTSHKYVACLENSGGGDARV

SEQ ID NO: 165109 - protein, 506 aa, Zea Mays
MDATAFHPSLWGDFFVKYKPPTAPKRGHMTERAELLKEEVRKTLKAAANQITNALDLIITLQRLGLDHHYENEISELLRFVYSSSDYDDKDLYVVSLRFYLLRKHGHCVSSAYVRTHGEKVLDEAITFTRRQLEASLLDPLEPALADEVHLTLQTPLFRRLRILEAINYIPIYGKEAGRNEAILELAKLNFNLAQLIYCEELKEVTLWWKQLNVETNLSFIRDRIVECHFWMTGACCEPQYSLSRVIATKMTALITVLDDMMDTYSTTEEAMLLAEAIYRWEENAAELLPRYMKDFYLYLLKTIDSCGDELGPNRSFRTFYLKEMLKVLVRGSSQEIKWRNENYVPKTISEHLEHSGPTVGAFQVACSSFVGMGDSITKESFEWLLTYPELAKSLMNISRLLNDTASTKREQNAGQHVSTVQCYMLKHGTTMDEACEKIKELTEDSWKDMMELYLTPTEHPKLIAQTIVDFARTADYMYKETDGFTFSHTIKDMIAKLFVDPISLF

SEQ ID NO: 165110 - protein, 171 aa, Zea Mays
MARATAPSSRPPSAMAAAAAAAAATAASAAASLVPQRRATARGASSRSQPHQHRRATLPVVAPARPKRASCACSPTTHPGSFRCALHRGGQGPLPASASAALVSSRLSAPRRASMANPLVRIAAVEGGDHIRRALAALVRPTPSQTRRRADAFRPTPSRLSAMSSTAAAAP

SEQ ID NO: 165111 - protein, 60 aa, Zea Mays
MFLAQPWYKGVLALFSSNILSFHFGSSLKISQQCMKTKASFSSNNLTASSSCEQHTYTPN

SEQ ID NO: 165112 - protein, 221 aa, Zea Mays
MDPEPFVRLSVGQLGLKLPGGNASKAAGRLCDCEIRLGGFPVQTAPVPLVHSPAFNLDPFTNAAVFSLEESDLKALAAPGCFRAPRSSCLEVAVYYLARFGASRCGVLACGRKRLVGVFRVELASSEWRDGKPVLLHHGWAGIGKGAARPELHLRVKLEADPRYIFQFDDEIALNPQVVQLHGSIRQPVFSCKFIRDRRVTLWAAGSTGRAPAARSRTWRW

SEQ ID NO: 165113 - protein, 250 aa, Zea Mays
MRESFLAREMLAMSNTRLVISIAQKYDNLGVELPDLIQGGLIGLLRGIEKFDASRGFRISTYVYWWIRQGVSRALADNSRSFRLPTYLHERLVAIRGAKYALEDQGIAPTVENIAESLNISEKKVHNATEAVHKVISLDQQAFPSLNGLPGDTLHSYIEDQNVANDPWHGFEERYLKEEVNSLINSTLNERERDIIRLYHGIGKQCHTWEDISRQFGLSRERVRQVGLVAMEKLKHAARREHLDALLEEY

SEQ ID NO: 165114 - protein, 146 aa, Zea Mays
MLYGTLTEFCTPESCPTMTAGPKYEYRWADGVQIKKPIEVSAPKYVEYLMDWIEGQLDDESIFPQKLGTPFPPNFKEVVKTIFKRLFRVYAHTYHSHFQKIVSLKEEAHLNTCFKHFILFTNEFGLIDKKELAPLQELIESIIVPY

SEQ ID NO: 165115 - protein, 158 aa, Zea Mays
MACAVDFFNQVNMLYGTLTEFCTPESCPTMTAGPKYEYRWADGVQIKKPIEVSAPKYVEYLMDWIEGQLDDESIFPQKLGTPFPPNFKEVVKTIFKRLFRVYAHTYHSHFQKIVSLKEEAHLNTCFKHFILFTNEFGLIDKKELAPLQELIESIIVPY

SEQ ID NO: 165116 - protein, 451 aa, Zea Mays
MLTCARKVCHSFERICEGLPATRDGPVSDVDDTAMGFRLLRLHGYDVSPSVFKHFEQDGAFYCYPGQSNKSVTAMYNLYRASQVAFPGEDELRRAEAYSREFLCRRRASGELKDKWVIPKDLPGEVAYALDVPWKASLPRIETRMYLEQYGGADDVWIGKVLYRMSLVNNELLLRTAQADFRSFQRQCKLEWHGLRKWASRRNLQAYGVTSNSTLRSYFLAAASIFEPDRATERLGWARTAVLAEAVSSCLRDGRCSRADGMLRELTSGIHLRNDDNPAASLVHALHELIGLLAFDNASYNSLLDAWKQWLAMWTAQGHEGSVALLLVRTVEICSGRRRSASATDDGQAHSLSEYSQLEQLTSSVCSKLAAAGTGDGDDLSPASVEDAADRHRVDLEMQTLARCVLRSRSSIDAVTRQTFLHVARSFYYVAHCSARTVDAHISKVLFEDVV

SEQ ID NO: 165117 - protein, 456 aa, Zea Mays
MGSGQDRAAGHREALHRYWGDEGLPATRDGPVSDVDDTAMGFRLLRLHGYDVSPSVFKHFEQDGAFYCYPGQSNKSVTAMYNLYRASQVAFPGEDELRRAEAYSREFLCRRRASGELKDKWVIPKDLPGEVAYALDVPWKASLPRIETRMYLEQYGGADDVWIGKVLYRMSLVNNELLLRTAQADFRSFQRQCKLEWHGLRKWASRRNLQAYGVTSNSTLRSYFLAAASIFEPDRATERLGWARTAVLAEAVSSCLRDGRCSRADGMLRELTSGIHLRNDDNPAASLVHALHELIGLLAFDNASYNSLLDAWKQWLAMWTAQGHEGSVALLLVRTVEICSGRRRSASATDDGQAHSLSEYSQLEQLTSSVCSKLAAAGTGDGDDLSPASVEDAADRHRVDLEMQTLARCVLRSRSSIDAVTRQTFLHVARSFYYVAHCSARTVDAHISKVLFEDVV

SEQ ID NO: 165118 - protein, 476 aa, Zea Mays
MGDRVGVKYNSINEAEEHKGGHGIPKVSMIPLIFLIFYEVSGGPFGIEDSVKAAGPLLAILGFLLFALIWSVPEALITAEMGTMFPENGGYVVWVSSALGPFWGFQQGWAKWLSGVIDNALYPVLFLDYVKSSVPALGGGLPRTLAVLILTVALTYMNYRGLTIVGWVAVFLGVFSLLPFFVMGLIAIPQIEPSRWLEMDLGSVDWGLYLNTLFWNLNYWDSISTLAGEVENPKRTLPRALSYALVLVVGGYLYPLITCTAAVPIVREHWSDGYFSDIARILGGIWLHSWIQAAAALSNMGNFLTEMSSDSYQLLGMAERGMLPDFFAKRSHYGTPLIGILFSAFGVILLSWMSFQEIIAAENYLYCFGMILEFIAFIKLRVYHPNASRPYKIPLGTIGAILMIIPPGLLIIVVMALASYKVMVVSILAMVFGFVLQPCLVYVEKKRWLRFSISADLPDLPDVQEIAEDDAVPLVV

SEQ ID NO: 165119 - protein, 357 aa, Zea Mays
MDQPGCSVMIKNCYVSCNRHIVCTLDVIIRKRRKEMGGGCPTSPCQPHSLHTTRGHEHHSCLSHGPRAAQHLHLSKWQPAAVPFLHPLPSSQSQPLTMAATLSSVAAPSLPKHIPVTRAQQQAPPSIISASTKTAFHGVSLVVDRRWAAGHRRGGGRRRLLQVNARTAAKNIEVEVEKPLGLALGQKPGGGVVITSVESGGNAARAGLKTGDQVLYTSSFFGDELWPADKLGFTKTAIQAKSDSVYFVVSRGAEVDVKRLPKRPAPPRFGRKLTDSQKERATHVCLDCGYIYFLPKPFDEQPDDYGCPQCNAPKKRFARYDAATGKAIGGALPPIAVIVSLVIGIAGVGALLVYGLQ

SEQ ID NO: 165120 - protein, 322 aa, Zea Mays
MGGGCPTSPCQPHSLHTTRGHEHHSCLSHGPRAAQHLHLSKWQPAAVPFLHPLPSSQSQPLTMAATLSSVAAPSLPKHIPVTRAQQQAPPSIISASTKTAFHGVSLVVDRRWAAGHRRGGGRRRLLQVNARTAAKNIEVEVEKPLGLALGQKPGGGVVITSVESGGNAARAGLKTGDQVLYTSSFFGDELWPADKLGFTKTAIQAKSDSVYFVVSRGAEVDVKRLPKRPAPPRFGRKLTDSQKERATHVCLDCGYIYFLPKPFDEQPDDYGCPQCNAPKKRFARYDAATGKAIGGALPPIAVIVSLVIGIAGVGALLVYGLQ

SEQ ID NO: 165121 - protein, 358 aa, Zea Mays
MDQPGCSVMIKNCYVSCNRHIVCTLDVIIRKRRKEMGGGCPTSPCQPHSLHTTRGHEHHSCLSHGPRAAQHLHLSKWQPAAVPFLHPLPSSQSQPLTMAATLSSVAAPSLPKHIPVTRAQQQAPPSIISASTQKTAFHGVSLVVDRRWAAGHRRGGGRRRLLQVNARTAAKNIEVEVEKPLGLALGQKPGGGVVITSVESGGNAARAGLKTGDQVLYTSSFFGDELWPADKLGFTKTAIQAKSDSVYFVVSRGAEVDVKRLPKRPAPPRFGRKLTDSQKERATHVCLDCGYIYFLPKPFDEQPDDYGCPQCNAPKKRFARYDAATGKAIGGALPPIAVIVSLVIGIAGVGALLVYGLQ

SEQ ID NO: 165122 - protein, 154 aa, Zea Mays
MDPAASGRFDKLQSSFKLSIQCLLTACSREDVNDAFSSFTDAEKERLHRMLTLVMKNLHANVVDEFDDFCQETQVAAALEKIDDFVEKQNLDALSSEKTTVEEIEEKVSRAKKDEIEYLTGLLKKLLNQMEELLLLHVHGFEGLPLLLFPLEIQ

SEQ ID NO: 165123 - protein, 92 aa, Zea Mays
MDPAASGRFDKLQSSFKLSIQCLLTACSREDVNDAFSSFTDAEKERLHRMLTLDEFDDFCQETQVAAALEKIDDFVEKQNLDALSSENSFDC

SEQ ID NO: 165124 - protein, 102 aa, Zea Mays
MDPAASGRFDKLQSSFKLSIQCLLTACSREDVNDAFSSFTDAEKERLHRMLTLVMKNLHANVVDEFDDFCQETQVAAALEKIDDFVEKQNLDALSSENSFDC

SEQ ID NO: 165125 - protein, 417 aa, Zea Mays
MVMEWIVRERPYKLSELDYSYLLEFTAKVHGISEAESLFLRVPQECRKELLYNNLVMAALDLNHIKHSYAYMRKMRELSLPISPYVYNRLIILHSSPGRRKTISKILSQMKADRVVPHTSTYNILLKIQANEHNIDGLARVFNGMKRAKIEPNEITYGILAIAHAVARLYTVCHTYVEAIENSMTGTNWSTLEILLILYGYLGKEKELKRTWEIMQDLPHIRSKSFTLAIEAFGKVGSIDQAEKIWIHIKSTKKLSLTEQFNSMLSVYCRHGVVDKASSVFKEMRANGCQPNAITYRHLALGCLKSGLVKEALNTIDMGKKEVVTKKVRSSTPWLETTHLLLENFAEIGDLENAKRLYSELNESKYSLNSFVYNTLLKAYVKAKVYEPDLSRTMILRGAMPDAETYSLLRLIEQFKI

SEQ ID NO: 165126 - protein, 418 aa, Zea Mays
MVVMEWIVRERPYKLSELDYSYLLEFTAKVHGISEAESLFLRVPQECRKELLYNNLVMAALDLNHIKHSYAYMRKMRELSLPISPYVYNRLIILHSSPGRRKTISKILSQMKADRVVPHTSTYNILLKIQANEHNIDGLARVFNGMKRAKIEPNEITYGILAIAHAVARLYTVCHTYVEAIENSMTGTNWSTLEILLILYGYLGKEKELKRTWEIMQDLPHIRSKSFTLAIEAFGKVGSIDQAEKIWIHIKSTKKLSLTEQFNSMLSVYCRHGVVDKASSVFKEMRANGCQPNAITYRHLALGCLKSGLVKEALNTIDMGKKEVVTKKVRSSTPWLETTHLLLENFAEIGDLENAKRLYSELNESKYSLNSFVYNTLLKAYVKAKVYEPDLSRTMILRGAMPDAETYSLLRLIEQFKI

SEQ ID NO: 165127 - protein, 739 aa, Zea Mays
MKDAAVSVNRCLWSPDGTILGVAFSKHIVQTYTFVPNGDLRQQAEIDAHIGGVNDIAFSHPNKTLSIITCGDDKLIKVWDAQTGQKQYTFEGHEAPVYSVCPHYKESIQFIFSTAIDGKIKAWLYDCLGSRVDYDAPGHWCTTMAYSADGTRLFSCGTSKEGDSHLVEWNETEGAIKRTYNGFRKRSLGVVQFDTTRNRFLAAGDEFLVKFWDMDNNNILTTTDCDGGLPASPRLRFNREGSLLAVTTSDNGIKILANTDGQRLLRMLESRAFEGSRGPPQQINTKPPIVALGPVSNVSSPIAVNAERPDRILPAVSTSGLAPMDASRTPDVKPRITDESEKVKTWKLADIVDNGHLRALHLTDTDTNPSKIVRLLYTNNGVALLALGSNAVHKLWKWQRSDRNPSGKSTASVAPHLWQPANGILMTNDTNDGNPEEATACIALSKNDSYVMSASGGKVSLFNMMTFKVMTTFMAPPPAATFLAFHPQDNNIIAIGMEDSTIQIYNVRIDDVKSKLKGHQKKITGLAFSQSMNVLVSSGADAQLCVWSIDGWEKKKSRYIQPPANRPGTLVGDTRVQFHNDQTHLLVVHESQLGIYDGNLDCLRLWSPRDALPAPISSAIYSCDGLLVYAGFCDGAIGVFEAESLRLRCRIAPSAYIPPSILACAGRVYPLVVAAHPMEPNQIAIGMSDGKVHVVEPLDGDPKWGSAPPQDNGAHPHPHPAISAAPSTATNQASDQPTR

SEQ ID NO: 165128 - protein, 909 aa, Zea Mays
MGAHAPFQPVVSPSPNAIAGWMTNANPSLPHAAVAQGPPGLVQAPNTAAFLKHPRTPTSAPGIDYQSADSEHLMKRMRVGQPDEVSFSGASHPANMYTQEDLPKQVSRTLNQGSNVMSLDFHPVQQTILLVGTNVGDIAVWEVGSRERIAHKTFKVWDIGSCTLPLQASLMKDAAVSVNRCLWSPDGTILGVAFSKHIVQTYTFVPNGDLRQQAEIDAHIGGVNDIAFSHPNKTLSIITCGDDKLIKVWDAQTGQKQYTFEGHEAPVYSVCPHYKESIQFIFSTAIDGKIKAWLYDCLGSRVDYDAPGHWCTTMAYSADGTRLFSCGTSKEGDSHLVEWNETEGAIKRTYNGFRKRSLGVVQFDTTRNRFLAAGDEFLVKFWDMDNNNILTTTDCDGGLPASPRLRFNREGSLLAVTTSDNGIKILANTDGQRLLRMLESRAFEGSRGPPQQINTKPPIVALGPVSNVSSPIAVNAERPDRILPAVSTSGLAPMDASRTPDVKPRITDESEKVKTWKLADIVDNGHLRALHLTDTDTNPSKIVRLLYTNNGVALLALGSNAVHKLWKWQRSDRNPSGKSTASVAPHLWQPANGILMTNDTNDGNPEEATACIALSKNDSYVMSASGGKVSLFNMMTFKVMTTFMAPPPAATFLAFHPQDNNIIAIGMEDSTIQIYNVRIDDVKSKLKGHQKKITGLAFSQSMNVLVSSGADAQLCVWSIDGWEKKKSRYIQPPANRPGTLVGDTRVQFHNDQTHLLVVHESQLGIYDGNLDCLRLWSPRDALPAPISSAIYSCDGLLVYAGFCDGAIGVFEAESLRLRCRIAPSAYIPPSILACAGRVYPLVVAAHPMEPNQIAIGMSDGKVHVVEPLDGDPKWGSAPPQDNGAHPHPHPAISAAPSTATNQASDQPTR

SEQ ID NO: 165129 - protein, 947 aa, Zea Mays
MSSLSRELVFLILQFLDEEKFKETVHKLEQESGFYFNMKHFEDLVQGGEWDEVEKYLSGFTKVEDNRYSMKIFFEIRKQKYLEALDRHDRAKAVEILVKDLKVFASFNEELFKEITQLLTLENFRQNEQLSKYGDTKSARNIMLLELKKLIEANPLFRDKLNFPPFKASRLRTLINQSLNWQHQLCKNPRPNPDIKTLFTDHSCAAPTNGARAPPPANGPLGSIPKSAGFPPMGAHAPFQPVVSPSPNAIAGWMTNANPSLPHAAVAQGPPGLVQAPNTAAFLKHPRTPTSAPGIDYQSADSEHLMKRMRVGQPDEVSFSGASHPANMYTQEDLPKQVSRTLNQGSNVMSLDFHPVQQTILLVGTNVGDIAVWEVGSRERIAHKTFKVWDIGSCTLPLQASLMKDAAVSVNRCLWSPDGTILGVAFSKHIVQTYTFVPNGDLRQQAEIDAHIGGVNDIAFSHPNKTLSIITCGDDKLIKVWDAQTGQKQYTFEGHEAPVYSVCPHYKESIQFIFSTAIDGKIKAWLYDCLGSRVDYDAPGHWCTTMAYSADGTRLFSCGTSKEGDSHLVEWNETEGAIKRTYNGFRKRSLGVVQFDTTRNRFLAAGDEFLVKFWDMDNNNILTTTDCDGGLPASPRLRFNREGSLLAVTTSDNGIKILANTDGQRLLRMLESRAFEGSRGPPQQINTKPPIVALGPVSNVSSPIAVNAERPDRILPAVSTSGLAPMDASRTPDVKPRITDESEKVKTWKLADIVDNGHLRALHLTDTDTNPSKIVRLLYTNNGVALLALGSNAVHKLWKWQRSDRNPSGKSTASVAPHLWQPANGILMTNDTNDGNPEEATACIALSKNDSYVMSASGGKVSLFNMMTFKVMTTFMAPPPAATFLAFHPQDNNIIAIGMEDSTIQIYNVRIDDVKSKLKGHQKKITGLAFSQSMNVLVSSGADAQSL

SEQ ID NO: 165130 - protein, 357 aa, Zea Mays
MASTGAGAVLAVVVLACALGARADGSDHKYKEGDHVPLYANKVGPFHNPSETYRYYDLPFCAPEHPKDKKEALGEVLNGDRLVDAPYELNFKEDRNSKVLCKKVLSKEQVAKLRDAVAKDYYFQMYYDDLPLWGFLGKLDKDKEQGDVKYLLFKHIHFDIMYNDNRVIEINVQTDPNVAVDITEDKEVPIEFSYSATWKKTDIPFEKRMDKYSKSSSMPQHLEIHWFSIINSCVTVLLLTGFLATILMRVLKNDFIKYSHEDESLEDQEETGWKYIHGDVFRFPKQKSVFAAIIGSGTQLLALAIFIFLLALVGVFYPYNRGALFTALVVIYALTSGIAGYTATSFYLQLEGTNWSQ

SEQ ID NO: 165131 - protein, 291 aa, Zea Mays
MAQIKQLKRRKKTDQYDAGVVSLAVVLGGLNPCALPLGAVGHPGCPGLAVLEPPGGVVRVGPLLDVVVEAVDARLELVVVLAHAAAVVDEVLLGAAHVRVGLEVEVALGAARLDAVLAAEGHPDGGELGGLRHGLVGEQHPGVVGEVARVALHGVVGGQDGQHGVGRAQDRLLERVRRRHEHVQPRQQRRPSAGAPARAVEPLPQRRQVRHAVDRVQLRQLVQQPREAEPELARDRRHPQPQRVRVAVRDAPDYEQRERDQPDEDQHPAATPNPVVNKFCFHPQFTSTFFL

SEQ ID NO: 165132 - protein, 128 aa, Zea Mays
MQCRAQLHLSNAAVVSLSHSLCVLLSMTDSNDVRLQLKPAPKRRWTDGGGPCWGQHRFNAPCIRHDVLVGRSPFINLMDTSSWHLQILYVTKHHALSQNASSFPLLSPLVCHEAPRSPLYYCRPFRTN

SEQ ID NO: 165133 - protein, 102 aa, Zea Mays
MTDSNDVRLQLKPAPKRRWTDGGGPCWGQHRFNAPCIRHDVLVGRSPFINLMDTSSWHLQILYVTKHHALSQNASSFPLLSPLVCHEAPRSPLYYCRPFRTN

SEQ ID NO: 165134 - protein, 61 aa, Zea Mays
MLPQLGYKCPIRSDQLTSCTVSMYCIISCRTGKHSGLDLRISIFMCVYAACQLIYIISVCV

SEQ ID NO: 165135 - protein, 133 aa, Zea Mays
MDVKDLTLAHVKSHLQMYRTVKNTERPAASSDLADGFENGSAGEICDDNSLDLHGAGRPESGAARHGREDWTGFPSESNTGRMSMHSRSLKDQTMQSKSLEILSDMNSSCVSETTSCASELNLEFTLGPRIRH

SEQ ID NO: 165136 - protein, 50 aa, Zea Mays
MHLPVCRKLYQTLFCCHRTQPSIMSTNPKRKGRWNYILINDTPSISNHKL

SEQ ID NO: 165137 - protein, 278 aa, Zea Mays
MASLLRRSAVPARQLLLLPRHFAAAGSAPALSRSFSRFNPRDDSSMFDPPEPPVNWGVSIVPEKKAYVVERFGKYLKTLGSGFHLLIPAVDRIAYVHSLKEETIPIPHQNAITKDNVTIQIDSVIYVKHIEWRDCMSVNLNLPSAINEAATDWGLKCIRYEIRDINPPAGIRQAMEMQAEAERKKRAQILESEGMKQAQILESEGKKTAQILESEGAMLDLANRAKGMRHSTHLITMFSFSFVKPFNMHYSATVLPYLMMAIGAVKLNIVNICNFFFF

SEQ ID NO: 165138 - protein, 344 aa, Zea Mays
MASLLRRSAVPARQLLLLPRHFAAAGSAPALSRSFSRFNPRDDSSMFDPPEPPVNWGVSIVPEKKAYVVERFGKYLKTLGSGFHLLIPAVDRIAYVHSLKEETIPIPHQNAITKDNVTIQIDSVIYVKSAINEAATDWGLKCIRYEIRDINPPAGIRQAMEMQAEAERKKRAQILESEGMKQAQILESEGKKTAQILESEGAMLDLANRAKGAAEAILAKSEATARGMRLVSDAMTTEGSAKAASLKLAEQYIEAFSNLAQKTNTMLLPGDSASPASFVAQAMKTYEQIHSHSQALKSHPQIEELKESGETSPAPSSEASKTPPLIEEADSNQTFSLQRPKNKQ

SEQ ID NO: 165139 - protein, 668 aa, Zea Mays
MPARGEGRPAKERVDQVVGVGTRGDNTWILAWVPSDDGHQGELEKEAINNGTSPGQAHDIDIPPPRPKRKANSPYPRKSGLSSETPTKELPSDKSTKPNMPLSNENVLMAGDASLQKFQRKELSGKESCSEVLNLFRDAPSPSFSSVNKSSSNHGAPIEASKTKIRDMTIMENSSLNPNMQEDVKEINDQEMERLNGTQISSKCEHSHEGYLDISMQQMKLKPESVETTYVDKQTARASHSLAERTGTTSIPVTATEETHSVLTSDQVGINGSMNPSIHPMFPADPKFDSSATPQPFPHNYAAFAPMMQCNCNQDTHRSLVNMSSTFSSMLVSTLLSNPAIHAAARLAASYWPAAEGNTPIDPNQENLADGVQGRSIGSPPSMASIVAATVAAASAWWATQGLLPFFAPPMAFSFVPAPSAAFPTVDVPRPSEKDRDCPAENAQKECQEARKQGQFEGFRVAASSEYDGSGKGEVSVHTELKISPVQNADATSAAGADTTDAFMNKKKQDRSSCGSNTPSSSDVDVDNVPEKEGNGNEKAKQASCSNSSAGDTNHRRFRSSGSTSDSWKEVSEEGRLAFHALFSREKLPQSFSPPQAEGSKEVGKEEEDEVTTVAVDLNKSTTSIDHDLDTIGFKPYKRCSVEAKENRVPASDEVGTKRIRLDSEAST

SEQ ID NO: 165140 - protein, 522 aa, Zea Mays
MTIMENSSLNPNMQEDVKEINDQEMERLNGTQISSKCEHSHEGYLDISMQQMKLKPESVETTYVDKQTARASHSLAERTGTTSIPVTATEETHSVLTSDQVGINGSMNPSIHPMFPADPKFDSSATPQPFPHNYAAFAPMMQCNCNQDTHRSLVNMSSTFSSMLVSTLLSNPAIHAAARLAASYWPAAEGNTPIDPNQENLADGVQGRSIGSPPSMASIVAATVAAASAWWATQGLLPFFAPPMAFSFVPAPSAAFPTVDVPRPSEKDRDCPAENAQKECQEARKQGQFEGFRVAASSEYDGSGKGEVSVHTELKISPVQNADATSAAGADTTDAFMNKKKQDRSSCGSNTPSSSDVDVDNVPEKEGNGNEKAKQASCSNSSAGDTNHRRFRSSGSTSDSWKEVSEEGRLAFHALFSREKLPQSFSPPQAEGSKEVGKEEEDEVTTVAVDLNKSTTSIDHDLDTIGEPRASFPNELSPLKLKLRRTGFKPYKRCSVEAKENRVPASDEVGTKRIRLDSEAST

SEQ ID NO: 165141 - protein, 590 aa, Zea Mays
MPLSNENVLMAGDASLQKFQRKELSGKESCSEVLNLFRDAPSPSFSSVNKSSSNHGAPIEASKTKIRDMTIMENSSLNPNMQEDVKEINDQEMERLNGTQISSKCEHSHEGYLDISMQQMKLKPESVETTYVDKQTARASHSLAERTGTTSIPVTATEETHSVLTSDQVGINGSMNPSIHPMFPADPKFDSSATPQPFPHNYAAFAPMMQCNCNQDTHRSLVNMSSTFSSMLVSTLLSNPAIHAAARLAASYWPAAEGNTPIDPNQENLADGVQGRSIGSPPSMASIVAATVAAASAWWATQGLLPFFAPPMAFSFVPAPSAAFPTVDVPRPSEKDRDCPAENAQKECQEARKQGQFEGFRVAASSEYDGSGKGEVSVHTELKISPVQNADATSAAGADTTDAFMNKKKQDRSSCGSNTPSSSDVDVDNVPEKEGNGNEKAKQASCSNSSAGDTNHRRFRSSGSTSDSWKEVSEEGRLAFHALFSREKLPQSFSPPQAEGSKEVGKEEEDEVTTVAVDLNKSTTSIDHDLDTIGEPRASFPNELSPLKLKLRRTGFKPYKRCSVEAKENRVPASDEVGTKRIRLDSEAST

SEQ ID NO: 165142 - protein, 426 aa, Zea Mays
MEVNSSGEETVIKVRKPYTITKQRERWTEAEHKRFLEALKLYGRAWQRIEEHVGTKTAVQIRSHAQKFFTKLEKEAINNGTSPGQAHDIDIPPPRPKRKANSPYPRKSGLSSETPTKELPSDKSTKPNMPLSNENVLMAGDASLQKFQRKELSGKESCSEVLNLFRDAPSPSFSSVNKSSSNHGAPIEASKTKIRDMTIMENSSLNPNMQEDVKEINDQEMERLNGTQISSKCEHSHEGYLDISMQQMKLKPESVETTYVDKQTARASHSLAERTGTTSIPVTATEETHSVLTSDQVGINGSMNPSIHPMFPADPKFDSSATPQPFPHNYAAFAPMMQCNCNQDTHRSLVNMSSTFSSMLVSTLLSNPAIHAAARLAASYWPAAEGNTPIDPNQENLADGVQGRSIGSPPSMASIVAATVAAASAC

SEQ ID NO: 165143 - protein, 71 aa, Zea Mays
MEVNSSGEETVIKVRKPYTITKQRERWTEAEHKRFLEALKLYGRAWQRIEEHVGTKTAVQIRSHAQKFFTK

SEQ ID NO: 165144 - protein, 86 aa, Zea Mays
MEVNSSGEETVIKVRKPYTITKQRERWTEAEHKRFLEALKLYGRAWQRIEEHVGTKTAVQIRSHAQKFFTKMIPNVSGMGRWGAKS

SEQ ID NO: 165145 - protein, 91 aa, Zea Mays
MGLYVFCISPLYKGFSAYLQVLFITWYQRQKLGLDFFSKPNLFFPTHLPARCGSVHISDSSWRLSNRVASYRPSRSSPRHPPHRTLIYCML

SEQ ID NO: 165146 - protein, 108 aa, Zea Mays
MHACPIRPHEFRQHNVAIAFYIGGISTFSLGILLVVSYTYEFEVSVPVENSITAQFSMMQFTHNSLSQFILHILLYGGQLLIKRRATHRRCCHTLTIGQLIMVTHLLT

SEQ ID NO: 165147 - protein, 51 aa, Zea Mays
MSTIPTGPPLREPVRATREYGTPPSSHVPGGYTPLPPSLHSQCAIVFSHME

SEQ ID NO: 165148 - protein, 346 aa, Zea Mays
MIVPEDLGIPLDLLDMSVYNPRDVQSRMAPEDEELLRDDEVLTPIKQEGTRKRERPTDKGVSWLVKTQYISPLSTDATKMSLTEKQAKERRETREGRNAFLDNLNDREKQIKAIEESFRAAKSRPVHQTKRGMQAEWVMPLLPDFDRYEEPFVMVNFDGDPTADSEQYNKLERPVRDECESRAVMKSFSVSGSDPSKQEKFLAYMAPAPHELARDLDDENDDIQYSWLREYHWEVRGDDKDDPTTYLVTFDKEEGAKYLPLPTKLVLQKKKAKEGRSGDEIEHFPVPSLITVNKTGHVGTMERGESSGMHVNSKPRRPHVDDDLDEHSKRSRVEDIDQYSGEEYSE

SEQ ID NO: 165149 - protein, 471 aa, Zea Mays
MASYRPYAPPPPQGSYPPQMNPYAPPQAPYNRMPAPPYHAGPPPPPPPGPPPPHQPQFNFGPGPPQQHPPPPMYYQPPPPPYGGNSNPPPPPPSAPPPPPSPPPAAPPPPPPAQAPSAQALLPSKEQQPKATLPREETEEERRARKKREFEKQRVEERKQQQMMRQTQATILQKTQQVRASQQQPQSRHHHHQPPSIFRAAAIGSRAVATGSRPASAPNAERFENRLKKPTTFLCKHKFRNELPDPSAQLKWLPLNKDKDRYTKYRITSLEKNYIPKMIVPEDLGIPLDLLDMSVYNPRDVQSRMAPEDEELLRDDEVLTPIKQEGTRKRERPTDKGVSWLVKTQYISPLSTDATKMSLTEKQAKERRETREGRNAFLDNLNDREKQIKAIEESFRAAKSRPVHQTKRGMQAEWVMPLLPDFDRYEEPFVMVNFDGDPTADSEQYNKLERPVRDECESRISVAGTCMFFTD

SEQ ID NO: 165150 - protein, 149 aa, Zea Mays
MRKMASRAGGDGKEAINEQVIANTYANMRTEMNQLYTKITELEMEVSEHSLVMGAIEPLDPSRRCYRMIGGVLVERTIREVMPAVKRNKEGLEEVIARMHEALERKKKEITEFELKYKIRIRKADSDAEDEGGKKEGTAQGVLVGPAGQ

SEQ ID NO: 165151 - protein, 224 aa, Zea Mays
MEKKAPWPIQACLRPRQFFFIAQSSAYLPSLVLSPTRRVRAPCSLSLVGTAARPPPPYARRPGLRQYLRRRRTSTHRKMASRAGGDGKEAINEQVIANTYANMRTEMNQLYTKITELEMEVSEHSLVMGAIEPLDPSRRCYRMIGGVLVERTIREVMPAVKRNKEGLEEVIARMHEALERKKKEITEFELKYKIRIRKADSDAEDEGGKKEGTAQGVLVGPAGQ

SEQ ID NO: 165152 - protein, 321 aa, Zea Mays
MFRPVPEHLAASCARCKATTSRIHPAQLLHSPVCHQPKGRTVISYGSSSREMTPCLKHISAATFFFFMPGTAARQEGDRNFPSLLLIIPFGISPPGSHRSEGPALLPFAFDSFRVGFVAELLICSVPARGGGLAGSGIEQGSSHERRRKLEIMRQSSCSMQLTNKTDHYVAFKVKTTNPKQYCVRPNIGVVLPGSTCNVTVTMQAQKASPPDMQCKDKFLVQSVVAENGVTAQDINAAMFNKEPGKVVDEFKLRVVYVPTTMPNPIPEESELGSSTPSFSQENGIDHSMTPLSVSRSSAETAKEKPSEVALYGCLIRHQRY

SEQ ID NO: 165153 - protein, 78 aa, Zea Mays
MTCTSHHPSCILKLCRDLMVRLYRYIFSIVRCPRRGTMRLHILRDMKAEVILAFADICTHEAYMKCDITMLLLWFPPA

SEQ ID NO: 165154 - protein, 76 aa, Zea Mays
MYEEYYELLLKLVRVGGLIVMDNVLWYGRVADLLVDDQKTISIRNFNKKVLEDKRVDISMVPIGDGMTICRKLVDT

SEQ ID NO: 165155 - protein, 111 aa, Zea Mays
MIDVKHALAADSLRSLLDCGEASSYDFAFVDADKRMYEEYYELLLKLVRVGGLIVMDNVLWYGRVADLLVDDQKTISIRNFNKKVLEDKRVDISMVPIGDGMTICRKLVDT

SEQ ID NO: 165156 - protein, 117 aa, Zea Mays
MSSHLAAAASALPLPLPPPAVAAPSRALRALILSRGGAAAVCSSLRRGGTPACLVRRLCSHHSAAAAATALEEARRGRKQLGMTPALYDYLLANVLTECAVLDGSRFSGSFARRPRL

SEQ ID NO: 165157 - protein, 199 aa, Zea Mays
MSSHLAAAASALPLPLPPPAVAAPSRALRALILSRGGAAAVCSSLRRGGTPACLVRRLCSHHSAAAAATALEEARRGRKQLGMTPALYDYLLANVREHPILRELREETAAMRGSQMQVSPAQAQLLSMLVQILGARRCIEVGVFTGYSSLAVALALPESGHLVACERDDRCLEVAKKYYQRAGVAHKVIDVNIHLLYLG

SEQ ID NO: 165158 - protein, 89 aa, Zea Mays
MRGSQMQVSPAQAQLLSMLVQILGARRCIEVGVFTGYSSLAVALALPESGHLVACERDDRCLEVAKKYYQRAGVAHKVIDVNIHLLYLG

SEQ ID NO: 165159 - protein, 357 aa, Zea Mays
MDCSSDESSELSETDIDDYADKSYSDLKSGKFVARLGSDRFRCPFCPGKKKQDYRYSELLQHAVGVGASNRAAKVKANHQALAKLLKEDHADAAATLPAWQAIALSNAPKPAQDQEAFVWPWTGVLANVPAGQAQEGGATLMEQLAEFKPVQITAVCGADGYAGYVVVLFTKDWIGFKNALAFQNCFKSRRLGKQDWKETKGHVEQVFGWLAKEEDYRSDDPVGRFLSANGDLKTVSELEQEMSSKTDNLIDSLARQITAKSKYLQELECKCNQMNLSLQKAMEESDLLHKRYNEEMRNMQSAVREHTRRVFQETEELRNQLVEKESNIQRRSRELNELVAQTDMERRKLEEERKKN

SEQ ID NO: 165160 - protein, 628 aa, Zea Mays
MEEQIGEAHIKQSSTNQGPNKKLERLESKQPRNENVKETPPFFRLWYGLRKEDIMKILVGSSAAAISGISKPLFGYFIMTIGVAYYDPNAKKEVTKYSLIFFTAGMVTMVSNILQHYIYGIIGERAMKNIREALFSAVLRNELGWFEKPNNGVGFLTSRIVSDTSTVKTIISDRMAVIVQCIASILIATIVSMKVNWRMALVSWAVMPCHFIGGLIQAKSAKGFYGDSAIAHRELVSLASEAASNIRTVASFVYEDEIIKKAELSLQEPLRITKIESMKYGVIQGISLCLWNIAHAVALWYTTVLVQRKQAKFENSIRSYQIFSLTVPSITELWTLIPMVMSAISILNPVFDTLDRETQIVPDKPENPGKGWLVGRTEFQDVSFNYPSRPEVTILDGFNLIIEPGQRVALVGPSGAGKSSVLALILRFYDPARGRLLIDNKNIKDYNLRWLRKQIGLVQQEPILFNTSIRDNISYGSESPSETEIIQAAMEANIHEFISGLPEGYGTVVGDKGSQLSGGQKQRIAIARTILKRPAILLLDEATSALDGESERVVMSSLGTKVWKDKDEQASTITSITVAHRLSTVINADTIVVMEKGKVVELGNHQELISAEDGVYSRLFHLQSNMKE

SEQ ID NO: 165161 - protein, 706 aa, Zea Mays
MLKDPPILLLDEATSALDSESEKLVQDALERAMRGRTVILIAHRMSTIVNADTIVVVENGRVAHTGTHHELLDKSTFYSNEQIGEAHIKQSSTNQGPNKKLERLESKQPRNENVKETPPFFRLWYGLRKEDIMKILVGSSAAAISGISKPLFGYFIMTIGVAYYDPNAKKEVTKYSLIFFTAGMVTMVSNILQHYIYGIIGERAMKNIREALFSAVLRNELGWFEKPNNGVGFLTSRIVSDTSTVKTIISDRMAVIVQCIASILIATIVSMKVNWRMALVSWAVMPCHFIGGLIQAKSAKGFYGDSAIAHRELVSLASEAASNIRTVASFVYEDEIIKKAELSLQEPLRITKIESMKYGVIQGISLCLWNIAHAVALWYTTVLVQRKQAKFENSIRSYQIFSLTVPSITELWTLIPMVMSAISILNPVFDTLDRETQIVPDKPENPGKGWLVGRTEFQDVSFNYPSRPEVTILDGFNLIIEPGQRVALVGPSGAGKSSVLALILRFYDPARGRLLIDNKNIKDYNLRWLRKQIGLVQQEPILFNTSIRDNISYGSESPSETEIIQAAMEANIHEFISGLPEGYGTVVGDKGSQLSGGQKQRIAIARTILKRPAILLLDEATSALDGESERVVMSSLGTKVWKDKDEQASTITSITVAHRLSTVINADTIVVMEKGKVVELGNHQELISAEDGVYSRLFHLQSNMKE

SEQ ID NO: 165162 - protein, 62 aa, Zea Mays
MVKDSSIKYADIRLKICVLNKHISSSVIHITNHIHRTITVVLLAPNHNKIHHLKFHKHLNII

SEQ ID NO: 165163 - protein, 354 aa, Zea Mays
MGKEGRLIIRLHSEAYRKLARSYHPDVNKDPGAEQKFKDISNAYEVLSDDEKRSIYDKYGEAGLKGAGMGTGDYSNPFDLFESLFEGFGGMGGMGGGRAARNRPMQGDDESYNLVLNFKEAVFGVEKEIEITRLEGCNTCDGSGAKPGTKATTCKTCGGQGQVVSSTRTPLGIFQQVSTCNTCGGTGEFSTPCNTCGGDGRVRRTKRISLKVPAGVDSGSRLRVRSEGNAGRRGGPPGDLYVFIDVLSDPVLKRDGTNILYTCKVSYIDAILGTTVKVPTVDGTVDLKIPSGTQPGTTLVMSKKGVPLLGKSNARGDQLVRVQVEIPKRLSSDEKKLIEELANLNKAQTANSRR

SEQ ID NO: 165164 - protein, 264 aa, Zea Mays
MGGMGGGRAARNRPMQGDDESYNLVLNFKEAVFGVEKEIEITRLEGCNTCDGSGAKPGTKATTCKTCGGQGQVVSSTRTPLGIFQQVSTCNTCGGTGEFSTPCNTCGGDGRVRRTKRISLKVPAGVDSGSRLRVRSEGNAGRRGGPPGDLYVFIDVLSDPVLKRDGTNILYTCKVSYIDAILGTTVKVPTVDGTVDLKIPSGTQPGTTLVMSKKGVPLLGKSNARGDQLVRVQVEIPKRLSSDEKKLIEELANLNKAQTANSRR

SEQ ID NO: 165165 - protein, 68 aa, Zea Mays
MDSLLRVLESVLTCPDATTQIGQQFWRSWSSRRLSLQAHACINHSCIVIYYYCYYYTDPRFGLLFAAG

SEQ ID NO: 165166 - protein, 73 aa, Zea Mays
MILLTLVLFVVLSFICCDLAKVNSTDGTNDTSICFVNTLRSLLSYFSFKVRCRLKVHIMNRALPSFELLHNKW

SEQ ID NO: 165167 - protein, 175 aa, Zea Mays
MAKLGPGQGLGCEAAEGSLVPSRKREYKPCGKHTEGKRPLYAIGFNFMDARYYDVFATVGGNRVTTYRCLENGSFALLQAYVDEDKDESFYTLSWARDHVDGSPLLVAAGSNGIIRVINCATEKLAKSFVGHGDSINEIRTQPLKPSLIISASKAMECPYRDLYLDICWSWRSSQ

SEQ ID NO: 165168 - protein, 1309 aa, Zea Mays
MTNETRKHRSKWDTKEGSDVVEISDDESPDKTGVHRKGGDLHTKPDTSMHHRGAGHEKEHADGSNEDMKEMQHKAPSERSQPLRMVDERDNNEWSKATGNQGTNRYADDRRRGDGWGTAPSRDYSSARAPSDPDAWRQRSRSPSPRGVWNKSRRNRSRSRSRSRSRSRNRSRSRSRSIGRGRGRSRSPYIADRGSEWRVERGRTSGGPVRPCRDFVAGRCRRGSNCRFLHEDGGHRPFDDHYPADPRERYGYQSKEFMDTRGPNDYLRSRQSRDRYDDRPWERSEPRRDYRYPEQCFNFAKGKCMRGASCIFAHSNSASHGRWRDETRESAHDRFGPDSSYGNRTEHRRVNKNPCKFFAEGCCRRGENCSYLHEEAPHSQIGVSAPDEALNYSDGHAARGNYSNWGEQNNAVHATSQILSRDDRESPISQSIGRNDSRNDYENQHSKDAGKSQYQIIHQEDFGSPGQKKHEDAISQQPQLLTPVQTTALSMHNEKVSEMDSQNAPSSIGGLSMQSGVRSANIIAEQSLGQILQRHDPIPHIPGPQTLPITTQPQNVTSSFPSNSHVQQNNFPIHQNRQEQFVVPHAAANISTPSMQSQPIASHMGHIQRGGYGIEPQALPNISTHNGHNFNVASQVPPNIPTAVHAGQTQVTIDMPRLGQDSGPQSIHNMEMQPMSPNVQSQSLQGLPLVPASSSADMAGVPVPHNAVKSEEVSRVTASLAQYFGNTAFGAGTVGLQPSQPNMNASLMATPPVVPPPVQPNPWPWAQQQTGIVQPGLPVPPQQQQQQQQAPQRQQQQQAPQSFQTLIAVGGSNGNSMLIPNAGASVGPATVAAKETAPPESKKGEKKNADAEKKNGDAERRNAEAEAQEDGDKGKKGKDSKQLKMFKVALADFVKEALKPTWKDGQMSREVHKTIVKKVVDKVTSTVENTPPTKEKIDVYMTYSKEKLNKLVQKELDGILKDYVGRESPLYFAERLTEHYKRADGTGPLIYLKREDLNHTGAHKINNAVAQALLAKRLGKQRIIAETGAGQHGVATATVCARFGLQCIIYMGAQDMERQALNVFRMRLLGAEVRAVHSGTATLKDATSEAIRDWVTNVETTHYILGSVAGPHPYPMMVREFHKVIGKETRRQAMDKWGGKPDVLVACVGGGSNAMGLFHEFVEDQDVRLVGVEAAGHGVDTDKHAATLTKGQVGVLHGSMSYLLQDDDGQVIEPHSISAGLDYPGVGPEHSFLKDIGRAEYDSVTDQEALDAFKRVSRLEGIIPALETSHALAYLEKLCPTLADGVRVVVNCSGRGDKDVHTASKYLDV

SEQ ID NO: 165169 - protein, 874 aa, Zea Mays
MTNETRKHRSKWDTKEGSDVVEISDDESPDKTGVHRKGGDLHTKPDTSMHHRGAGHEKEHADGSNEDMKEMQHKAPSERSQPLRMVDERDNNEWSKATGNQGTNRYADDRRRGDGWGTAPSRDYSSARAPSDPDAWRQRSRSPSPRGVWNKSRRNRSRSRSRSRSRSRNRSRSRSRSIGRGRGRSRSPYIADRGSEWRVERGRTSGGPVRPCRDFVAGRCRRGSNCRFLHEDGGWRDETRESAHDRFGPDSSYGNRTEHRRVNKNPCKFFAEGCCRRGENCSYLHEEAPHSQIGVSAPDEALNYSDGHAARGNYSNWGEQNNAVHATSQILSRDDRESPISQSIGRNDSRNDYENQHSKDAGKSQYQIIHQEDFGSPGQKKHEDAISQQPQLLTPVQTTALSMHNEKVSEMDSQNAPSSIGGLSMQSGVRSANIIAEQSLGQILQRHDPIPHIPGPQTLPITTQPQNVTSSFPSNSHVQQNNFPIHQNRQEQFVVPHAAANISTPSMQSQPIASHMGHIQRGGYGIEPQALPNISTHNGHNFNVASQVPPNIPTAVHAGQTQVTIDMPRLGQDSGPQSIHNMEMQPMSPNVQSQSLQGLPLVPASSSADMAGVPVPHNAVKSEEVSRVTASLAQYFGNTAFGAGTVGLQPSQPNMNASLMATPPVVPPPVQPNPWPWAQQQTGIVQPGLPVPPQQQQQQQQAPQRQQQQQAPQSFQTLIAVGGSNGNSMLIPNAGASVGPATVAAKETAPPESKKGEKKNADAEKKNGDAERRNAEAEAQEDGDKGKKGKDSKQLKMFKVALADFVKEALKPTWKDGQMSREVHKTIVKKVVDKVTSTVENTPPTKEKIDVYMTYSKEKLNKLVQAYVGKYAKA

SEQ ID NO: 165170 - protein, 226 aa, Zea Mays
MFIKKKFEPKKVSFNLDRTSSKHEADGRVIIAEFESFLLLNTYSPNNGWKEEENAFQRRRKWDKRMLEFVQHVDKPLIWCGDLNVSHEEIDVSHPDFFSSAKLNGYTPPNKEDCGQPGFTPAERRRFGNILFQGKLVDAYRHLHKEKDIDGGFSWSGHPIGKYRGKRMRIDYFLVSEQLKDRIVSCEMHGRGIELDGFYGSDHCPVSLELSEAVAEEAPGQPKPSI

SEQ ID NO: 165171 - protein, 344 aa, Zea Mays
MKRFFQPVPKDGSPSKKRLAGAAEPGDGPTSAGAATGAGGDVEGRPTEEPFKFLTWNANSLLLRMKSDWPAFSQLVARLDPDVICVQEVRMPAAGSKGAPKNPSELKDDTSLSRDEKQVVLRALSASPFKDYRVWWSLSDSKYAGTAMFIKKKFEPKKVSFNLDRTSSKHEADGRVIIAEFESFLLLNTYSPNNGWKEEENAFQRRRKWDKRMLEFVQHVDKPLIWCGDLNVSHEEIDVSHPDFFSSAKLNGYTPPNKEDCGQPGFTPAERRRFGNILFQYRGKRMRIDYFLVSEQLKDRIVSCEMHGRGIELDGFYGSDHCPVSLELSEAVAEEAPGQPKPSI

SEQ ID NO: 165172 - protein, 393 aa, Zea Mays
MKRFFQPVPKDGSPSKKRLAGAAEPGDGPTSAGAATGAGGDVEGRPTEEPFKFLTWNANSLLLRMKSDWPAFSQLVARLDPDVICVQEVRMPAAGSKGAPKNPSELKDDTSLSRDEKQVVLRALSASPFKDYRVWWSLSDSKYAGTAMFIKKKFEPKKVSFNLDRTSSKHEADGRVIIAEFESFLLLNTYSPNNGWKEEENAFQRRRKWDKRMLEFVQHVDKPLIWCGDLNVSMIFFRDILFVICFTLFEHSSHEEIDVSHPDFFSSAKLNGYTPPNKEDCGQPGFTPAERRRFGNILFQGKLVDAYRHLHKEKDIDGGFSWSGHPIGKYRGKRMRIDYFLVSEQLKDRIVSCEMHGRGIELDGFYGSDHCPVSLELSEAVAEEAPGQPKPSI

SEQ ID NO: 165173 - protein, 284 aa, Zea Mays
MKRFFQPVPKDGSPSKKRLAGAAEPGDGPTSAGAATGAGGDVEGRPTEEPFKFLTWNANSLLLRMKSDWPAFSQLVARLDPDVICVQEVRMPAAGSKGAPKNPSELKDDTSLSRDEKQVVLRALSASPFKDYRVWWSLSDSKYAGTAMFIKKKFEPKKVSFNLDRTSSKHEADGRVIIAEFESFLLLNTYSPNNGWKEEENAFQRRRKWDKRMLEFVQHVDKPLIWCGDLNVSHEEIDVSHPDFFSSAKLNGYTPPNKEDCGQPGFTPAERRRFGNILFQMALL

SEQ ID NO: 165174 - protein, 267 aa, Zea Mays
MKRFFQPVPKDGSPSKKRLAGAAEPGDGPTSAGAATGAGGDVEGRPTEEPFKFLTWNANSLLLRMKSDWPAFSQLVARLDPDVICVQEVRMPAAGSKGAPKNPSELKDDTSLSRDEKQVVLRALSASPFKDYRVWWSLSDSKYAGTAMFIKKKFEPKKVSFNLDRTSSKHEADGRVIIAEFESFLLLNTYSPNNGWKEEENAFQRRRKWDKRMLEFVQHVDKPLIWCGDLNVSHEEIDVSHPDFFSSAKLNGYTPPNKEWARLCMTN

SEQ ID NO: 165175 - protein, 61 aa, Zea Mays
MQTTAKSSPLLPSHVETLAPHARSWVSGAGGNNDWGARGRESGGIERLGKAGLVGLARAQR

SEQ ID NO: 165176 - protein, 160 aa, Zea Mays
MAEKEETKGRCPACHTRYDKDMIVKMAATCDRTVADKNAEKKQKAQRVKPKAAPTATTTSTVESKKHLATIRVIQRNLVYIIGLPAHLCNESVLERREYFGHYGKVLKVLVSRPTGPPSQQASANSSISVRYTWSVRIICASTRTVTTILHQVDVHTSQI

SEQ ID NO: 165177 - protein, 186 aa, Zea Mays
MGTCLICCYCSDMAEKEETKGRCPACHTRYDKDMIVKMAATCDRTVADKNAEKKQKAQRVKPKAAPTATTTSTVESKKHLATIRVIQRNLVYIIGLPAHLCNESVLERREYFGHYGKVLKVLVSRPTGPPSQQASANSSISVVKACLGYYFPRPDSCGSRQHWEIYVERQNYMCIYKNSYNNSPSG

SEQ ID NO: 165178 - protein, 169 aa, Zea Mays
MAEKEETKGRCPACHTRYDKDMIVKMAATCDRTVADKNAEKKQKAQRVKPKAAPTATTTSTVESKKHLATIRVIQRNLVYIIGLPAHLCNESVLERREYFGHYGKVLKVLVSRPTGPPSQQASANSSISVYVSLNYTVYMHDLFILHMNLDLYFQYWSISLMEYQITIY

SEQ ID NO: 165179 - protein, 173 aa, Zea Mays
MGTCLICCYCSDMAEKEETKGRCPACHTRYDKDMIVKMAATCDRTVADKNAEKKQKAQRVKPKAAPTATTTSTVESKKHLATIRVIQRNLVYIIGLPAHLCNESVLERREYFGHYGKVLKVLVSRPTGPPSQQASANSSISVVKACLGYYFPRPDSCGSRQHWVCSFTDLLRV

SEQ ID NO: 165180 - protein, 174 aa, Zea Mays
MNHGAKVLMVRLQDMAEKEETKGRCPACHTRYDKDMIVKMAATCDRTVADKNAEKKQKAQRVKPKAAPTATTTSTVESKKHLATIRVIQRNLVYIIGLPAHLCNESVLERREYFGHYGKVLKVLVSRPTGPPSQQASANSSISVRYTWSVRIICASTRTVTTILHQVDVHTSQI

SEQ ID NO: 165181 - protein, 171 aa, Zea Mays
MDEAVPALATGQASTDAVTEQPVNVYIWDMDETLILLKSLLDGSYAGAFDGLKDHEKSTEIGKRWENLILELCDEHFFYEEIENYNEPYLNALNEYDDGRDLTSYDFEADCFSSPYDDANKKKLAYRHRAIGEKYAKGLEKVLDGHMVKVCNDQYSLTDKYTDGWLSSEKY

SEQ ID NO: 165182 - protein, 145 aa, Zea Mays
MDEAVPALATGQASTDAVTEQPVNVYIWDMDETLILLKSLLDGSYAGAFDGLKDHEKSTEIGKRWENLILELCDEHFFYEEIENYNEPYLNALNEYDDGRDLTSYDFEADCFSSPYDDANKKKLAYRHRAIGEKYAKKGRPGIVV

SEQ ID NO: 165183 - protein, 236 aa, Zea Mays
MRCNQRQMSYKLKKAYFNGVAADKVRTTSPLSTMIDEQWMQLVNMWSTPKHKDKCVNNKVIRGKVRFQQKTGSRSYIAHMHAKQAKYGDAPPSAIDLFKECHCSRKTGFVEPVKEAIDTMEALVVEPGVEGKESKTPTEAVAQVLSSSKILHNIGLVPATKKSCNGDDPTRVAELEAKLESEKQNSLAVRAQLDALKKKVEESEEARAKELEKINDLQKGADETNAVLRRLFSLNK

SEQ ID NO: 165184 - protein, 279 aa, Zea Mays
MCDEGNRHPEVPMQAAMLASEGGIVIRQHMPILTHWKEYKNDKSYLEDFVGRIGGQFAIDTKNKDVKYACADLMRCNQRQMSYKLKKAYFNGVAADKVRTTSPLSTMIDEQWMQLVNMWSTPKHKKQAKYGDAPPSAIDLFKECHCSRKTGFVEPVKEAIDTMEALVVEPGVEGKESKTPTEAVAQVLSSSKILHNIGLVPATKKSCNGDDPTRVAELEAKLESEKQNSLAVRAQLDALKKKVEESEEARAKELEKINDLQKGADETNAVLRRLFSLNK

SEQ ID NO: 165185 - protein, 157 aa, Zea Mays
MHAKQAKYGDAPPSAIDLFKECHCSRKTGFVEPVKEAIDTMEALVVEPGVEGKESKTPTEAVAQVLSSSKILHNIGLVPATKKSCNGDDPTRVAELEAKLESEKQNSLAVRAQLDALKKKVEESEEARAKELEKINDLQKGADETNAVLRRLFSLNK

SEQ ID NO: 165186 - protein, 126 aa, Zea Mays
MPPGRMDRERTRKDLGEVPITEYEKERALNVMRNNKMLSSLGITGLTSVIRSSSTRKNSIAREDFDPLYEPDHSENNDHHVADQDEPFYIERRNTNMSIGFGGTKGSKRVVAPNVEDQVGRVTILS

SEQ ID NO: 165187 - protein, 627 aa, Zea Mays
MEANPKNTFTIKVEDGKPGKDGRLAVGPVFRSVLAKDGFPQLEPDMKTSWDVFRVAAVKYADNRMLGWRPFKDGVPGPYLWKSYKEIYDEVLQAGSALQKLGVQPGSRVGIYGANCPQWIVAMQACNGYSLVCVPLYDTLGAGAVDYIIDHAEIDVVFIQDKKIKEILSPNCKSAKRLKALVAFTSATTEQNKEADQIGIKMYAWDDFLKVGKDNPRQPCPPQASDICTVMYTSGTSGQPKGVMLTHESHAMYVKGVDLFMDQFDDKMTTDDVFLSFLPLAHILDRMIEEYFFHKGASIGYYHGDLNALRDDIVELKPTLLVGVPRVYERIYEGILKAIAELRPLRRVIFNALYNRKLASMKAGYSHKTASPFADMLAFRKVKARLGGRLRLLISGGAPLSNEIEEFMRVTTCAYFIQGYGLTETLGPSTVCYIDDMALVGSAGVPATYTEIRLEEVPEMGYNPLGVPSRGEICIRGKSLFAGYYKSPELTNEAIVDGWFHTGDIGEMTPDGILKVIDRKKNIFKLSQGEYVAVEYLEKVYGFPPLVEDIWVYGDSFRSSLVAVVNPHQENTMKWAESNGYKGSFDEICKLEGLKEYILKELAAVAQKNKVRSSIYSDRPKKKTSSP

SEQ ID NO: 165188 - protein, 440 aa, Zea Mays
MYTSGTSGQPKGVMLTHESHAMYVKGVDLFMDQFDDKMTTDDVFLSFLPLAHILDRMIEEYFFHKGASIGYYHGDLNALRDDIVELKPTLLVGVPRVYERIYEGILKAIAELRPLRRVIFNALYNRKLASMKAGYSHKTASPFADMLAFRKVKARLGGRLRLLISGGAPLSNEIEEFMRVTTCAYFIQGYGLTETLGPSTVCYIDDMALVGSAGVPATYTEIRLEEVPEMGYNPLGVPSRGEICIRGKSLFAGYYKSPELTNEAIVDGWFHTGDIGEMTPDGILKVIDRKKNIFKLSQGEYVAVEYLEKVYGFPPLVEDIWVYGDSFRSSLVAVVNPHQENTMKWAESNGYKGSFDEICKLEGLKEYILKELAAVAQKNKLRGFEYIKGVVLDPVPFDIERDLVTATMKKKRKNMLNYYQSEIDTIYKKLEAQKSAARAK

SEQ ID NO: 165189 - protein, 662 aa, Zea Mays
MEANPKNTFTIKVEDGKPGKDGRLAVGPVFRSVLAKDGFPQLEPDMKTSWDVFRVAAVKYADNRMLGWRPFKDGVPGPYLWKSYKEIYDEVLQAGSALQKLGVQPGSRVGIYGANCPQWIVAMQACNGYSLVCVPLYDTLGAGAVDYIIDHAEIDVVFIQDKKIKEILSPNCKSAKRLKALVAFTSATTEQNKEADQIGIKMYAWDDFLKVGKDNPRQPCPPQASDICTVMYTSGTSGQPKGVMLTHESHAMYVKGVDLFMDQFDDKMTTDDVFLSFLPLAHILDRMIEEYFFHKGASIGYYHGDLNALRDDIVELKPTLLVGVPRVYERIYEGILKAIAELRPLRRVIFNALYNRKLASMKAGYSHKTASPFADMLAFRKVKARLGGRLRLLISGGAPLSNEIEEFMRVTTCAYFIQGYGLTETLGPSTVCYIDDMALVGSAGVPATYTEIRLEEVPEMGYNPLGVPSRGEICIRGKSLFAGYYKSPELTNEAIVDGWFHTDGILKVIDRKKNIFKLSQGEYVAVEYLEKVYGFPPLVEDIWVYGDSFRSSLVAVVNPHQENTMKWAESNGYKGSFDEICKLEGLKEYILKELAAVAQKNKLRGFEYIKGVVLDPVPFDIERDLVTATMKKKRKNMLNYYQSEIDTIYKKLEAQKSAARAK

SEQ ID NO: 165190 - protein, 218 aa, Zea Mays
MASVGVARSSLGFQNGTSSSSDPDRLPNELGSMSIRDDKDVEDIVVNGNGAEPGHIIVTSIDGRNGQAKQTISYMAERVVGHGSFGTVFQAKCLETGETVAIKKVLQDKRYKNRELQTMRVLDHPNVVALKHCFFSKTEKEELYLNLVLEYVPETAHRVIKHYNKMNQRMPLIYAKLYMYQICRALAYIHNSIGVCHRDIKPQNLLVLQSSRAHIWCY

SEQ ID NO: 165191 - protein, 174 aa, Zea Mays
MITLIELVCHWLLPSTAGSVATSTPSLSSSALSQSWRRHKNRLPTASLRPVQPAATTTSSCSLSSPTRGVENLRDQLLKEGSLRASLESGLMNMRRGQVSFPSTIDTKTKADLEEVVAAEADIMNLKQKVSDLRGQLNNQVQLSSTSLCESCNNKRSINADKLVEGEQNTALSP

SEQ ID NO: 165192 - protein, 736 aa, Zea Mays
MDYQGDNLRDFFQTNGRKVLQRAENNYSLKYFTENEIRNITDGYKSVLGRGAFGEVYKGTLEDQSSVAVKRYIHGTHKEVFAKEVIVHSQINHKNVVRLLGCCTEENALMIVMEFISNGNLDSILHGNRGNGRVPFPLKKRIEIAIEVAEVLWCMHSMYSPVLHGDIKPANILLDENFQPKISDFGIARLLSANGPQQATTVIGSIGYLDPAYCESGILTPKSDVYSFGVVLLEIITRNKAVDGTVTLAQSFNEALTKGEDVQHMFDEEISVAENKKFLRRIGQLAAKCLQRDVKTRPEMVEVANSLRMIRKAMQRDQDEDVLLAAYQFGDLKIFNETEMKEMTKNYSMAFRKSMCECLYNGVIGMNRPIIVRLLETSSETGREIFLNTMSILSQKNHKNVVNIVGFHIGKSSLECVYESCCDLSKTMLGSISLSNRNLYDTICSMKKLHLQQRLSIAVQCAEGLVHIHSLAAESPESCGTSLLGNFRSANIFLDENFVPKIFNVNLSTFLGLSGAQKHTVFSIHYNGPEKYYSDPRDVSGQLLNKKSDVYSFGVVLLELITWKTVRYMYNLRARVLTTDFLDSYRRDRDAIGMFGKVCDEHEGYFVHEALSIAIDCLQLDIQMRPEMEHVLFRLRIIVARSKLAAGSNNKPSQHIGRALVNNIDKLHPTLISTISMEELNEATGNFSNDVLIGQGPYAECFLGVLKDGQNLAVKRLRTSEEIQVEGSDHFKNVLP

SEQ ID NO: 165193 - protein, 707 aa, Zea Mays
MDYQGDNLRDFFQTNGRKVLQRAENNYSLKYFTENEIRNITDGYKSVLGRGAFGEVYKGTLEDQSSVAVKRYIHGTHKEVFAKEVIVHSQINHKNVVRLLGCCTEENALMIVMEFISNGNLDSILHGNRGNGRVPFPLKKRIEIAIEVAEVLWCMHSMYSPVLHGDIKPANILLDENFQPKISDFGIARLLSANGPQQATTVIGSIGYLDPAYCESGILTPKSDVYSFGVVLLEIITRNKAVDGTVTLAQSFNEALTKGEDVQHMFDEEISVAENKKFLRRIGQLAAKCLQRDVKTRPEMVEVANSLRMIRKAMQRDQDEDVLLAAYQFGDLKIFNETEMKEMTKNYSMAFRKSMCECLYNGVIGMNRPIIVRLLETSSETGREIFLNTMSILSQKNHKNVVNIVGFHIGKSSLECVYESCCDLSKTMLGSISLSNRNLYDTICSMKKLHLQQRLSIAVQCAEGLVHIHSLAAESPESCGTSLLGNFRSANIFLDENFVPKIFNVNLSTFLGLSGAQKHTVFSIHYNGPEKYYSDPRDVSGQLLNKKSDVYSFGVVLLELITWKTVRYMYNLRARVLTTDFLDSYRRDRDAIGMFGKVCDEHEGYFVHEALSIAIDCLQLDIQMRPEMEHVLFRLRIIVARSKLAGKMGIKGARPGPPLSWLQRVKIAVSAAKGIEFLHEKVTLVFQYMMPIAGFIIGPSTILSGNI

SEQ ID NO: 165194 - protein, 834 aa, Zea Mays
MDYQGDNLRDFFQTNGRKVLQRAENNYSLKYFTENEIRNITDGYKSVLGRGAFGEVYKGTLEDQSSVAVKRYIHGTHKEVFAKEVIVHSQINHKNVVRLLGCCTEENALMIVMEFISNGNLDSILHGNRGNGRVPFPLKKRIEIAIEVAEVLWCMHSMYSPVLHGDIKPANILLDENFQPKISDFGIARLLSANGPQQATTVIGSIGYLDPAYCESGILTPKSDVYSFGVVLLEIITRNKAVDGTVTLAQSFNEALTKGEDVQHMFDEEISVAENKKFLRRIGQLAAKCLQRDVKTRPEMVEVANSLRMIRKAMQRDQDEDVLLAAYQFGDLKIFNETEMKEMTKNYSMAFRKSMCECLYNGVIGMNRPIIVRLLETSSETGREIFLNTMSILSQKNHKNVVNIVGFHIGKSSLECVYESCCDLSKTMLGSISLSNRNLYDTICSMKKLHLQQRLSIAVQCAEGLVHIHSLAAESPESCGTSLLGNFRSANIFLDENFVPKIFNVNLSTFLGLSGAQKHTVFSIHYNGPEKYYSDPRDVSGQLLNKKSDVYSFGVVLLELITWKTVRYMYNLRARVLTTDFLDSYRRDRDAIGMFGKVCDEHEGYFVHEALSIAIDCLQLDIQMRPEMEHVLFRLRIIVARSKLAAGSNNKPSQHIGRALVNNIDKLHPTLISTISMEELNEATGNFSNDVLIGQGPYAECFLGVLKDGQNLAVKRLRTSEEIQVEVMHVPTILRMCYHDNVVQFLGCFLEGGTRVLAYEYAPRGSLHDILHGKMGIKGARPGPPLSWLQRVKIAVSAAKGIEFLHEKVTLVFQYMMPIAGFIIGPSTILSGNI

SEQ ID NO: 165195 - protein, 818 aa, Zea Mays
MDYQGDNLRDFFQTNGRKVLQRAENNYSLKYFTENEIRNITDGYKSVLGRGAFGEVYKGTLEDQSSVAVKRYIHGTHKEVFAKEVIVHSQINHKNVVRLLGCCTEENALMIVMEFISNGNLDSILHGNRGNGRVPFPLKKRIEIAIEVAEVLWCMHSMYSPVLHGDIKPANILLDENFQPKISDFGIARLLSANGPQQATTVIGSIGYLDPAYCESGILTPKSDVYSFGVVLLEIITRNKAVDGTVTLAQSFNEALTKGEDVQHMFDEEISVAENKKFLRRIGQLAAKCLQRDVKTRPEMVEVANSLRMIRKAMQRDQDEDVLLAAYQFGDLKIFNETEMKEMTKNYSMAFRKSMCECLYNGVIGMNRPIIVRLLETSSETGREIFLNTMSILSQKNHKNVVNIVGFHIGKSSLECVYESCCDLSKTMLGSISLSNRNLYDTICSMKKLHLQQRLSIAVQCAEGLVHIHSLAAESPESCGTSLLGNFRSANIFLDENFVPKIFNVNLSTFLGLSGAQKHTVFSIHYNGPEKYYSDPRDVSGQLLNKKSDVYSFGVVLLELITWKTVRYMYNLRARVLTTDFLDSYRRDRDAIGMFGKVCDEHEGYFVHEALSIAIDCLQLDIQMRPEMEHVLFRLRIIVARSKLAAGSNNKPSQHIGRALVNNIDKLHPTLISTISMEELNEATGNFSNDVLIGQGPYAECFLGVLKDGQNLAVKRLRTSEEIQVEVPTILRMCYHDNVVQFLGCFLEGGTRVLAYEYAPRGSLHDILHGKMGIKGARPGPPLSWLQRVKIAVTLVFQYMMPIAGFIIGPSTILSGNI

SEQ ID NO: 165196 - protein, 56 aa, Zea Mays
MRQLRMCIVKYWEDNSVCVTIVITVFAYVADYLYNCFLASMREQLQVFLLLLYVLN

SEQ ID NO: 165197 - protein, 230 aa, Zea Mays
MDIFRMYEKYAQKNGWKFDVIDIMESAVKGYKEASGTISGPGAFGKLKFESGIHRVQRVPATEKSGRMHTSAVSVAVLPQADEVDVQLRNEDLRIDTYRSGGSGGQSVNTTDSAVRITHIPTGTVVAIQDERSQHMNKAKALKVLRARLYELERRRLHMDRSKLRSEQIGSGDRSERIRTYNFPQGRVTDHRVGVTHHSIADVMEGESLDMFVDALLLQEEMDAIASFGA

SEQ ID NO: 165198 - protein, 146 aa, Zea Mays
MHTSAVSVAVLPQADEVDVQLRNEDLRIDTYRSGGSGGQSVNTTDSAVRITHIPTGTVVAIQDERSQHMNKAKALKVLRARLYELERRRLHMDRSKLRSEQGRVTDHRVGVTHHSIADVMEGESLDMFVDALLLQEEMDAIASFGA

SEQ ID NO: 165199 - protein, 177 aa, Zea Mays
MSQQLPANLVEIMEQRMKLIEQRSAYLQEQINQPAASPEEYSRANKEFRKLESTMELIKDLRSKQEEIEGLKSLVANDHEEKDMREMAEEELLVAVEEEKRLQHELFRSLLPKDEADEKDCILEVRAGTGGEEASLFAMDIFRMYEKYAQKNGWKFDVIDIMESAVKGYKVLGRSAN

SEQ ID NO: 165200 - protein, 183 aa, Zea Mays
MSQQLPANLVEIMEQRMKLIEQRSAYLQEQINQPAASPEEYSRANKEFRKLESTMELIKDLRSKQEEIEGLKSLVANDHEEKDMREMAEEELLVAVEEEKRLQHELFRSLLPKDEADEKDCILEVRAGTGGEEASLFAMDIFRMYEKYAQKNGWKFDVIDIMESAVKGYKLVELYQVLGRSAN

SEQ ID NO: 165201 - protein, 231 aa, Zea Mays
MQYHLRRCGGGALAALWRLRHNASSAVASPPVAWRRPCLPPRFYSTAEMSQQLPANLVEIMEQRMKLIEQRSAYLQEQINQPAASPEEYSRANKEFRKLESTMELIKDLRSKQEEIEGLKSLVANDHEEKDMREMAEEELLVAVEEEKRLQHELFRSLLPKDEADEKDCILEVRAGTGGEEASLFAMDIFRMYEKYAQKNGWKFDVIDIMESAVKGYKLVELYQVLGRSAN

SEQ ID NO: 165202 - protein, 101 aa, Zea Mays
MSEGTANCVDILIAIILPPPHLPRLHPRHHLRHLRHHQEHLASHPCRRRSMSLYLCLFICLMPTCAVCSCLNSVVFLFCYRTHPMHHLSPRRNNHSNNKFR

SEQ ID NO: 165203 - protein, 252 aa, Zea Mays
MHSSAACLRRRGKGRGAEPATVFGVAGGDWLRFRIKAGRTLPLLIHNMRVRLGYLECYLEYIDYPGEKKEWVRLFRKNSARSNQNSSDSIHTMIRPSFPKWYFVHEVPEQFPNSDVTAIVDETWQIGDRVDWLKEGCYWSGTITKIINEDLVEIELPAPPIGEGKCYKAKCSDLRPTLEWSLARGWMVPLSQNQMMIMTTTIAGMPGKRCAELQTRLRKLQAPWSLHLRQPQTTLPATCIRRMLLSHPQRTC

SEQ ID NO: 165204 - protein, 172 aa, Zea Mays
MVPLSQANGKGWHAARLLQHYKSESDDDNDDNDSWDARQTVCRASNTPEEAPGPMVPAPPSATNNAPSHMYQKDAAVTSTEDLLKPSSTSKSPDPRHDAQASTQPAGTGVSMKPEPVIGVSTIKKEDSSLTEGEVDGGTEECLEKLGAIKARLKYLMQGTRLEHERSATFRG

SEQ ID NO: 165205 - protein, 232 aa, Zea Mays
MVSLYIICVSGLDTWSVTWNTLIIQEKIELPAPPIGEGKCYKAKCSDLRPTLEWSLARGWMVPLSQANGKGWHAARLLQHYKSESDDDNDDNDSWDARQTVCRASNTPEEAPGPMVPAPPSATNNAPSHMYQKDAAVTSTEDLLKPSSTSKSPDPRHDAQASTQPAGTGVSMKPEPVIGVSTIKKEDSSLTEGEVDGGTEECLEKLGAIKARLKYLMQGTRLEHERSATFRG

SEQ ID NO: 165206 - protein, 222 aa, Zea Mays
MRVRLGYLECYLEYIDYPGETIVDETWQIGDRVDWLKEGCYWSGTITKIINEDLVEANGKGWHAARLLQHYKSESDDDNDDNDSWDARQTVCRASNTPEEAPGPMVPAPPSATNNAPSHMYQKDAAVTSTEDLLKPSSTSKSPDPRHDAQASTQPAGTGVSMKPEPVIGVSTIKKEDSSLTEGEVDGGTEECLEKLGAIKARLKYLMQGTRLEHERSATFRG

SEQ ID NO: 165207 - protein, 272 aa, Zea Mays
MRVRLGYLECYLEYIDYPGEKKEWVRLFRKNSARSNQNSSDSIHTMIRPSFPKWYFVHEVPEQFPNSDVTAIVDETWQIGDRVDWLKEGCYWSGTITKIINEDLVEANGKGWHAARLLQHYKSESDDDNDDNDSWDARQTVCRASNTPEEAPGPMVPAPPSATNNAPSHMYQKDAAVTSTEDLLKPSSTSKSPDPRHDAQASTQPAGTGVSMKPEPVIGVSTIKKEDSSLTEGEVDGGTEECLEKLGAIKARLKYLMQGTRLEHERSATFRG

SEQ ID NO: 165208 - protein, 199 aa, Zea Mays
MDLILPYKVGDLAESKSLVSGYRGAWFRCKIHNMRVRLGYLECYLEYIDYPGEKKEWVRLFRKNSARSNQNSSDSIHTMIRPSFPKWYFVHEVPEQFPNSDVTAIVDETWQIGDRVDWLKEGCYWSGTITKIINEDLVENQMMIMTTTIAGMPGKRCAELQTRLRKLQAPWSLHLRQPQTTLPATCIRRMLLSHPQRTC

SEQ ID NO: 165209 - protein, 188 aa, Zea Mays
MDLILPYKVGDLAESKSLVSGYRGAWFRCKIHNMRVRLGYLECYLEYIDYPGETIVDETWQIGDRVDWLKEGCYWSGTITKIINEDLVEIELPAPPIGEGKCYKAKCSDLRPTLEWSLARGWMVPLSQNQMMIMTTTIAGMPGKRCAELQTRLRKLQAPWSLHLRQPQTTLPATCIRRMLLSHPQRTC

SEQ ID NO: 165210 - protein, 118 aa, Zea Mays
MVPAPPSATNNAPSHMYQKDAAVTSTEDLLKPSSTSKSPDPRHDAQASTQPAGTGVSMKPEPVIGVSTIKKEDSSLTEGEVDGGTEECLEKLGAIKARLKYLMQGTRLEHERSATFRG

SEQ ID NO: 165211 - protein, 124 aa, Zea Mays
MGTHPYMPDDKLSIPEFMLNEPQHYLPEKELVIPDPLLHFIQSHGAALTIDQSGRVLLAGNGDEMRDLLSIFLAFNMSRRETGGCKAAFLVPYFERKRRSRANSQVSNLKLAGTTADVSKRNIK

SEQ ID NO: 165212 - protein, 274 aa, Zea Mays
MVGDLSLLAVASASPVVLPPSKELHGVLPLQGKRPQDAGVQLCAPLQQHPPHHLEAVPYHQGQPVQMVVPGNHQGQALPAAYQAITMPDTAVLIDVQDSHPDSVQLSLGIAEQCARQEKLLKFLVSGSDVKELDESLLAEFTGQQTLAINMGTHPYMPDDKLSIPEFMLNEPQHYLPEKELVIPDPLLHFIQSHGAALTIDQSGRVLLAGNGDEMRDLLSIFLAFNMSRRETGGCKAAFLVPYFERKRRSRANSQVSNLKLAGTTADVSKRNIK

SEQ ID NO: 165213 - protein, 268 aa, Zea Mays
MDEEEEEDEREEQDVQYCIAEMTKPGQQLIIARGGKGGLGNAFIMKEMRPSKANRQEKIAHLSTGQPGTQSLLILELKSIADVGLVGLPNAGKSTLLSALSRAHPEIADYEFTTLRPNIGSLIYEDYFSVKVADIPGLIKGAHENRGLGHAFLRHIERTKVIAYVLDLAATLNGRKGVPPWEQLHDLVAELEHYQEGMTRRPSLIVANKIDEEGAEEMCQELKRRVQGVPIFPVCAILQEGVPDLRVGLRNLMDDSDPQGKNFEKNDC

SEQ ID NO: 165214 - protein, 958 aa, Zea Mays
MKCLLEMYGLKLLDLQKKVRSDISAEYWLQKKCAYPERQLFDWGLMRIRYPLSMYGIGDILSMDADDVHRKKRFTERMSRLEEEEKNQADIRKRKFFAEILNASREHQVQLGTTFKQRKQRNDGVQAWHVRARQRISRQEKNRLNLLKIGDQVAYMKMVEESKNERLKMLLDKTNELLEGIGKAVQRQKDAEHVSQHEGSEVPKGSESEDCSQISGVKSESPGESPSDDDADFAGSADESKFNAGRRLDFTVHSIEEKVTEQPSALEGGELRPYQLEGLQWMLSLFNNNLNGILADEMGLGKTIQTIALIAYLLENKEVAGPHLIIAPKAVLPNWSNEFKTWAPSIGTILYDGRPEERKLLREKNFDGLQFNVLLTHYDLILKDKKFLKKVHWHYLIVDEGHRLKNHECALARTLVSGYQIRRRLLLTGTPIQNSLQELWSLLNFILPNIFNSSQNFEEWFNAPFACDVSLNDEEQLLIIHRLHQVLRPFLLRRKKDEVEKYLPVKTQVILKCDMSAWQKAYYEQVTSREKVALGFGLRSKALQNLSMQLRKCCNHPYLFVEHYNMYQREEIVRASGKFELLDRLLPKLQRAGHRVLLFSQMTKLLDVLEIYLQMYNFKYMRLDGSTKTEERGRLLADFNKKDSEYFMFLLSTRAGGLGLNLQTADTVIIFDSDWNPQMDQQAEDRAHRIGQKNEVRVFVLVSVGSIEEEILDRAKQKMGIDAKVIQAGLFNTTSTAQDRRALLQEILRRGTSSLGTDIPSEREINRLAARTDEEFWLFEKMDEERRLRENYKSRLMDGNEVPDWVFANNDLPKRTVADEFQNIMVGAKRRRKEVVYSDSFGDQWMKSDEGFEDIPKATQRSKKTAYSSDIQVEFSERRKRPRSVENSADGVSNPTWTPDKGRAGVSSYSKDETEDDGEDEVITSGLQKGNSFTWNTLGRRRSSHFSSSSDSRGRPTF

SEQ ID NO: 165215 - protein, 576 aa, Zea Mays
MAASVDAAAALAVTPPAVEEAGGAVEQARTLIGALNLLSRNLPLPPDVLRAVSSIYHDGGAGDDEEEEGGEREAEKEGNMEMTAAEEGYPVDVATKGSSLIEELEDAIYKNKKTPISYSELAALKEGRFNASIQHRLAELEGLPSTRGEDLQMKCLLEMYGLKLLDLQKKVRSDISAEYWLQKKCAYPERQLFDWGLMRIRYPLSMYGIGDILSMDADDVHRKKRFTERMSRLEEEEKNQADIRKRKFFAEILNASREHQVQLGTTFKQRKQRNDGVQAWHVRARQRISRQEKNRLNLLKIGDQVAYMKMVEESKNERLKMLLDKTNELLEGIGKAVQRQKDAEHVSQHEGSEVPKGSESEDCSQISGVKSESPGESPSDDDADFAGSADESKFNAGRRLDFTVHSIEEKVTEQPSALEGGELRPYQLEGLQWMLSLFNNNLNGILADEMGLGKTIQTIALIAYLLENKEVAGPHLIIAPKAVLPNWSNEFKTWAPSIGTILYDGRPEERKLLREKNFDGLQFNVLLTHYDLILKDKKFLKKVHWHYLIVDEGHRLKNHECALARTLVSGFCVHFC

SEQ ID NO: 165216 - protein, 133 aa, Zea Mays
MKCLLEMYGLKLLDLQKKVRSDISAEYWLQKKCAYPERQLFDWGLMRIRYPLSMYGIGDILSMDADDVHRKKRFTERMSRLEEEEKNQADIRKRKFFAEILNASREHQVQLGTTFKQRKQRNDGVQECFVTIY

SEQ ID NO: 165217 - protein, 524 aa, Zea Mays
MPKTPPVNASKNTEPQKQSAPNLTITNGHTSTKVVVKKEHPINDVKHISTWVCKNLACKAVRPAEDSFCKRYWKRQLVIGKDARRVDNLCQRIYLSYRLLEGTVHFKELHEIIEDAKAKLESEVGPLDGMSAKNAHGIVSRFSAGIAVQKLCSTAIQRADEWLSSPDLHLRDSLPVACRFKFVDITSSSLIVILKETSSSDTIKGYKLWYWKSREQPSMEKPVIVSKDERKILLYDLTPCTEYSFRVISFTDDGVLGHSESRCRTESREIFVMRAPKNAVGGGATHAQKKDRNQSCKSTGFKIRDIWKNFQEALDAEGCFEGFSEDVHEGSCSRSVTETELSGACRKLHFNSSSVPDLNAEVPVPVDYTENHYYSKKGLVRSNDSGDSETCAVGQTAEPPAVESRQVSKVNSVPVNKCEQNGASAICHEKMLSGSTRQLDGDYEHCVKVVRQLECDGHIENGFRMKFLTWYSLRSTDQERKAVSTFVRTLSNEPSSLAEQLVDSFGEILNSKKAKTGFCSKLWH

SEQ ID NO: 165218 - protein, 886 aa, Zea Mays
MMIIIWWILMHRRTRRVTQIQQGKQMASDAIHPMPKVVDQSTKCSTSFGEVDNDSHGYVQNHDKGGAKSRDKCSTAKKLFADTTAEDGEKNSRCLAGLSYAGSQEPGDLSQANAFDVVDRLISINCGLSSQETIPNKLEIAKPHASSKRGTLMLAEKVDLGRSSNGKAEIFEFVDNLEDEGGGDFFSKNRDILLPKPIGRGEPKSHYTRAKKPSTKKSCGENKIGEAMNKRNSKLPGRLETIPLSHSRLFKSDVKSKQAYGSRTKKNLLKDLDNLSNAKSLEEQERADVALNDVGPDTQMAVEAMEALVQCSPAKSLSAEDQPLLNRDTMAEKSGIAKSHLKNGSQRTSNIQEGVTTRSKRRKVPDFSTKPQKERLRGSKVQESSEPIVKVKHKQTKSVPEKSKVSKEFIDENKYHGTPIAHRTRHCGRNDPSAFIEFSNKHLRRGKKLTGDSSTIQQVQNNRIAIESGLSYFEKESTEQICTNNDQDLQQSKDGSTQRTSVNNAQNLETHRVEPTTDVTCRDIPLHPKRRRTPTKLILSTSAAAANHEIPSEVARPYKKRRIFVRSVSDLLKYAKREPSHGRSASMLSSILEKSLAASPVLNFSVCGDSKTSSDVISSAQRPKESSHDEDTSKSPENNPQVPNRSMKTPSKVVNELSPTFSPANPSKGSSRNLSKASVARELLKLDPENVLPNQQRKDSRRRKDMAHVSILLSHHLDDDVVKRQKKILARLRGSEAFSMADATHFVADRFCRTKNMLEAITIGKPIVTSMWLENCGEAGCFIDERKYILRDEKKEKEIGFSMPISLASACNHPLLLGKRVFVTSNVKPSQAVVTSLVKASSGQPLERVGRSIMNEKEVAPDLLVISCEEDYQTCAPLLEKAWSFC

SEQ ID NO: 165219 - protein, 1173 aa, Zea Mays
MCIASSGSPPSDGDETQREADDWALYDETQPLDDAETQLIDEVEEGVAGDWTETQLMDSGNEDGGCGDEDHGNDGDPVKTKQVEDEEGGDVGGGVDDNANKWTKTQLDEKCEVDGVNNIVGDMVETQLVEEPEEDADKDGLNGHGEHDLGEWGKTQLVEDSDEDIGDYELSDGTVVLSDNESLSGDERVVKSGMDKRDVKFGMEGRIEGLTGEIRKHDDNNLVDSDASTDEEGDTDSVLTCGISEPRDTMSVNCMKQGKQMASDAIHPMPKVVDQSTKCSTSFGEVDNDSHGYVQNHDKGGAKSRDKCSTAKKLFADTTAEDGEKNSRCLAGLSYAGSQEPGDLSQANAFDVVDRLISINCGLSSQETIPNKLEIAKPHASSKRGTLMLAEKVDLGRSSNGKAEIFEFVDNLEDEGGGDFFSKNRDILLPKPIGRGEPKSHYTRAKKPSTKKSCGENKIGEAMNKRNSKLPGRLETIPLSHSRLFKSDVKSKQAYGSRTKKNLLKDLDNLSNAKSLEEQERADVALNDVGPDTQMAVEAMEALVQCSPAKSLSAEDQPLLNRDTMAEKSGIAKSHLKNGSQRTSNIQEGVTTRSKRRKVPDFSTKPQKERLRGSKVQESSEPIVKVKHKQTKSVPEKSKVSKEFIDENKYHGTPIAHRTRHCGRNDPSAFIEFSNKHLRRGKKLTGDSSTIQQVQNNRIAIESGLSYFEKESTEQICTNNDQDLQQSKDGSTQRTSVNNAQNLETHRVEPTTDVTCRDIPLHPKRRRTPTKLILSTSAAAANHEIPSEVARPYKKRRIFVRSVSDLLKYAKREPSHGRSASMLSSILEKSLAASPVLNFSVCGDSKTSSDVISSAQRPKESSHDEDTSKSPENNPQVPNRSMKTPSKVVNELSPTFSPANPSKGSSRNLSKASVARELLKLDPENVLPNQQRKDSRRRKDMAHVSILLSHHLDDDVVKRQKKILARLRGSEAFSMADATHFVADRFCRTKNMLEAITIGKPIVTSMWLENCGEAGCFIDERKYILRDEKKEKEIGFSMPISLASACNHPLLLGKRVFVTSNVKPSQAVVTSLVKASSGQPLERVGRSIMNEKEVAPDLLVISCEEDYQTCAPLLEKGASVFSVEFLLNGIVIQKLEYERHRLFLDRVKQTRSSRWLKDTVQDRFVPVPKRRRR

SEQ ID NO: 165220 - protein, 1003 aa, Zea Mays
MRGEAGNDCGGGDTQVLDGGTPPLGSPPSDGDETQREADDWALYDETQPLDDAETQLIDEVEEGVAGDWTETQLMDSGNEDGGCGDEDHGNDGDPVKTKQVEDEEGGDVGGGVDDNANKWTKTQLDEKCEVDGVNNIVGDMVETQLVEEPEEDADKDGLNGHGEHDLGEWGKTQLVEDSDEDIGDYELSDGTVVLSDNESLSGDERVVKSGMDKRDVKFGMEGRIEGLTGEIRKHDDNNLVDSDASTDEEGDTDSGHLHMKVPFVRVASVLTCGISEPRDTMSVNCMKQGKQMASDAIHPMPKVVDQSTKCSTSFGEVDNDSHGYVQNHDKGGAKSRDKCSTAKKLFADTTAEDGEKNSRCLAGLSYAGSQEPGDLSQANAFDVVDRLISINCGLSSQETIPNKLEIAKPHASSKRGTLMLAEKVDLGRSSNGKAEIFEFVDNLEDEGGGDFFSKNRDILLPKPIGRGEPKSHYTRAKKPSTKKSCGENKIGEAMNKRNSKLPGRLETIPLSHSRLFKSDVKSKQAYGSRTKKNLLKDLDNLSNAKSLEEQERADVALNDVGPDTQMAVEAMEALVQCSPAKSLSAEDQPLLNRDTMAEKSGIAKSHLKNGSQRTSNIQEGVTTRSKRRKVPDFSTKPQKERLRGSKVQESSEPIVKVKHKQTKSVPEKSKVSKEFIDENKYHGTPIAHRTRHCGRNDPSAFIEFSNKHLRRGKKLTGDSSTIQQVQNNRIAIESGLSYFEKESTEQICTNNDQDLQQSKDGSTQRTSVNNAQNLETHRVEPTTDVTCRDIPLHPKRRRTPTKLILSTSAAAANHEIPSEVARPYKKRRIFVRSVSDLLKYAKREPSHGRSASMLSSILEKSLAASPVLNFSVCGDSKTSSDVISSAQRPKESSHDEDTSKSPENNPQVPNRSMKTPSKVVNELSPTFSPANPSKGSSRNLSKASVARELLKLDPENVLPNQQRKDSRRRKDMAHVSILLSHHLDDDVVKRQKKIDSAAQRTC

SEQ ID NO: 165221 - protein, 1171 aa, Zea Mays
MRGEAGNDCGGGDTQVLDGGTPPLGSPPSDGDETQREADDWALYDETQPLDDAETQLIDEVEEGVAGDWTETQLMDSGNEDGGCGDEDHGNDGDPVKTKQVEDEEGGDVGGGVDDNANKWTKTQLDEKCEVDGVNNIVGDMVETQLVEEPEEDADKDGLNGHGEHDLGEWGKTQLVEDSDEDIGDYELSDGTVVLSDNESLSGDERVVKSGMDKRDVKFGMEGRIEGLTGEIRKHDDNNLVDSDASTDEEGDTDSGKQMASDAIHPMPKVVDQSTKCSTSFGEVDNDSHGYVQNHDKGGAKSRDKCSTAKKLFADTTAEDGEKNSRCLAGLSYAGSQEPGDLSQANAFDVVDRLISINCGLSSQETIPNKLEIAKPHASSKRGTLMLAEKVDLGRSSNGKAEIFEFVDNLEDEGGGDFFSKNRDILLPKPIGRGEPKSHYTRAKKPSTKKSCGENKIGEAMNKRNSKLPGRLETIPLSHSRLFKSDVKSKQAYGSRTKKNLLKDLDNLSNAKSLEEQERADVALNDVGPDTQMAVEAMEALVQCSPAKSLSAEDQPLLNRDTMAEKSGIAKSHLKNGSQRTSNIQEGVTTRSKRRKVPDFSTKPQKERLRGSKVQESSEPIVKVKHKQTKSVPEKSKVSKEFIDENKYHGTPIAHRTRHCGRNDPSAFIEFSNKHLRRGKKLTGDSSTIQQVQNNRIAIESGLSYFEKESTEQICTNNDQDLQQSKDGSTQRTSVNNAQNLETHRVEPTTDVTCRDIPLHPKRRRTPTKLILSTSAAAANHEIPSEVARPYKKRRIFVRSVSDLLKYAKREPSHGRSASMLSSILEKSLAASPVLNFSVCGDSKTSSDVISSAQRPKESSHDEDTSKSPENNPQVPNRSMKTPSKVVNELSPTFSPANPSKGSSRNLSKASVARELLKLDPENVLPNQQRKDSRRRKDMAHVSILLSHHLDDDVVKRQKKILARLRGSEAFSMADATHFVADRFCRTKNMLEAITIGKPIVTSMWLENCGEAGCFIDERKYILRDEKKEKEIGFSMPISLASACNHPLLLGKRVFVTSNVKPSQAVVTSLVKASSGQPLERVGRSIMNEKEVAPDLLVISCEEDYQTCAPLLEKGASVFSVEFLLNGIVIQKLEYERHRLFLDRVKQTRSSRWLKDTVQDRFVPVPKRRRR

SEQ ID NO: 165222 - protein, 398 aa, Zea Mays
MYAAVFAAFVAGMACLVGVDFSAKILASIAKSFEDEYSKEDGLSLRNLTLLFCYLCIFGVTSSDLVYDLLSILSKRLTELDVSTVLTILQCCGMKLRGDDPCAMKDFVLSIQNSVNDLKLHSGVGADGKTDIRSRRMEFMLETICDIKNNKKRPKEDPSHHTRIKKWLQKLKAEDVLLRGLTWSRLLDPDKKGQWWLSGDVPSTVAKIEDVAAVISKDVAETKKLLQLAAAQRMNTDIRRAIFCIIMSAEDYVDAFEKLLRLGLSGKQDREIIRVIVDCCLHEKMFNKYYTVLASKLCNHEKNHKFSLQVVNLANPVEMTPARVSHFRMLFETLLQKDDARVWNVFTRVAGLPELEVLRDGIVMFIKQHVIAEDSGKDLASKFKIAKKALDNTAGVLM

SEQ ID NO: 165223 - protein, 645 aa, Zea Mays
MGGKSEQKSRKERRKEARSEKHKLRFLSWVGHQGGKKKKPSMSVVEPSSVEEKPKKEPDGMMKKKRKREAEGKRKPRSNFQEYLEMEMGGPVSMEEDLEMERKLAKKLKLKKGKLGGPDDGMDDLFADLGFGGDFGSDDGETKAYDWNVVEDTNLDKRKGKKKNKEKKDDTVMEEPDDIDEENGRKKKKKKKKDGMEKEELVDVGEENGQKRKKKKKMKDDSEMDEPDDEGVHMDEENDGAVLESEDGVSNVVELPKESKGKYVPPSLRNASNSESEEIAQMRRRVRGLLNRLSESNVESITQEIATLFRSVPRSDGSQIIGDEVLASCSRGPRGNEQYAAVFAAFVAGMACLVGVDFSAKILASIAKSFEDEYSKEDGLSLRNLTLLFCYLCIFGVTSSDLVYDLLSILSKRLTELDVSTVLTILQCCGMKLRGDDPCAMKDFVLSIQNSVNDLKLHSGVGADGKTDIRSRRMEFMLETICDIKNNKKRPKEDPSHHTRIKKWLQKLKAEDVLLRGLTWSRLLDPDKKGQWWLSGDVPSTVAKIEDVAAVISKDVAETKKLLQLAAAQRMNTDIRRAIFCIIMSAEDYVDAFEKLLRLGLSGKQDREIIRVIVDCCLHEKMFNKYYTVLASKLCNHEKNHKFSL

SEQ ID NO: 165224 - protein, 164 aa, Zea Mays
MESRSKMSDVNDISTDGNIETMLSVEKGLRELASLKVEDAIMLTLAENRHVKPLSGQASEGRSPSESLELSAEEREDVRFKQAWLTYFWRRAKNHNIEEDIADEKLQFWIEQINYPVTTSEVVEVERGLHELKKLGIESQLWEATRRALDDDLSNHGSPTGSEA

SEQ ID NO: 165225 - protein, 321 aa, Zea Mays
MHMEREDSDAGDAAETEPILINRKDAALEQRKIAMRIASRRSSSASCNEIATLKSEAKVTTNVVTSLSRRVKSARSELRSLQATANRMILSQEELEEVVLKRCWLARYWTLCSKLGIHSDIAEEKKEYWSSFAPLALEAVLSIGQKARDGTLSDNADMESRSKMSDVNDISTDGNIETMLSVEKGLRELASLKVEDAIMLTLAENRHVKPLSGQASEGRSPSESLELSAEEREDVRFKQAWLTYFWRRAKNHNIEEDIADEKLQFWIEQINYPVTTSEVVEVERGLHELKKLGIESQLWEATRRALDDDLSNHGSPTGSEA

SEQ ID NO: 165226 - protein, 375 aa, Zea Mays
MDRLARPASPGGGGLGYASRRGLYAQASSHHLAGGSAQTSPGGSPKELSPVHRHARAGSLGGAGAASTAGRRAGVGAGAGARAQNSAARAAAQRLARVMGGAGGDAGSGSDDDDDYELSGPPIELSNTPRRTSTRSPSPSVGRHLADQTQVGRPPSLTNRYTAGKSVPMIPSIKRPATSGPGAGAGSESPMPNRREQRRSVDLGSSLRARRTSSSLNDEINTLQVENESMYDKLAEERFDDGDAKSMHMEREDSDAGDAAETEPILINRKDAALEQRKIAMRIASRRSSSASCNEIATLKSEAKVTTNVVTSLSRRVKSARSELRSLQATANRMILSQEELEEVVLKRCWLARYWTLCSKLGIKITFALFILLYY

SEQ ID NO: 165227 - protein, 377 aa, Zea Mays
MDRLARPASPGGGGLGYASRRGLYAQASSHHLAGGSAQTSPGGSPKELSPVHRHARAGSLGGAGAASTAGRRAGVGAGAGARAQNSAARAAAQRLARVMGGAGGDAGSGSDDDDDYELSGPPIELSNTPRRTSTRSPSPSVGRHLADQTQVGRPPSLTNRYTAGKSVPMIPSIKRPATSGPGAGAGSESPMPNRREQRRSVDLGSSLRARRTSSSLNDEINTLQVENESMYDKLQLAEERFDDGDAKSMHMEREDSDAGDAAETEPILINRKDAALEQRKIAMRIASRRSSSASCNEIATLKSEAKVTTNVVTSLSRRVKSARSELRSLQATANRMILSQEELEEVVLKRCWLARYWTLCSKLGIKITFALFILLYY

SEQ ID NO: 165228 - protein, 469 aa, Zea Mays
MDRLARPASPGGGGLGYASRRGLYAQASSHHLAGGSAQTSPGGSPKELSPVHRHARAGSLGGAGAASTAGRRAGVGAGAGARAQNSAARAAAQRLARVMGGAGGDAGSGSDDDDDYELSGPPIELSNTPRRTSTRSPSPSVGRHLADQTQVGRPPSLTNRYTAGKSVPMIPSIKRPATSGPGAGAGSESPMPNRREQRRSVDLGSSLRARRTSSSLNDEINTLQVENESMYDKLQLAEERFDDGDAKSMHMEREDSDAGDAAETEPILINRKDAALEQRKIAMRIASRRSSSASCNEIATLKSEAKVTTNVVTSLSRRVKSARSELRSLQATANRMILSQEELEEVVLKRCWLARYWTLCSKLGIHSDIAEEKKEYWSSFAPLALEAVLSIGQKARDGTLSDNADMESRSKMSDVNDISTDGNIETMLSVEKGLRELASLKVEDAIMLTLAENRHVKPLSGGFSKMPSF

SEQ ID NO: 165229 - protein, 336 aa, Zea Mays
MIPSIKRPATSGPGAGAGSESPMPNRREQRRSVDLGSSLRARRTSSSLNDEINTLQVENESMYDKLAEERFDDGDAKSMHMEREDSDAGDAAETEPILINRKDAALEQRKIAMRIASRRSSSASCNEIATLKSEAKVTTNVVTSLSRRVKSARSELRSLQATANRMILSQEELEEVVLKRCWLARYWTLCSKLGIHSDIAEEKKEYWSSFAPLALEAVLSIGQKARDGTLSDNADMESRSKMSDVNDISTDGNIETMLSVEKGLRELASLKVEDAIMLTLAENRHVKPLSGQASEGRSPSESLVKCGRARRCTLQAGMVDLFLEAGEKSQHRRRYS

SEQ ID NO: 165230 - protein, 567 aa, Zea Mays
MDRLARPASPGGGGLGYASRRGLYAQASSHHLAGGSAQTSPGGSPKELSPVHRHARAGSLGGAGAASTAGRRAGVGAGAGARAQNSAARAAAQRLARVMGGAGGDAGSGSDDDDDYELSGPPIELSNTPRRTSTRSPSPSVGRHLADQTQVGRPPSLTNRYTAGKSVPMIPSIKRPATSGPGAGAGSESPMPNRREQRRSVDLGSSLRARRTSSSLNDEINTLQVENESMYDKLAEERFDDGDAKSMHMEREDSDAGDAAETEPILINRKDAALEQRKIAMRIASRRSSSASCNEIATLKSEAKVTTNVVTSLSRRVKSARSELRSLQATANRMILSQEELEEVVLKRCWLARYWTLCSKLGIHSDIAEEKKEYWSSFAPLALEAVLSIGQKARDGTLSDNADMESRSKMSDVNDISTDGNIETMLSVEKGLRELASLKVEDAIMLTLAENRHVKPLSGQASEGRSPSESLELSAEEREDVRFKQAWLTYFWRRAKNHNIEEDIADEKLQFWIEQINYPVTTSEVVEVERGLHELKKLGIESQLWEATRRALDDDLSNHGSPTGSEA

SEQ ID NO: 165231 - protein, 264 aa, Zea Mays
MDRLARPASPGGGGLGYASRRGLYAQASSHHLAGGSAQTSPGGSPKELSPVHRHARAGSLGGAGAASTAGRRAGVGAGAGARAQNSAARAAAQRLARVMGGAGGDAGSGSDDDDDYELSGPPIELSNTPRRTSTRSPSPSVGRHLADQTQVGRPPSLTNRYTAGKSVPMIPSIKRPATSGPGAGAGSESPMPNRREQRRSVDLGSSLRARRTSSSLNDEINTLQVENESIFSLQKKGLMMEMPNPCTWRERILMLAMQQKQSQF

SEQ ID NO: 165232 - protein, 353 aa, Zea Mays
MGLGLGALLKSGGLSVSDHDAIVSINIFIALLCSCIVIGHLLEGNRWVNESITALVMGLITGGVILLVTNGTNSRILVFSEDLFFIYLLPPIIFNAGFQVKKKQFFRNFITIILFGAIGTLISFVIISLGAMGLFKKLDVGPLELGDYLAIGAIFSATDSVCTLQVLNQDETPLLYSLVFGEGVVNDATSVVLFNAIENLDIDNFDAIVLLNFVGKFLYLFFTSTILGVATGLLSAYIIKKLCFARHSTDREVSIMILMAYLSYMISMLLDLSGILTVFFCGIVMSHYTWHNVTESSRVTTKHTFATLSFIAEIFLFLYVGMDALDIEKWKLASSRYLSPVGMIDFEGLDIPT

SEQ ID NO: 165233 - protein, 332 aa, Zea Mays
MIKGSALVWHFRSDEAENIGYVIPTTVVSHFLNDYQKNGKYTGFPCLGVLLQKLENPALRESLKVPSSEGVLVRRVEPTAPASSVLRKGDVIVSFDGIAVGCEATVPFRSTERIAFRYLTSQKYAGDIAQLGIIRDGNSMKVQTILQPRKHLVPFHVEGGQPSYLIVAGLVFTPLTEPFIEEECEDTLGLKLLAKARYSLATFEGEEIVIVSQVLAHEVNIGYEHMGNQQVMKLNGTTIKNIHHLAHLVDTCKDKFLTFEFEDDFLVVLHREEADAASSDILKEHAIPSIRSSDLSEPYAEANNNEIQKTSEDFGESPVTNFEMGIDCLLWA

SEQ ID NO: 165234 - protein, 401 aa, Zea Mays
MACVAALFASPALLPFPSTTSSMASCSCRLRPAVVARAPRQQPRGRRALRRFDEVEGVSKKRRGIGGGGGVGAGGSQPSSSRRDRGLSVDFKEPQVAEFDDLEEDKFLNAVVKVYCTHIAPDYGLPWQKQRQHSSSGSAFMIGDGKLLTNAHCVEHDTQVKVKRRGDDKKYIAKVLARGVECDLALLSVENEEFWRGTEALHFGRLPCLQDSVTVVGYPLGGDTISVTKGVVSRIEVTPYAHGTSDLLGIQIDAAINPGNSGGPAFNDQGECIGVAFQVYRSDEAENIGYVIPTTVVSHFLNDYQKNGKYTGFPCLGVLLQKLENPALRESLKVPSSEGVLVRRVEPTAPASSVLRKGDVIVSFDGIAVGCEATVPFRSTERIAFRYLTSQKRYCPARNHS

SEQ ID NO: 165235 - protein, 728 aa, Zea Mays
MAGQERRTIDLEEGWAFMQKGITKLKNILEGKPEPQTIYNMCTQKPPQDYSQQLYDKYRESFEEYIASMVLPSLREKHDEFMLRELVQRWSNHKVMVRWLSRFFYYLDRYFISRRSLTPLKEVGLTCFRELIYQEIKGQVKDAVIALIDKEREGEQIDRALLKNVLDIFVEIGLGQMECYENDFEDFLLKDTTEYYSVKAQSWILEDSCPDYMIKAEECLKREKERVGHYLHISSEQKLLEKVQNELLAQYATPLLEKEHSGCSALLRDDKVEDLSRMYRLFSKISRGLEPISNMFKTHVTSEGTALVKQAEDSASNKKPEKKDMVGMQEQVFVWKIIELHDKYVAYVTECFQGHTLFHKALKEAFEVFCNKGVSGSSNAELLATFCDNILKKGCSEKLSDEAIEDALEKVVRLLAYISDKDLFAEFYRRLLFDKSANDEHERSILTKLKQQCGGQFTSKMEGMVTDLTVARDHQTKFEEFVAGHPELNPGIDLAVTVLTTGFWPSYKTFDINLPAEMVKCVEVFKEFYQTRTKHRKLTWIYSLGTCNINAKFDAKPIELIVTTYQAALLLLFNGSERLSYSEIATQLNLSDDDVVRLLHSLSCAKYKILNKEPANRSISPNDVFEFNSKFTDRMRRIKIPLPPVDEKKKVVEDVDKDRRYAIDASIVRIMKSRKVMGHQQLVAECVEQLSRMFKPDFKAIKKRIEDLITRDYLERDKDNANTYKYLA

SEQ ID NO: 165236 - protein, 230 aa, Zea Mays
MGNTSFCPPAAMLPMYPPSPQGQFSNPANQDALGLLPCFPDASPAMLRHFSPYPVSYVPRSPLPVTVHNVHERRHDHTETVELPDAVVFSQCTTLDSFRTSECGGPPLKVQEPTKNRKEGCIGSPEKELDTLAVSSSTAQASSQKLEANEVLQLWHRARITLAPSSMMSLYIEGILLILVRLHCLMCGLPARKLCPDLDHQVGCSSSDLGWLHPSQFEPLFLSAQPGQTW

SEQ ID NO: 165237 - protein, 82 aa, Zea Mays
MAPSLGRRLVQHLIDESVGLKKIKQPKMISIMGIRGSGKTALATEVHERHLRLSPAAYPSPYPYSNSTLRTAQSIVQNSAFG

SEQ ID NO: 165238 - protein, 204 aa, Zea Mays
MLISCLSCYNVETLVHSTLEHCEDADFTFPVHFNFREHTIYVRCRPYLKEFLDRVASVFETIIFTASQSIYAEQLLNVLDPKRKLFRHRVYRESCVYVEGNYMKDLTVLGRDLTRVMIVDNSPQAFGFQLDNGIPIESWFDDPNDMELLKLLPFLESLVGVEDVRPYIARKFNLREKHVRISWLLALLYALPTAMYNFRCSWQL

SEQ ID NO: 165239 - protein, 420 aa, Zea Mays
MQTRKKGAAKNAVGYHANPKTSRPSRRATQSTVAEKKVSDLITSSSKKQRPVGVTSKKHSKGGRKLLVSCDTTDAGNDAPQAQHSDGVADDRPNDSIFSPTYHHHKEGGVNNLSKGLEEQTTHVHGSKEASLKSGSNLACNTHDGINDHSGTLKLQSAGQSTLLEVDEYSELGNLSSEVSAIYLAMQQSKLECIDEQSQDSTSTEGYGEAEETEEYDDFDPYSFIKDLPDLSMVVPKFRPVLLPKQTRSCPTMTLVLDLDVHFNFREHTIYVRCRPYLKEFLDRVASVFETIIFTASQSIYAEQLLNVLDPKRKLFRHRVYRESCVYVEGNYMKDLTVLGRDLTRVMIVDNSPQAFGFQLDNGIPIESWFDDPNDMELLKLLPFLESLVGVEDVRPYIARKFNLREKVATASSLTIDMQM

SEQ ID NO: 165240 - protein, 223 aa, Zea Mays
MQTRKKGAAKNAVGYHANPKTSRPSRRATQSTVAEKKVSDLITSSSKKQRPVGVTSKKHSKGGRKLLVSCDTTDAGNDAPQAQHSDGVADDRPNDSIFSPTYHHHKEGGVNNLSKGLEEQTTHVHGSKEASLKSGSNLACNTHDGINDHSGTLKLQSAGQSTLLEVDEVKILPQQKVMVKLRRLKSMMILTPTPLSKIYLIYLWWSPSFVLFSFQSRPGVVLR

SEQ ID NO: 165241 - protein, 445 aa, Zea Mays
MQTRKKGAAKNAVGYHANPKTSRPSRRATQSTVAEKKVSDLITSSSKKQRPVGVTSKKHSKGGRKLLVSCDTTDAGNDAPQVPPSVFPDLQAQHSDGVADDRPNDSIFSPTYHHHKEGGVNNLSKGLEEQTTHVHGSKEASLKSGSNLACNTHDGINDHSGTLKLQSAGQSTLLEVDEYSELGNLSSEVSAIYLAMQQSKLECIDEQSQDSTSTEGYGEAEETEEYDDFDPYSFIKDLPDLSMVVPKFRPVLLPKQTRSCPTMTLVLDLDETLVHSTLEHCEDADFTFPVHFNFREHTIYVRCRPYLKEFLDRVASVFETIIFTASQSIYAEQLLNVLDPKRKLFRHRVYRESCVYVEGNYMKDLTVLGRDLTRVMIVDNSPQAFGFQLDNGIPIESWFDDPNDMELLKLLPFLESLVGVEDVRPYIARKFNLREKVFFRCQRSP

SEQ ID NO: 165242 - protein, 217 aa, Zea Mays
MKPAARRPLLLCALAAAAALSILLVAPPPLAAHLSSLLLAFPASPYAGGPKLVVLLAGQSNMAGRGLAPSLLPPQFRPHPRVLRLAASRRWVVAAPPLHADIDTHKACGLGPAMPFAHRLLHAASPDLVLGLVPCAVGGTRIWMWAKGEPLYEAAVARGRAAVAAGGGTLGAVLWFQGESDTIELDDATAYGGRMERLVNDFRADLGMPNLLVIQLI

SEQ ID NO: 165243 - protein, 228 aa, Zea Mays
MKPAARRPLLLCALAAAAALSILLVAPPPLAAHLSSLLLAFPASPYAGGPKLVVLLAGQSNMAGRGLAPSLLPPQFRPHPRVLRLAASRRWVVAAPPLHADIDTHKACGLGPAMPFAHRLLHAASPDLVLGLVPCAVGGTRIWMWAKGEPLYEAAVARGRAAVAAGGGTLGAVLWFQGESDTIELDDATAYGGRMERLVNDFRADLGMPNLLVIQSSLNFSLPRGFVR

SEQ ID NO: 165244 - protein, 137 aa, Zea Mays
MFRDELERDGMPNIERTLRQGFQTWFRTHILRMRNINQEEADDDLFSLACGPDFRVRKYSSRIVNGVRFNTSDRDKHRKTQNSGVMTQAAEIAQLVQENGQKVYGSDSEEEDDDDTILEYCSEAEEGATNDVDSDDE

SEQ ID NO: 165245 - protein, 604 aa, Zea Mays
MEESNFMMALLIPGPTSPGKDFDIFLEPLIEDLLELWTGVPTYDALTGQKFNLRAAVLWCIHDYPALGTLSGRKTKGFFACIHCDKQSLSYSLRSKIGYFGHFRFLPVGHRLRKNNEFVGLHESNDPPGKFSMEELMAELERVKHVRPRKQQGSRKRKRSNLDKDHVVIWSWMVSLWKLPYWKNLKLRHNLDIMHIEKNICENLIGTILNIPGKTKDTIKARLDLKDMGIRKELHFRGNVDSCEMPYARYTLPTEYKKAFCDFLREVKFPDGFASNISRCLNAEGTKLQGLKTHDCHILLQRILPVAMRGFLDKDIYEALADLGKFFRELCSRTLKKDVLAEMRKEIPIILVKLEKIFPPAFFDVMVHLAVHLPDEALLRGPVHYGWMYPIERRLYTLKRYVRNRARPEGSIAEAYIADECLTFCSKYMDDVETKFNREPRNKGFSNEEAYTVDVFGHGVNFTSAPELVYDDSAIDQMVWYVLNNCSQVDKYMRMFRDELERDGMPNIERTLRQGFQTWFRTHILRMRNINQEEADDDLFSLACGPDFRVRKYSSRIVNGVRFNTSDRDKHRKTQNSGVMTQGTHNGQEIDFFWNLKRDHSVRA

SEQ ID NO: 165246 - protein, 110 aa, Zea Mays
MFRDELERDGMPNIERTLRQGFQTWFRTHILRMRNINQEEADDDLFSLACGPDFRVRKYSSRIVNGVRFNTSDRDKHRKTQNSGVMTQGTHNGQEIDFFWNLKRDHSVRA

SEQ ID NO: 165247 - protein, 82 aa, Zea Mays
MHFITWLTCSLPHRFTAQLKDIECGHLPITAPKYHLWIGSNRFKALIFRPAEGGVLRPQSYTPYSSQLHTQISPLSPTASDN

SEQ ID NO: 165248 - protein, 328 aa, Zea Mays
MEKETPPPLHTDQETSVSSEQQRPRPHLSIDIPAASSLPADHLLPMATATQAGTSITPPSTRRGQQTSSNILSTPAPSSSSSKPSSRPPLRSPSFMLRQTVKSLLPLGSFKSSAVKSYEASISKLFGASATKVMARTPSLPLDHALSSSPHPPPVQQKSAALHHMCRSQSLPTTTNMKKAKLLNAANAKSFKRMDSLGGTFRVVPSTPRTPATAVPDDIAPAPPGGPGVDGGEDIPEEEAVCRICMAELSEGSDTLIKLECACKGELALAHTDCAVKWFSIKGTRTCEVCKQDVQNLPVTLLRVQSVQRRDLLNRGGASNTPRYDRYR

SEQ ID NO: 165249 - protein, 411 aa, Zea Mays
MEKETPPPLHTDQETSVSSEQQRPRPHLSIDIPAASSLPADHLLPMATATQAGTSITPPSTRRGQQTSSNILSTPAPSSSSSKPSSRPPLRSPSFMLRQTVKSLLPLGSFKSSAVKSYEASISKLFGASATKVMARTPSLPLDHALSSSPHPPPVQQKSAALHHMCRSQSLPTTTNMKKAKLLNAANAKSFKRMDSLGGTFRVVPSTPRTPATAVPDDIAPAPPGGPGVDGGEDIPEEEAVCRICMAELSEGSDTLIKLECACKGELALAHTDCAVKWFSIKGTRTCEVCKQDVQNLPVTLLRVQSVQRRDLLNRGGASNTPRYDRYRMWHGTPILVIISILAYFCFLEELLVAHDGIVALAISLPFSCILGLFSSLTTTSMGTWQEDTYGSTPRLSSSWSSSSPISSTDT

SEQ ID NO: 165250 - protein, 360 aa, Zea Mays
MKEEFDKLSAILIQGAATCSPPLPLTTIVVQDHKGISNAAPTDCPLIPLLVPKGDQLDGTTEDKIRIHDHISNLKFSLSPTAFFQVNTLAAERLYTLAGDWANLNSDTLLFDVCCGTGTIGLTLAQHVGMVVGIEMNESAVSNACRNALVNGIKNCRFVCGKAEDVMGPLLTEYLGSPQQQAAASKSNSEIDDASKNEDTIGCASYDGENIDSSKQRNDNAEGQQPMGASVDHPTCASEVDENNVASGEQNCGEASLVNDKPIETASDNSLEQGKACKDGSSSPNNNVLAANACQFKNVVAIVDSPRVGLRPTVRGWDRIIQVLSTVVPQNWRDEREHQSDQGIEDASTYSTSSVRFLQP

SEQ ID NO: 165251 - protein, 631 aa, Zea Mays
MTVGFVTFQSVEQLTNAVQILKKNPSGGKEIKIVDANRRSHQKAHDGALVSNTGTTTENGSSPTTPAEETSVLESVSSSKKGARDAVTPLANMTYIDQLEHKNQSMAQILKKLTRNARKACPPAIPHPDWVFKSKEIGGLPCKFEGILESPVVNGYRNKCEFSVGYSLEGKKTVGFMLGNFREGVTAVEEPVNCPNVSEISCKYAQMFQDFLQPSSFPLWSRIDNSGFWRQLTVREGRCPAEAVVSQNAESQISEVMLIVQVCSTGVDEALMKEEFDKLSAILIQGAATCSPPLPLTTIVVQDHKGISNAAPTDCPLIPLLVPKGDQLDGTTEDKIRIHDHISNLKFSLSPTAFFQVNTLAAERLYTLAGDWANLNSDTLLFDVCCGTGTIGLTLAQHVGMVVGIEMNESAVSNACRNALVNGIKNCRFVCGKAEDVMGPLLTEYLGSPQQQAAASKSNSEIDDASKNEDTIGCASYDGENIDSSKQRNDNAEGQQPMGASVDHPTCASEVDENNVASGEQNCGEASLVNDKPIETASDNSLEQGKACKDGSSSPNNNVLAANACQFKNVVAIVDSPRVGLRPTVRGWDRIIQVLSTVVPQNWRDEREHQSDQGIEDASTYSTSSVRFLQP

SEQ ID NO: 165252 - protein, 795 aa, Zea Mays
MEDVLTPPPQPELVGEKRKRDETSLDASIEDAPAAPASTGGAEDAAGSDVARHPMWKTSLCSYFRRRGAGAEECSHGESCRYAHTEEELRPRPDGTWDPTSDRAKKLRKVAAEAQEEAEEEVTVDEQSLEKCLVGLPMGWTADRLKPFLQDQGISYAIAKKKKGMTVGFVTFQSVEQLTNAVQILKKNPSGGKEIKIVDANRRSHQKAHDGALVSNTGTTTENGSSPTTPAEETSVLESVSSSKKGARDAVTPLANMTYIDQLEHKNQSMAQILKKLTRNARKACPPAIPHPDWVFKSKEIGGLPCKFEGILESPVVNGYRNKCEFSVGYSLEGKKTVGFMLGNFREGVTAVEEPVNCPNVSEISCKYAQMFQDFLQPSSFPLWSRIDNSGFWRQLTVREGRCPAEAVVSQNAESQISEVMLIVQVCSTGVDEALMKEEFDKLSAILIQGAATCSPPLPLTTIVVQDHKGISNAAPTDCPLIPLLVPKGDQLDGTTEDKIRIHDHISNLKFSLSPTAFFQVNTLAAERLYTLAGDWANLNSDTLLFDVCCGTGTIGLTLAQHVGMVVGIEMNESAVSNACRNALVNGIKNCRFVCGKAEDVMGPLLTEYLGSPQQQAAASKSNSEIDDASKNEDTIGCASYDGENIDSSKQRNDNAEGQQPMGASVDHPTCASEVDENNVASGEQNCGEASLVNDKPIETASDNSLEQGKACKDGSSSPNNNVLAANACQFKNVVAIVDSPRVGLRPTVRGWDRIIQVLSTVVPQNWRDEREHQSDQGIEDASTYSTSSVRFLQP

SEQ ID NO: 165253 - protein, 348 aa, Zea Mays
MKEEFDKLSAILIQGAATCSPPLPLTTIVVQDHKGISNAAPTDCPLIPLLVPKGDQLDGTTEDKIRIHDHISNLKFSLSPTAFFQVNTLAAERLYTLAGDWANLNSDTLLFDVCCGTGTIGLTLAQHVGMVVGIEMNESAVSNACRNALVNGIKNCRFVCGKAEDVMGPLLTEYLGSPQQQAAASKSNSEIDDASKNEDTIGCASYDGENIDSSKQRNDNAEGQQPMGASVDHPTCASEVDENNVASGEQNCGEASLVNDKPIETASDNSLEQGKACKDGSSSPNNNVLAANACQFKNVVAIVDSPRVGLRPTVRGWDRIIQVLSTVVPQNWRDEREHQSTFPATLTV

SEQ ID NO: 165254 - protein, 181 aa, Zea Mays
MGEIYERMDCMVGEIKDIMTKDDNLHKDDFVEVESIVMRRWEKMNLPLHCLAYALCPKFYHQQYLNTPAPGGTIRQAPNTDKEVMTNVLEAFSKIADSPREQQILREQFNAFIMKKGMFALPPVQLDAFTMEPIEWWVSYGSETPDLAEVAKKFYLNPSAVHRPREFGAHSTISITPSAIG

SEQ ID NO: 165255 - protein, 240 aa, Zea Mays
MEAGAAAAATAIYPLHRCKTIHLVRHAQGVHNVEGDTDHSAYMKPDFFDASITPLGWNQVDLLREHVKESGLAEKIELVICSPLSRTMQTAVGVFGGESCSNGVSVPPLMVENAGRPAVSSLNCPPFLAVEACRERLGVHPCDKRRSITEYRALFPAIDFSLIESDEDVLWVPDVRETFESLAERGMKFIDWLWTREEREIAIVTHSGLLSHTLRMYSKECHPTVAQELCKLRAPVLGTG

SEQ ID NO: 165256 - protein, 167 aa, Zea Mays
MISSRMELGATTALYPLHRCKTIYLVRHAQGIHNVAGEKDFGAYMSHELFDAQLTPLGWNQVDGLREHVKKSGLAEKIELVISSPLLRTMQTAVGVFGGEKYTDGVNAPPLMVENARHSGRPAVSSLNCPPFIAVETCREHLGVHPCDKRRSITEYRPLFPAIDFSL

SEQ ID NO: 165257 - protein, 266 aa, Zea Mays
MRSADVIMSRVAPVPRGSLSRLSPARDLIFPSQQCLPTHPPPQIHQWCDVTDSDDRIHRRLIRPPLGMISSRMELGATTALYPLHRCKTIYLVRHAQGIHNVAGEKDFGAYMSHELFDAQLTPLGWNQVDGLREHVKKSGLAEKIELVISSPLLRTMQTAVGVFGGEKYTDGVNAPPLMVENARHSGRPAVSSLNCPPFIAVETCREHLGVHPCDKRRSITEYRPLFPAIDFSLIENDEDVLWEPDVREPNEAVALRGCGQEKRKR

SEQ ID NO: 165258 - protein, 316 aa, Zea Mays
MRSADVIMSRVAPVPRGSLSRLSPARDLIFPSQQCLPTHPPPQIHQWCDVTDSDDRIHRRLIRPPLGMISSRMELGATTALYPLHRCKTIYLVRHAQGIHNVAGEKDFGAYMSHELFDAQLTPLGWNQVDGLREHVKKSGLAEKIELVISSPLLRTMQTAVGVFGGEKYTDGVNAPPLMVENARHSGRPAVSSLNCPPFIAVETCREHLGVHPCDKRRSITEYRPLFPAIDFSLIENDEDVLWEPDVREPNEAVALRGMKFMDCFANCELRSMVLVDRSMLGSYSSRFNYAGKNPTGLDVPSDIADKKQVDEAQKN

SEQ ID NO: 165259 - protein, 205 aa, Zea Mays
MSHELFDAQLTPLGWNQVDGLREHVKKSGLAEKIELVISSPLLRTMQTAVGVFGGEKYTDGVNAPPLMVENARHSGRPAVSSLNCPPFIAVETCREHLGVHPCDKRRSITEYRPLFPAIDFSLIENDEDVLWEPDVREPNEAVALRGMKFMDCFANCELRSMVLVDRSMLGSYSSRFNYAGKNPTGLDVPSDIADKKQVDEAQKN

SEQ ID NO: 165260 - protein, 158 aa, Zea Mays
MPDTVAVRQFQGVHPCDKRRSITEYRPLFPAIDFSLIENDEDVLWEPDVREPNEAVALRGMKFMDWLWTREEKEIAIVSHSGFLFHTLSMYSKECHPTISDEVSKHFANCELRSMVLVDRSMLGSYSSRFNYAGKNPTGLDVPSDIADKKQVDEAQKN

SEQ ID NO: 165261 - protein, 234 aa, Zea Mays
MLLSDTQQQQSAAPENSSRKQFGRPAVAPATRFTHVEIPIGPGDPPPLVSECEEEPPRGARVRQVPWRAGERGDARGAAGAGVPDGGDYGGVLVRGRAAGRGSLRWCGGERAAGRDVRGGGARAAGGGARAAGQPPRTRCRCGARTATRHRRRRCAARSSLCCCPRWRASGRRRRRGGCTTCSWRRAPWRSRGGWRSCRTWGLRSTCCRRRGRWYCSRHRRSSSRSWWAAWTRS

SEQ ID NO: 165262 - protein, 882 aa, Zea Mays
MANPTATKHAFKRILTSLLKPGGGEYGKFFSLPALNDPRIDKLPYSIRVLLESAIRHCDNFQVTESDVEKIIDWENTSPKLAEIPFKPARCILMDNTGVPAVVDLAAMRDMMPKLGCDPYKINPLIPVDAVIDHAVRVDVAGTYDALDRNEELEFQRNKERFAFLKWASNAFHNMQVFPPGSGTVHQVNLEYLARVVFNEDGILYFDSVVGTDSHTTMINSLGVAGWGVGGIEAVVAMLGQPMGMVLPGVVGFKLSGKLRDGVTTTDIVLTMTQMLRKHGAIGKFVEFYGVGVGELSLPARATIANMSPEYGATMGFFPVDQVALDYLKLTGRSDETVSMIEAYLRANKMFVDKHEPETERVFSSHLELDLSEVEPCVSGPKRPHDRVPLKEMKSDWHACLDNEVGFKGYAVPKEQQGKVVKFDFHGRPAEIKHGSVVLAAICSSTNTSNPSVMIGAGLVAKKACELGLEVKPWVKTSLTPGSVVATEYLKHSGLQDYLNQQGFHVAAHGCATCVGNSGDLDGSVSAAITENDMVAAAVLSANRNFEGRVNPLTRANYLASPPLVVAYALAGTVDIDFEKEPIGVGKGGKEVFLRDIWPSNQEIDEVVESSVQTHLFKKVYDSIMERNPRWNQLPVPKEALYPWEDRSTYIRKPTYLEGMSMTPPAAPPTVTEAYCLLNLGDSITTDHISYSGKIPEGTPAAKYLLEYGVEPKNFSSYGGRRGNNEVVMRGAFANMRIVNKLLDGKAGPWTIHVPTGEKLYVYDAAMKYKSEGHDMVIIAGSEYGSGSSRDSAAKGPMLLGVKSVIAKSFERIHRSNLVGMGIIPLCFKAGEDADSLGLTGRERYTIHLPTSTAELSPGQDVTVTTHDGRSFTCTLRLDTQV

SEQ ID NO: 165263 - protein, 472 aa, Zea Mays
MKSDWHACLDNEVGFKGYAVPKEQQGKVVKFDFHGRPAEIKHGSVVLAAICSSTNTSNPSVMIGAGLVAKKACELGLEVKPWVKTSLTPGSVVATEYLKHSGLQDYLNQQGFHVAAHGCATCVGNSGDLDGSVSAAITENDMVAAAVLSANRNFEGRVNPLTRANYLASPPLVVAYALAGTVDIDFEKEPIGVGKGGKEVFLRDIWPSNQEIDEVVESSVQTHLEGMSMTPPAAPPTVTEAYCLLNLGDSITTDHISYSGKIPEGTPAAKYLLEYGVEPKNFSSYGGRRGNNEVVMRGAFANMRIVNKLLDGKAGPWTIHVPTGEKLYVYDAAMKYKSEGHDMVIIAGSEYGSGSSRDSAAKGPMLLGVKSVIAKSFERIHRSNLVGMGIIPLCFKAGEDADSLGLTGRERYTIHLPTSTAELSPGQDVTVTTHDGRSFTCTLRLDTQLEVTYFNHGGILPYMVRNLAAQMK

SEQ ID NO: 165264 - protein, 528 aa, Zea Mays
MVSMIEAYLRANKMFVDKHEPETERVFSSHLELDLSEVEPCVSGPKRPHDRVPLKEMKSDWHACLDNEVGFKGYAVPKEQQGKVVKFDFHGRPAEIKHGSVVLAAICSSTNTSNPSVMIGAGLVAKKACELGLEVKPWVKTSLTPGSVVATEYLKHSGLQDYLNQQGFHVAAHGCATCVGNSGDLDGSVSAAITENDMVAAAVLSANRNFEGRVNPLTRANYLASPPLVVAYALAGTVDIDFEKEPIGVGKGGKEVFLRDIWPSNQEIDEVVESSVQTHLEGMSMTPPAAPPTVTEAYCLLNLGDSITTDHISYSGKIPEGTPAAKYLLEYGVEPKNFSSYGGRRGNNEVVMRGAFANMRIVNKLLDGKAGPWTIHVPTGEKLYVYDAAMKYKSEGHDMVIIAGSEYGSGSSRDSAAKGPMLLGVKSVIAKSFERIHRSNLVGMGIIPLCFKAGEDADSLGLTGRERYTIHLPTSTAELSPGQDVTVTTHDGRSFTCTLRLDTQLEVTYFNHGGILPYMVRNLAAQMK

SEQ ID NO: 165265 - protein, 347 aa, Zea Mays
MERKALELYHQRVSKITEDILFEQQENCDSTDDNEEGATICKMLEHAAEPEFILAGMTPEQLKCFSSYIEKQKIVKQNEVSEKVEKALVVAGLSSRDVTPFLKVRVIGLVNKHSASTSSNKEGLITIWNPTEMQKDNLVEGQAYSVMGLVPSNYCTEIMYLHARGSSTTWKPLASAQTTDFKPFFTPRRAIELLKFGEVPISSEFDIAGLILYVGNTYLCNNKKKQWLFLTDGSKFVSGQGCEEQDCLLAVSFSSATTDEDSTLFSYTLSGNTVGFSNLVKRQKDETRQVWVAEATESSSYTLSNEIPRKSHLKEAAVLAERWASRSYHKIQELKERVLCIVGNAGV

SEQ ID NO: 165266 - protein, 766 aa, Zea Mays
MFSTAGGRSMAISVDALQRAKSLLGDSDLVVSPNGSIGRSLASAIENLPKPTISPKGDVSNLSYGTRAIGYAVPDTPVTKTSANQFHMGREYRPVNEIPKVPKPPSRCLSEGDNASNSKDKTQWHHMPAGPLVDITNYMATCSGNTDCLANGKRIIGGRNSVSPFKRPRSSRFITPIKNNKLSSAGESIVPPMQISPCRTMLSVRYPFQHQRKNYKEYFGGPPCFKYLTEHVTDDVKLMDARRAEKFRFQHMDTGAEEFQKMLLTCGASLSCATKEWVSNHYKWIVWKLASLERCYPTRVAGKFLTVDNVLEELKYRYSLDASLDVALLEQLEKRKLFVGQKLRVSGVVKLVVHINGTYRARWNDALGFCKHVGLPLAFRCIKVSGGRVPRTLVGITRIYPILYRERLPDGRFVVRSERMERKALELYHQRVSKITEDILFEQQENCDSTDDNEEGATICKMLEHAAEPEFILAGMTPEQLKCFSSYIEKQKIVKQNEVSEKVEKALVVAGLSSRDVTPFLKVRVIGLVNKHSASTSSNKEGLITIWNPTEMQKDNLVEGQAYSVMGLVPSNYCTEIMYLHARGSSTTWKPLASAQTTDFKPFFTPRRAIELLKFGEVPISSEFDIAGLILYVGNTYLCNNKKKQWLFLTDGSKFVSGQGCEEQDCLLAVSFSSATTDEDSTLFSYTLSGNTVGFSNLVKRQKDETRQVWVAEATESSSYTLSNEIPRKSHLKEAAVLAERWASRSYHKIQELKERVLCIVGNAGV

SEQ ID NO: 165267 - protein, 1037 aa, Zea Mays
MDEDVKNIRQWDTGCQLPIFQTGLGRPVAVKHSSIKKASTILGDGDVKRSGNGHTGVCTTPFQFETPKSVLMSSSLIINGMTVTPEENTSVRAEKCFNDDGQLPLFQTGSGRSVTASKGSFKRASSVLEPRNIAKELEDESHLNDGYATSIFKTGLGKSILPTENSRERAQFVLEAKEAVKQAVISDIGAGFGENPMFHSGKQQFSPENDTSRPRASTPMEQGKFATKGYEDCGSPLPMFQTGSGKSVLVCESSMQKARAVLEEEEHYKLVKMDKKIAASASPLKTSHARTVNISSTGVSRAATLLGLEENTLSTQFFGHVSDKLGTEITVKRGNPEHMLDVASAHAISSGTHKGFIYPTENPTHMDKHQQFGFSKSSTSYVGEHSIRFSTAGGRSMAISVDALQRAKSLLGDSDLVVSPNGSIGRSLASAIENLPKPTISPKGDVSNLSYGTRAIGYAVPDTPVTKTSANQFHMGREYRPVNEIPKVPKPPSRCLSEGDNASNSKDKTQWHHMPAGSGNTDCLANGKRIIGGRNSVSPFKRPRSSRWVSNHYKWIVWKLASLERCYPTRVAGKFLTVDNVLEELKYRYSLDASLDVALLEQLEKRKLFVGQKLRVSGVVKLVVHINGTYRARWNDALGFCKHVGLPLAFRCIKVSGGRVPRTLVGITRIYPILYRERLPDGRFVVRSERMERKALELYHQRVSKITEDILFEQQENCDSTDDNEEGATICKMLEHAAEPEFILAGMTPEQLKCFSSYIEKQKIVKQNEVSEKVEKALVVAGLSSRDVTPFLKVRVIGLVNKHSASTSSNKEGLITIWNPTEMQKDNLVEGQAYSVMGLVPSNYCTEIMYLHARGSSTTWKPLASAQTTDFKPFFTPRRAIELLKFGEVPISSEFDIAGLILYVGNTYLCNNKKKQWLFLTDGSKFVSGQGCEEQDCLLAVSFSSATTDEDSTLFSYTLSGNTVGFSNLVKRQKDETRQVWVAEATESSSYTLSNEIPRKSHLKEAAVLAERWASRSYHKIQELKERVLCIVGNAGV

SEQ ID NO: 165268 - protein, 1279 aa, Zea Mays
MFQSGSGKAVLLNKDSIQKARAVLEENVENAAGAKQPMFHTSTGRSVLVSKSSIDKARAVLGGRMIAHEGDVGGVDGMEQFPVSQAGSGNVEGPGRPANQSLIFQTSSGRPVLISKRYVERSRALLMDEDVKNIRQWDTGCQLPIFQTGLGRPVAVKHSSIKKASTILGDGDVKRSGNGHTGVCTTPFQFETPKSVLMSSSLIINGMTVTPEENTSVRAEKCFNDDGQLPLFQTGSGRSVTASKGSFKRASSVLEPRNIAKELEDESHLNDGYATSIFKTGLGKSILPTENSRERAQFVLEAKEAVKQAVISDIGAGFGENPMFHSGKQQFSPENDTSRPRASTPMEQGKFATKGYEDCGSPLPMFQTGSGKSVLVCESSMQKARAVLEEEEHYKLVKMDKKIAASASPLKTSHARTVNISSTGVSRAATLLGLEENTLSTQFFGHVSDKLGTEITVKRGNPEHMLDVASAHAISSGTHKGFIYPTENPTHMDKHQQFGFSKSSTSYVGEHSIRFSTAGGRSMAISVDALQRAKSLLGDSDLVVSPNGSIGRSLASAIENLPKPTISPKGDVSNLSYGTRAIGYAVPDTPVTKTSANQFHMGREYRPVNEIPKVPKPPSRCLSEGDNASNSKDKTQWHHMPAGPLVDITNYMATCSGNTDCLANGKRIIGGRNSVSPFKRPRSSRFITPIKNNKLSSAGESIVPPMQISPCRTMLSVRYPFQHQRKNYKEYFGGPPCFKYLTEHVTDDVKLMDARRAEKFRFQHMDTGAEEFQKMLLTCGASLSCATKEWVSNHYKWIVWKLASLERCYPTRVAGKFLTVDNVLEELKYRYSLDASLDVALLEQLEKRKLFVGQKLRVSGVVKLVVHINGTYRARWNDALGFCKHVGLPLAFRCIKVSGGRVPRTLVGITRIYPILYRERLPDGRFVVRSERMERKALELYHQRVSKITEDILFEQQENCDSTDDNEEGATICKMLEHAAEPEFILAGMTPEQLKCFSSYIEKQKIVKQNEVSEKVEKALVVAGLSSRDVTPFLKVRVIGLVNKHSASTSSNKEGLITIWNPTEMQKDNLVEGQAYSVMGLVPSNYCTEIMYLHARGSSTTWKPLASAQTTDFKPFFTPRRAIELLKFGEVPISSEFDIAGLILYVGNTYLCNNKKKQWLFLTDGSKFVSGQGCEEQDCLLAVSFSSATTDEDSTLFSYTLSGNTVGFSNLVKRQKDETRQVWVAEATESSSYTLSNEIPRKSHLKEAAVLAERWASRSYHKIQELKERVLCIVGNAGV

SEQ ID NO: 165269 - protein, 1213 aa, Zea Mays
MFQSGSGKAVLLNKDSIQKARAVLEENVENAAGAKQPMFHTSTGRSVLVSKSSIDKARAVLGGRMIAHEGNVEGPGRPANQSLIFQTSSGRPVLISKRYVERSRALLMDEDVKNIRQWDTGCQLPIFQTGLGRPVAVKHSSIKKASTILGDGDVKRSGNGHTGVCTTPFQFETPKSVLMSSSLIINGMTVTPEENTSVREKCFNDDGQLPLFQTGSGRSVTASKGSFKRASSVLEPRNIAKELEDESHLNDGYATSIFKTGLGKSILPTENSRERAQFVLEAKEAVKQVISDIGAGFGENPMFHSGKQQFSPENDTSRPRASTPMEQGKFATKGYEDCGSPLPMFQTGSGKSVLVCESSMQKARAVLEEEEHYKLVKMDKKIAASASPLKTSHARTVNISSTGVSRAATLLGLEENTLSTQFFGHVSDKLGTEITVKRGNPEHMLDVASAHAISSGTHKGFIYPTENPTHMDKHQQFGFSKSSTSYVGEHSIRFSTAGGRSMAISVDALQRAKSLLGDSDLVVSPNGSIGRSLASAIENLPKPTISPKGDVSNLSYGTRAIGYAVPDTPVTKTSANQFHMGREYRPVNEIPKVPKPPSRCLSEGDNASNSKDKTQWHHMPAGPLVDITNYMATCSGNTDCLANGKRIIGGRNSVSPFKRPRSSRFITPIKNNKLSSAGESIVPPMQISPCRTMLSVRYPFQHQRKNYKEYFGGPPCFKYLTEHVTDDVKLMDARRAEKFRFQHMDTGAEEFQKMLLTCGASLSCATKEWVSNHYKWIVWKLASLERCYPTRVAGKFLTVDNVLEELKYRYSLDASLDVALLEQLEKRKLFVGQKLRVSGVVKLVVHINGTYRARWNDALGFCKHVGLPLAFRCIKVSGGRVPRTLVGITRIYPILYRERLPDGRFVVRSERMERKALELYHQRVSKITEDILFEQQENCDSTDDNEEGATICKMLEHAAEPEFILAGMTPEQLKCFSSYIEKQKIVKQNEVSEKVEKALVVAGLSSRDVTPFLKVRVIGLVNKHSASTSSNKEGLITIWNPTEMQKDNLVEGQAYSVMGLVPSNYCTEIMYLHARGSSTTWKPLASAQTTDFKPFFTPRRAIELLKFGEVPISSEFDIAGLILYVGNTYLCNNKKKQWLFLTDGSKFVSGQGCEEQDCLLAVSFSSATTDEDSTLFSYTLSGNTVCFILILYVEFLFLVLKPLDGTPVWEIYC

SEQ ID NO: 165270 - protein, 1245 aa, Zea Mays
MDGLAQSVNTAGLFSTGSGRPLAVSQRAVRRASALVGEEVDEATDNNNKKRKKPFGCDAGLEGELANLHVPFGGGVHKDNFFPMFQSGSGKAVLLNKDSIQKARAVLEENVENAAGAKQPMFHTSTGRSVLVSKSSIDKARAVLGGRMIAHEGDVGGVDGMEQFPVSQAGSGNVEGPGRPANQSLIFQTSSGRPVLISKRYVERSRALLMDEDVKNIRQWDTGCQLPIFQTGLGRPVAVKHSSIKKASTILGDGDVKRSGNGHTGVCTTPFQFETPKSVLMSSSLIINGMTVTPEENTSVRAEKCFNDDGQLPLFQTGSGRSVTASKGSFKRASSVLEPRNIAKELEDESHLNDGYATSIFKTGLGKSILPTENSRERAQFVLEAKEAVKQVISDIGAGFGENPMFHSGKQQFSPENDTSRPRASTPMEQGKFATKGYEDCGSPLPMFQTGSGKSVLVCESSMQKARAVLEEEEHYKLVKMDKKIAASASPLKTSHARTVNISSTGVSRAATLLGLEENTLSTQFFGHVSDKLGTEITVKRGNPEHMLDVASAHAISSGTHKGFIYPTENPTHMDKHQQFGFSKSSTSYVGEHSIRFSTAGGRSMAISVDALQRAKSLLGDSDLVVSPNGSIGRSLASAIENLPKPTISPKGDVSNLSYGTRAIGYAVPDTPVTKTSANQFHMGREYRPVNEIPKVPKPPSRCLSEGDNASNSKDKTQWHHMPAGSGNTDCLANGKRIIGGRNSVSPFKRPRSSRWVSNHYKWIVWKLASLERCYPTRVAGKFLTVDNVLEELKYRYSLDASLDVALLEQLEKRKLFVGQKLRVSGVVKLVVHINGTYRARWNDALGFCKHVGLPLAFRCIKVSGGRVPRTLVGITRIYPILYRERLPDGRFVVRSERMERKALELYHQRVSKITEDILFEQQENCDSTDDNEEGATICKMLEHAAEPEFILAGMTPEQLKCFSSYIEKQKIVKQNEVSEKVEKALVVAGLSSRDVTPFLKVRVIGLVNKHSASTSSNKEGLITIWNPTEMQKDNLVEGQAYSVMGLVPSNYCTEIMYLHARGSSTTWKPLASAQTTDFKPFFTPRRAIELLKFGEVPISSEFDIAGLILYVGNTYLCNNKKKQWLFLTDGSKFVSGQGCEEQDCLLAVSFSSATTDEDSTLFSYTLSGNTVGFSNLVKRQKDETRQVWVAEATESSSYTLSNEIPRKSHLKEAAVLAERWASRSYHKIQELKERVLCIVGNAGV

SEQ ID NO: 165271 - protein, 972 aa, Zea Mays
MDGLAQSVNTAGLFSTGSGRPLAVSQRAVRRASALVGEEVDEATDNNNKKRSGVHKDNFFPMFQSGSGKAVLLNKDSIQKARAVLEENVENAAGAKQPMFHTSTGRSVLVSKSSIDKARAVLGGRMIAHEGNVEGPGRPANQSLIFQTSSGRPVLISKRYVERSRALLMDEDVKNIRQWDTGCQLPIFQTGLGRPVAVKHSSIKKASTILGDGDVKRSGNGHTGVCTTPFQFETPKSVLMSSSLIINGMTVTPEENTSVREKCFNDDGQLPLFQTGSGRSVTASKGSFKRASSVLEPRNIAKELEDESHLNDGYATSIFKTGLGKSILPTENSRERAQFVLEAKEAVKQAVISDIGAGFGENPMFHSGKQQFSPENDTSRPRASTPMEQGKFATKGYEDCGSPLPMFQTGSGKSVLVCESSMQKARAVLEEEEHYKLVKMDKKIAASASPLKTSHARTVNISSTGVSRAATLLGLEENTLSTQFFGHVSDKLGTEITVKRGNPEHMLDVASAHAISSGTHKGFIYPTENPTHMDKHQQFGFSKSSTSYVGEHSIRFSTAGGRSMAISVDALQRAKSLLGDSDLVVSPNGSIGRSLASAIENLPKPTISPKGDVSNLSYGTRAIGYAVPDTPVTKTSANQFHMGREYRPVNEIPKVPKPPSRCLSEGDNASNSKDKTQWHHMPAGSGNTDCLANGKRIIGGRNSVSPFKRPRSSRWVSNHYKWIVWKLASLERCYPTRVAGKFLTVDNVLEELKYRYSLDASLDVALLEQLEKRKLFVGQKLRIWGASLCGWSGPVSFHEVSGVVKLVVHINGTYRARWNDALGFCKHVGLPLAFRCIKVSGGRVPRTLVGITRIYPILYRERLPDGRFVVRSERMERKALELYHQRVSKITEDILFEQQENCDSTDDNEEGATICKMLEHAAEPEFILAGMTPEQLKCFSSYIEKQKVSSLASVGSYLHGKLHMLCRYAADC

SEQ ID NO: 165272 - protein, 1238 aa, Zea Mays
MADLLLQAREQLIEGDAMDGLAQSVNTAGLFSTGSGRPLAVSQRAVRRASALVGEEVDEATDNNNKKRSGVHKDNFFPMFQSGSGKAVLLNKDSIQKARAVLEENVENAAGAKQPMFHTSTGRSVLVSKSSIDKARAVLGGRMIAHEGNVEGPGRPANQSLIFQTSSGRPVLISKRYVERSRALLMDEDVKNIRQWDTGCQLPIFQTGLGRPVAVKHSSIKKASTILGDGDVKRSGNGHTGVCTTPFQFETPKSVLMSSSLIINGMTVTPEENTSVRAEKCFNDDGQLPLFQTGSGRSVTASKGSFKRASSVLEPRNIAKELEDESHLNDGYATSIFKTGLGKSILPTENSRERAQFVLEAKEAVKQVISDIGAGFGENPMFHSGKQQFSPENDTSRPRASTPMEQGKFATKGYEDCGSPLPMFQTGSGKSVLVCESSMQKARAVLEEEEHYKLVKMDKKIAASASPLKTSHARTVNISSTGVSRAATLLGLEENTLSTQFFGHVSDKLGTEITVKRGNPEHMLDVASAHAISSGTHKGFIYPTENPTHMDKHQQFGFSKSSTSYVGEHSIRFSTAGGRSMAISVDALQRAKSLLGDSDLVVSPNGSIGRSLASAIENLPKPTISPKGDVSNLSYGTRAIGYAVPDTPVTKTSANQFHMGREYRPVNEIPKVPKPPSRCLSEGDNASNSKDKTQWHHMPAGSGNTDCLANGKRIIGGRNSVSPFKRPRSSRWVSNHYKWIVWKLASLERCYPTRVAGKFLTVDNVLEELKYRYSLDASLDVALLEQLEKRKLFVGQKLRIWGASLCGWSGPVSFHEVSGVVKLVVHINGTYRARWNDALGFCKHVGLPLAFRCIKVSGGRVPRTLVGITRIYPILYRERLPDGRFVVRSERMERKALELYHQRVSKITEDILFEQQENCDSTDDNEEGATICKMLEHAAEPEFILAGMTPEQLKCFSSYIEKQKIVKQNEVSEKVEKALVVAGLSSRDVTPFLKVRVIGLVNKHSASTSSNKEGLITIWNPTEMQKDNLVEGQAYSVMGLVPSNYCTEIMYLHARGSSTTWKPLASAQTTDFKPFFTPRRAIELLKFGEVPISSEFDIAGLILYVGNTYLCNNKKKQWLFLTDGSKFVSGQGCEEQDCLLAVSFSSATTDEDSTLFSYTLSGNTVGFSNLVKRQKDETRQVWVAEATESSSYTLSNEIPRKSHLKEAAVLAERWASRSYHKIQELKERVLCIVGNAGV

SEQ ID NO: 165273 - protein, 1360 aa, Zea Mays
MADLLLQAREQLIEGDAMDGLAQSVNTAGLFSTGSGRPLAVSQRAVRRASALVGEEVDEATDNNNKKRSGVHKDNFFPMFQSGSGKAVLLNKDSIQKARAVLEENVENAAGAKQPMFHTSTGRSVLVSKSSIDKARAVLGGRMIAHEGDVGGVDGMEQFPVSQAGSGNVEGPGRPANQSLIFQTSSGRPVLISKRYVERSRALLMDEDVKNIRQWDTGCQLPIFQTGLGRPVAVKHSSIKKASTILGDGDVKRSGNGHTGVCTTPFQFETPKSVLMSSSLIINGMTVTPEENTSVRAEKCFNDDGQLPLFQTGSGRSVTASKGSFKRASSVLEPRNIAKELEDESHLNDGYATSIFKTGLGKSILPTENSRERAQFVLEAKEAVKQAATLLGLEENTLSTQFFGHVSDKLGTEITVKRGNPEHMLDVASAHAISSGTHKGFIYPTENPTHMDKHQQFGFSKSSTSYVGEHSIRFSTAGGRSMAISVDALQRAKSLLGDSDLVVSPNGSIGRSLASAIENLPKPTISPKGDVSNLSYGTRAIGYAVPDTPVTKTSANQFHMGREYRPVNEIPKVPKPPSRCLSEGDNASNSKDKTQWHHMPAGPLVDITNYMATCSGNTDCLANGKRIIGGRNSVSPFKRPRSSRFITPIKNNKLSSAGESIVPPMQISPCRTMLSVRYPFQHQRKNYKEYFGGPPCFKYLTEHVTDDVKLMDARRAEKFRFQHMDTGAEEFQKMLLTCGASLSCATKEWVSNHYKWIVWKLASLERCYPTRVAGKFLTVDNVLEELKYRYDREVNHGHRSAIKKILEGNSSPSLMMVLCISAIYSCPYQNNNKLEVNKVDTNEDNSGNQSFSATNRNMSANIELTDGWYVVVFTLLHCIETESHQQVPCWLLHRYSLDASLDVALLEQLEKRKLFVGQKLRIWGASLCGWSGPVSFHEVSGVVKLVVHINGTYRARWNDALGFCKHVGLPLAFRCIKVSGGRVPRTLVGITRIYPILYRERLPDGRFVVRSERMERKALELYHQRVSKITEDILFEQQENCDSTDDNEEGATICKMLEHAAEPEFILAGMTPEQLKCFSSYIEKQKIVKQNEVSEKVEKALVVAGLSSRDVTPFLKVRVIGLVNKHSASTSSNKEGLITIWNPTEMQKDNLVEGQAYSVMGLVPSNYCTEIMYLHARGSSTTWKPLASAQTTDFKPFFTPRRAIELLKFGEVPISSEFDIAGLILYVGNTYLCNNKKKQWLFLTDGSKFVSGQGCEEQDCLLAVSFSSATTDEDSTLFSYTLSGNTVGFSNLVKRQKDETRQVWVAEATESSSYTLSNEIPRKSHLKEAAVLAERWASRSYHKIQELKERVLCIVGNAGV

SEQ ID NO: 165274 - protein, 1563 aa, Zea Mays
MPSKWQVWGQPDGSIVWLPVSDAPPNPPRPGPLRPAPRHPPLPDEAPIEETLCPDTAGGCRISSMADLLLQAREQLIEGDAMDGLAQSVNTAGLFSTGSGRPLAVSQRAVRRASALVGEEVDEATDNNNKKRKKPFGCDAGLEGELANLHVPFGGGVHKDNFFPMFQSGSGKAVLLNKDSIQKARAVLEENVENAAGAKQPMFHTSTGRSVLVSKSSIDKARAVLGGRMIAHEGDVGGVDGMEQFPVSQAGSGNVEGPGRPANQSLIFQTSSGRPVLISKRYVERSRALLMDEDVKNIRQWDTGCQLPIFQTGLGRPVAVKHSSIKKASTILGDGDVKRSGNGHTGVCTTPFQFETPKSVLMSSSLIINGMTVTPEENTSVREKCFNDDGQLPLFQTGSGRSVTASKGSFKRASSVLEPRNIAKELEDESHLNDGYATSIFKTGLGKSILPTENSRERAQFVLEAKEAVKQVISDIGAGFGENPMFHSGKQQFSPENDTSRPRASTPMEQGKFATKGYEDCGSPLPMFQTGSGKSVLVCESSMQKARAVLEEEEHYKLVKMDKKIAASASPLKTSHARTVNISSTGVSRAATLLGLEENTLSTQFFGHVSDKLGTEITVKRGNPEHMLDVASAHAISSGTHKGFIYPTENPTHMDKHQQFGFSKSSTSYVGEHSIRFSTAGGRSMAISVDALQRAKSLLGDSDLVVSPNGSIGRSLASAIENLPKPTISPKGDVSNLSYGTRAIGYAVPDTPVTKTSANQFHMGREYRPVNEIPKVPKPPSRCLSEGDNASNSKDKTQWHHMPAGPLVDITNYMATCSGNTDCLANGKRIIGGRNSVSPFKRPRSSRFITPIKNNKLSSAGESIVPPMQISPCRTMLSVRYPFQHQRKNYKEYFGGPPCFKYLTEHVTDDVKLMDARRAEKFRFQHMDTGAEEFQKMLLTCGASLSCATKEWVSNHYKWIVWKLASLERCYPTRVAGKFLTVDNVLEELKYRYDREVNHGHRSAIKKILEGNSSPSLMMVLCISAIYSCPYQNNNKLEVNKVDTNEDNSGNQSFSATNRNMSANIELTDGWYVVVFTLLHCIETESHQQVPCWLLHRYSLDASLDVALLEQLEKRKLFVGQKLRIWGASLCGWSGPVSFHEVSGVVKLVVHINGTYRARWNDALGFCKHVGLPLAFRCIKVSGGRVPRTLVGITRIYPILYRERLPDGRFVVRSERMERKALELYHQRVSKITEDILFEQQENCDSTDDNEEGATICKMLEHAAEPEFILAGMTPEQLKCFSSYIEKQKIVKQNEVSEKVEKALVVAGLSSRDVTPFLKVRVIGLVNKHSASTSSNKEGLITIWNPTEMQKDNLVEGQAYSVMGLVPSNYCTEIMYLHARGSSTTWKPLASAQTTDFKPFFTPRRAIELLKFGEVPISSEFDIAGLILYVGNTYLCNNKKKQWLFLTDGSKFVSGQGCEEQDCLLAVSFSSATTDEDSTLFSYTLSGNTVGFSNLVKRQKDETRQVWVAEATESSSYTLSNEIPRKSHLKEAAVLAERWASRSYHKIQELKERVLCIVGNAGV

SEQ ID NO: 165275 - protein, 1325 aa, Zea Mays
MPSKWQVWGQPDGSIVWLPVSDAPPNPPRPGPLRPAPRHPPLPDEAPIEETLCPDTAGGCRISSMADLLLQAREQLIEGDAMDGLAQSVNTAGLFSTGSGRPLAVSQRAVRRASALVGEEVDEATDNNNKKRKKPFGCDAGLEGELANLHVPFGGGVHKDNFFPMFQSGSGKAVLLNKDSIQKARAVLEENVENAAGAKQPMFHTSTGRSVLVSKSSIDKARAVLGGRMIAHEGNVEGPGRPANQSLIFQTSSGRPVLISKRYVERSRALLMDEDVKNIRQWDTGCQLPIFQTGLGRPVAVKHSSIKKASTILGDGDVKRSGNGHTGVCTTPFQFETPKSVLMSSSLIINGMTVTPEENTSVRAEKCFNDDGQLPLFQTGSGRSVTASKGSFKRASSVLEPRNIAKELEDESHLNDGYATSIFKTGLGKSILPTENSRERAQFVLEAKEAVKQAVISDIGAGFGENPMFHSGKQQFSPENDTSRPRASTPMEQGKFATKGYEDCGSPLPMFQTGSGKSVLVCESSMQKARAVLEEEEHYKLVKMDKKIAASASPLKTSHARTVNISSTGVSRAATLLGLEENTLSTQFFGHVSDKLGTEITVKRGNPEHMLDVASAHAISSGTHKGFIYPTENPTHMDKHQQFGFSKSSTSYVGEHSIRFSTAGGRSMAISVDALQRAKSLLGDSDLVVSPNGSIGRSLASAIENLPKPTISPKGDVSNLSYGTRAIGYAVPDTPVTKTSANQFHMGREYRPVNEIPKVPKPPSRCLSEGDNASNSKDKTQWHHMPAGSGNTDCLANGKRIIGGRNSVSPFKRPRSSRWVSNHYKWIVWKLASLERCYPTRVAGKFLTVDNVLEELKYRYSLDASLDVALLEQLEKRKLFVGQKLRIWGASLCGWSGPVSFHEVSGVVKLVVHINGTYRARWNDALGFCKHVGLPLAFRCIKVSGGRVPRTLVGITRIYPILYRERLPDGRFVVRSERMERKALELYHQRVSKITEDILFEQQENCDSTDDNEEGATICKMLEHAAEPEFILAGMTPEQLKCFSSYIEKQKIVKQNEVSEKVEKALVVAGLSSRDVTPFLKVRVIGLVNKHSASTSSNKEGLITIWNPTEMQKDNLVEGQAYSVMGLVPSNYCTEIMYLHARGSSTTWKPLASAQTTDFKPFFTPRRAIELLKFGEVPISSEFDIAGLILYVGNTYLCNNKKKQWLFLTDGSKFVSGQGCEEQDCLLAVSFSSATTDEDSTLFSYTLSGNTVGFSNLVKRQKDETRQVWVAEATESSSYTLSNEIPRKSHLKEAAVLAERWASRSYHKIQELKERVLCIVGNAGV

SEQ ID NO: 165276 - protein, 1423 aa, Zea Mays
MPSKWQVWGQPDGSIVWLPVSDAPPNPPRPGPLRPAPRHPPLPDEAPIEETLCPDTAGGCRISSMADLLLQAREQLIEGDAMDGLAQSVNTAGLFSTGSGRPLAVSQRAVRRASALVGEEVDEATDNNNKKRKKPFGCDAGLEGELANLHVPFGGGVHKDNFFPMFQSGSGKAVLLNKDSIQKARAVLEENVENAAGAKQPMFHTSTGRSVLVSKSSIDKARAVLGGRMIAHEGNVEGPGRPANQSLIFQTSSGRPVLISKRYVERSRALLMDEDVKNIRQWDTGCQLPIFQTGLGRPVAVKHSSIKKASTILGDGDVKRSGNGHTGVCTTPFQFETPKSVLMSSSLIINGMTVTPEENTSVRAEKCFNDDGQLPLFQTGSGRSVTASKGSFKRASSVLEPRNIAKELEDESHLNDGYATSIFKTGLGKSILPTENSRERAQFVLEAKEAVKQVISDIGAGFGENPMFHSGKQQFSPENDTSRPRASTPMEQGKFATKGYEDCGSPLPMFQTGSGKSVLVCESSMQKARAVLEEEEHYKLVKMDKKIAASASPLKTSHARTVNISSTGVSRAATLLGLEENTLSTQFFGHVSDKLGTEITVKRGNPEHMLDVASAHAISSGTHKGFIYPTENPTHMDKHQQFGFSKSSTSYVGEHSIRFSTAGGRSMAISVDALQRAKSLLGDSDLVVSPNGSIGRSLASAIENLPKPTISPKGDVSNLSYGTRAIGYAVPDTPVTKTSANQFHMGREYRPVNEIPKVPKPPSRCLSEGDNASNSKDKTQWHHMPAGPLVDITNYMATCSGNTDCLANGKRIIGGRNSVSPFKRPRSSRFITPIKNNKLSSAGESIVPPMQISPCRTMLSVRYPFQHQRKNYKEYFGGPPCFKYLTEHVTDDVKLMDARRAEKFRFQHMDTGAEEFQKMLLTCGASLSCATKEWVSNHYKWIVWKLASLERCYPTRVAGKFLTVDNVLEELKYRYSLDASLDVALLEQLEKRKLFVGQKLRVSGVVKLVVHINGTYRARWNDALGFCKHVGLPLAFRCIKVSGGRVPRTLVGITRIYPILYRERLPDGRFVVRSERMERKALELYHQRVSKITEDILFEQQENCDSTDDNEEGATICKMLEHAAEPEFILAGMTPEQLKCFSSYIEKQKIVKQNEVSEKVEKALVVAGLSSRDVTPFLKVRVIGLVNKHSASTSSNKEGLITIWNPTEMQKDNLVEGQAYSVMGLVPSNYCTEIMYLHARGSSTTWKPLASAQTTDFKPFFTPRRAIELLKFGEVPISSEFDIAGLILYVGNTYLCNNKKKQWLFLTDGSKFVSGQGCEEQDCLLAVSFSSATTDEDSTLFSYTLSGNTVGFSNLVKRQKDETRQVWVAEATESSSYTLSNEIPRKSHLKEAAVLAERWASRSYHKIQELKERVLCIVGNAGV

SEQ ID NO: 165277 - protein, 1308 aa, Zea Mays
MPSKWQVWGQPDGSIVWLPVSDAPPNPPRPGPLRPAPRHPPLPDEAPIEETLCPDTAGGCRISSMADLLLQAREQLIEGDAMDGLAQSVNTAGLFSTGSGRPLAVSQRAVRRASALVGEEVDEATDNNNKKRKKPFGCDAGLEGELANLHVPFGGGVHKDNFFPMFQSGSGKAVLLNKDSIQKARAVLEENVENAAGAKQPMFHTSTGRSVLVSKSSIDKARAVLGGRMIAHEGDVGGVDGMEQFPVSQAGSGNVEGPGRPANQSLIFQTSSGRPVLISKRYVERSRALLMDEDVKNIRQWDTGCQLPIFQTGLGRPVAVKHSSIKKASTILGDGDVKRSGNGHTGVCTTPFQFETPKSVLMSSSLIINGMTVTPEENTSVRAEKCFNDDGQLPLFQTGSGRSVTASKGSFKRASSVLEPRNIAKELEDESHLNDGYATSIFKTGLGKSILPTENSRERAQFVLEAKEAVKQVISDIGAGFGENPMFHSGKQQFSPENDTSRPRASTPMEQGKFATKGYEDCGSPLPMFQTGSGKSVLVCESSMQKARAVLEEEEHYKLVKMDKKIAASASPLKTSHARTVNISSTGVSRAATLLGLEENTLSTQFFGHVSDKLENPTHMDKHQQFGFSKSSTSYVGEHSIRFSTAGGRSMAISVDALQRAKSLLGDSDLVVSPNGSIGRSLASAIENLPKPTISPKGDVSNLSYGTRAIGYAVPDTPVTKTSANQFHMGREYRPVNEIPKVPKPPSRCLSEGDNASNSKDKTQWHHMPAGSGNTDCLANGKRIIGGRNSVSPFKRPRSSRWVSNHYKWIVWKLASLERCYPTRVAGKFLTVDNVLEELKYRYSLDASLDVALLEQLEKRKLFVGQKLRIWGASLCGWSGPVSFHEVSGVVKLVVHINGTYRARWNDALGFCKHVGLPLAFRCIKVSGGRVPRTLVGITRIYPILYRERLPDGRFVVRSERMERKALELYHQRVSKITEDILFEQQENCDSTDDNEEGATICKMLEHAAEPEFILAGMTPEQLKCFSSYIEKQKIVKQNEVSEKVEKALVVAGLSSRDVTPFLKVRVIGLVNKHSASTSSNKEGLITIWNPTEMQKDNLVEGQAYSVMGLVPSNYCTEIMYLHARGSSTTWKPLASAQTTDFKPFFTPRRAIELLKFGEVPISSEFDIAGLILYVGNTYLCNNKKKQWLFLTDGSKFVSGQGCEEQDCLLAVSFSSATTDEDSTLFSYTLSGNTVGFSNLVKRQKDETRQVWVAEATESSSYTLSNEIPRKSHLKEAAVLAERWASRSYHKIQELKERVLCIVGNAGV

SEQ ID NO: 165278 - protein, 1324 aa, Zea Mays
MPSKWQVWGQPDGSIVWLPVSDAPPNPPRPGPLRPAPRHPPLPDEAPIEETLCPDTAGGCRISSMADLLLQAREQLIEGDAMDGLAQSVNTAGLFSTGSGRPLAVSQRAVRRASALVGEEVDEATDNNNKKRKKPFGCDAGLEGELANLHVPFGGGVHKDNFFPMFQSGSGKAVLLNKDSIQKARAVLEENVENAAGAKQPMFHTSTGRSVLVSKSSIDKARAVLGGRMIAHEGNVEGPGRPANQSLIFQTSSGRPVLISKRYVERSRALLMDEDVKNIRQWDTGCQLPIFQTGLGRPVAVKHSSIKKASTILGDGDVKRSGNGHTGVCTTPFQFETPKSVLMSSSLIINGMTVTPEENTSVRAEKCFNDDGQLPLFQTGSGRSVTASKGSFKRASSVLEPRNIAKELEDESHLNDGYATSIFKTGLGKSILPTENSRERAQFVLEAKEAVKQVISDIGAGFGENPMFHSGKQQFSPENDTSRPRASTPMEQGKFATKGYEDCGSPLPMFQTGSGKSVLVCESSMQKARAVLEEEEHYKLVKMDKKIAASASPLKTSHARTVNISSTGVSRAATLLGLEENTLSTQFFGHVSDKLGTEITVKRGNPEHMLDVASAHAISSGTHKGFIYPTENPTHMDKHQQFGFSKSSTSYVGEHSIRFSTAGGRSMAISVDALQRAKSLLGDSDLVVSPNGSIGRSLASAIENLPKPTISPKGDVSNLSYGTRAIGYAVPDTPVTKTSANQFHMGREYRPVNEIPKVPKPPSRCLSEGDNASNSKDKTQWHHMPAGSGNTDCLANGKRIIGGRNSVSPFKRPRSSRWVSNHYKWIVWKLASLERCYPTRVAGKFLTVDNVLEELKYRYSLDASLDVALLEQLEKRKLFVGQKLRIWGASLCGWSGPVSFHEVSGVVKLVVHINGTYRARWNDALGFCKHVGLPLAFRCIKVSGGRVPRTLVGITRIYPILYRERLPDGRFVVRSERMERKALELYHQRVSKITEDILFEQQENCDSTDDNEEGATICKMLEHAAEPEFILAGMTPEQLKCFSSYIEKQKIVKQNEVSEKVEKALVVAGLSSRDVTPFLKVRVIGLVNKHSASTSSNKEGLITIWNPTEMQKDNLVEGQAYSVMGLVPSNYCTEIMYLHARGSSTTWKPLASAQTTDFKPFFTPRRAIELLKFGEVPISSEFDIAGLILYVGNTYLCNNKKKQWLFLTDGSKFVSGQGCEEQDCLLAVSFSSATTDEDSTLFSYTLSGNTVGFSNLVKRQKDETRQVWVAEATESSSYTLSNEIPRKSHLKEAAVLAERWASRSYHKIQELKERVLCIVGNAGV

SEQ ID NO: 165279 - protein, 739 aa, Zea Mays
MFQSGSGKAVLLNKDSIQKARAVLEENVENAAGAKQPMFHTSTGRSVLVSKSSIDKARAVLGGRMIAHEGNVEGPGRPANQSLIFQTSSGRPVLISKRYVERSRALLMDEDVKNILFTSLCEGQWDTGCQLPIFQTGLGRPVAVKHSSIKKTGSGRSVTASKGSFKRASSVLEPRNIAKELEDESHLNDGYATSIFKTGLGKSILPTENSRERAQFVLEAKEAVKQVISDIGAGFGENPMFHSGKQQFSPENDTSRPRASTPMEQGKFATKGYEDCGSPLPMFQTGSGKSVLVCESSMQKARAVLEEEEHYKLVKMDKKIAASASPLKTSHARTVNISSTGVSRAATLLGLEENTLSTQFFGHVSDKLGTEITVKRGNPEHMLDVASAHAISSGTHKGFIYPTENPTHMDKHQQFGFSKSSTSYVGEHSIRFSTAGGRSMAISVDALQRAKSLLGDSDLVVSPNGSIGRSLASAIENLPKPTISPKGDVSNLSYGTRAIGYAVPDTPVTKTSANQFHMGREYRPVNEIPKVPKPPSRCLSEGDNASNSKDKTQWHHMPAGPLVDITNYMATCSGNTDCLANGKRIIGGRNSVSPFKRPRSSRFITPIKNNKLSSAGESIVPPMQISPCRTMLSVRYPFQHQRKNYKEYFGGPPCFKYLTEHVTDDVKLMDARRAEKFRFQHMDTGAEEFQKMLLTCGASLSCATKDFPVLDGSVTTINGLCGSLLHLRGATQLELLVNS

SEQ ID NO: 165280 - protein, 1045 aa, Zea Mays
MPSKWQVWGQPDGSIVWLPVSDAPPNPPRPGPLRPAPRHPPLPDEAPIEETLCPDTAGGCRISSMADLLLQAREQLIEGDAMDGLAQSVNTAGLFSTGSGRPLAVSQRAVRRASALVGEEVDEATDNNNKKRSGVHKDNFFPMFQSGSGKAVLLNKDSIQKARAVLEENVENAAGAKQPMFHTSTGRSVLVSKSSIDKARAVLGGRMIAHEGDVGGVDGMEQFPVSQAGSGNVEGPGRPANQSLIFQTSSGRPVLISKRYVERSRALLMDEDVKNIRQWDTGCQLPIFQTGLGRPVAVKHSSIKKASTILGDGDVKRSGNGHTGVCTTPFQFETPKSVLMSSSLIINGMTVTPEENTSVREKCFNDDGQLPLFQTGSGRSVTASKGSFKRASSVLEPRNIAKELEDESHLNDGYATSIFKTGLGKSILPTENSRERAQFVLEAKEAVKQVISDIGAGFGENPMFHSGKQQFSPENDTSRPRASTPMEQGKFATKGYEDCGSPLPMFQTGSGKSVLVCESSMQKARAVLEEEEHYKLVKMDKKIAASASPLKTSHARTVNISSTGVSRAATLLGLEENTLSTQFFGHVSDKLGTEITVKRGNPEHMLDVASAHAISSGTHKGFIYPTENPTHMDKHQQFGFSKSSTSYVGEHSIRFSTAGGRSMAISVDALQRAKSLLGDSDLVVSPNGSIGRSLASAIENLPKPTISPKGDVSNLSYGTRAIGYAVPDTPVTKTSANQFHMGREYRPVNEIPKVPKPPSRCLSEGDNASNSKDKTQWHHMPAGPLVDITNYMATCSGNTDCLANGKRIIGGRNSVSPFKRPRSSRFITPIKNNKLSSAGESIVPPMQISPCRTMLSVRYPFQHQRKNYKEYFGGPPCFKYLTEHVTDDVKLMDARRAEKFRFQHMDTGAEEFQKMLLTCGASLSCATKEWVSNHYKWIVWKLASLERCYPTRVAGKFLTVDNVLEELKYRYDREVNHGHRSAIKKILEGNSSPSLMMVLCISAIYSCPYQNNNKLEVNKVDTNEDNSGNQSFSATNRNMSANIEL

SEQ ID NO: 165281 - protein, 1068 aa, Zea Mays
MPSKWQVWGQPDGSIVWLPVSDAPPNPPRPGPLRPAPRHPPLPDEAPIEETLCPDTAGGCRISSMADLLLQAREQLIEGDAMDGLAQSVNTAGLFSTGSGRPLAVSQRAVRRASALVGEEVDEATDNNNKKRKKPFGCDAGLEGELANLHVPFGGGVHKDNFFPMFQSGSGKAVLLNKDSIQKARAVLEENVENAAGAKQPMFHTSTGRSVLVSKSSIDKARAVLGGRMIAHEGDVGGVDGMEQFPVSQAGSGNVEGPGRPANQSLIFQTSSGRPVLISKRYVERSRALLMDEDVKNIRQWDTGCQLPIFQTGLGRPVAVKHSSIKKASTILGDGDVKRSGNGHTGVCTTPFQFETPKSVLMSSSLIINGMTVTPEENTSVRAEKCFNDDGQLPLFQTGSGRSVTASKGSFKRASSVLEPRNIAKELEDESHLNDGYATSIFKTGLGKSILPTENSRERAQFVLEAKEAVKQAVISDIGAGFGENPMFHSGKQQFSPENDTSRPRASTPMEQGKFATKGYEDCGSPLPMFQTGSGKSVLVCESSMQKARAVLEEEEHYKLVKMDKKIAASASPLKTSHARTVNISSTGVSRAATLLGLEENTLSTQFFGHVSDKLGTEITVKRGNPEHMLDVASAHAISSGTHKGFIYPTENPTHMDKHQQFGFSKSSTSYVGEHSIRFSTAGGRSMAISVDALQRAKSLLGDSDLVVSPNGSIGRSLASAIENLPKPTISPKGDVSNLSYGTRAIGYAVPDTPVTKTSANQFHMGREYRPVNEIPKVPKPPSRCLSEGDNASNSKDKTQWHHMPAGPLVDITNYMATCSGNTDCLANGKRIIGGRNSVSPFKRPRSSRFITPIKNNKLSSAESIVPPMQISPCRTMLSVRYPFQHQRKNYKEYFGGPPCFKYLTEHVTDDVKLMDARRAEKFRFQHMDTGAEEFQKMLLTCGASLSCATKEWVSNHYKWIVWKLASLERCYPTRVAGKFLTVDNVLEELKYRYDREVNHGHRSAIKKILEGNSSPSLMMVLCISAIYSCPYQNNNKLEVNKVDTNEDNSGNQSFSATNRNMSANIEL

SEQ ID NO: 165282 - protein, 1046 aa, Zea Mays
MPSKWQVWGQPDGSIVWLPVSDAPPNPPRPGPLRPAPRHPPLPDEAPIEETLCPDTAGGCRISSMADLLLQAREQLIEGDAMDGLAQSVNTAGLFSTGSGRPLAVSQRAVRRASALVGEEVDEATDNNNKKRSGVHKDNFFPMFQSGSGKAVLLNKDSIQKARAVLEENVENAAGAKQPMFHTSTGRSVLVSKSSIDKARAVLGGRMIAHEGDVGGVDGMEQFPVSQAGSGNVEGPGRPANQSLIFQTSSGRPVLISKRYVERSRALLMDEDVKNIRQWDTGCQLPIFQTGLGRPVAVKHSSIKKASTILGDGDVKRSGNGHTGVCTTPFQFETPKSVLMSSSLIINGMTVTPEENTSVREKCFNDDGQLPLFQTGSGRSVTASKGSFKRASSVLEPRNIAKELEDESHLNDGYATSIFKTGLGKSILPTENSRERAQFVLEAKEAVKQAVISDIGAGFGENPMFHSGKQQFSPENDTSRPRASTPMEQGKFATKGYEDCGSPLPMFQTGSGKSVLVCESSMQKARAVLEEEEHYKLVKMDKKIAASASPLKTSHARTVNISSTGVSRAATLLGLEENTLSTQFFGHVSDKLGTEITVKRGNPEHMLDVASAHAISSGTHKGFIYPTENPTHMDKHQQFGFSKSSTSYVGEHSIRFSTAGGRSMAISVDALQRAKSLLGDSDLVVSPNGSIGRSLASAIENLPKPTISPKGDVSNLSYGTRAIGYAVPDTPVTKTSANQFHMGREYRPVNEIPKVPKPPSRCLSEGDNASNSKDKTQWHHMPAGPLVDITNYMATCSGNTDCLANGKRIIGGRNSVSPFKRPRSSRFITPIKNNKLSSAGESIVPPMQISPCRTMLSVRYPFQHQRKNYKEYFGGPPCFKYLTEHVTDDVKLMDARRAEKFRFQHMDTGAEEFQKMLLTCGASLSCATKEWVSNHYKWIVWKLASLERCYPTRVAGKFLTVDNVLEELKYRYDREVNHGHRSAIKKILEGNSSPSLMMVLCISAIYSCPYQNNNKLEVNKVDTNEDNSGNQSFSATNRNMSANIEL

SEQ ID NO: 165283 - protein, 1028 aa, Zea Mays
MPSKWQVWGQPDGSIVWLPVSDAPPNPPRPGPLRPAPRHPPLPDEAPIEETLCPDTAGGCRISSMADLLLQAREQLIEGDAMDGLAQSVNTAGLFSTGSGRPLAVSQRAVRRASALVGEEVDEATDNNNKKRSGVHKDNFFPMFQSGSGKAVLLNKDSIQKARAVLEENVENAAGAKQPMFHTSTGRSVLVSKSSIDKARAVLGGRMIAHEGNVEGPGRPANQSLIFQTSSGRPVLISKRYVERSRALLMDEDVKNIRQWDTGCQLPIFQTGLGRPVAVKHSSIKKASTILGDGDVKRSGNGHTGVCTTPFQFETPKSVLMSSSLIINGMTVTPEENTSVRAEKCFNDDGQLPLFQTGSGRSVTASKGSFKRASSVLEPRNIAKELEDESHLNDGYATSIFKTGLGKSILPTENSRERAQFVLEAKEAVKQAVISDIGAGFGENPMFHSGKQQFSPENDTSRPRASTPMEQGKFATKGYEDCGSPLPMFQTGSGKSVLVCESSMQKARAVLEEEEHYKLVKMDKKIAASASPLKTSHARTVNISSTGVSRAATLLGLEENTLSTQFFGHVSDKLGTEITVKRGNPEHMLDVASAHAISSGTHKGFIYPTENPTHMDKHQQFGFSKSSTSYVGEHSIRFSTAGGRSMAISVDALQRAKSLLGDSDLVVSPNGSIGRSLASAIENLPKPTISPKGDVSNLSYGTRAIGYAVPDTPVTKTSANQFHMGREYRPVNEIPKVPKPPSRCLSEGDNASNSKDKTQWHHMPAGPLVDITNYMATCSGNTDCLANGKRIIGGRNSVSPFKRPRSSRFITPIKNNKLSSAGESIVPPMQISPCRTMLSVRYPFQHQRKNYKEYFGGPPCFKYLTEHVTDDVKLMDARRAEKFRFQHMDTGAEEFQKMLLTCGASLSCATKEWVSNHYKWIVWKLASLERCYPTRVAGKFLTVDNVLEELKYRYDREVNHGHRSAIKKILEGNSSPSLMMVLCISAIYSCPYQNNNKLEVNKVDTNEDNSGNQSFSATNRNMSANIEL

SEQ ID NO: 165284 - protein, 129 aa, Zea Mays
MEESTSSAWRATQRLRRRDSRLCLRTADDSTSPYSRRGRPGWWIRCIPWPALWRQGDMLRRGGGRVERRVPARDAEGLYLASDLDKRLLIYFPFMQVVKLHFVLFKGPKDDAMAMTIYQWTSWSYLPII

SEQ ID NO: 165285 - protein, 685 aa, Zea Mays
MVNSCAPAAFLHSSASWQALLVFFISVTAVGAADAGGQDAGGQGPCPHFSCGDLGNISKPFRRPGDPEECGVKAYELVCSNGKATIRINTGTYFVTSINYTNRSFWVVDANLDMHSSCPLPRWDQFPYTSEGLFWRSGKHTHIDLPTDDASLWACFVNCSRAVRITNNLGYKPVTCLSGSSSFVYIYVQYGACTVGSLEPFCGYLAEISFGTNPKGTNASYADIIQVVKKGFSVGFPKDEYDYSYHNTSWIFKTCLNNFTRYFHEQLSSGGIVGITRAFFWSDVFLLKCAESYNATTVILDFDVISVVTGVKITTLLVLFRFVFTALAVQMFLAHKYWKTTIAIDAVEKFLHMQQMLGPTRFAYTDITAITGHFRDKLGQGGYGSVYKGALLSGNMHVAVKMLGNSNCNGDEFISEVSTIGRIHHINVVRLVGFCAEEMRRALVYEYMPNGSLDKYIFSAERSFSWDMLNEIALGIARGINYLHLGCDMQILHFDIKPHNILLDSNFVPKVSDFGLAKLYPRDKSFVPASAMRGTIGYIAPEMISRSFGAISSKSDVYSFGMLLLEMAGGRRNADQNAANSSRAYYPAWVYDRLAEQDAGEISVAADMHELERKLCIVGLRCIQMKPQDRPTMSEVIEMLECGTHGLGLQMPSRPFFCDDDDPNMPAADSYHFSSELTAISEEDG

SEQ ID NO: 165286 - protein, 138 aa, Zea Mays
MAGKELTLLGLWASPFVLRARIALSLKGLTYAYSEENLDDKSELLLSSNPVLKKVPVLIHHGKPVCESQIIVQYVDEAFPAAAPNFLPSDPYDRAIARFWSIPRPGGPYLACRRSVLRHSGHVSFLFLKKKIICSMFV

SEQ ID NO: 165287 - protein, 262 aa, Zea Mays
MHVSWWSQKQKTVSLSKVDHVRRSDVLSAWSGIRPLAMDPSAKNTESISRDHVVFEDYPGLITITGGKWTTYRSMAEDAVNAAVMSGNLKPANGCLTDNLHIVGGYGWDPASFTVLAQNYKRMKKTYGGKVIPGAMDSAVSKHLSHAYGSLAEQVATIAQNEGLGKRLAHGYPFLEAEVAYCARYEYCESAVDFVARRCRLAFLDTDAAGRALPRIIEILASEHKWDKARKKAELQKGREFLETFKSSKNAQFHDGKHNGRS

SEQ ID NO: 165288 - protein, 329 aa, Zea Mays
MADSTVAPMICPSSGVHIVLPDYYSPEGMGLIVPKTKDGRVVFMLPWLGRTVAGTTDSNTAITMLPEPHEDEIQFILDAISDYLNVQVRRSDVLSAWSGIRPLAMDPSAKNTESISRDHVVFEDYPGLITITGGKWTTYRSMAEDAVNAAVMSGNLKPANGCLTDNLHIVGGYGWDPASFTVLAQNYKRMKKTYGGKVIPGAMDSAVSKHLSHAYGSLAEQVATIAQNEGLGKRLAHGYPFLEAEVAYCARYEYCESAVDFVARRCRLAFLDTDAAGRALPRIIEILASEHKWDKARKKAELQKGREFLETFKSSKNAQFHDGKHNGRS

SEQ ID NO: 165289 - protein, 589 aa, Zea Mays
MTRRTPLRPAPLRSRLRAPTHGARRFPPRPPALRPRCHAYPVTGAPALPRRAPSAPPRPEREDFSSGTSSRSTKLIHGGVRYLEKAVFNLDYGQLKLVFHALKERKQVIENAPHLCHALPCMTPCFNWFEVVYYWFGLKLYDLVAGRRLLHLSRYYSVDESVELFPTLAKNGHNCSLKGTVVYYDGQMNDSRLNVGLACTAAVVGAAVLNYAEVVSLIKDESGERIIGARVRDTLSGKEFETFAKVVVNAAGPFCDSVRKMADSTVAPMICPSSGVHIVLPDYYSPEGMGLIVPKTKDGRVVFMLPWLGRTVAGTTDSNTAITMLPEPHEDEIQFILDAISDYLNVQVRRSDVLSAWSGIRPLAMDPSAKNTESISRDHVVFEDYPGLITITGGKWTTYRSMAEDAVNAAVMSGNLKPANGCLTDNLHIVGGYGWDPASFTVLAQNYKRMKKTYGGKVIPGAMDSAVSKHLSHAYGSLAEQVATIAQNEGLGKRLAHGYPFLEAEVAYCARYEYCESAVDFVARRCRLAFLDTDAAGRALPRIIEILASEHKWDKARKKAELQKGREFLETFKSSKNAQFHDGKHNGRS

SEQ ID NO: 165290 - protein, 69 aa, Zea Mays
MYCFFSIRQVLLDNVDIKTLQLKRLRDQIGLVNQEPTLFATTILENILFGKPEATKAEVGSTTTSAVFS

SEQ ID NO: 165291 - protein, 109 aa, Zea Mays
MLGLFLRIWAWKGVRNLKVSCVGRGLMGYIRDKVNQGQVLLDNVDIKTLQLKRLRDQIGLVNQEPTLFATTILENILFGKPEATKAEVGSTTTSAGAEPRWWQGWKQGC

SEQ ID NO: 165292 - protein, 80 aa, Zea Mays
MGYIRDKVNQGQVLLDNVDIKTLQLKRLRDQIGLVNQEPTLFATTILENILFGKPEATKAEVGSTTTSAESFISCFVVFS

SEQ ID NO: 165293 - protein, 97 aa, Zea Mays
MLGLFLRIWAWKGVRNLKVSCVGRGLMGYIRDKVNQGQVLLDNVDIKTLQLKRLRDQIGLVNQEPTLFATTILENILFGKPEATKAEVGSTTTSAVD

SEQ ID NO: 165294 - protein, 150 aa, Zea Mays
MEHVDLKYHISVKNSLRYTIQEMRRQSSLLRTINGLCCSIPEVEGGKVGKLAGHLKEVCKGLEKTSSICQEDLENKCPGWDLHNPPSDVEDNSHPSDVEDAMDGYVSEDPELWQMVFDDLQWEENKVAVSLAEHCRIMGYDYDQMFDRTI

SEQ ID NO: 165295 - protein, 101 aa, Zea Mays
MAQSVKILCKDGFNLYVTIRGNKAVLAPEDPDDEMQEWFKDYSRVSSVTDDNGQRVFALVNKETQQAMVNRRDEQESSQRTTATAFTKLQRSRTHMRPWTG

SEQ ID NO: 165296 - protein, 75 aa, Zea Mays
MDEQGRETTVGERESSAIMEVGAGQPWDMLEETPASTTEQGTGAPAGELHGERTAPARDGGGGENECLLSCGENT

SEQ ID NO: 165297 - protein, 305 aa, Zea Mays
MKVNDEDSPSQPSSSMPRGTGNQNVVQRSRFGLTRESPRLHIDISVPDETSDHQDASHRPAAIVGEQEENIYNEGPDLTLETHEVGINGSSVSSDVSSLNQLLCPLCRGAVSGWKIIKEARQYLDGKSRACSREACMFSGNYREIRRHARRVHPTTRPADVDPSRRRAWHHLEHQRDYADIVSAIRSAMPGAVVLGDYAIEGGEIFSHDRETSEPSGSLLTTFFLFHMLSSSPIRSGDEPRGTSRGLRRQRRRYLWGENLLGLQYDDDDDDDDNEGEEDEVDAVDEVQRPRSRRRFIRSRSEERA

SEQ ID NO: 165298 - protein, 885 aa, Zea Mays
MQPPMGNERPPPPGRTVSAFVPGAAVPPPPFAAGGPFAPPPWQGVPPPQSGAAAPHFGAVPPAAMGGFRGPPSSQGPFGAGTPPQRPFTSAPPPQSPFTSAPPSQGPFASAPPSQVPFASAQPSQSPFTSPPQSQGPFAAGPPPTGPFAATPAPFRSPLSSLAQPQSPTQGALPPPPTYARPLSQPLQAQGYYPGAPPSNPQFPMSRPAFQQPVQNMPPPPMGSAATFGNQAAYQSGGPPVGGTLQSLVEDFQSLSLSSVPGSLDPGVDVKGLPRPLDGDEEPVKLIESYPFNCHPRYFRLTTHAIPASQSLVSRWHLPLGAVVHPLAESPDGEEVPVINFGSAGVIRCRRCRTYINPYATFADAGRKWRCNLCTLLNDVPGEYFCALDASGRRYDTDQRPELSKGTVEFVAPTEYMVRPPMPPSYFFLIDVSVSAVRSGLLEIVAKTIKSCLDELPGFPRTQIGFLTFDSTLHFHNFKSSLSQPQMMVVADLDDVFLPLPDDLLVNLVDSRHVVESFLDSLPNMFHDNVNVESALGPALKAAFMVMSQIGGKLLVFQSTLPSLGIGRLRLRGDDVRAYGTDKEHTLRVPEDPFYKQMAAEFTKNQIAVDIFSFSEKYSDIASLGSLAKYTGGQVYHYPSFQAPTHEDKLKLELSRDLTRETAWESVMRIRCGKGVRFTTYHGHFMLRSTDLLALPAVDSDKAFAMQLSLEETLMTTQTVYFQVALLYTSSSGERRIRVHTAAAPVVTDLSEMYRQADTGAIVSLLGRIAVENSLSDKLDSVRQQLQLKLVRSLKEYRNLYVVQHRIGGRLIFPESLKFLPLYILAICKTLALRGGYADVSLDERCAAGFSMMILPVKRLLNFIYPSLYRVDEVLTMVCCSFPLS

SEQ ID NO: 165299 - protein, 598 aa, Zea Mays
MVRPPMPPSYFFLIDVSVSAVRSGLLEIVAKTIKSCLDELPGFPRTQIGFLTFDSTLHFHNFKSSLSQPQMMVVADLDDVFLPLPDDLLVNLVDSRHVVESFLDSLPNMFHDNVNVESALGPALKAAFMVMSQIGGKLLVFQSTLPSLGIGRLRLRGDDVRAYGTDKEHTLRVPEDPFYKQMAAEFTKNQIAVDIFSFSEKYSDIASLGSLAKYTGGQVYHYPSFQAPTHEDKLKLELSRDLTRETAWESVMRIRCGKGVRFTTYHGHFMLRSTDLLALPAVDSDKAFAMQLSLEETLMTTQTVYFQVALLYTSSSGERRIRVHTAAAPVVTDLSEMYRQADTGAIVSLLGRIAVENSLSDKLDSVRQQLQLKLVRSLKEYRNLYVVQHRIGGRLIFPESLKFLPLYILAICKTLALRGGYADVSLDERCAAGFSMMILPVKRLLNFIYPSLYRVDEVLTMEPNKIDGWLKRLPLTFQCLDTGGLYLLDDGFTFLVWLGRMLPPELVNNILGVSLANFPDLSKILLRECDNELSRNFMKILRYLREKDPSYHQLSLVVRQGEQPRESYLLLSNLVEDQMAGTSSYVDWIQQIHRQTQS

SEQ ID NO: 165300 - protein, 1204 aa, Zea Mays
MTVRETLDFSRRCLGIGARYEMITELARRERDAGIKPDPEIDAFMKATAVQGQETNIITDLTLKVLGLDICADVIIGDEMIRGISGGQKKRVTTGEMLTGPATALFMDEISTGLDSSSTFQIVKFMRHLVHVMNETVMISLLQPPPETYNLFDDIILLSEGYIVYHGPRENILEFFESVGFRCPDRKGVADFLQEVTSKKDQQQYWYLDQEQYHYVSVPDFAERFKSFHACQQMQKELQIPFEKSKTHPAALTTKKYGLSSWESLKAVMSREQLLMKRNSFIYIFKVTVLIILAFVSMTVFLRTKMPHGQIADGTKFFGALTFGLITIMFNGFAELQLTIKKLPVFYKHRDFLFFPAWTFGVANILLKVPISLVESVVWVVLTYYVMGFAPAAGRFFRQFIAFFATHQMAMALFRFLGAVLKTMVVANTFGMFVLLIIFIFGGFVIRRNDIKPWWIWGYWASPMMYSQNAISINEFLASRWAIPNNDTTIDAPTVGKAILKSKGLFTEEWGFWLSIGALIGFIILFNSLYLWALTYLSPSSGSNALVSEGEDDVNEIALKERSRDARSEDEISQVVYGDLGTNGATNTLVQSRVTLPFQPLSLCFNHVNYYVDMPAEMKEQGFTESRLQLLSDISGAFRPGVLTALVGVSGAGKTTLMDVLAGRKTSGAIEGDITLSGYPKKQETFARISGYCEQTDIHSPNVTVFESITYSAWLRLSSDIDDGTKKMFVEEVMALVELDVLCDALVGLPGVSGLSTEQRKRLTIAVELVANPSIIFMDEPTSGLDARAAAIVMRTVRNTVNTGRTVVCTIHQPSIDIFESFDELLLLKRGGQVIYAGELGRHSHKLVEYFEAIPGVQKITEGYNPATWALEVSSPLSEARLNMNFAEIYANSVLYRKNQELIKELSVPSPDYQDLSFPTKYSQNFYNQCAANFWKQYRSYWKNPPYNAMRYLMTFLFGLVFGTVFWQKGKNIDSQQDLYNLLGATYAATFFLGASNSITVQPVVSIERAVFYREKAAGMYSPLSYAFAQTCVEVIYTILQGILYTVIIYATIGYDWKADKFLYFLFFMTACFNYFGLFGMMLVACTPSALLANILITFALPLWNLFAGFLIVRPAIPIWWRWYYWANPVSWTIYGVVASQFGENQGELSVPGGKPVVVKQFLKDNLGIQHDLLGYVVLVHFAYIIAFFFVFGYSIKFFNFQKR

SEQ ID NO: 165301 - protein, 60 aa, Zea Mays
MNIIKLTYTIRQIIETIVRHIHFMLIAQHSHDLNFTIYTNLNNKLLQEILNQIKHIFEIR

SEQ ID NO: 165302 - protein, 150 aa, Zea Mays
MPACKKFRLAALENEDLEIMFNGVSCTNAYAMAPGAKEGLPANDSDDVEEVSPSVEDKQARKRGVDHKSPIKKSKKNFRDMQFKRFVDSFVEKASSSKSSATSSPNDHVRQEITEMMESVISAGIVEGSDDISMPLNFSSRRSIEMCFSH

SEQ ID NO: 165303 - protein, 116 aa, Zea Mays
MKTRWDALKSDFTTWKTLLLSVSGLGRDPRIGSITASDEWWEEKIEAMPACKKFRLAALENEDLEIMFNGVSCTNAYAMAPGAKEGLPANDSDDVEEVSPSVEDKQARKRDGFHLK

SEQ ID NO: 165304 - protein, 594 aa, Zea Mays
MAGKEDENEKPSLVAAGGKQDRTAATTESLPQRTNLEWGKAACSEDDIQKCVAAGAFHPGELVEWRAPVKDETPTLSTMEDQFVILSLTHIICGLRVDASDFLVSVLEYYRLEWSHLTPNSITALSIFAHLCEAYVEAPPTVEVFTHFYSLYHNRKGETTTLGAVYFRLRDRMKKNYPLYYLRSSQFMWVSLWFYAKVPKSCRLTFRGDILKEENNWNWKDLLPLSCEQMKQVGQIMKLSNQGLTGADIIHDYLKRRISPLRRRMHLTCNYSGLSDPTRDSDKDLSVEDIESKLSYLLDLKRMGVKQPTGRLVRASTNDQANQPLDLLNVCSTHEAKKEAQPQVCASLRRYTRQSAGPRKVAVPPPLKIDPPPTQGPAPEEILDATTNIATAVSPNLGVEQKSIEHPTVAEERKIAELVKPTFSVIGAKRKASAPRSRSKRRAKYSLLSVVTKTRMSSLDTGSIKGTSRTKEAVLALNSRSIGLARCPPASLAEGTGNGGLFMLAKVVDHTKVVEDSMSNILLNQQVGDSSRKEVDPAQSITEIVQDQEAIEVSAAIPVPNKEEINSGVIWERMQKVQSEFFICSLPCSTCHSV

SEQ ID NO: 165305 - protein, 206 aa, Zea Mays
MIGRDALFEYAKQVKDLGQRLFGLLSESLGLKPSYLTDIECDQGQIILGHYYPPCPQPELAIGTSRHSDSGFLTILLQDKVGGLQILHDGQWVDVAPTPGAFIVNIGDLLQLVSNDKFSSVEHRVVAKNAEPRVSIACFFSTHFHPASTRTYGPIKELLSEENPPLYRETLVREYVARYYSVGLDGKQKTALADFRLSAAVSARPP

SEQ ID NO: 165306 - protein, 122 aa, Zea Mays
MLAGLLKWPQGTFASKVTLDTEKQKATVEREVDGGIETICLDLPAVITTDLRLNQPRYATLPNIMKAKSKVIKKVAAEDLGVDIRSDMEVIEVNEPPKRKAGVILSCVDELLDKLKNEARVL

SEQ ID NO: 165307 - protein, 96 aa, Zea Mays
MIWCMLHTIERWQLGSKKICEEGKNFDPLVLEDFDWDNEWVDPLATSFVVGDGPLFTWEHVDHGAGASTQLQGRNFPRTAHGTQLPINVFKSSGRT

SEQ ID NO: 165308 - protein, 1064 aa, Zea Mays
MRDARAPQFQRRGQGGVGVVLLPLMLLLAGTASGQQQIQPPPVPPADLPDVERRLNNLTDHVATTISDKFRFCVADPKEDWNEAFNYTSDLSFVDRCLTETQGDLPQRLCGPDEVKFYFSSLYDRDGDKNINLKTNINCNMSSWGKGCDAGWACATDPVPDRPSNRGSNDIPLRTSSCQACCEGFFCPRGLTCMLPCPLGSYCPRATANHTTGLCDPYKYQIAPNSTDSCGGADMWADIQSTEEIFCPAGYYCPSTTRKDNCSSTIADWVPQLRRGALCLLLLVIYNCSDKFLSIRERRKARSRENAIRLARQQLKAQEGWKAAKQFARRHVSGMQGHLSRTFSRRRSFRQQVDADKSSHRVQEAPLMGQVQMQEMSDSAVFASESANEITEAMPSVIVDVSDGEVVATNENPAPKGKHRSTHTQVFKYAYGEIEKEKFQQRQDNKNLTFTGVIAMVKDQQKEITRPLLKVEFRDLTLMLGKKKLLRSINGELRPGRVTAVMGPSGAGKTTFLNAVTGKVNGYKMTGSVLVNGKNLNIRSYKKVIGFVPQDDIVHGNLTVEENLWFSAKCRLSASMKHRDKVLLVERVIDSLDLQGIRNSLVGTVEKRGISGGQRKRVNVGIEMVMEPSLLILDEPTSGLDSSSSQLLLRALRHEALQGVNVCAVVHQPSYTLYNMFDDLILLAKGGLMVYNGPVKTVEEYFTALGIHVPDRVNPPDHYIDILEGIVKPDSSAIKAKHLPVHWMLHNGYEVPSDMQDDVKEIGEQAPQFRSSSSTSGSPSPHCLPIRNAFAEERDRLEQRLSKPKDLSSRKTPGIFMQYKYYLGRVTKQRLREARLLMVDFLILGLAGICLGTIAKLSDKTFGMPGYIYTIIAVSLLCKIAALRSFSLERLQYFRERESGMSSLAYFLARDTIDHFSTVVKPIIYLSMFYYFNNPRSTIADNYIVLLALVYCVTGIGYTFAICFSPGSAQLCSALIPVVLTLLSTQKSTPTLIRRLCYSKWALEGFIIVNAKKYPGVWLITRCGLLFQSQFDIHNYKLCILILFMYGLFFRMVAFAAMILLKKR

SEQ ID NO: 165309 - protein, 387 aa, Zea Mays
MANYAFDMNLLWTDMNPDNAEYHRNIQNHFMSNIENMNAYGNRDLDASSMFDSDISDALSGLRLSNNSVMDQRNNREELADEILERQRDFSKTVDETRSSLVGNVFHAPRSDVHPSRIYGDGILRRQTSACALDGSNVSRINRHHIKGVDRPSLADQLAIMQSGNFPRGTNLSRNVSVTNMSNPMSNRYNSNTDLDLARSRMTFFKEILAQQYLQEDNLSYNDSRIYHDEPCFPCSRMQRSGSHFYSNSRCILSHGDRQSRLLSLNRKAMGRNIGSHAYHDNTLSNYLDVLSLDNADRNGADSVELIDLVGHVKEISMDQYGSRFIQQKLEIASLDDREKIFPEILSNAIALTTDVFGNYVIQKFFEFATERQLIQLADQLKGFGGS

SEQ ID NO: 165310 - protein, 753 aa, Zea Mays
MAAPLLFPLLLLLLLLSSSTTPLQAQQNFTQVTWYAKTNDPDPAPVQAPSGSRLQLNSNGALSLQDSAGTEVWNPQVVGASYAAMLDSGNFVLAAADGSALWESFKYPTDTILPTQVLTTGMSLRSRIIPTDYSNGRFLLGLQSTGASLYTVAVPSGYEYDPYWSMDVNTTNLVFDASGVIYIGNRSEITSWVVSSIADYYLRATLDPDGVFRQYMYPKKNSNQSNQAWSVVDFKPPNICGAQLTNVGSGICGFNSYCTWNGANNQSTCKCPEQYSFIDDERKYKGCKPDFQPQSCDLDEAAALMQFKVIPMSHVDWPLSDYEQYSPITKDQCQQLCLTDCFCALAVFHDEDNTCWKKKMPLSNGQMADGVQRTVYIKVRKDNGTQSEIVDSNKWKKDKKNWIIGSSLFLGSSVLVNLLLISIILFGTYCTITIKEVPAMQSSNSIGLPLKAFTYAELEKATGGFQKVIGTGASGIVYKGQLQDDLSTHIAVKKIDKLEHETEKEFTIEVQTIGRTHHKNLVRLLGFCNEGKERLLVYEFMTNGSLNRFLFGDAKLQWNIRAQLALGVARGLLYLHEECSTQIIHCDIKSQNILLDGNFTAKISDFGLAKLLRTNQTQTNTGIRGTRGYVAPEWFKNIGITAKVDVYSFGVILLELVCCRRNVELEATDEDQKILTDWANDCYRCGRIDFLVEGDEEAISDLKNVERFVAVALWCLQEDPTMRPTMLKVTQMLDEAAAVPSPPEPTSFVSALA

SEQ ID NO: 165311 - protein, 645 aa, Zea Mays
MAAPLLFPLLLLLLLLSSSTTPLQAQQNFTQGSSLTPQGPTTSWLSPSGDFAFGFQPIEDQRPGSSAGASSIRLTPPAQLQWGALAPGLRRHRDGSALWESFKYPTDTILPTQVLTTGMSLRSRIIPTDYSNGRFLLGLQSTGASLYTVAVPSGYEYDPYWSMDVNTTNLVFDASGVIYIGNRSEITSWVVSSIADYYLRATLDPDGVFRQYMYPKKNSNQSNQAWSVVDFKPPNICGAQLTNVGSGICGFNSYCTWNGANNQSTCKCPEQYSFIDDERKYKGCKPDFQPQSCDLDEAAALMQFKVIPMSHVDWPLSDYEQYSPITKDQCQQLCLTDCFCALAVFHDEDNTCWKKKMPLSNGQMADGVQRTVYIKVRKDNGTQSEIVDSNKWKKDKKNWIIGSSLFLGSSVLVNLLLISIILFGTYCTITIKEVPAMQSSNSIGLPLKAFTYAELEKATGGFQKVIGTGASGIVYKGQLQDDLSTHIAVKKIDKLEHETEKEFTIEVQTIGRTHHKNLVRLLGFCNEGKERLLVYEFMTNGSLNRFLFGDAKLQWNIRAQLALGVARGLLYLHEECSTQIIHCDIKSQNILLDGNFTAKISDFGLAKLLRTNQTQTNTALGSSCWSLFVVGGMLNWRPQMRIKKY

SEQ ID NO: 165312 - protein, 315 aa, Zea Mays
MGGLCACWFTTRTCRGRDGWHRRPGWRQRRSYRSHAPSTSSTGRCGQDGCHCRWWTGKSCLHAGCWVSSLVPTTFRRSQQSQTGALCSFGHHCGNLRGWRTPTTCSSTHSTRSNPSSESCLAWLDKQLPCSVVLVSYGTVSDYDETQLEELGNGLYNSGKPFIWVVRSNEEHKLSDELRDKCKERGLIVSWCPQLEVLAHKATGCFFTHCGWNSTLEAIVNGVPMVAIPHWADQPTISKYMESMWGLGVRVRKDEKGLVTRDEVERCIKDVMDGDSKDKYRKSATMWMQKAKSAMQNGGSSDKNITEFVAKYSLS

SEQ ID NO: 165313 - protein, 237 aa, Zea Mays
MGSTSATGTTSSSSSAAHGGGAAHVLLLPYPGAQGHTNPLLQFGRCLAYHGLRPTLVTSRYVLSTTPPPGEPFRVAAISDGFDDGGAAACPDLDVYWRQLEAVGSETLAELIRSEAADGRPVRVLVYDPHLPWARRVAQAAGLAAAAFLSQPCAVDVVYGEVWAGRLPLPVVDGKELFARGLLGVELGPDDVPPFAAKPDWCPVFLRASLRQFEGLEDADDVLVNSFHEIEPKIIWP

SEQ ID NO: 165314 - protein, 314 aa, Zea Mays
MGGLCACWFTTRTCRGRDGWHRRPGWRQRRSYRSHAPSTSSTGRCGQDGCHCRWWTGKSCLHAGCWVSSLVPTTFRRSQQSQTGALCSFGHHCGNLRGWRTPTTCSSTHSTRSNPSESCLAWLDKQLPCSVVLVSYGTVSDYDETQLEELGNGLYNSGKPFIWVVRSNEEHKLSDELRDKCKERGLIVSWCPQLEVLAHKATGCFFTHCGWNSTLEAIVNGVPMVAIPHWADQPTISKYMESMWGLGVRVRKDEKGLVTRDEVERCIKDVMDGDSKDKYRKSATMWMQKAKSAMQNGGSSDKNITEFVAKYSLS

SEQ ID NO: 165315 - protein, 784 aa, Zea Mays
MHSERYSEIVNACCLEKDLEMMEFGDQTEIGERGINLSGGQKQRIQLARAVYQDCDIYLLDDIFSAVDAHTGSAIFKECLKGILKNKTVLLVTHQVDFLQNVDTIIVMKDGLVIQSGIYLELLASCSEFSDLVTAHHSSMETAGAQAFHVQNTESSQASTGSVDAPSLASKSNAENGESVGSATNKEAGSSKLIQEEEKESGRVSWRVYKLYMTEAWGWWGIVVILAVSLLSEGSSMASNYWLSYETSGGPVFDTSLFLGVYASIVATTIILEMIATLIVTFMGLQSAQAFFNKMFDSILRAPMSFFDTTPSGRILSRASSDQSKIDTNLVFYVGFATSMCISVVTNVAITCQVAWPSVIAVFPLLLLNIWYRNRYITTSRELTRLQGVTRAPIIDHFTESFLGAPTVRCFRKEDEFYQINLDRINSNLRMSFHNYAANEWLGFRLELIGTLILSITAFLMISLPSNFIKKEFVGMSLSYGISLNSLVYYTISISCMIENDMVAIERVHQYSTLPSEAAWEVADGLPSQDWPSRGDIDVKDLKVRYRQNTPLILKGITVSIKGGEKVGVVGRTGSGKSTLVQALFRIVEPADGHIIIDGVNICTLGLRDLRSRFGVIPQEPVLFEGTVRSNIDPAGRYSEAEIWQALECCQLKDIVASKPEKLDALVADMGENWSVGQKQLLCFGRVILKRSRILFMDEATASVDSQTDAAIQKIIREEFTECTVISVAHRIPTVMDSDRVLVLDAGLVAEFDAPSKLMRRPSLFGAMVQEYASRSSSVKETVG

SEQ ID NO: 165316 - protein, 922 aa, Zea Mays
MLSNMRPIKLQAWEDTFGGKVRDIRREELGWLAKIMLFMCANTVVFSSGPLAMTVLVFGTYLASGGQLDAGKVFTATAFFGMLEGPMRNFPQTIVMSMQAFVSLDRLNKFLTDTEIDTAAVERIESGGAEDTVAVKVQGGVFAWDVPADEEMKGNNNNSSRPRHEVAENDQGNRAELVTVLRGIDVEVRRGELTAVVGTVGSGKSSLLSCIMGEMHKLSGTVSICGSTAYVAQTAWIRNGTIQENILFGKPMHSERYSEIVNACCLEKDLEMMEFGDQTEIGERGINLSGGQKQRIQLARAVYQDCDIYLLDDIFSAVDAHTGSAIFKECLKGILKNKTVLLVTHQVDFLQNVDTIIVMKDGLVIQSGIYLELLASCSEFSDLVTAHHSSMETAGAQAFHVQNTESSQASTGSVDAPSLASKSNAENGESVGSATNKEAGSSKLIQEEEKESGRVSWRVYKLYMTEAWGWWGIVVILAVSLLSEGSSMASNYWLSYETSGGPVFDTSLFLGVYASIVATTIILEMIATLIVTFMGLQSAQAFFNKMFDSILRAPMSFFDTTPSGRILSRASSDQSKIDTNLVFYVGFATSMCISVVTNVAITCQVAWPSVIAVFPLLLLNIWYRNRYITTSRELTRLQGVTRAPIIDHFTESFLGAPTVRCFRKEDEFYQINLDRINSNLRMSFHNYAANEWLGFRLELIGTLILSITAFLMISLPSNFIKKEFVGMSLSYGISLNSLVYYTISISCMIENDMVAIERVHQYSTLPSEAAWEVADGLPSQDWPSRGDIDVKDLKVRYRQNTPLILKGITVSIKGGEKVGVVGRTGSGKSTLVQALFRIVEPADGHIIIDGVNICTLGLRDLRSRFGVIPQEPVLFEGTVRSNIDPAGRYSEAEIWQEIQPKPMLCPRVLPAKGYSSLKTREA

SEQ ID NO: 165317 - protein, 235 aa, Zea Mays
MSAPLVDAEYMAEIERARRDLRALVASKNCAPIMLRLAWHDAGTYDAKTNTGGPNGSIRFPQEYSHSSNAGIKIAIDLLEPVKQKHPKITYADLYQDSSICPEEGRLPDARRGASHLRQVFYRMGLSDRDIVALSGGHTLGRAHRERTGFDGPWTRDPLKFDNSYFLELLKGDSEGLLKLPTDKVLVEDPEFRQHVQLYAKDEDAFFRDYAESHKKLSELGFTPPSLLSLIQICE

SEQ ID NO: 165318 - protein, 185 aa, Zea Mays
MIYVCKIGEQRPVKAFSGHQSEVNAIKWDPTGSLLASCSDDWTAKIWSMKQDKCVFDFKEHTKEIYTIRWSPTGPGTNNPNQQLLLASASFDSTIKLWEVEQGCLLYSLSGHRQPVYSVAFSPDGEYLASGSLDQCLHIWSVKEGRILKTYRGTGGIFEVCWNKEGSKIAACFSNNTVCVMDFRM

SEQ ID NO: 165319 - protein, 356 aa, Zea Mays
MLLFWKDTVQVFACAWSPSGSLLASGSGDSTARIWTIPDGPCGSNMQSSPPGVHVLKHFKGRTNEKSKDVTTLDWNGEGTLLATGSYDGQARIWSRDGDLKQTLFKHKGPIFSLKWNKKGDFLLSGSVDKTAIVWDTKTWECKQQFEFHSAPTLDVDWRNNNSFATCSTDNMIYVCKIGEQRPVKAFSGHQSEVNAIKWDPTGSLLASCSDDWTAKIWSMKQDKCVFDFKEHTKEIYTIRWSPTGPGTNNPNQQLLLASASFDSTIKLWEVEQGCLLYSLSGHRQPVYSVAFSPDGEYLASGSLDQCLHIWSVKEGRILKTYRGTGGIFEVCWNKEGSKIAACFSNNTVCVMDFRM

SEQ ID NO: 165320 - protein, 174 aa, Zea Mays
MMNGNIWSVSDSKSIGETIMLVLQFQLEPVTPVSGASSDLYRSSAIPNFNGLRVLLADSDCTNRAVTHRLLEKLGCRVLSVASGVQCISSFAAESSFQLVVLDLDMQTMDGFEVARAIRKFSSNSWLPLIIALAARIDDNIRDRCQRSGVNGLIQKPVTLAALGDELYRVLQNN

SEQ ID NO: 165321 - protein, 153 aa, Zea Mays
MRRRPAFTPMAGETLKKFARGEDEECCINSSMDETAGTVLVMSFVSLVVIMSVLASFLFARNCRLLRHGVDNHPPYVKKQVVEKFPCSAYSAPCSSEDNFQEACAICLEDYNNGDMLRHLPCKHEFHKICIDSWLTKWGIFCPICKLEVTLGG

SEQ ID NO: 165322 - protein, 161 aa, Zea Mays
MVGESDGIHIPAIFVSKMAGETLKKFARGEDEECCINSSMDETAGTVLVMSFVSLVVIMSVLASFLFARNCRLLRHGVDNHPPYVKKQVVEKFPCSAYSAPCSSEDNFQEACAICLEDYNNGDMLRHLPCKHEFHKICIDSWLTKWGIFCPICKLEVTLGG

SEQ ID NO: 165323 - protein, 97 aa, Zea Mays
MKEEFRSGHVEDSLNVPYLFFTSQGREKNPKFIAQVAAGFDKEDNIVVGCKSGVRSELACADLMAAGFRNVKNIEGGYTAWVESGLAVKKSQAQDEL

SEQ ID NO: 165324 - protein, 213 aa, Zea Mays
MDRLKSNEAKLAAQAEAHKAKVEELKRKVAEATEKFKVEVVKHEICEIERSRAQKNTDVLRASKEKCYEISLECARKLKDNFARVGAYSSEQRLIHGDPDGVVQWISGEAKAFDEILSDRGDFCAFAGAWEATSILEKAGCEHAKVVVQPEFVFSADDIKNRSTKASALGGKFYSEVWMKGGREIADEDIRKNEKNLTTLKKKRKELKKLLSV

SEQ ID NO: 165325 - protein, 200 aa, Zea Mays
MTCWSGGYASSAGSATSTTPVCSSSTSAPPCTSSPYPVTSPASSWSTCTTSSSRPETSSRSVTPPLPDGLRGDASCCCVPISFVQARRTGWYWSPIAAVSTYVRMYCMFVIGTDRVLTCDLHGAARSCGCFLHAVLLCLPPNKCTRERRRRRRRRMLLIYPDLRNVYQNTETILKERSHPGQRILLLQLYHPITELYHIH

SEQ ID NO: 165326 - protein, 234 aa, Zea Mays
MAYIMDTNEEERVKGKTVEVGRAHFETEHTRFTILDAPGHKSYVPNMISGASQADIGVLVISARKGEFETGYERGGQTREHVLLAKTLGVAKLVVVINKMDEPTVKWSKERYDEIEAKMVPFLKSSGYNVKKDVQFLPISGLVGTNMKTRMDKSICSWWDGPCLFEVLDRIVVPLRDPKGSVRMPIIDKYKDMGTVAMGKIESGTIREGDSLLVMPNKLILLVPLVNSLLSCRF

SEQ ID NO: 165327 - protein, 502 aa, Zea Mays
MAASPSSPLTAPPEPVTPPSPWTITDGAISGTLPAAEAFAVHYPGYPSSPARAARTLGGLPGLAKVRSSDPGARLELRFRPEDPYCHPAFGQSRASTGLLLRLSKRKGAAAPCAHVVARVRTAYYFEDKTGHDEADGDVMMLVPPLFSVKDRPTKIALVPSSNAISKTMHRGVVQERWEMNVGPTLALPFNTQVVPEKINWEDHIRKNSVEWGWQMAVCKLFDERPVWPRQSLYERFLDDNVHVSQNQFKRLLFRAGYYFSTGPFGKFWIRRGYDPRKDSESQMSRKWADMCKLETMPSQSFIYLQLYELKDDFIQAEIRKPSYQSVCSRSTGWFSKPMIKTLRLQVSIRLLSLLHNEEAKNLLRNAHELIERSKKQEALSRSELSIEYNDADQVSAAHTGTEDQVGPNNSDSEDVDDEEEEEELEGYDSPPMADDIHEFTLGDSYAFGEGFSNGYLEEVLRSLPLQEDGQKKLCDAPINADASDGEFEIYEQPSDDEDSDG

SEQ ID NO: 165328 - protein, 368 aa, Zea Mays
MAASPSSPLTAPPEPVTPPSPWTITDGAISGTLPAAEAFAVHYPGYPSSPARAARTLGGLPGLAKVRSSDPGARLELRFRPEDPYCHPAFGQSRASTGLLLRLSKRKGAAAPCAHVVARVRTAYYFEGMADFQHVVPVHAAQTRKRKHSDSQNDNENFGSDKTGHDEADGDVMMLVPPLFSVKDRPTKIALVPSSNAISKTMHRGVVQERWEMNVGPTLALPFNTQVVPEKINWEDHIRKNSVEWGWQMAVCKLFDERPVWPRQSLYERFLDDNVHVSQNQFKRLLFRAGYYFSTGPFGKFWIRRGYDPRKDSESQMSRKWADMCKLETMPSQSFIYLQLYELKDDFIQAEIRKPSYQSVCSDGFLSQ

SEQ ID NO: 165329 - protein, 533 aa, Zea Mays
MAASPSSPLTAPPEPVTPPSPWTITDGAISGTLPAAEAFAVHYPGYPSSPARAARTLGGLPGLAKVRSSDPGARLELRFRPEDPYCHPAFGQSRASTGLLLRLSKRKGAAAPCAHVVARVRTAYYFEGMADFQHVVPVHAAQTRKRKHSDSQNDNENFDKTGHDEADGDVMMLVPPLFSVKDRPTKIALVPSSNAISKTMHRGVVQERWEMNVGPTLALPFNTQVVPEKINWEDHIRKNSVEWGWQMAVCKLFDERPVWPRQSLYERFLDDNVHVSQNQFKRLLFRAGYYFSTGPFGKFWIRRGYDPRKDSESQMSRKWADMCKLETMPSQSFIYLQLYELKDDFIQAEIRKPSYQSVCSRSTGWFSKPMIKTLRLQVSIRLLSLLHNEEAKNLLRNAHELIERSKKQEALSRSELSIEYNDADQVSAAHTGTEDQVGPNNSDSEDVDDEEEEEELEGYDSPPMADDIHEFTLGDSYAFGEGFSNGYLEEVLRSLPLQEDGQKKLCDAPINADASDGEFEIYEQPSDDEDSDG

SEQ ID NO: 165330 - protein, 493 aa, Zea Mays
MAASPSSPLTAPPEPVTPPSPWTITDGAISGTLPAAEAFAVHYPGYPSSPARAARTLGGLPGLAKVRSSDPGARLELRFRPEDPYCHPAFGQSRASTGLLLRLSKRKGAAAPCAHVVARVRTAYYFEGMADFQHVVPVHAAQTRKRKHSDSQNDNENFDKTGHDEADGDVMMLVPPLFSVKDRPTKIALVPSSNAISKTMHRGVVQERWEMNVGPTLALPFNTQVVPEKINWEDHIRKNSVEWGWQMAVCKLFDERPVWPRQSLYERFLDDNVHVSQNQFKRLLFRAGYYFSTGPFGKFWIRRGYDPRKDSESQIYQRIDFRMPPELRYLLRLKNSESRKWADMCKLETMPSQSFIYLQLYELKDDFIQAEIRKPSYQSVCSRSTGWFSKPMIKTLRLQVSIRLLSLLHNEEAKNLLRNAHELIERSKKQEALSRSELSIEYNDADQVSAAHTGTEDQVGPNNSDSEDVDDEEEEEELEGYDSPPMLTFMITL

SEQ ID NO: 165331 - protein, 61 aa, Zea Mays
MSKRTVELHWGKHHQDYMDGLNNQLATSPLYGYTLEDLIKEAYNNDNPLPEYNNTAQVTRL

SEQ ID NO: 165332 - protein, 98 aa, Zea Mays
MSKRTVELHWGKHHQDYMDGLNNQLATSPLYGYTLEDLIKEAYNNDNPLPEYNNTAQDDKLTYVTNFMDHLVSWHTVTLRMMRAESFVNLGEPNILEA

SEQ ID NO: 165333 - protein, 109 aa, Zea Mays
MGYAEIAIRPSGSGKKIQRQGGLSRRFSNVSYYGLTTPPYKLDALEPYMSKRTVELHWGKHHQDYMDGLNNQLATSPLYGYTLEDLIKEAYNNDNPLPEYNNTAQVTRL

SEQ ID NO: 165334 - protein, 828 aa, Zea Mays
MEPRVPCGDGGPEPRAARTHRREGERNHVLDARILEPQRQRSNPIRNIFHLLTQREVSPRLKHHAKRMWNESPKYDPDSIELRSADAKLDIFSWAESQSLHSWSAKYCPLLPPPRSTIAAAFSPDGKTLASTHGDHTVKIIDCQTGKCLKVLTGHRRTPWVVRYHPLHSDILASGSLDHEVRLWDANTSDCIGSQDFHRPIASIAFHGSGEILAVASGHKLYIWNYNKRDGTSVPAIILKTRRSLRAVHFHPRGAPYLLTAEVNNIESADSPLTLARSSGYLNYPSALLVTNTNSRFCTLPESNVVSPCLLWPAYLRDGGILHVLGNDSSSTIVQQRSSLVQPSTSDTANVQLEQFATPMDVCPGEPTSSNDIPDAVTVPTSNGNEMHGAGGQSNSRLQGSSSTSNLERFSARDDLQVSSLSRTDPIPLTAGPSGSDLHRAMPLNMLLTGGLDVQMFLRNVGSGQQDHSLFGDSRNWEVPFLQGFLMAPNHAGLHPALVNNSVLEDMSIAGTAGTNNLKSPHMRNFGCPGASSSIPLTTGSSRGPNRRYASRSVPGVGNLLLGPQIDEAEAHAVSLGAGSEITASMLAPGTELPCTVKLRIWRHGTNEPCVPLEPEACCLTISHAVLCSEMGAHFSPCGRFLVACVACLLPQTEDDRGSQLPVSYEGAGSSPTRHPLPSHRVIYELRVYSLEAETFGDILASRAIRAAHCLTSIQFSPTSEHILLAYGRRHSSLLRSIVVEGENGVPVYTILEVYRVSDMELVRVLPSAEDEVNVACFHPSPGGGLVYGTKEGKLRILQHNGADMTNMGVGCFIEENMVEIQRYALEC

SEQ ID NO: 165335 - protein, 678 aa, Zea Mays
MEPRVPCGDGGPEPRAARTHRREGERNHVLDARILEPQRQRSNPIRNIFHLLTQREVSPRLKHHAKRMWNESPKYDPDSIELRSADAKLDIFSWAESQSLHSWSAKYCPLLPPPRSTIAAAFSPDGKTLASTHGDHTVKIIDCQTGKCLKVLTGHRRTPWVVRYHPLHSDILASGSLDHEVRLWDANTSDCIGSQDFHRPIASIAFHGSGEILAVASGHKLYIWNYNKRDGTSVPAIILKTRRSLRAVHFHPRGAPYLLTAEVNNIESADSPLTLARSSGYLNYPSALLQRSSLVQPSTSDTANVQLEQFATPMDVCPGEPTSSNDIPDAVTVPTSNGNEMHGAGGQSNSRLQGSSSTSNLERFSARDDLQVSSLSRTDPIPLTAGPSGSDLHRAMPLNMLLTGGLDVQMFLRNVGSGQQDHSLFGDSRNWEVPFLQGFLMAPNHAGASSSIPLTTGSSRGPNRRYASRSVPGVGNLLLGPQIDEAEAHAVSLGAGSEITASMLAPGTELPCTVKLRIWRHGTNEPCVPLEPEACCLTISHAVLCSEMGAHFSPCGRFLVACVACLLPQTEDDRGSQLPVSYEGAGSSPTRHPLPSHRVIYELRVYSLEAETFGDILASRAIRAAHCLTSIQFSPTSEHILLAYGRRHSSLLRSIVVEGENGVPVYTILEIQRYALEC

SEQ ID NO: 165336 - protein, 741 aa, Zea Mays
MLNLIFFHESQSLHSWSAKYCPLLPPPRSTIAAAFSPDGKTLASTHGDHTVKIIDCQTGKCLKVLTGHRRTPWVVRYHPLHSDILASGSLDHEVRLWDANTSDCIGSQDFHRPIASIAFHGSGEILAVASGHKLYIWNYNKRDGTSVPAIILKTRRSLRAVHFHPRGAPYLLTAEVNNIESADSPLTLARSSGYLNYPSALLVTNTNSRFCTLPESNVVSPCLLWPAYLRDGGILHVLGNDSSSTIVQQRSSLVQPSTSDTANVQLEQFATPMDVCPGEPTSSNDIPDAVTVPTSNGNEMHGAGGQSNSRLQGSSSTSNLERFSARDDLQVSSLSRTDPIPLTAGPSGSDLHRAMPLNMLLTGGLDVQMFLRNVGSGQQDHSLFGDSRNWEVPFLQGFLMAPNHAGLHPALVNNSVLEDMSIAGTAGTNNLKSPHMRNFGCPGASSSIPLTTGSSRGPNRRYASRSVPGVGNLLLGPQIDEAEAHAVSLGAGSEITASMLAPGTELPCTVKLRIWRHGTNEPCVPLEPEACCLTISHAVLCSEMGAHFSPCGRFLVACVACLLPQTEDDRGSQLPVSYEGAGSSPTRHPLPSHRVIYELRVYSLEAETFGDILASRAIRAAHCLTSIQFSPTSEHILLAYGRRHSSLLRSIVVEGENGVPVYTILEVYRVSDMELVRVLPSAEDEVNVACFHPSPGGGLVYGTKEGKLRILQHNGADMTNMGVGCFIEENMVEIQRYALEC

SEQ ID NO: 165337 - protein, 603 aa, Zea Mays
MEPRVPCGDGGPEPRAARTHRREGERNHVLDARILEPQRQRSNPIRNIFHLLTQREVSPRLKHHAKRMWNESPKYDPDSIELRSADAKLDIFSWAESQSLHSWSAKYCPLLPPPRSTIAAAFSPDGKTLASTHGDHTVKIIDCQTGKCLKVLTGHRRTPWVVRYHPLHSDILASGSLDHEVRLWDANTSDCIGSQDFHRPIASIAFHGSGEILAVASGHKLYIWNYNKRDGTSVPAIILKTRRSLRAVHFHPRGAPYLLTAEVNNIESADSPLTLARSSGYLNYPSALLVTNTNSRFCTLPESNVVSPCLLWPAYLRDGGILHVLGNDSSSTIVQQRSSLVQPSTSDTANVQLEQFATPMDVCPGEPTSSNDIPDAVTVPTSNGNEMHGAGGQSNSRLQGSSSTSNLERFSARDDLQVSSLSRTDPIPLTAGPSGSDLHRAMPLNMLLTGGLDVQMFLRNVGSGQQDHSLFGDSRNWEVPFLQGFLMAPNHAGLHPALVNNSVLEDMSIAGTAGTNNLKSPHMRNFGCPGASSSIPLTTGSSRGPNRRYASRSVPGVGNLLLGPQIDEAEAHAVSLGAGSEITASMLAPVKWVPIFPHVDDFW

SEQ ID NO: 165338 - protein, 817 aa, Zea Mays
MEPRVPCGDGGPEPRAARTHRREGERNHVLDARILEPQRQRSNPIRNIFHLLTQREVSPRLKHHAKRMWNESPKYDPDSIELRSADAKLDIFSWAESQSLHSWSAKYCPLLPPPRSTIAAAFSPDGKTLASTHGDHTVKIIDCQTGKCLKVLTGHRRTPWVVRYHPLHSDILASGSLDHEVRLWDANTSDCIGSQDFHRPIASIAFHGSGEILAVASGHKLYIWNYNKRDGTSVPAIILKTRRSLRAVHFHPRGAPYLLTAEVNNIESADSPLTLARSSGYLNYPSALLVTNTNSRFCTLPESNVVSPCLLWPAYLRDGGILHVLGNDSSSTIVQQRSSLVQPSTSDTANVQLEQFATPMDVCPGEPTSSNDIPDAVTVPTSNGNEMHGAGGQSNSRLQGSSSTSNLERFSARDDLQVSSLSRTDPIPLTAGPSGSDLHRAMPLNMLLTGGLDVQMFLRNVGSGQQDHSLFGDSRNWEVPFLQGFLMAPNHAGLHPALVNNSVLEDMSIAGTAGTNNLKSPHMRNFGCPGASSSIPLTTGSSRGPNRRYASRSVPGVGNLLLGPQIDEAEAHAVSLGAGSEITASMLAPGTELPCTVKLRIWRHGTNEPCVPLEPEACCLTISHAVLCSEMGAHFSPCGRFLVACVACLLPQTEDDRGSQLPVSYEGAGSSPTRHPLPSHRVIYELRVYSLEAETFGDILASRAIRAAHCLTSIQFSPTSEHILLAYGRRHSSLLRSIVVEGENGVPVYTILEVYRVSDMELVRVLPSAEDEVNVACFHPSPGGGLVYGTKEGKLRILQHNGADMTNMGIQRYALEC

SEQ ID NO: 165339 - protein, 631 aa, Zea Mays
MVRYHPLHSDILASGSLDHEVRLWDANTSDCIGSQDFHRPIASIAFHGSGEILAVASGHKLYIWNYNKRDGTSVPAIILKTRRSLRAVHFHPRGAPYLLTAEVNNIESADSPLTLARSSGYLNYPSALLVTNTNSRFCTLPESNVVSPCLLWPAYLRDGGILHVLGNDSSSTIVQQRSSLVQPSTSDTANVQLEQFATPMDVCPGEPTSSNDIPDAVTVPTSNGNEMHGAGGQSNSRLQGSSSTSNLERFSARDDLQVSSLSRTDPIPLTAGPSGSDLHRAMPLNMLLTGGLDVQMFLRNVGSGQQDHSLFGDSRNWEVPFLQGFLMAPNHAGASSSIPLTTGSSRGPNRRYASRSVPGVGNLLLGPQIDEAEAHAVSLGAGSEITASMLAPGTELPCTVKLRIWRHGTNEPCVPLEPEACCLTISHAVLCSEMGAHFSPCGRFLVACVACLLPQTEDDRGSQLPVSYEGAGSSPTRHPLPSHRVIYELRVYSLEAETFGDILASRAIRAAHCLTSIQFSPTSEHILLAYGRRHSSLLRSIVVEGENGVPVYTILEVYRVSDMELVRVLPSAEDEVNVACFHPSPGGGLVYGTKEGKLRILQHNGADMTNMGVGCFIEENMVEIQRYALEC

SEQ ID NO: 165340 - protein, 688 aa, Zea Mays
MEPRVPCGDGGPEPRAARTHRREGERNHVLDARILEPQRQRSNPIRNIFHLLTQREVSPRLKHHAKRMWNESPKYDPDSIELRSADAKLDIFSWAESQSLHSWSAKYCPLLPPPRSTIAAAFSPDGKTLASTHGDHTVKIIDCQTGKCLKVLTGHRRTPWVVRYHPLHSDILASGSLDHEVRLWDANTSDCIGSQDFHRPIASIAFHGSGEILAVASGHKLYIWNYNKRDGTSVPAIILKTRRSLRAVHFHPRGAPYLLTAEVNNIESADSPLTLARSSGYLNYPSALLVTNTNSRFCTLPESNVVSPCLLWPAYLRDGGILHVLGNDSSSTIVQQRSSLVQPSTSDTANVQLEQFATPMDVCPGEPTSSNDIPDAVTVPTSNGNEMHGAGGQSNSRLQGSSSTSNLERFSARDDLQVSSLSRTDPIPLTAGPSGSDLHRAMPLNMLLTGGLDVQMFLRNVGSGQQDHSLFGDSRNWEVPFLQGFLMAPNHAGASSSIPLTTGSSRGPNRRYASRSVPGVGNLLLGPQIDEAEAHAVSLGAGSEITASMLAPGTELPCTVKLRIWRHGTNEPCVPLEPEACCLTISHAVLCSEMGAHFSPCGRFLVACVACLLPQTEDDRGSQLPVSYEGAGSSPTRHPLPSHRVIYELRVYSLEAETFGDILASRAIRAAHCLTSIQFSSLNWILFV

SEQ ID NO: 165341 - protein, 120 aa, Zea Mays
MFIGHRSMVLSLAMSPDGRYMASGDEDGTIMIWDLSTGCCVSPLLGHSSCVWTLAFSCEGALLASGSADCTVKLWDVAFSTKAMKTEDTKGSSSANRLRLLKSLPTKSAPVYSLRIQYLG

SEQ ID NO: 165342 - protein, 388 aa, Zea Mays
MEVCQEDNGSIYKYYTSPMSGYMFTSKMETLHYLFSGVEERMLELQASAEDNELHESHTWLPRGWVIEVRAGGKKMDKMYKRFLSKAEVLHFVNKGMVSTCDMDVLCDTSTDDNILAHVEFNPDGLPDGWVKETISRKFNDGIRKDQYYTDPVSHRVFRTLKSVLSYLGTGEISRHSYLPRRNVIDMYSFDKCADLPKSMVKRLKAKGQAKKKFMRAQVLDKDLSNGQTSNHCEGAIGLTQSDPEGDKFGSMEAACEKGTSSETMKQRIGRPKKILKQTNDSISDRDKGSHQEHIEAKEEVDICGGKDLTHLKTLERTEAQNSTMITKEVNNNDTAEKNLSKIEGDNSDLVTGTGLHKQENSRLTEVSEKATFSTGYKFYKRRSCNKT

SEQ ID NO: 165343 - protein, 203 aa, Zea Mays
MLAELVHSIADFANQALLAYGLSSSRRAPDALHPYGYSKERFVWSLISAVGIFCLGSGATIVHGVQNLWNCQPPENIHWAALVIGGSFLIEGASLLVAINAVRKGAEAEGMGIWDYIWRGHDPTSVAVMTEDGAAVTGLAIAATSLVAVQMTGNAMYDPIGSIIVGNLLGLRSKKPRLSQFGPSLIATLKLVTWHIIEGVFGS

SEQ ID NO: 165344 - protein, 546 aa, Zea Mays
MLTSQPLGQNPFPEVGAATAFAGRDEQEDEMQLALCTECTKNYEREATLVKAEADAEGPRASLPGWLVLDRPPADQTPHEKYLTVLKRKWSRLCRKLHLCSDPGSPQCPWWSGSCSQPASKGKPSEPRFLGLDGLMGQHTSRRSPPSPSRSPRWAPSPPMGSGCQGVGTTLALASHLLSDSATSDSRAPGSGDGSAAARELEQRLRRNIPWQPRAIVAEIANAVVASRESDDGATGVWLYVKGSDHVATRRAVTVIAETRCGSADRVICADPSKFSSAERLCSDVVSRASAMGGKMVVVVVDDVENASRDVADCLVAASKSGSLKDRQSGQALDLSGCIVILLASKWTGGSSDQISLRLWAENEASSAALKRKTESPLRESKRARHDAGLGGLDLNLCAEDDPADEDDEALPSDITDEGDSSDTSEHGQPHGLLEALAARVVTLDNDDGDGDATASIRARLARAIGQGWTRVEETAVQMLAAASGQFLEDEFESWTSEVLEPAVALATVKNGGKGKVIVLGLGPCGESRETPGFMGSVLPSRVQVD

SEQ ID NO: 165345 - protein, 278 aa, Zea Mays
MILLVYYIKHVSREVQVFEPFSILGLESGASESDIKKSYRRLSIQYHPDKNPDPEAHKYFVEYISKAYQALTDPISRENYEKYGHPDGRQGLQMGIALPKFLLNIDGASGGIMLLGIVGFCILLPLMIAVIYLSRSSKYTGNYVMHQTLSTYYYFMKPSLAPSKVMDVFIKAAEYMEMPVRRSDDEPLQKLFVAVRSELNLDLKNIKTEQAKFWKQHPSLVKMELLIQAHLTRESFALTPALLKDYRHMLELAPRLLEELVKRKMQKSSRKDHKRGHL

SEQ ID NO: 165346 - protein, 398 aa, Zea Mays
MSLLSRHARHPTTPPPASFSGGVETPPRRRVPKENVDPSSPARNHHSALDHGASPFRSPSSAAKPLSARNRLPPRPPSSNPLKRKLEVSPAAAAVGSAHDAAPGLDSGVQVVVRIRPSCWVDEEEAGEDGRGPEACVRKTAANSVAIQGQDFTFDAVADSVSTQEDIFTLVGLPLVENCLSGFNSSIFAYGQTGSGKTYTMWGPLSALSEDSLSSERGLTPRVFEQLFSRINEEQVKHADKELTYNCICSFLEIYNEQITDLLDPSQKNLQVREDVRTACVYVESLTKELVFTLKDVTQLLVKGLANRRTGATSANADSSRSHCVFTCVIKMDSKNPEDGSSITRSSRINLVDLAGSERQKLTHAAGDRLKEAGNINRSLSQLGNIAVWKTKAPCSIS

SEQ ID NO: 165347 - protein, 414 aa, Zea Mays
MSLLSRHARHPTTPPPASFSGGVETPPRRRVPKENVDPSSPARNHHSALDHGASPFRSPSSAAKPLSARNRLPPRPPSSNPLKRKLEVSPAAAAVGSAHDAAPGLDSGVQVVVRIRPSCWVDEEEAGEDGRGPEACVRKTAANSVAIQGQDFTFDAVADSVSTQEDIFTLVGLPLVENCLSGFNSSIFAYGQTGSGKTYTMWGPLSALSEDSLSSERGLTPRVFEQLFSRINEEQVKHADKELTYNCICSFLEIYNEQITDLLDPSQKNLQVREDVRTACVYVESLTKELVFTLKDVTQLLVKGLANRRTGATSANADSSRSHCVFTCVIKMDSKNPEDGSSITRSSRINLVDLAGSERQKLTHAAGDRLKEAGNINRSLSQLGLENKGTMFHIVIPSLHFYYKNPLEAMPNWQ

SEQ ID NO: 165348 - protein, 634 aa, Zea Mays
MKRRQARMGGDRRPACARRRPTRLRSRGRTSRLMLSLTRSPRRRISSPLLGCHLLKIAYQVSTAPYLPMDSGKTYTMWGPLSALSEDSLSSERGLTPRVFEQLFSRINEEQVKHADKELTYNCICSFLEIYNEQITDLLDPSQKNLQVREDVRTACVYVESLTKELVFTLKDVTQLLVKGLANRRTGATSANADSSRSHCVFTCVIKMDSKNPEDGSSITRSSRINLVDLAGSERQKLTHAAGDRLKEAGNINRSLSQLGNLINILAEISQSGKQRHHVPYRDSKLTFLLQESLGGNAKLAMICAVSPSQSCKSETLSTLRFAQRAKAIKNNAVVNEEKIEDVNALREQIRQLKDELHRMKSNGGIEGNSGSFATGWNPRRSLHLLKMSLGHPTTFQCIKEDSDEEMEIDENDVEKPYNHENMAMSSINVKESKRFQASMNVSAGTSQVEDLDRDKILISIKRSCCSANKFNTGTDVGDGKCKLNIAASIQRGLQVIESHQNNSAWKRASVGLNARIMDIQPCKVDVAIQTDPEEYETRDNPLALVPSCLLEASANESRDPSTCRDLQLVPVDVTVPSDDQKQRHFLKAVEKVLAGAIRREMARDEQCAKQAAEIQQLNRLVQQYKHERECNAV

SEQ ID NO: 165349 - protein, 734 aa, Zea Mays
MSLLSRHARHPTTPPPASFSGGVETPPRRRVPKENVDPSSPARNHHSALDHGASPFRSPSSAAKPLSARNRLPPRPPSSNPLKRKLEVSPAAAAVGSAHDAAPGLDSGVQVVVRIRPSCWVDEEEAGEDGRGPEACVRKTAANSVAIQGQDFTFDAVADSVSTQEDIFTLVGLPLVENCLSGFNSSIFAYGQTGSGKTYTMWGPLSALSEDSLSSERGLTPRVFEQLFSRINEEQVKHADKELTYNCICSFLEIYNEQITDLLDPSQKNLQDVTQLLVKGLANRRTGATSANADSSRSHCVFTCVIKMDSKNPEDGSSITRSSRINLVDLAGSERQKLTHAAGDRLKEAGNINRSLSQLGNLINILAEISQSGKQRHHVPYRDSKLTFLLQESLGGNAKLAMICAVSPSQSCKSETLSTLRFAQRAKAIKNNAVVNEEKIEDVNALREQIRQLKDELHRMKSNGGIEGNSGSFATGWNPRRSLHLLKMSLGHPTTFQCIKEDSDEEMEIDENDVEKPYNHENMAMSSINVKESKRFQASMNVSAGTSQVEDLDRDKILISIKRSCCSANKFNTGTDVGDGKCKLNIAASIQRGLQVIESHQNNSAWKRASVGLNARIMDIQPCKVDVAIQTDPEEYETRDNPLALVPSCLLEASANESRDPSTCRDLQLVPVDVTVPSDDQKQRHFLKAVEKVLAGAIRREMARDEQCAKQAAEIQQLNRLVQQYKHERECNAV

SEQ ID NO: 165350 - protein, 758 aa, Zea Mays
MSLLSRHARHPTTPPPASFSGGVETPPRRRVPKENVDPSSPARNHHSALDHGASPFRSPSSAAKPLSARNRLPPRPPSSNPLKRKLEVSPAAAAVGSAHDAAPGLDSGVQVVVRIRPSCWVDEEEAGEDGRGPEACVRKTAANSVAIQGQDFTFDAVADSVSTQEDIFTLVGLPLVENCLSGFNSSIFAYGQTGSGKTYTMWGPLSALSEDSLSSERGLTPRVFEQLFSRINEEQVKHADKELTYNCICSFLEIYNEQITDLLDPSQKNLQVREDVRTACVYVESLTKELVFTLKDVTQLLVKGLANRRTGATSANADSSRSHCVFTCVIKMDSKNPEDGSSITRSSRINLVDLAGSERQKLTHAAGDRLKEAGNINRSLSQLGNLINILAEISQSGKQRHHVPYRDSKLTFLLQESLGGNAKLAMICAVSPSQSCKSETLSTLRFAQRAKAIKNNAVVNEEKIEDVNALREQIRQLKDELHRMKSNGGIEGNSGSFATGWNPRRSLHLLKMSLGHPTTFQCIKEDSDEEMEIDENDVEKPYNHENMAMSSINVKESKRFQASMNVSAGTSQVEDLDRDKILISIKRSCCSANKFNTGTDVGDGKCKLNIAASIQRGLQVIESHQNNSAWKRASVGLNARIMDIQPCKVDVAIQTDPEEYETRDNPLALVPSCLLEASANESRDPSTCRDLQLVPVDVTVPSDDQKQRHFLKAVEKVLAGAIRREMARDEQCAKQAAEIQQLNRLVQQYKHERECNAV

SEQ ID NO: 165351 - protein, 755 aa, Zea Mays
MSLLSRHARHPTTPPPASFSGGVETPPRRRVPKENVDPSSPARNHHSALDHGASPFRSPSSAAKPLSARNRLPPRPPSSNPLKRKLEVSPAAAAVGSAHDAAPGLDSGVQVVVRIRPSCWVDEEEAGEDGRGPEACVRKTAANSVAIQGQDFTFDAVADSVSTQEDIFTLVGLPLVENCLSGFNSSIFAYGQTGSGKTYTMWGPLSALSEDSLSSERGLTPRVFEQLFSRINEEQVKHADKELTYNCICSFLEIYNEQITDLLDPSQKNLQVREDVRTACVYVESLTKELVFTLKDVTQLLVKGLANRRTGATSANADSSRSHCVFTCVIKMDSKNPEDGSSITRSSRINLVDLAGSERQKLTHAAGDRLKEAGNINRSLSQLGNLINILAEISQSGKQRHHVPYRDSKLTFLLQESLGGNAKLAMICAVSPSQSCKSETLSTLRFAQRAKAIKNNAVVNEEKIEDVNALREQIRQLKDELHRMKSNGGIEGNSGSFATGWNPRRSLHLLKMSLGHPTTFQCIKEDSDEEMEIDENDVEKPYNHENMAMSSINVKESKRFQASMNVSAGTSQVEDLDRDKILISIKRSCCSANKFNTGTDVGDGKCKLNIAASIQRGLQVIESHQNNSAWKRASVGLNARIMDIQPCKVDVAIQTDPEEYETRDNPLALVPSCLLEASANESRDPSTCRDLQLVPVDVTVPSDDQKQRHFLKAVEKVLAGAIRREMARDEQCAKQAAEIQQLNRLYKHERECNAV

SEQ ID NO: 165352 - protein, 359 aa, Zea Mays
MLSKTAICCRMTPLQKAQLVAILKSVGYLTLAIGDGGNDVRMIQEANIGVGISGREGLQAARAADYSIGKFKFLKRLILIHGRYSYNRTAFISQYSFYKSLLMCFIQILFAFLSGLSGTSLFNSISLMAYNVFYTSLPVMTIIFDKDISETTVMQYPQILLHSQAGRLLNLTTFCGWFGRSLYHALVVFFITICAYSDEKSEMQELSMVALSGCIWLQAFVVTMDTNSFTCPQILLIWGNFVAFYMINLILSTVPSLQLYTITFRLCSQPSYWISMALTVAVGMGPVVAFRYLKNLYQPSAVNILQQVEQRNGSIRTSGNLESAGANLTNLLTGSRKNRDSNYRPLLSESAESVSASGS

SEQ ID NO: 165353 - protein, 301 aa, Zea Mays
MLSNDTFAESTEFKFLKRLILIHGRYSYNRTAFISQYSFYKSLLMCFIQILFAFLSGLSGTSLFNSISLMAYNVFYTSLPVMTIIFDKDISETTVMQYPQILLHSQAGRLLNLTTFCGWFGRSLYHALVVFFITICAYSDEKSEMQELSMVALSGCIWLQAFVVTMDTNSFTCPQILLIWGNFVAFYMINLILSTVPSLQLYTITFRLCSQPSYWISMALTVAVGMGPVVAFRYLKNLYQPSAVNILQQVEQRNGSIRTSGNLESAGANLTNLLTGSRKNRDSNYRPLLSESAESVSASGS

SEQ ID NO: 165354 - protein, 443 aa, Zea Mays
MFDWETNTPAHSANTAISEDLGQIEYILSDKTGTLTENKMIFKQCCISDTLYGNDNGDALNDVRLVNAVSSNDPDVIKFLLVMALCNTVVPIKSNDGTVSYKAQSQDEEALVNAAAKLNMMLISKDTITAEICFNGSKFWYELLDILEFTSDRKRMSVVVKEGETGKILLLSKGADEALLPRACPGQQIQRYLEAVEMYSQLGLRTLCLGWRDLKENEYKEWSKNFQKASCSLDNREFKIAEVCNSLEQDLQILGVTAIEDRLQDGVPETIKLLRNAGINVWMLTGDKQNTAIQIGLLCNLITSGPNSQLLSISGKTEEDVLRSLERALFIMKNTSETKGLAFVLDGWALELILKHSKESFTRLAMLSKTAICCRMTPLQKAQLVAILKSVGYLTLAIGDGGNDVRMIQEANIGVGISGREGLQAARAADYSIGSKHTSSWHK

SEQ ID NO: 165355 - protein, 393 aa, Zea Mays
MKNTSETKGLAFVLDGWALELILKHSKESFTRLAMLSKTAICCRMTPLQKAQLVAILKSVGYLTLAIGDGGNDVRMIQEANIGVGISGREGLQAARAADYSIGKFKFLKRLILIHGRYSYNRTAFISQYSFYKSLLMCFIQILFAFLSGLSGTSLFNSISLMAYNVFYTSLPVMTIIFDKDISETTVMQYPQILLHSQAGRLLNLTTFCGWFGRSLYHALVVFFITICAYSDEKSEMQELSMVALSGCIWLQAFVVTMDTNSFTCPQILLIWGNFVAFYMINLILSTVPSLQLYTITFRLCSQPSYWISMALTVAVGMGPVVAFRYLKNLYQPSAVNILQQVEQRNGSIRTSGNLESAGANLTNLLTGSRKNRDSNYRPLLSESAESVSASGS

SEQ ID NO: 165356 - protein, 876 aa, Zea Mays
MRLFLPIIDNEKSPLTINNTLLQSCYLRYTEWACGVAVYTGNETKSGISRGAAEPKFTAADVIIDKLTIAIFMFQVVVVLVLGYFGNTWKDTQGLKQWYLMYPMEVEGPWYDFLIIPLRFELLCSIMIPISIKVTLDLAKGLYAKFIDWDEQMFDWETNTPAHSANTAISEDLGQIEYILSDKTGTLTENKMIFKQCCISDTLYGNDNGDALNDVRLVNAVSSNDPDVIKFLLVMALCNTVVPIKSNDGTVSYKAQSQDEEALVNAAAKLNMMLISKDTITAEICFNGSKFWYELLDILEFTSDRKRMSVVVKEGETGKILLLSKGADEALLPRACPGQQIQRYLEAVEMYSQLGLRTLCLGWRDLKENEYKEWSKNFQKASCSLDNREFKIAEVCNSLEQDLQILGVTAIEDRLQDGVPETIKLLRNAGINVWMLTGDKQNTAIQIGLLCNLITSGPNSQLLSISGKTEEDVLRSLERALFIMKNTSETKGLAFVLDGWALELILKHSKESFTRLAMLSKTAICCRMTPLQKAQLVAILKSVGYLTLAIGDGGNDVRMIQEANIGVGISGREGLQAARAADYSIGKFKFLKRLILIHGRYSYNRTAFISQYSFYKSLLMCFIQILFAFLSGLSGTSLFNSISLMAYNVFYTSLPVMTIIFDKDISETTVMQYPQILLHSQAGRLLNLTTFCGWFGRSLYHALVVFFITICAYSDEKSEMQELSMVALSGCIWLQAFVVTMDTNSFTCPQILLIWGNFVAFYMINLILSTVPSLQLYTITFRLCSQPSYWISMALTVAVGMGPVVAFRYLKNLYQPSAVNILQQVEQRNGSIRTSGNLESAGANLTNLLTGSRKNRDSNYRPLLSESAESVSASGS

SEQ ID NO: 165357 - protein, 470 aa, Zea Mays
MRLFLPIIDNEKSPLTINNTLLQSCYLRYTEWACGVAVYTGNETKSGISRGAAEPKFTAADVIIDKLTIAIFMFQVVVVLVLGYFGNTWKDTQGLKQWYLMYPMEVEGPWYDFLIIPLRFELLCSIMIPISIKVTLDLAKGLYAKFIDWDEQMFDWETNTPAHSANTAISEDLGQIEYILSDKTGTLTENKMIFKQCCISDTLYGNDNGDALNDVRLVNAVSSNDPDVIKFLLVMALCNTVVPIKSNDGTVSYKAQSQDEEALVNAAAKLNMMLISKDTITAEICFNGSKFWYELLDILEFTSDRKRMSVVVKEGETGKILLLSKGADEALLPRACPGQQIQRYLEAVEMYSQLGLRTLCLGWRDLKENEYKEWSKNFQKASCSLDNREFKIAEVCNSLEQDLQILGVTAIEDRLQDGVPETIKLLRNAGINVWMLTGDKQNTAIQIGLLCNLITSVNCYLSVGKLKRTC

SEQ ID NO: 165358 - protein, 421 aa, Zea Mays
MKRFVYINDDSCRYSYCDNRISNTKYTLWNFLPKNLWEQFRRFMNQYFLLIACLQLWSRITPVSPATTWGPLIIIFIVSASKEAWDDYNRYLSDKKANERKIWLVKDGVRIQIKAQEVHVGDLVWLHENDEIPCDLVLIGTSDRQGICYVETAALDGETDLKTRTIPPISANLSVEQLGKVKGVIECPNPDNDIRRFDANMRLFLPIIDNEKSPLTINNTLLQSCYLRYTEWACGVAVYTGNETKSGISRGAAEPKFTAADVIIDKLTIAIFMFQVVVVLVLGYFGNTWKDTQGLKQWYLMYPMEVEGPWYDFLIIPLRFELLCSIMIPISIKVTLDLAKGLYAKFIDWDEQMFDWETNTPAHSANTAISEDLGQIEYILSDKTGTLTENKMIFKQCCISDTLYGNDNGDALNEAKLFFVH

SEQ ID NO: 165359 - protein, 398 aa, Zea Mays
MQSLLTGMSKCLIGKQIHLLIQLTISEDLGQIEYILSDKTGTLTENKMIFKQCCISDTLYGNDNGDALNDVRLVNAVSSNDPDVIKFLLVMALCNTVVPIKSNDGTVSYKAQSQDEEALVNAAAKLNMMLISKDTITAEICFNGSKFWYELLDILEFTSDRKRMSVVVKEGETGKILLLSKGADEALLPRACPGQQIQRYLEAVEMYSQLGLRTLCLGWRDLKENEYKEWSKNFQKASCSLDNREFKIAEVCNSLEQDLQILGVTAIEDRLQDGVPETIKLLRNAGINVWMLTGDKQNTAIQIGLLCNLITSGPNSQLLSISGKTEEDVLRSLERALFIMKNTSETKGLAFVLDGWALELILKHSKESFTRLAMLSKTAICCRMTPLQKAQSSSFLRD

SEQ ID NO: 165360 - protein, 367 aa, Zea Mays
MKRFVYINDDSCRYSYCDNRISNTKYTLWNFLPKNLWEQFRRFMNQYFLLIACLQLWSRITPVSPATTWGPLIIIFIVSASKEAWDDYNRYLSDKKANERKIWLVKDGVRIQIKAQEVHVGDLVWLHENDEIPCDLVLIGTSDRQGICYVETAALDGETDLKTRTIPPISANLSVEQLGKVKGVIECPNPDNDIRRFDANMRLFLPIIDNEKSPLTINNTLLQSCYLRYTEWACGVAVYTGNETKSGISRGAAEPKFTAADVIIDKLTIAIFMFQVVVVLVLGYFGNTWKDTQGLKQWYLMYPMEVEGPWYDFLIIPLRFELLCSIMIPISIKVTLDLAKGLYAKFIDWDEQMFDWETNTPAHSANY

SEQ ID NO: 165361 - protein, 1043 aa, Zea Mays
MGAIQYFRRFMNQYFLLIACLQLWSRITPVSPATTWGPLIIIFIVSASKEAWDDYNRYLSDKKANERKIWLVKDGVRIQIKAQEVHVGDLVWLHENDEIPCDLVLIGTSDRQGICYVETAALDGETDLKTRTIPPISANLSVEQLGKVKGVIECPNPDNDIRRFDANMRLFLPIIDNEKSPLTINNTLLQSCYLRYTEWACGVAVYTGNETKSGISRGAAEPKFTAADVIIDKLTIAIFMFQVVVVLVLGYFGNTWKDTQGLKQWYLMYPMEVEGPWYDFLIIPLRFELLCSIMIPISIKVTLDLAKGLYAKFIDWDEQMFDWETNTPAHSANTAISEDLGQIEYILSDKTGTLTENKMIFKQCCISDTLYGNDNGDALNDVRLVNAVSSNDPDVIKFLLVMALCNTVVPIKSNDGTVSYKAQSQDEEALVNAAAKLNMMLISKDTITAEICFNGSKFWYELLDILEFTSDRKRMSVVVKEGETGKILLLSKGADEALLPRACPGQQIQRYLEAVEMYSQLGLRTLCLGWRDLKENEYKEWSKNFQKASCSLDNREFKIAEVCNSLEQDLQILGVTAIEDRLQDGVPETIKLLRNAGINVWMLTGDKQNTAIQIGLLCNLITSGPNSQLLSISGKTEEDVLRSLERALFIMKNTSETKGLAFVLDGWALELILKHSKESFTRLAMLSKTAICCRMTPLQKAQLVAILKSVGYLTLAIGDGGNDVRMIQEANIGVGISGREGLQAARAADYSIGKFKFLKRLILIHGRYSYNRTAFISQYSFYKSLLMCFIQILFAFLSGLSGTSLFNSISLMAYNVFYTSLPVMTIIFDKDISETTVMQYPQILLHSQAGRLLNLTTFCGWFGRSLYHALVVFFITICAYSDEKSEMQELSMVALSGCIWLQAFVVTMDTNSFTCPQILLIWGNFVAFYMINLILSTVPSLQLYTITFRLCSQPSYWISMALTVAVGMGPVVAFRYLKNLYQPSAVNILQQVEQRNGSIRTSGNLESAGANLTNLLTGSRKNRDSNYRPLLSESAESVSASGS

SEQ ID NO: 165362 - protein, 470 aa, Zea Mays
MFQVVVVLVLGYFGNTWKDTQGLKQWYLMYPMEVEGPWYDFLIIPLRFELLCSIMIPISIKVTLDLAKGLYAKFIDWDEQMFDWETNTPAHSANTAISEDLGQIEYILSDKTGTLTENKMIFKQCCISDTLYGNDNGDALNDVRLVNAVSSNDPDVIKFLLVMALCNTVVPIKSNDGTVSYKAQSQDEEALVNAAAKLNMMLISKDTITAEICFNGSKFWYELLDILEFTSDRKRMSVVVKEGETGKILLLSKGADEALLPRACPGQQIQRYLEAVEMYSQLGLRTLCLGWRDLKENEYKEWSKNFQKASCSLDNREFKIAEVCNSLEQDLQILGVTAIEDRLQDGVPETIKLLRNAGINVWMLTGDKQNTAIQIGLLCNLITSGPNSQLLSISGKTEEDVLRSLERALFIMKNTSETKGLAFVLDGWALELILKHSKESFTRLAMLSKTAICCRMTPLQKAQSSSFLRD

SEQ ID NO: 165363 - protein, 311 aa, Zea Mays
MKRFVYINDDSCRYSYCDNRISNTKYTLWNFLPKNLWEQFRRFMNQYFLLIACLQLWSRITPVSPATTWGPLIIIFIVSASKEAWDDYNRYLSDKKANERKIWLVKDGVRIQIKAQEVHVGDLVWLHENDEIPCDLVLIGTSDRQGICYVEGVIECPNPDNDIRRFDANMRLFLPIIDNEKSPLTINNTLLQSCYLRYTEWACGVAVYTGNETKSGISRGAAEPKFTAADVIIDKLTIAIFMFQVVVVLVLGYFGNTWKDTQGLKQWYLMYPMEVEGPWYDFLIIPLRFELLCSIMIPISIKSCLVLASSY

SEQ ID NO: 165364 - protein, 220 aa, Zea Mays
MKRFVYINDDSCRYSYCDNRISNTKYTLWNFLPKNLWEQFRRFMNQYFLLIACLQLWSRITPVSPATTWGPLIIIFIVSASKEAWDDYNRYLSDKKANERKIWLVKDGVRIQIKAQEVHVGDLVWLHENDEIPCDLVLIGTSDRQGICYVETAALDGETDLKTRTIPPISANLSVEQLGKVKGVIECPNPDNDIRSHVTFDTLNGLVELQFTQAMKQNLE

SEQ ID NO: 165365 - protein, 73 aa, Zea Mays
MGKYFSRFFSLSVFKESWYLVRRLRMARVFLGRRSSGRSFFFLYASRSADFCFCEMTVSTRAMEVRTILLGDA

SEQ ID NO: 165366 - protein, 175 aa, Zea Mays
MLKVCLGDSSMRLGVPFIAPRQLGAVGGILGRQYLPSVGWRTGQSGAPPDIPCSLSDANRLPNLAQPTVEDLESLAHRTVRCPHQTVGSATRHVRIARPTVGAADRWLTGQSGAPQDSPMNFSRTPPTNSRERPVDQNPAWRTGHCQVHHRTVRCTQTVLCLGCFSQVFFFFCFP

SEQ ID NO: 165367 - protein, 73 aa, Zea Mays
MGSIYLCYVEFSLVASGNGVMTKRLMVPRRNREPLVGAHTRLSCSVRAGIAVNSRDPLRDYTDVLSFVDILSK

SEQ ID NO: 165368 - protein, 57 aa, Zea Mays
MHQSKLVDMQTPYYYFRFSSITKASLSIYKLHIITFGYYRSCNIFNTTTQLRWSCHS

SEQ ID NO: 165369 - protein, 246 aa, Zea Mays
MGPINTDESAVCLTGLQPEIPAFEDWETTGNTPYTQKFEDVRKNKKTGIPAQTNDPRRNPEHPRKSPLHPTAYKTDPQDQGPRNPPHRPRPETDQQRHSDRPTHREPAPRRHANPHREQGSNAVAPRSPYRTAAGSASPMQSNNQSKPNHRSTATQAPERRHSSEGHSQHTPGRSRMKPGSYEPEEVAVPPFGEWDDANAASGEKYTGIFNRVRDDRLSPTSSARQPSTARREENKVQQKCSCCIL

SEQ ID NO: 165370 - protein, 305 aa, Zea Mays
MDLDGWGLGGILTLSLLKKGYKLGSSCEIFLSWEDLILLLLVPEGRICVKRVVVQNFLCTGEAQLRLADPNWPMAQPEIPAFEDWETTGNTPYTQKFEDVRKNKKTGIPAQTNDPRRNPEHPRKSPLHPTAYKTDPQDQGPRNPPHRPRPETDQQRHSDRPTHREPAPRRHANPHREQGSNAVAPRSPYRTAAGSASPMQSNNQSKPNHRSTATQAPERRHSSEGHSQHTPGRSRMKPGSYEPEEVAVPPFGEWDDANAASGEKYTGIFNRVRDDRLSPTSSARQPSTARREENKVQQKCSCCIL

SEQ ID NO: 165371 - protein, 173 aa, Zea Mays
MAQPEIPAFEDWETTGNTPYTQKFEDVRKNKKTGIPAQTNDPRRNPEHPRKSPLHPTAYKTDPQDQGPRNPPHRPRPETDQQRHSDRPTHREPAPRRHANPHREQGSNAVAPRSPYRTAAGSASPMQSNNQSKPNHRSTATQAPERRHSSEGHSQHTPGRSRMKPGSYEGKGR

SEQ ID NO: 165372 - protein, 57 aa, Zea Mays
MLAALEIWKHRNDCVFEGQWPCVHTVLQVVANECTLWCAAGASALQELLTRQPTLRV

SEQ ID NO: 165373 - protein, 349 aa, Zea Mays
MLLRVCSLSKYGFMMAGDGVKQRHTLQEVTSEITGPMVVEDVVYENADGDQGSMSEKMFRRLIFGRSSGLVQSEALLIRDPPSDEVDKKNKSAAATSKKRRNHKRGSKNSLRIDHKFLGSSYHSSIISGLSLVASSLSAAASSGEKVSITVVGLGAGCFPMFLRGCLPFVDIEVVELDPLVAELAKKYFGFSMDEQLKVHLGDGIKFIEDSVAANQSVNGSTRNAFKILILDVDSSDLSSGLSCPPENFVEDPFLLIAKEFLLEGGLFVINLVSRSTSVRETVVSRLKAVFEHLYSLQLEEDINEVLFASPSGRYLEINDISAGASKLQDLLKIPVDVESDIQKLQKLQ

SEQ ID NO: 165374 - protein, 336 aa, Zea Mays
MMAGDGVKQRHTLQEVTSEITGPMVVEDVVYENADGDQGSMSEKMFRRLIFGRSSGLVQSEALLIRDPPSDEVDKKNKSAAATSKKRRNHKRGSKNSLRIDHKFLGSSYHSSIISGLSLVASSLSAAASSGEKVSITVVGLGAGCFPMFLRGCLPFVDIEVVELDPLVAELAKKYFGFSMDEQLKVHLGDGIKFIEDSVAANQSVNGSTRNAFKILILDVDSSDLSSGLSCPPENFVEDPFLLIAKEFLLEGGLFVINLVSRSTSVRETVVSRLKAVFEHLYSLQLEEDINEVLFASPSGRYLEINDISAGASKLQDLLKIPVDVESDIQKLQKLQ

SEQ ID NO: 165375 - protein, 478 aa, Zea Mays
MATTTPPTAILGTLVDFTSRENWDKFFALRGTGDSFEWYAEWPNLRAPLLDLLGDRGAAAGAAQEILVPACGSSVLSEKLYDAGFCRVTNVDFSRVVVADMLRRHARARPEMRWRVMDMTDMQFADGSFDVILDKGGLDALMEPEAGTKLGIKYLNEVKRVMKSGGKFVCLTLAESHVLALLLSEFRFGWDMSIQAIASESSEKSAFQTFMVVMVKGKMGVAQTIKSSLDQSAEYCNMRQANAVIRALGNENIIRESYSSSVDVLLSLRDLQLGAIGDLKVIVPGRRRQFILGEQETSLYCYKAILLDAKKQTETFVYHCGVFIVPKVHLGDGIKFIEDSVAANQSVNGSTRNAFKILILDVDSSDLSSGLSCPPENFVEDPFLLIAKEFLLEGGLFVINLVSRSTSVRETVVSRLKAVFEHLYSLQLEEDINEVLFASPSGRYLEINDISAGASKLQDLLKIPVDVESDIQKLQKLQ

SEQ ID NO: 165376 - protein, 400 aa, Zea Mays
MATTTPPTAILGTLVDFTSRENWDKFFALRGTGDSFEWYAEWPNLRAPLLDLLGDRGAAAGAAQEILVPACGSSVLSEKLYDAGFCRVTNVDFSRVVVADMLRRHARARPEMRWRVMDMTDMQFADGSFDVILDKGGLDALMEPEAGTKLGIKYLNEVKRVMKSGGKFVCLTLAESHVLALLLSEFRFGWDMSIQAIASESSEKSAFQTFMVVMVKGKMGVAQTIKSSLDQSAEYCNMRQANAVIRALGNENIIRESYSSSVDVLLSLRDLQLGAIGDLKVIVPGRRRQFILGEQETSLYCYKAILLDAKKQTETFVYHCGVFIVPKARALEWLFCSSEGQWHVVESARAARLIMKDLSPLVKDLEPGNPEEEAPIPFMMAGDGVKQRHTLQEKFWFSAI

SEQ ID NO: 165377 - protein, 360 aa, Zea Mays
MATTTPPTAILGTLVDFTSRENWDKFFALRGTGDSFEWYAEWPNLRAPLLDLLGDRGAAAGAAQEILVPACGSSVLSEKLYDAGFCRVTNVDFSRVVVADMLRRHARARPEMRWRVMDMTDMQFADGSFDVILDKGGLDALMEPEAGTKLGIKYLNEVKRVMKSGGKFVCLTLAESHVLALLLSEFRFGWDMSIQAIASESSEKSAFQTFMVVMVKGKMGVAQTIKSSLDQSAEYCNMRQANAVIRALGNENIIRESYSSSVDVLLSLRDLQLGAIGDLKVIVPGRRRQFILGEQETSLYCYKAILLDAKKQTETFVYHCGVFIVPKARALEWLFCSSEGQWHVVESARAARLIMVHDGR

SEQ ID NO: 165378 - protein, 560 aa, Zea Mays
MATTTPPTAILGTLVDFTSRENWDKFFALRGTGDSFEWYAEWPNLRAPLLDLLGDRGAAAGAAQEILVPACGSSVLSEKLYDAGFCRVTNVDFSRVVVADMLRRHARARPEMRWRVMDMTDMQFADGSFDVILDKGGLDALMEPEAGTKLGIKYLNEVKRVMKSGGKFVCLTLAESHVLALLLSEFRFGWDMSIQAIASESSEKSAFQTFMVVMVKGKMGVAQTIKSSLDQSAEYCNMRQANAVIRALGNENIIRESYSSSVDVLLSLRDLQLGAIGDLKVIVPGRRRQFILGEQETSLYCYKAILLDAKKQTETFVYHCGVFIVPKARALEWLFCSSEGQWHVVESARAARLIMVFLDSRHANIDMDIIKKDLSPLVKDLEPGNPEEEAPIPFMMAGDGVKQRHTLQEVHLGDGIKFIEDSVAANQSVNGSTRNAFKILILDVDSSDLSSGLSCPPENFVEDPFLLIAKEFLLEGGLFVINLVSRSTSVRETVVSRLKAVFEHLYSLQLEEDINEVLFASPSGRYLEINDISAGASKLQDLLKIPVDVESDIQKLQKLQ

SEQ ID NO: 165379 - protein, 648 aa, Zea Mays
MATTTPPTAILGTLVDFTSRENWDKFFALRGTGDSFEWYAEWPNLRAPLLDLLGDRGAAAGAAQEILVPACGSSVLSEKLYDAGFCRVTNVDFSRVVVADMLRRHARARPEMRWRVMDMTDMQFADGSFDVILDKGGLDALMEPEAGTKLGIKYLNEVKRVMKSGGKFVCLTLAESHVLALLLSEFRFGWDMSIQAIASESSEKSAFQTFMVVMVKGKMGVAQTIKSSLDQSAEYCNMRQANAVIRALGNENIIRESYSSSVDVLLSLRDLQLGAIGDLKVIVPGRRRQFILGEQETSLYCYKAILLDAKKQTETFVYHCGVFIVPKVTSEITGPMVVEDVVYENADGDQGSMSEKMFRRLIFGRSSGLVQSEALLIRDPPSDEVDKKNKSAAATSKKRRNHKRGSKNSLRIDHKFLGSSYHSSIISGLSLVASSLSAAASSGEKVSITVVGLGAGCFPMFLRGCLPFVDIEVVELDPLVAELAKKYFGFSMDEQLKVHLGDGIKFIEDSVAANQSVNGSTRNAFKILILDVDSSDLSSGLSCPPENFVEDPFLLIAKEFLLEGGLFVINLVSRSTSVRETVVSRLKAVFEHLYSLQLEEDINEVLFASPSGRYLEINDISAGASKLQDLLKIPVDVESDIQKLQKLQ

SEQ ID NO: 165380 - protein, 678 aa, Zea Mays
MATTTPPTAILGTLVDFTSRENWDKFFALRGTGDSFEWYAEWPNLRAPLLDLLGDRGAAAGAAQEILVPACGSSVLSEKLYDAGFCRVTNVDFSRVVVADMLRRHARARPEMRWRVMDMTDMQFADGSFDVILDKGGLDALMEPEAGTKLGIKYLNEVKRVMKSGGKFVCLTLAESHVLALLLSEFRFGWDMSIQAIASESSEKSAFQTFMVVMVKGKMGVAQTIKSSLDQSAEYCNMRQANAVIRALGNENIIRESYSSSVDVLLSLRDLQLGAIGDLKVIVPGRRRQFILGEQETSLYCYKAILLDAKKQTETFVYHCGVFIVPKARALEWLFCSSEGQWHVVESARAARLIMVFLDSRHANIDMDIIKKDLSPLVKDLEPGNPEEEAPIPFMMAGDGVKQRHTLQEVTSEITGPMVVEDVVYENADGDQGSMSEKMFRRLIFGRSSGLVQSEALLIRDPPSDEVDKKNKSAAATSKKRRNHKRGSKNSLRIDHKFLGSSYHSSIISGLSLVASSLSAAASSGEKVHLGDGIKFIEDSVAANQSVNGSTRNAFKILILDVDSSDLSSGLSCPPENFVEDPFLLIAKEFLLEGGLFVINLVSRSTSVRETVVSRLKAVFEHLYSLQLEEDINEVLFASPSGRYLEINDISAGASKLQDLLKIPVDVESDIQKLQKLQ

SEQ ID NO: 165381 - protein, 410 aa, Zea Mays
MATTTPPTAILGTLVDFTSRENWDKFFALRGTGDSFEWYAEWPNLRAPLLDLLGDRGAAAGAAQEILVPACGSSVLSEKLYDAGFCRVTNVDFSRVVVADMLRRHARARPEMRWRVMDMTDMQFADGSFDVILDKGGLDALMEPEAGTKLGIKYLNEVKRVMKSGGKFVCLTLAESHVLALLLSEFRFGWDMSIQAIASESSEKSAFQTFMVVMVKGKMGVAQTIKSSLDQSAEYCNMRQANAVIRALGNENIIRESYSSSVDVLLSLRDLQLGAIGDLKVIVPGRRRQFILGEQETSLYCYKAILLDAKKQTETFVYHCGVFIVPKARALEWLFCSSEGQWHVVESARAARLIMVFLDSRHANIDMDIIKKDLSPLVKDLEPGNPEEEAPIPFMMAGDGVKQRHTLQEK

SEQ ID NO: 165382 - protein, 113 aa, Zea Mays
MHPQPSNADPKPKPKPVSEVVNISRRQTADEMPARQSKRAPKQTSLKKTSQPKVESPLSSFLSSLGLEKYSITFQAEEVDMAALRHMTESDLKALGIPMGPRKKIILALEPRA

SEQ ID NO: 165383 - protein, 211 aa, Zea Mays
MEFFNGDSSDSLSNQESLKRILTIFAKLNPGIRYVQGMNEVLAPLYYVFKNDPDQSQAALAEPDAFFCFVELLSGFRDNFCKQLDNSVVGIRSTITTLSQLLRRHDEELWRHLEVVTKVNPQFYAFRWITLLLTQEFQFRDCLSLWDTLLGDPEGPQATLLRVCCAMLILVRRRLLAGDFTANLKLLQNYPPTNIDHILHIANKLRGPLPF

SEQ ID NO: 165384 - protein, 420 aa, Zea Mays
MDDGDTPRRKSVPDWLNSPIWSAPPPSPRHSSLPPTAPSPPQPPPSPLPPPQPRRDPTPIPPPNAPRDADVSDDEGKGAGAPSCAHLVAEFKVALDRKVVDLAELRRLACQGVPDAAGIRPIVWKRSQYCDFKDELLVNPSEVTRRMEEMTASEREEHNAEGTGVLPRAEIVRDEHPLSLGKTSVWNQYFQESEIVEQIDRDVKRTHPEMEFFNGDSSDSLSNQESLKRILTIFAKLNPGIRYVQGMNEVLAPLYYVFKNDPDQSQAALAEPDAFFCFVELLSGFRDNFCKQLDNSVVGIRSTITTLSQLLRRHDEELWRHLEVVTKVNPQFYAFRWITLLLTQEFQFRDCLSLWDTLLGDPEGPQATLLRVCCAMLILVRRRLLAGDFTANLKLLQNYPPTNIDHILHIANKLRGPLPF

SEQ ID NO: 165385 - protein, 844 aa, Zea Mays
MYQWRKFEFFEEKSAGRGGGGGSAAAVPAEIAGRVTCCSGGRGRVAVGCDDGTVGLLDRGFRLSYGFQAYASSVLFLQQLKQRNVLVTVGDDDQSSSQASAICLKVFDLDKVQEEGSSTTTPFCVQILRIFTDQFPQAKITSFMVLEEAPPILMIAIGLDNGFIYCIKGDIARERITRFKLQVEAASDGSTSLPITGLGFRVEGQAHQLFSVTPGSVTLFSLHIQPPRRQTLDQIGCQTNAVAMSDRMDLIIGRPEAVYFYEVDGRGPCWAFDGEKKFVGWFRGYLLCIIEDQRTHKSTLNVYDLKNRLIAHSMPVGDVSHLVCEWGYIILIMSDKKILCIGEKDMESKLDMLFKKNLYTVAINLVQSQQADPASTAEVLRKYGDHLYGKQEYDEAMSQYIHTIGHLEPSYVIQKFLDAKRIYNLTNYLEKLHDRGLASKDHTTLLLNCYTKLKDVEKLNHFIKDEDGVGEIKFDVETAIRVCRAAGYHEHAMFVAKKAGRHELYLKILLEDLGRYDEALQYISGLEANQAGLTVKEYGKILVEHRPAETVEILLRLCTDVGDPTSRRGSNSMHLLMIPSPMDFVNIFVHSPQYLMGFLENYIKTVTDSPAQTEIHNTLLELYISNDLSFPSISQENEYENHYIKEIKGKETANVYRSGIKEKTGLGKEDPKVAKNIVDRRRKGLALLKSAWTSEMEDPLYDVDLALILCNTNAFKDGLLFLYEKLKLYKEVISCYKQAHDHQGLIACCKKLGDSSQGGDPSLWGDLLKYFGDLGEDCSKEVKEVLTYIEKEDVVPPIVVLQTLSKNPCLTLSVVKDYIARKLEQESKLIEDDRKSIDKYQRQS

SEQ ID NO: 165386 - protein, 220 aa, Zea Mays
MAAAAVGGHREALYSLAVIQFNGSGGGKDDRDLRAGAALCARAAARGHVDALRELGHCLQDGYGVRRSVLDGRRLLIQANARELAAASVAHPCLLMSDLGCRAGEAHAANRFLVDWFASRPLGLTPGGNGNGSAGTAGSPEEDGVGGLRLCSQALCGRPETRRHEFRRCSVCGVVNYCSRACQALHWRMAHKAECTPMDRWLDAVQPNAIANADAAAPAP

SEQ ID NO: 165387 - protein, 157 aa, Zea Mays
MSGNYLFGEVLRGVSRLAGLQTLVLDDNMLGGEVPTWIGAQPSLAVLSLRNNTFQGVVPESLGSAPSLRSLVLASNNLSGNLPDMSQQANLQVLDVGGNSLEPAFPKLGRKVVTVVLARNRFVAFLQNPQLVQEFRPDKQYNIHMLQERYQGKDNAY

SEQ ID NO: 165388 - protein, 199 aa, Zea Mays
MQPQSVNDSEPIQIDDDVDEIEEVIAEPKRKLTSVVWNEFKRVKLSSSEIKAQCSYCHKKLNGKSTHGTKHLHDHLKICVLRKIKLTSQNKIMSQSSLRFSSQEGGKVSVESYTFDPEVARKELAAMIALHEYPLCIVEHIGFRRFVSACQPLFKMVSENTIRKDIMDAYTEEKKRVLQYMCACKSRVAITRDMWTSDN

SEQ ID NO: 165389 - protein, 148 aa, Zea Mays
MASEAARRRQEMAEEGQRHLEETIAASFQILVSMNDELCNAGLWSSSSVSATAAAGYQHHHSATLPTPHSVDSDAADAGGAPSPGGSLDEARHRYKSAVAALRASISAVSSCAQDIGSTESEADHAEIERLEEHASALRKVLPCNFSS

SEQ ID NO: 165390 - protein, 239 aa, Zea Mays
MAEKEGAKVGAEEMEEREQEGEAEEVEVKFRLFDGSDIGPVRCNAAATTVAALKDRVVADWPKDKSIIPKTASDVKLISGGKILENDKNVAQCRAPFGDLPSSAITMHVVVQPSSAKSKPEGEQVAQNHSLLMYHTMNYEGPSPSETNNNLYVHRRFCRGFENERSKMSTSFFSANGWQWRKTTTSICCKLCNCNLGTKSGSLCRTDGGKIVYWLPCFTLHKIVLYDVPQDTYTLLFWV

SEQ ID NO: 165391 - protein, 127 aa, Zea Mays
MAEKEGAKVGAEEMEEREQEGEAEEVEVKFRLFDGSDIGPVRCNAAATTVAALKDRVVADWPKELLLVIFPVVLSRCMLLFNHRQQNQNQVSCKFLHFEEICSYGFLTYTIQLIRLDINFFYQYHII

SEQ ID NO: 165392 - protein, 629 aa, Zea Mays
MALPSATVLWTASITFRLAQNMVVLFFLAALLAAPARSSSPSSNNGAGLQQPTLTLCSGHSTVAKSGEFASFLAAVCAGAYGGGVAHMSHSMSSYVAAENRTMYGVAQCRPDVSASDCTACLAAASSKLITGTACATSAVWHDACFLRYSDRDTGRFREDEHTETVFNASRALSSLPPHVGANKAVVVRRLLAAVADSTRSGHMCSDIGVGTGAAGGGRIYGLTRCAAEISCADCRRCLGGALAVVEREYNGSAGMQVLRLSCMARYESYPFYNTKFLTRRLLASATSGSPRPTHGGIVFNSSISFGPFGLVHSGGPNPPPSPPVSPPPPAFTTISVPASVGTAQPTPPPSRPAQAQPSPPPPAASMIVSGPATATPRAAQAQPTPAPPGGHNPPPASPPPASIMNISGPATATPTPRAAQPTPAPPGGPTPQPVAAATNENKGKGTLNTPKWQIVSIATGLVAAFIILALTVWCRRKQQLSQREHVIDGVPGETMHHLEKKHLGSEEDDDGGRTSCQLYSYLVLEAATCRFSSRNKLGSGGFGTVYKGTLENGKDVAVKRLRDSKRAIQELEREISIVASLRHKNIVRFLGYCFQEEGRFFIYEYVLNNSLDKFWYKGKFITPTINYV

SEQ ID NO: 165393 - protein, 763 aa, Zea Mays
MALPSATVLWTASITFRLAQNMVVLFFLAALLAAPARSSSPSSNNGAGLQQPTLTLCSGHSTVAKSGEFASFLAAVCAGAYGGGVAHMSHSMSSYVAAENRTMYGVAQCRPDVSASDCTACLAAASSKLITGTACATSAVWHDACFLRYSDRDTGRFREDEHTETVFNASRALSSLPPHVGANKAVVVRRLLAAVADSTRSGHMCSDIGVGTGAAGGGRIYGLTRCAAEISCADCRRCLGGALAVVEREYNGSAGMQVLRLSCMARYESYPFYNTKFLTRRLLASATSGSPRPTHGGIVFNSSISFGPFGLVHSGGPNPPPSPPVSPPPPAFTTISVPASVGTAQPTPPPSRPAQAQPSPPPPAASMIVSGPATATPRAAQAQPTPAPPGGHNPPPASPPPASIMNISGPATATPTPRAAQPTPAPPGGPTPQPVAAATNENKGKGTLNTPKWQIVSIATGLVAAFIILALTVWCRRKQQLSQREHVIEPHVLNHQADGVPGETMHHLEKKHLGSEEDDDGGRTSCQLYSYLVLEAATCRFSSRNKLGSGGFGTVYKGTLENGKDVAVKRLRDSKRAIQELEREISIVASLRHKNIVRFLGYCFQEEGRFFIYEYVLNNSLDKFWYKASSQCQKLEWATWFNIILGVARGLLFLHDMGIIHRDLKPHNILLDRNFNPKIADFDLMRMYDQQKTHESTEKVAGTFGYMAPECTSGRKFLLSIKSDVYSYGVLVLEIITGHKIYTFEGQNSEGLVEYVWQHWSTG

SEQ ID NO: 165394 - protein, 638 aa, Zea Mays
MALPSATVLWTASITFRLAQNMVVLFFLAALLAAPARSSSPSSNNGAGLQQPTLTLCSGHSTVAKSGEFASFLAAVCAGAYGGGVAHMSHSMSSYVAAENRTMYGVAQCRPDVSASDCTACLAAASSKLITGTACATSAVWHDACFLRYSDRDTGRFREDEHTETVFNASRALSSLPPHVGANKAVVVRRLLAAVADSTRSGHMCSDIGVGTGAAGGGRIYGLTRCAAEISCADCRRCLGGALAVVEREYNGSAGMQVLRLSCMARYESYPFYNTKFLTRRLLASATSGSPRPTHGGIVFNSSISFGPFGLVHSGGPNPPPSPPVSPPPPAFTTISVPASVGTAQPTPPPSRPAQAQPSPPPPAASMIVSGPATATPRAAQAQPTPAPPGGHNPPPASPPPASIMNISGPATATPTPRAAQPTPAPPGGPTPQPVAAATNENKGKGTLNTPKWQIVSIATGLVAAFIILALTVWCRRKQQLSQREHVIEPHVLNHQADGVPGETMHHLEKKHLGSEEDDDGGRTSCQLYSYLVLEAATCRFSSRNKLGSGGFGTVYKGTLENGKDVAVKRLRDSKRAIQELEREISIVASLRHKNIVRFLGYCFQEEGRFFIYEYVLNNSLDKFWYKGKFITPTINYV

SEQ ID NO: 165395 - protein, 759 aa, Zea Mays
MALPSATVLWTASITFRLAQNMVVLFFLAALLAAPARSSSPSSNNGAGLQQPTLTLCSGHSTVAKSGEFASFLAAVCAGAYGGGVAHMSHSMSSYVAAENRTMYGVAQCRPDVSASDCTACLAAASSKLITGTACATSAVWHDACFLRYSDRDTGRFREDEHTETVFNASRALSSLPPHVGANKAVVVRRLLAAVADSTRSGHMCSDIGVGTGAAGGGRIYGLTRCAAEISCADCRRCLGGALAVVEREYNGSAGMQVLRLSCMARYESYPFYNTKFLTRRLLASATSGSPRPTHGGIVFNSSISFGPFGLVHSGGPNPPPSPPVSPPPPAFTTISVPASVGTAQPTPPPSRPAQAQPSPPPPAASMIVSGPATATPRAAQAQPTPAPPGGHNPPPASPPPASIMNISGPATATPTPRAAQPTPAPPGGPTPQPVAAATNENKGKGTLNTPKWQIVSIATGLVAAFIILALTVWCRRKQQLSQREHVIEPHVLNHQADGVPGETMHHLEKKHLGSEEDDDGGRTSCQLYSYLVLEAATCRFSSRNKLGSGGFGTVYKGTLENGKDVAVKRLRDSKRAIQELEREISIVASLRHKNIVRFLGYCFQEEGRFFIYEYVLNNSLDKFWYKASSQCQKLEWATWFNIILGVARGLLFLHDMGIIHRDLKPHNILLDRNFNPKIADFDLMRMYDQQKTHESTEKVAGTFGYMAPECTSGRKFLLSIKSDVYSYGVLVLEIITGHKIYTFEGQNSEGLVEYTVGM

SEQ ID NO: 165396 - protein, 509 aa, Zea Mays
MMMMKVRTNIINTITNPSESLLKELQVVEEMKDQCDQKRVEYEAMRAAYGEKGGRLRHLKNESFSLGQLQTSFLEYQEEAALFIFRLKSLKQGQFLSILTQAARHHASQLSFFRKGLKHLEALEPCVKAVAEKQHIDYHFSGLDNNSDIDDYSSYQDNHSDGSELSFNYEINDRDKDLPTFRSPMDMDQAHPVSSPRPLKEQQENAEEIKATLGVPHMKPEIGTQSAPIFAENVPDPSMRFRKMNLLTRTVHSYKLPTPADDKNPASVIANKSPHSDQPESKSHVAVNLWHSSPLAKDFMPNSMHSGPVKMPSSNEGVSLAYSYSTTDFKKVKREAFSGPIPSKVGLSTPLISATDRKPSGKRPSYVLPTRPPGPGWQSSVPPKATPRVTSLPTTTPRISELHELPRPPANAGLVGYSGPLVSRRPMPTAVSTTRVSPPSHTASPLPRPPAAMTRSYSIPSNSQRTPIITVNKLLEARHSRESSEVSSPPVTPISLADVSRRPTTEAAV

SEQ ID NO: 165397 - protein, 95 aa, Zea Mays
MNNNQQPAADSNIKPAPAPYTSDELVKVTEEQIAASAAAAWNPQQPASSQQQEVYTTPSEDAPTSGGSDGPAAPALAASDSDPKQVNLDKAETQR

SEQ ID NO: 165398 - protein, 346 aa, Zea Mays
MTYFPGEVVEHIFSFLPSHSDRNTVSLVCKLWYDVERLSRRGVFVGNCYAVLPERVVLRFPNVKALTVKGKPHFADFNLVPPDWGGYAGPWIEATARSCLSLEELRMKRMVISDENLELLARTFPKFKVLVLISCEGFSTDGLAAIANHCKLLRELDLQENDVEDRGPRWLSFPDSCTSLVSLNFACIKGEVNSGALERLVAKSPNLRSLRLNRSVSVDTLSKILERTPNLEDLGTGNLTDEFQAESFVRLTSALEKCKRLRNLSGFWDASPIFVPFIYPLCHQLTGLNLSYTPTLDYSDLTKMISRCVKLQRLWTRVCRWWPLVARIYKNSGCFHQNLMLLVLLR

SEQ ID NO: 165399 - protein, 882 aa, Zea Mays
MEGALVQSAIVPAVYRSSSGRFRVRARARTNATMVRNTPTRTLTLGGFQGLRQTNFLDTRSVIKRDFGSIVASQIARPRGSASRGVVRAMFERFTEKAIKVIMLAQEEARRLGHNFVGTEQILLGLIGEGTGIAAKVMKSMGINLKDARVEVEKIIGRGSGFVAVEIPFTPRAKRVLELSLEEARQLGHNYIGSEHLLLGLLREGEGVAARVLESLGADPNNIRTQVIRMVGESTEAVGAGVGGGSSGQKMPTLEEYGTNLTKLAEEGKLDPVVGRQDQIERVTQILGRRTKNNPCLIGEPGVGKTAIAEGLAQRISNGDVPETIEGKKVITLDMGLLVAGTKYRGEFEERLKKLMEEIKQNEDIILFIDEVHTLIGAGAAEGAIDAANILKPALARGELQILRGLRERYELHHKLRYTDDALIAAAQLSYQYISDRFLPDKAIDLIDEAGSRVRLRHAQLPDEAKELDKELRQITKQKNEAVRGQDFEKAGELRDREMELKAQITAIIDKSKEMIKAETESGDVGPLVTEADIQHIVSSWTGIPVEKVSSDESDRLLKMEETLHTRIIGQDEAVKAISRAIRRARVGLKNPNRPIASFIFSGPTGVGKSELAKALAAYYFGSEEAMIRLDMSEFMERHTVSKLIGSPPGYVGYTEGGQLTEAVRRRPYTVVLFDEIEKAHPDVFNMMLQILEDGRLTDSKGRTVDFKNTLLIMTSNVGSSVIEKGGRKIGFDLDYDEKDTSYNRIKSLVTEELKQYFRPEFLNRLDEMIVFRQLTKLEVKEIADIMLKEVFDRLKAKEINLQVTEKFRDRVVDEGYNPSYGARPLRRAIMRLLEDSLAEKMLAGEVKEGDSAIVDVDSDGKVIVLNGGSGVAEPLEPALST

SEQ ID NO: 165400 - protein, 427 aa, Zea Mays
MEGALVQSAIVPAVYRSSSGRFRVRARARTNATMVRNTPTRTLTLGGFQGLRQTNFLDTRSVIKRDFGSIVASQIARPRGSASRGVVRAMFERFTEKAIKVIMLAQEEARRLGHNFVGTEQILLGLIGEGTGIAAKVMKSMGINLKDARVEVEKIIGRGSGFVAVEIPFTPRAKRVLELSLEEARQLGHNYIGSEHLLLGLLREGEGVAARVLESLGADPNNIRTQVIRMVGESTEAVGAGVGGGSSGQKMPTLEEYGTNLTKLAEEGKLDPVVGRQDQIERVTQILGRRTKNNPCLIGEPGVGKTAIAEGLAQRISNGDVPETIEGKKVITLDMGLLVAGTKYRGEFEERLKKLMEEIKQNEDIILFIDEVHTLIGAGAAEGAIDAANILKPALARGELQCIGATTLDEYRKHIEKDPALERRFQP

SEQ ID NO: 165401 - protein, 351 aa, Zea Mays
MTLAQMSGHFAQLLGLSLGKLWREKTRRQQSRTAWIGWSYLSRERGDGSSGAQEAGEGGADAEECDAHHVGGIQAVAIAQWKQVFVDRRIRASFVGTSMAAWLVEVGTVEALNEPEWHAVDATNESGHTLFDLAASLGRADIVQVLLEYGVDANKPSHSRTPLETATASGECLIVQLLANGAMPVGSNAIHVATAASHNDIMKLLLGKPASASPASSTSASFLSSLTCIDVARRDDKTPLRVEAEAGQQDTVKALLTGGARANARCGTTVPPHSTSWRGTTTRRSRVSYRTVWPARPWCATWLGRLRPHSRSPPRRAMAIVSLKGKCALGPFLVVLVIKCSTHHLELTPFI

SEQ ID NO: 165402 - protein, 287 aa, Zea Mays
MHDEGLALVPLWDDRQGTITGMLTASDFVLILRKLQRNIQVIGNEEPISAWKEAKLQFYGGPDGAAMQRRPLIHVKDSDNLVDVALTIIRNEISSVPIFKCMADSSGVPFLNLATLQGILKFLCSKLQEEAEGCSLLHNQLLSIPIGTWSPHTGRSSSRQLRTLLLSSPLNTCLDILLQDRVSSIPIVDDNGSLRDVYSLSDIMALAKNDVYARIELEQVTVQNALDVQYQVHGRRQCHTCLQTSTLLEVLEGLSIPGVRRLVVIEQSTRFVEGIISLRDVFTFLLG

SEQ ID NO: 165403 - protein, 351 aa, Zea Mays
MDKGTILKTMPPEPSSQNPSMQIAVIRHVVSGILLHNTIYDVVPLSSKLTVLDTQLPVKQAFKIMHDEGLALVPLWDDRQGTITGMLTASDFVLILRKLQRNIQVIGNEEPISAWKEAKLQFYGGPDGAAMQRRPLIHVKDSDNLVDVALTIIRNEISSVPIFKCMADSSGVPFLNLATLQGILKFLCSKLQEEAEGCSLLHNQLLSIPIGTWSPHTGRSSSRQLRTLLLSSPLNTCLDILLQDRVSSIPIVDDNGSLRDVYSLSDIMALAKNDVYARIELEQVTVQNALDVQYQVHGRRQCHTCLQTSTLLEVLEGLSIPGVRRLVVIEQSTRFVEGIISLRDVFTFLLG

SEQ ID NO: 165404 - protein, 368 aa, Zea Mays
MKCLWKTMYNLLCSQSLLSEELIWIRMPPEPSSQNPSMQIAVIRHVVSGILLHNTIYDVVPLSSKLTVLDTQLPVKQAFKIMHDEGLALVPLWDDRQGTITGMLTASDFVLILRKLQRNIQVIGNEEPISAWKEAKLQFYGGPDGAAMQRRPLIHVKDSDNLVDVALTIIRNEISSVPIFKCMADSSGVPFLNLATLQGILKFLCSKLQEEAEGCSLLHNQLLSIPIGTWSPHTGRSSSRQLRTLLLSSPLNTCLDILLQDRVSSIPIVDDNGSLRDVYSLSDIMALAKNDVYARIELEQVTVQNALDVQYQVHGRRQCHTCLQTSTLLEVLEGLSIPGVRRLVVIEQSTRFVEGIISLRDVFTFLLG

SEQ ID NO: 165405 - protein, 420 aa, Zea Mays
MGLVGAVFQVVFDLPPGVYQYRFLVDGVWRCDETKPFVRDEYGLISNEVLVENNVQPVVQPEPSIRGTNMDKGTILKTMPPEPSSQNPSMQIAVIRHVVSGILLHNTIYDVVPLSSKLTVLDTQLPVKQAFKIMHDEGLALVPLWDDRQGTITGMLTASDFVLILRKLQRNIQVIGNEEPISAWKEAKLQFYGGPDGAAMQRRPLIHVKDSDNLVDVALTIIRNEISSVPIFKCMADSSGVPFLNLATLQGILKFLCSKLQEEAEGCSLLHNQLLSIPIGTWSPHTGRSSSRQLRTLLLSSPLNTCLDILLQDRVSSIPIVDDNGSLRDVYSLSDIMALAKNDVYARIELEQVTVQNALDVQYQVHGRRQCHTCLQTSTLLEVLEGLSIPGVRRLVVIEQSTRFVEGIISLRDVFTFLLG

SEQ ID NO: 165406 - protein, 197 aa, Zea Mays
MQLQRNIQVIGNEEPISAWKEAKLQFYGGPDGAAMQRRPLIHVKDSDNLVDVALTIIRNEISSVPIFKCMADSSGVPFLNLATLQGILKFLCSKLQEEAEGCSLLHNQLLSIPIGTWSPHTGRSSSRQLRTLLLSSPLNTCLDILLQDRVSSIPIVDDNGSLRDVYSLSDIMALAKNDVYARIELEQVTVQNQFLCF

SEQ ID NO: 165407 - protein, 274 aa, Zea Mays
MHTDTFPSNPPPMATVDCPLPSPADLDDNGFPALPSSPAACSSGFAEDFYRSGTDWSSLRAPPPLGPPRRAPGVKERGGGSAVQSSLFQAWGIEKPRRDGRGAGDSSLVQRSLFQAWGIERPQREGLGAGDSSPSSSLSGSLLARKRRRGSTEEERVAAKKPLACPFYKKIPGTPFTVDAFRYGQVEGCSAYFLSHFHHDHYGGLTKKWCHGPIYCSALTARLVKMCLSVNSEPIYTLMHREGGFSTHLAGQICPKGYVHAIKVHHFMFCPLDL

SEQ ID NO: 165408 - protein, 280 aa, Zea Mays
MCLSVNSDYICPLELDTEYVIEGVTVTLLEANHCPGAALIHFRLSDGKTCLHTGDFRASKTMQSHPLLQRGRVNLVYLDTTYCNPKYKFPPQEDVIDFVVRTTRRYLKKQPKTLIVVGAYSIGKENVYLAISQALEAHIYTDASRRRILYSFGWPDLSKRLCSCNQSSSLHVLPLGSINHENLKKYLETLNGRFLAVLAFRPTGWTFSEATGKHLDLIKPSSNANVTIYGVPYSEHSSFTELRDFVMFLKPQKIIPTVNVGNATSRDKMQAHFREWLKSP

SEQ ID NO: 165409 - protein, 177 aa, Zea Mays
MHTDTFPSNPPPMATVDCPLPSPADLDDNGFPALPSSPAACSSGFAEDFYRSGTDWSSLRAPPPLGPPRRAPGVKERGGGSAVQSSLFQAWGIEKPRRDGRGAGDSSLVQRSLFQAWGIERPQREGLGAGDSSPSSSLSGSLLARKRRRGSTEEERVAAKKPLACPFYKKIPGPYIH

SEQ ID NO: 165410 - protein, 217 aa, Zea Mays
MFGPDKCGSTNKVHFILKHKNPKTGKYVEHHLKFPPSVPYDKLSHVYTAILKPDNEVRILIDGEEKKKANFLSADDFEPALIPSKTIPDPDDKKPEDWDERAKIPDPDAVKPDDWDEDAPMEIVDEEATKPEGWLDDEPEEIDDPEAAKPEDWDDEEDGEWEAPKIDNPKCEEAPGCGEWKRPMKQNPAYKGLILIQLLLLGLRSGQCRMASCSTIS

SEQ ID NO: 165411 - protein, 114 aa, Zea Mays
MDHYRLLDRLNAYGLFEVRVSGDGNCQFRALSDQLYRSPDYHKHVRKEIVKQLKKCNTLYEGYVPMKYKKYCKKMKKSGEWGDHVTLQAAADKVTPLFCAMFLTSFALLNFHAT

SEQ ID NO: 165412 - protein, 66 aa, Zea Mays
MDGDGSGVRAHGRISRCFQLSNCLVTFPAGSDPTDHDDDIWRWRWQDGARKCGVMGAQLYACPLKN

SEQ ID NO: 165413 - protein, 168 aa, Zea Mays
MQGGGGVDQPPMQMVLRVRHPSSLGGSGADEDDGEGSSRSALSVFKAKEEQIERRKMEVREKVFAHLGRVEEESKRLAFIRQELEGMADPTRKEVESIRKRIDTVNRQLKPLSKSCVKKEYKEVLEAYNEKSKEKALLVNRLIELVSESERMRMKKLEELNKTVDSLY

SEQ ID NO: 165414 - protein, 96 aa, Zea Mays
MQGGGGVDQPPMQMVLRVRHPSSLGGSGADEDDGEGSSRSALSVFKAKEEQIERRKMEVREKVFAHLGRVEEESKRLAFIRSLKGWPTLQGRRWSR

SEQ ID NO: 165415 - protein, 130 aa, Zea Mays
MELGIIPKGPTSISILQRRDRKYQTVAEAVAEEVATVVRMDLALGSYVLLLVWALLQRAAAAVVLAQKMEDDAGRLGFHLGKELPRAASAFMHNLCSRGAHLFGNTSASSVWCLYRLSSFSMLASCVVST

SEQ ID NO: 165416 - protein, 425 aa, Zea Mays
MASADKATGCQRNGAVRSSIEQRKSKSSGVTETGPDPARRRRRTEVWRGGRARRKDGERRRPKSRRDGSGRAEGVGTGDYSLHRVGRRGSSHSRIERLRRTAVAETPPEMSAPSAPPRTVICVGDVHGYITKLESLWSNLQAALPADAFATALVIFLGDYNDRGPHTRRVLDFLLALPTRYPAQRHVFLCGNHDLAFAAFVGALPPPPDGSPFSATWDEYIHNEEHEGWFRGPGFEGMHVQGRRWGGVIKERWNPKKGLPYKGSIYDAQPTFESYGVAHGSSDLAKAVPEEHKRFLHDLVWIHEEENVPVDMDGGQIICNLIAVHAGLERTIDLNEQLRVLRTRDTRVPKVQMLSGRQDVWDTPKGLAGKQTIIVSGHHGKLHIDGLRFIIDEGGGYEDKPIAAIVFPSKTLIRSTEEAGTTSER

SEQ ID NO: 165417 - protein, 125 aa, Zea Mays
MASLAVSGARLGVVVRAGGSAGSGGERRSGVALPSVLFRRKDAFSRVVLGCDGAPGKELLMAGCGSDHLLSSTEPVVDALQRSEGLQILQRLCQRSTRGFCMIWFGYMKRKMCQLIWMEDKSSAI

SEQ ID NO: 165418 - protein, 97 aa, Zea Mays
MASLAVSGARLGVVVRAGGSAGSGGERRSGVALPSVLFRRKDAFSRVVLGCDGAPGKELLMAGCGSDHLLSSTEPVVDALQRSEGLQRKSKSSGVTE

SEQ ID NO: 165419 - protein, 236 aa, Zea Mays
MQVDTQPFPVNTIDVACEKILVRPEMADKSKSKDIIIDDPRTSNISQKEIARKAPDDKAKKSGGTGGQAQLMSQARQPGLSITDGMTPTCGRSGAQTDGSANSAGQSAYGQRRHPPHKALKGKETQRQSTYGRLIKTDSTFDQLLSKNTSKKTVLRDRSTKKPRSPAKTKRVNKTARKATQQASPIHPMRPRYFPPVYSSSVYYPVHTWNGTMMNPWYMYSPFVYPGWGPPPFYSF

SEQ ID NO: 165420 - protein, 61 aa, Zea Mays
MKLHMKTSELNPKEKKRETGKGEPKNDETRKHIKRDKTHKNQQDLKGHKKRSNDHTLNYQK

SEQ ID NO: 165421 - protein, 439 aa, Zea Mays
MEIGGQTESGANGGGGGGFRAARCWELLRWAAGVLRGKAVGLAGRLGRIARDEPRRVAHSVKVGLALTLVSVLYYVRPLFNSWGASTMWAVLTVVVVMEYTVGGTLCKGLNRASGTLVAGFIAVGAHKVAYMCGDKAEPVLLAIFVFLLSSAATFSRFIPEVKARYDYGVTIFILTFSLVAVSSYRVDELIRLAHRRFSTIAVGVATCLCTTIFVFPVWAGEGLHKLAIANLNKLAEFLEGIESECFRENATFENLEAKPFLQVYQSVLNSKATEDSLCNFAKWEPCHGKFKLRHPWSQYQKLGALCRECASSMEALSSYVVTLARTEVRTACRQMSLHSAKALRELTAAMRTMTTVPSPASVHVSAAIKAAKGLRDGLSEGADLARAMHVAVIASLLSELVTKTKQITESVDVLARLARFRNPETTQTHKGVAIDVVS

SEQ ID NO: 165422 - protein, 287 aa, Zea Mays
MEIGGQTESGANGGGGGGFRAARCWELLRWAAGVLRGKAVGLAGRLGRIARDEPRRVAHSVKVGLALTLVSVLYYVRPLFNSWGASTMWAVLTVVVVMEYTVGGTLCKGLNRASGTLVAGFIAVGAHKVAYMCGDKAEPVLLAIFVFLLSSAATFSRFIPEVKARYDYGVTIFILTFSLVAVSSYRVDELIRLAHRRFSTIAVGVATCLCTTIFVFPVWAGEGLHKLAIANLNKLAEFLEGIESECFRENATFENLEAKPFLQVYQSVLNSKATEDSLLLNPEKKYT

SEQ ID NO: 165423 - protein, 63 aa, Zea Mays
MEPVRHADAWRSSSPAVTAQNRTKVLHHPFQTMDLKDCSGHSFFEQEQKDSRPWPASSKYSPS

SEQ ID NO: 165424 - protein, 330 aa, Zea Mays
MGDREEDEELQMALRMSLQGSPPAQPEPKRSKPPPPAAESPEAEARRKQRELMAAAAEKRRRGAASPASVSVARSLLQPVVVESAPAPEVTKEQVEEPEQAGVSMEEAKEVEEEEEEEKGEELPPDVAENLWAMVFGRGVSKAVLAQWSNQGIRFSSDPETTMGLVQHEGGPCGVLATVQAYVLKYLLFFSDDLSNPEISNPLYTLGQRRFYQSSFAAGDDFSSLTDDRKTRALVHAMVEILFLCGTGKRAVVASVARANRGKIDAALEDLSVESAVDLQKVLKTSTFTSRKDAFNTLLANIPLFQSRLGAMLFLISALLSRGLVCVRQY

SEQ ID NO: 165425 - protein, 590 aa, Zea Mays
MGDREEDEELQMALRMSLQGSPPAQPEPKRSKPPPPAAESPEAEARRKQRELMAAAAEKRRRGAASPASVSVARSLLQPVVVESAPAPEVTKEQVEEPEQAGVSMEEAKEVEEEEEEEKGEELPPDVAENLWAMVFGRGVSKAVLAQWSNQGIRFSSDPETTMGLVQHEGGPCGVLATVQAYVLKYLLFFSDDLSNPEISNPLYTLGQRRFYQSSFAAGDDFSSLTDDRKTRALVHAMVEILFLCGTGKRAVVASVARANRGKIDAALEDLSVESAVDLQKVLKTSTFTSRKDAFNTLLANIPLFQSRLGAMLFLISALLSRGLEDIQADRDDPSQPLVTAPFGHASQEIVNLLLCGEAVPNVFDGKMDLGGGMSLKGIPNNVEVGFLTLLESLNLCKVGQYLKCPKWPIWVVGSESHYTVLFALNPNVQEENELEERESKIRRAFDAQDQSGGGGFISVEGFQQVLRDTDINFPSDKLEDLCNAGIIVWSEFWQALLQLDKRAGGMKDPTGLMGKKQFTIFHFNGIAKSVPNGNASAGGSCPIQRPRLCKLNVTVPPRWTQDEYLADVVSASTSSSKDDSILSLAPPGT

SEQ ID NO: 165426 - protein, 65 aa, Zea Mays
MSEEKHHHHLFHHRKAEEEEGASGEVDYEKKEKHHKHMEQLGQLGAIAAGAYALLLICVCLCVCI

SEQ ID NO: 165427 - protein, 292 aa, Zea Mays
MSDLGPLRHFLGIEVTPSDTGLVLSQKQYALDILARANMTHCNPCHTPVDTNSKPASTDGCLLSQPTVYRSLAGALQYLTLTRPDISYAVQQVCLFMHAPRDTHMSLLKRILRYVRGTLDYGLHIYRSSSLDLLAYSDADWAGCPDTRRSTSGYCVFLGANLVAWSSKRQHTVSRSSAEAEYRGVANAVAEICWLRQLLTELCHPPRRAAVVFCDNVSTMYLASNPVQHQRTKHVEIDLHFVRERVSLGEVKVIHVPSSLQFADIFTKGLSSSLFKEFRSNLQIKPATDSTG

SEQ ID NO: 165428 - protein, 477 aa, Zea Mays
MRSNSDGDLYPFFGTSSPSSTALVAHTASADVWHRRLGHPNNHSLARFPFSCNKSLAASTLCDACQKGKHVRLSFPRSTSFTYFPFQIIHCDLWTSPISSISGFHYYLIVLDDYTHYVWTFPIRHKTEVPSVLRNFYSYVRTQFHLSIQSIQCDNGREFDNNDLRTFLLANGVTLRLSCPYTSSQNGKAERGIRIINNILRTLLEQASMPRSYWVEALHTATYLLNRRPCQPLNFCTPYQLLFGCSPDYQHLRTFGCLCYPNLSSTASHKLAPRSARCVFLGYLSEHKGYRCLNLDTMKIIISRHVIFDESFFPFASPQPTKSLPHSSIPDPAASGLEIIPVRASPVFSAPAVSATVRTPPHPPLSVTGGQTSTSPAAQLSASAPTRLCSSPTHAPATPISQQQTPGSSPPVLRYAHPDISQHHMTTRVKAGVFQPKKFMNLHVTTQPAISPIPYSYRTALTDPHCSQTCRCQRCQW

SEQ ID NO: 165429 - protein, 448 aa, Zea Mays
MTNHSGNLPIYYSSSLPNSSHVIVGDGSKILVHGTGHTSIRSPPNTFALRSVLHLPHLVKNLISVRRFTTDNSCAIEFDPYGFSVKDLATKNTIMRSNSDGDLYPFFGTSSPSSTALVAHTASADVWHRRLGHPNNHSLARFPFSCNKSLAASTLCDACQKGKHVRLSFPRSTSFTYFPFQIIHCDLWTSPISSISGFHYYLIVLDDYTHYVWTFPIRHKTEVPSVLRNFYSYVRTQFHLSIQSIQCDNGREFDNNDLRTFLLANGVTLRLSCPYTSSQNGKAERGIRIINNILRTLLEQASMPRSYWVEALHTATYLLNRRPCQPLNFCTPYQLLFGCSPDYQHLRTFGCLCYPNLSSTASHKLAPRSARCVFLGYLSEHKGYRCLNLDTMKIIISRHVIFDESFFPFASPQPTKSLPHSSIPDPAASGLEIIPVRASPVFSAPAVS

SEQ ID NO: 165430 - protein, 117 aa, Zea Mays
MDLSAVQAALSDKSYTAVASLCDELLLQAASKGTNTDEWPYSVHLLAHLYINDLNSARFFWKSLPQEVKDTRPELAAVWRIGQCLWNRDYAGVNTAAQGFEWGPDLTEFITAFLEIW

SEQ ID NO: 165431 - protein, 124 aa, Zea Mays
MDLSAVQAALSDKSYTAVASLCDELLLQAASKGTNTDEWPYSVHLLAHLYINDLNSARFFWKSLPQEVKDTRPELAAVWRIGQCLWNRDYAGVNTAAQGFEWGPDLTEFITAFLGELHGCSMIL

SEQ ID NO: 165432 - protein, 245 aa, Zea Mays
MDLSAVQAALSDKSYTAVASLCDELLLQAASKGTNTDEWPYSVHLLAHLYINDLYAIRRPCPRFFPILLMPWCCCDLGVSRNSARFFWKSLPQEVKDTRPELAAVWRIGQCLWNRDYAGVNTAAQGFEWGPDLTEFITAFLVRRGASWLFYDTLIHSVKFVLQESYRQRIFKLLTSAYSTISVADVAHFMGMSEEDATNYAVQIGWSLGAATKMLTVKKPKAQINQKLDASKLQRLTECVFHLEH

SEQ ID NO: 165433 - protein, 97 aa, Zea Mays
MYWNAIRVHHLNTTHICHTCTSSASANIKDNYQLLEHRGKQAGKNKRKKTNQSWTNMLYMQSSANIKDNPRKARTIRTSWLISLHNQFSEIISATVT

SEQ ID NO: 165434 - protein, 87 aa, Zea Mays
MCYMLGNKCVLTIRQSLIVWLAKAIVLLLSISCFIHISFALCDNVLCPLTCYIYYSKYVEVLCQFIFSGDLSNPAIRGVQRFRFAAG

SEQ ID NO: 165435 - protein, 251 aa, Zea Mays
MLINTGNLDQNMDGFPTLMLFIHGVPIEYTGSRKADQLVRNLKKFVAPDVSILESDSAIKNFVENAGTSFPMFLGFGVNDSLIAEYGRKYKKRAWFAVAKDFSEDVMVAYEFDKVPALVAIHPKYKEQSLFYGPFEENFLEDFVRQSLLPLVVPINTETIKMLNDDQRKVVLTILEDDSDENSTQLVKILRSAASANRDLVFGYVGIKQWDEFVETFDVSKSSQLPKLLVWDRNEEYELVSTVSSVINSIF

SEQ ID NO: 165436 - protein, 216 aa, Zea Mays
MSAHGGPAAFPWRPRARPGNRGRGSLRRLALGAARFGRGWSGPGMDGPSPMRPRSAPGAEGLSPGAAGSWRDAGASGPRRRSGAAAVGPGAGAASPRETADERYPGGAASTLAEGRRAPTAPTRASRPARPPRGHEQRDALPPGKGTAGLGLGLGPSAGAGAVRPQHQHPCIPARRVPGRPASASPGGPRRSSSGATPRLERSWRLGHGPADVDWA

SEQ ID NO: 165437 - protein, 535 aa, Zea Mays
MECHSWYALKSRRSVAIAGAGFEDAAEGASDLGDTMSLARKQKVVKETVEMEEEQEFVWKSNLLPYKDDDAFVLPESSKEEYASTSGDTAPSGKMDPRIERSGSNGTSKVPRLGSMLGTASMAGFGKAVEILDTLGCLMTTLSSDGGFVSRTKTKGCKISILAFEVANTILKGASIMQSLSEDTVTYFKQVVLPSEGVQNLVSSEMSELMRIAANDKREELKIFSQEIVRFGNRCKDPQWHNLDRYFVKLESESAPQKQLKETAIAEMQKLMNLVQRTTDLYHELHALDRFEQEYRSRLNGKGNTDRFEKGDNIQIVRLELKTQSSYVKSLKKRSLWSKTLEEVVEKLVEVVHYLHVEIDNAFGPSDGGGVVVNAEPTVSCQRLGPAGLALHYANIIIQIYSIVSRSGYVPANSRDALYQGLPPRIKSALPNELRTTSAPQVLTVDQIRARMEKTLKWLAPMAINTTCARGFFLRFSEWAKSGTESVGRRLGQADRVETLYHADKARTEDRILELVVWLHHLVSQSSRPALQKGH

SEQ ID NO: 165438 - protein, 277 aa, Zea Mays
MECHSWYALKSRRSVAIAGAGFEDAAEGASDLGDTMSLARKQKVVKETVEMEEEQEFVWKSNLLPYKDDDAFVLPESSKEEYASTSGDTAPSGKMDPRIERSGSNGTSKVPRLGSMLGTASMAGFGKAVEILDTLGCLMTTLSSDGGFVSRTKTKGCKISILAFEVANTILKGASIMQSLSEDTVTYFKQVVLPSEGVQNLVSSEMSELMRIAANDKREELKIFSQEIVRFGNRCKDPQWHNLDRYFVKIRECTPEAAERNSNSRDAKVDEPRSTYN

SEQ ID NO: 165439 - protein, 400 aa, Zea Mays
MECHSWYALKSRRSVAIAGAGFEDAAEGASDLGDTMSLARKQKVVKETVEMEEEQEFVWKSNLLPYKDDDAFVLPESSKEEYASTSGDTAPSGKMDPRIERSGSNGTSKVPRLGSMLGTASMAGFGKAVEILDTLGCLMTTLSSDGGFVSRTKTKGCKISILAFEVANTILKGASIMQSLSEDTVTYFKQVVLPSEGVQNLVSSEMSELMRIAANDKREELKIFSQEIVRFGNRCKDPQWHNLDRYFVKLESESAPQKQLKETAIAEMQKLMNLVQRTTDLYHELHALDRFEQEYRSRLNGKGNTDRFEKGDNIQIVRLELKTQSSYVKSLKKRSLWSKTLEEVVEKLVEVVHYLHVEIDNAFGPSWRRCGGECGTNRELSKARSCRARITLCKHYHPDI

SEQ ID NO: 165440 - protein, 499 aa, Zea Mays
MSLARKQKVVKETVEMEEEQEFVWKSNLLPYKDDDAFVLPESSKEEYASTSGDTAPSGKMDPRIERSGSNGTSKVPRLGSMLGTASMAGFGKAVEILDTLGCLMTTLSSDGGFVSRTKTKGCKISILAFEVANTILKGASIMQSLSEDTVTYFKQVVLPSEGVQNLVSSEMSELMRIAANDKREELKIFSQEIVRFGNRCKDPQWHNLDRYFVKLESESAPQKQLKETAIAEMQKLMNLVQRTTDLYHELHALDRFEQEYRSRLNGKGNTDRFEKGDNIQIVRLELKTQSSYVKSLKKRSLWSKTLEEVVEKLVEVVHYLHVEIDNAFGPSDGGGVVVNAEPTVSCQRLGPAGLALHYANIIIQIYSIVSRSGYVPANSRDALYQGLPPRIKSALPNELRTTSAPQLTVDQIRARMEKTLKWLAPMAINTTCARGFFLRFSEWAKSGTESVGRRLGQADRVETLYHADKARTEDRILELVVWLHHLVSQSSRPALQKGH

SEQ ID NO: 165441 - protein, 366 aa, Zea Mays
MEDIEDVLGAAGLSGGGAPPGLRLPLAAVAVKPKRRSSRVAQAPPQPEAGIPGTQTIYVKTFGCSHNQSDSEYMSGQLSAFGYAITEDPEGADLWLINTCTVKNPSQSAMTTLISKCKNANKPLVVAGCVPQGSQGLKELEGISIIGVQQIDRVVEVVEETLKGHEVRLLSRKTLPSLDLPKVRKNKFIEILPINVGCLGACTYCKTKHARGHLGSYTIDSLVDRVKTVVSEGVREIWLSSEDTGAYGRDIGTNLPNLLNAIVAELPVDQSTMLRIGMTNPPFILEHLKEIAAVLCHPCVYSFLHVPVQSGSDSVLKAMNREYTVGEFRKVVDTLCELVPGMQIATDIICGFPVRPTKISLRLLTS

SEQ ID NO: 165442 - protein, 88 aa, Zea Mays
MSMRSARALHLKMQDSGLAIACSFCILVSPEYTTGLYIYIRERVFCSTIQVVFLLWSIWKVVVVGFMSELGRGREGLRAVGMGKLRKH

SEQ ID NO: 165443 - protein, 107 aa, Zea Mays
MDPEAVRKSLEPTANCRKKSPAPPLRGSTSTTPFVLSGVSIEAAEHGRLLCSFVVTPRLAEEIEVEGKLLRAGKSVGVVSVDFRKKKTGKLMAQARHTKYLVASSRL

SEQ ID NO: 165444 - protein, 284 aa, Zea Mays
MVSKTRIHTDCACFCFFLCKPIHFLKFVEQISSFAEIRSFKGSPYWMAPEVIMNCKGYSLSVDIWSLGCTIIEMATARPPWHQYEGVAAIFKIANSKDIPEIPDSFSEEGKSFLQLCLKRNPASRASAVQLMDHPFVQDHPAVRAAKSSVLRNTPSSPADGRHTMSNRELPSRKIITPLKDIGLGMRDFTGFSTTVPSPHSPIPGRANMSTPVSPCSSPLRQFKQSNVRGMRSPPHPMLSPGLGNTVSYTQNQTRRNPAPAISDPWMDVGQMKLQSPNISPRRF

SEQ ID NO: 165445 - protein, 357 aa, Zea Mays
MDPAAFARERNMPSDSDRILNEDKCFMSCSMPREHQKFFDVPAASVRELHLQSDAPSTSEANCSRGRMISGDLFAPRTRSLSPIPKGHAFAVSNGNSREFGFSPRSPVRKMDGLRSPPHPLPLPPASGACSPLHPASGACSPLHPASGACSPLLPTHSFCSPLPSSPSSCPPLPASPTNCSQSQSQWKKGKLLGSGTFGQVYLGFNSENGQFCAIKEVQVIMDDPHSKERLKQLNQEIDMLRQLSHPNIVQYHGSELSDESLSICLEYVSGGSIHKLLREYGSFKEPVIRNYTGQILAGLAYLHGRNTVHKISKEQTYSWVLMVKSSWLTLAWLSIYHLLLKYVLSKEVLTGWLLRL

SEQ ID NO: 165446 - protein, 392 aa, Zea Mays
MPAWWPRSKLRSRSKAKPGAGSVSAASSPRKSADLESPSPSPSPTPTPRDRKAHSLDFPGAAAARGRPAGAAPGHGSVGYKLPTPVEAVEPVGTLYEVVLAAAAAAAAGDGCSSAEESSVCSAASLDEPHYQHGFRPMDPAAFARERNMPSDSDRILNEDKCFMSCSMPREHQKFFDVPAASVRELHLQSDAPSTSEANCSRGRMISGDLFAPRTRSLSPIPKGHAFAVSNGNSREFGFSPRSPVRKMDGLRSPPHPLPLPPASGACSPLHPASGACSPLHPASGACSPLLPTHSFCSPLPSSPSSCPPLPASPTNCSQSQSQWKKGKLLGSGTFGQVYLGFNSENGQFCAIKEVQVIMDDPHSKERLKQLNQEIDMLRQLSHPNIVQYHGK

SEQ ID NO: 165447 - protein, 431 aa, Zea Mays
MLASSSSFCSCPPLPASPTNCSQSQSQWKKGKLLGSGTFGQVYLGFNSENGQFCAIKEVQVIMDDPHSKERLKQLNQEIDMLRQLSHPNIVQYHGSELSDESLSICLEYVSGGSIHKLLREYGSFKEPVIRNYTGQILAGLAYLHGRNTVHRDIKGANILVGPNGEVKLADFGMAKHISSFAEIRSFKGSPYWMAPEVIMNCKGYSLSVDIWSLGCTIIEMATARPPWHQYEGVAAIFKIANSKDIPEIPDSFSEEGKSFLQLCLKRNPASRASAVQLMDHPFVQDHPAVRAAKSSVLRNTPSSPADGRHTMSNRELPSRKIITPLKDIGLGMRDFTGFSTTVPSPHSPIPGRANMSTPVSPCSSPLRQFKQSNVRGMRSPPHPMLSPGLGNTVSYTQNQTRRNPAPAISDPWMDVGQMKLQSPNISPRRF

SEQ ID NO: 165448 - protein, 323 aa, Zea Mays
MLKRYAMQQAFKSMMTQSAPNSFGSNSPFPFSMPPQASPTAPSTYPYLEPKKDTSPHVSTVDVSANEVEATGTSKEVDVTETPKPSKKFAFVDVSPEELQQKNLQSSPETVDVKHDSTYSESKEDTEEQVPTISTNTESKEDTEEKVPTNGASFKLNEGAAHGPTESNNSASMLSVETIEKMMEDPAVQKMVYPYLPEEMRNPNSFKWMLQNPMYRQQLQDMLNNMGATPDQWDNRMLDHLKNFDLSSPEVRQQFAQVGMTPEEVVSKIMANPDVAVAFQNPKIQTAIMDCSQNPLNIVKYQNDKEVMDVFMKISQIFPQING

SEQ ID NO: 165449 - protein, 222 aa, Zea Mays
MASSLAQRRHAVVCGRGHSNRVRTARGVAAGPRAARRMAMKGHPSPRFAKIDGVCAALSMEGSPRYTLIPCSALSPVLALYMEGEIDNVRPLVPGAKLHAVVDACHSDSVLDFPFLCNMSRELLVSFYKANGSHKPNRKIFYGDMPVRSSLVGSCFMKWMQLERRVPAWKRATFLRLHSLWCKSAITHDFVLKIIVHTNRQIDVEIFCQDTLETIVLMVQPG

SEQ ID NO: 165450 - protein, 78 aa, Zea Mays
MLLMFHHMLKRSHKTFSQQRLLMITTREVMAHLLLLEREHWPERKRRTSNCEVQGRKVYRSLRYNFMFYSIGSCKDVI

SEQ ID NO: 165451 - protein, 241 aa, Zea Mays
MKRYGLQLRTKPPSSSSSRAPPPPARPLAAFADDDDDDVEAEILRQAAKKRSLQKVEEQQKKAMEEDPSVYAYDELYDEMKEKEARPKMQDKVVREVTKKKDLSDFYFGLVKNVAFGAQTHDNTKSGHPLKADNKPEDTNTSSLDAEASEPSPKRRRESSIESERTKSMDMEEPSASRMRDSTVAASTEKNAADVSSHAKEIPQNIQPAKVTDDHYKRSDGALAAARARALARKKAKDQQL

SEQ ID NO: 165452 - protein, 150 aa, Zea Mays
MFNTEKDKRPPRAFNPRTIVKDQVERHARNRDRPDRGVWAARRYDKSTSAGSSHPSSSEFPQMQSHSGDNILQLADGHGDRKTDTRGQGGSRGVPVENGHRHANRRGLPRGPKETEISASVPDAKNSKRGSASYGAHERQVWVQKSSSGS

SEQ ID NO: 165453 - protein, 257 aa, Zea Mays
MLVPNHEIANNATSGGTSGSGQVAEFKRDKIVILKGRGRIDSNTPNGATQHSSTPIKNVPPSRSRQDQRLEASGKIIKTILSNKEARSSNPSEHEQEGHMFNTEKDKRPPRAFNPRTIVKDQVVENAERSHFDEKANHLHGSVPIGEKVERHARNRDRPDRGVWAARRYDKSTSAVSKLELNTGHGDRKTDTRGQGGSRGVPVENGHRHANRRGLPRGPKETEISASVPDAKNSKRGSASYGAHERQVWVQKSSSGS

SEQ ID NO: 165454 - protein, 478 aa, Zea Mays
MKDPAHRTKVVLRRLPPAIAQQAVVDQVDLRFAGRYDWACFRPGNASQKNHRHSRLYLNFKRPEDVVEFAEVFNGHVFVNEKGAQFKAFVEYAPSQQVPKSTIKKDGREGTIMKDPEYLEFLEFISKPTEHLPSAEIQLERKEAERAAAGKEAPVVTPLMMYVRQQRAAKSMVHRPGSRLSRKLASVVSSSSPKRSSEKRRSSTYVVRDNTKEKPTYIMVPKREEHTQREKDVAGNSGDATSGGTSGSGQVAEFKRDKIVILKGRGRIDSNTPNGATQHSSTPIKNVPPSRSRQDQRLEASGKIIKTILSNKEARSSNPSEHEQEGHMFNTEKDKRPPRAFNPRTIVKDQVVENAERSHFDEKANHLHGSVPIGEKVERHARNRDRPDRGVWAARRYDKSTSAGSHGDRKTDTRGQGGSRGVPVENGHRHANRRGLPRGPKETEISASVPDAKNSKRGSASYGAHERQVWVQKSSSGS

SEQ ID NO: 165455 - protein, 493 aa, Zea Mays
MKDPAHRTKVVLRRLPPAIAQQAVVDQVDLRFAGRYDWACFRPGNASQKNHRHSRLYLNFKRPEDVVEFAEVFNGHVFVNEKGAQFKAFVEYAPSQQVPKSTIKKDGREGTIMKDPEYLEFLEFISKPTEHLPSAEIQLERKEAERAAAGKEAPVVTPLMMYVRQQRAAKSMVHRPGSRLSRKLASVVSSSSPKRSSEKRRSSTYVVRDNTKEKPTYIMVPKREEHTQREKDVAGNSGDATSGGTSGSGQVAEFKRDKIVILKGRGRIDSNTPNGATQHSSTPIKNVPPSRSRQDQRLEASGKIIKTILSNKEARSSNPSEHEQEGHMFNTEKDKRPPRAFNPRTIVKDQVVENAERSHFDEKANHLHGSVPIGEKVERHARNRDRPDRGVWAARRYDKSTSAGSSHPSSSEFPQMQSHSGDNILQLADGHGDRKTDTRGQGHRHANRRGLPRGPKETEISASVPDAKNSKRGSASYGAHERQVWVQKSSSGS

SEQ ID NO: 165456 - protein, 473 aa, Zea Mays
MKDPAHRTKVVLRRLPPAIAQQAVVDQVDLRFAGRYDWACFRPGNASQKNHRHSRLYLNFKRPEDVVEFAEVFNGHVFVNEKGAQFKAFVEYAPSQQVPKSTIKKDGREGTIMKDPEYLEFLEFISKPTEHLPSAEIQLERKEAERAAAGKEAPVVTPLMMYVRQQRAAKSMVHRPGSRLSRKLASVVSSSSPKRSSEKRRSSTYVVRDNTKEKPTYIMVPKREEHTQREKDVAGNSGDATSGGTSGSGQVAEFKRDKIVILKGRGRIDSNTPNGATQHSSTPIKNVPPSRSRQDQRLEASGKIIKTILSNKEARSSNPSEHEQEGHMFNTEKDKRPPRAFNPRTIVKDQVVENAERSHFDEKANHLHGSVPIGSSHPSSSEFPQMQSHSGDNILQLADGHGDRKTDTRGQGGSRGVPVENGHRHANRRGLPRGPKETEISASVPDAKNSKRGSASYGAHERQVWVQKSSSGS

SEQ ID NO: 165457 - protein, 423 aa, Zea Mays
MPGAQFKAFVEYAPSQQVPKSTIKKDGREGTIMKDPEYLEFLEFISKPTEHLPSAEIQLERKEAERAAAGKEAPVVTPLMMYVRQQRAAKSMVHRPGSRLSRKLASVVSSSSPKRSSEKRRSSTYVVRDNTKEKPTYIMVPKREEHTQREKDVAGNSGDATSGGTSGSGQVAEFKRDKIVILKGRGRIDSNTPNGATQHSSTPIKNVPPSRSRQDQRLEASGKIIKTILSNKEARSSNPSEHEQEGHMFNTEKDKRPPRAFNPRTIVKDQVVENAERSHFDEKANHLHGSVPIGEKVERHARNRDRPDRGVWAARRYDKSTSAGSSHPSSSEFPQMQSHSGDNILQLADGHGDRKTDTRGQGGSRGVPVENGHRHANRRGLPRGPKETEISASVPDAKNSKRGSASYGAHERQVWVQKSSSGS

SEQ ID NO: 165458 - protein, 491 aa, Zea Mays
MKDPAHRTKVVLRRLPPAIAQQAVVDQVDLRFAGRYDWACFRPGNASQKNHRHSRLYLNFKRPEDVVEFAEVFNGHVFVNEKGAQFKAFVEYAPSQQVPKSTIKKDGREGTIMKDPEYLEFLEFISKPTEHLPSAEIQLERKEAERAAAGKEAPVVTPLMMYVRQQRAAKSMVHRPGSRLSRKLASVVSSSSPKRSSEKRRSSTYVVRDNTKEKPTYIMVPKREEHTQREKDVAGNSGDATSGGTSGSGQVAEFKRDKIVILKGRGRIDSNTPNGATQHSSTPIKNVPPSRSRQDQRLEASGKIIKTILSNKEARSSNPSEHEQEGHMFNTEKDKRPPRAFNPRTIVKDQVVENAERSHFDEKANHLHGSVPIGEKVERHARNRDRPDRGVWAARRYDKSTSAALVMPAVSKLELNTGHGDRKTDTRGQGGSRGVPVENGHRHANRRGLPRGPKETEISASVPDAKNSKRGSASYGAHERQVWVQKSSSGS

SEQ ID NO: 165459 - protein, 285 aa, Zea Mays
MVPKREEHTQREKDVAGNSGDATSGGTSGSGQVAEFKRDKIVILKGRGRIDSNTPNGATQHSSTPIKNVPPSRSRQDQRLEASGKIIKTILSNKEARSSNPSEHEQEGHMFNTEKDKRPPRAFNPRTIVKDQVVENAERSHFDEKANHLHGSVPIGEKVERHARNRDRPDRGVWAARRYDKSTSAGSSHPSSSEFPQMQSHSGDNILQLADGHGDRKTDTRGQGGSRGVPVENGHRHANRRGLPRGPKETEISASVPDAKNSKRGSASYGAHERQVWVQKSSSGS

SEQ ID NO: 165460 - protein, 485 aa, Zea Mays
MKDPAHRTKVVLRRLPPAIAQQAVVDQVDLRFAGRYDWACFRPGNASQKNHRHSRLYLNFKRPEDVVEFAEVFNGHVFVNEKGAQFKAFVEYAPSQQVPKSTIKKDGREGTIMKDPEYLEFLEFISKPTEHLPSAEIQLERKEAERAAAGKEAPVVTPLMMYVRQQRAAKSMVHRPGSRLSRKLASVVSSSSPKRSSEKRRSSTYVVRDNTKEKPTYIMVPKREEHTQREKDVAGNSGDATSGGTSGSGQVAEFKRDKIVILKGRGRIDSNTPNGATQHSSTPIKNVPPSRSRQDQRLEASGKIIKTILSNKEARSSNPSEHEQEGHMFNTEKDKRPPRAFNPRTIVKDQVVENAERSHFDEKANHLHGSVPIGEKVERHARNRDRPDRGVWAARRYDKSTSAVSKLELNTGHGDRKTDTRGQGGSRGVPVENGHRHANRRGLPRGPKETEISASVPDAKNSKRGSASYGAHERQVWVQKSSSGS

SEQ ID NO: 165461 - protein, 477 aa, Zea Mays
MKDPAHRTKVVLRRLPPAIAQQAVVDQVDLRFAGRYDWACFRPGNASQKNHRHSRLYLNFKRPEDVVEFAEVFNGHVFVNEKGAQFKAFVEYAPSQQVPKSTIKKDGREGTIMKDPEYLEFLEFISKPTEHLPSAEIQLERKEAERAAAGKEAPVVTPLMMYVRQQRAAKSMVHRPGSRLSRKLASVVSSSSPKRSSEKRRSSTYVVRDNTKEKPTYIMVPKREEHTQREKDVAGNSGDATSGGTSGSGQVAEFKRDKIVILKGRGRIDSNTPNGATQHSSTPIKNVPPSRSRQDQRLEASGKIIKTILSNKEARSSNPSEHEQEGHMFNTEKDKRPPRAFNPRTIVKDQVVENAERSHFDEKANHLHGSVPIGEKVERHARNRDRPDRGVWAARRYDKSTSAGHGDRKTDTRGQGGSRGVPVENGHRHANRRGLPRGPKETEISASVPDAKNSKRGSASYGAHERQVWVQKSSSGS

SEQ ID NO: 165462 - protein, 230 aa, Zea Mays
MEAAAGGVEAEGVMRVLVVDDSPVDRRVAQLLLSSDSCAGSFHVIAVDSARKAMEFLGLKDGGEAVDMVLTDYCMPEMTGYDLLKAIKALNPLEPIPVVVMSSEDEPQRISRCLSAGAEDFIVKPLQSKDVQRLRNCSAAARPSKGAAPCEAAVVAKRNQKPPHPAGAASPSGRRASLAGVAMVLHSSGVEYLPLLLKLVVLAYAALCLGELLHRWASSDGRCSLSPWCA

SEQ ID NO: 165463 - protein, 237 aa, Zea Mays
MGSCLGASCTTGRAVSYGPRVRACARDGFCSPPPLWGSKRQPLFHGGAGRRHGAHGLLHARDDRLRPPQGHQGTEPPGADPGRRHVVRRRAPEDQPMPERRRRGLHREAPAEQGRAAPPELLRRREAQQGRRAVRGRRRGQEESKAAASCRRRVAVWTASEPRRSRHGAALVGRGVPAAPAQARRAGVRGAVPGRAPAQVGVVGRPLLALPVVRLSSGACPGHQQETGDANAEFFSC

SEQ ID NO: 165464 - protein, 149 aa, Zea Mays
MEAAAGGVEAEGVMRVLVVDDSPVDRRVAQLLLSSDSCAGSFHGQPPLWCLPQNHLPTSSQFLFPTIRFFFFRPRRSHRESSQAGSPLFFNSGRAPRVRACISRADLPLLFIGCHRFQFVRATSALFFLYIYTYYQARPVEYINSKQLV

SEQ ID NO: 165465 - protein, 141 aa, Zea Mays
MPERRRRGLHREAPAEQGRAAPPELLRRREAQQGRRAVRGRRRGQEESKAAASCRRRVAVWTASEPRRSRHGAALVGRGVPAAPAQARRAGVRGAVPGRAPAQVGVVGRPLLALPVVRLSSGACPGHQQETGDANAEFFSC

SEQ ID NO: 165466 - protein, 565 aa, Zea Mays
MVHTGACIANLLGQGGSRKYHLTCNWLRYFKNDRDRRDLITCGSAAGVAAAFRAPVGGVLFALEEAASWWRSALLWRTFFTTAVVAVVLRGLIQFCRSGKCGLFGQGGLIMFDLSSTVPSYSTQDIIAIIVLGIIGGVFGGLFNFLLDRILRAYSFINERGAPYKILLTVTISIITSACSYGLPWLAPCTPCPADAVEECPTIGRSGNFKNFQCPPGYYNGLASLFFNTNDDAIRNLFSSGTENEFHMSTLFVFFTAIYCLGLVTYGIAVPSGLFIPVILAGATYGRIVGTLLGPISDLDPGLFALLGAASFLGGTMRMTVSVCVILLELTNDLLMLPLVMLVLLISKTIADSFNKGVYDQIVVMKGLPFLEAHAEPYMTHLVASDVVSGPLISFSGVERVGNIVQALRITGHNGFPVVDEPPLSEAPELVGLVLRSHLLVLLKGKGFMKEKMKTSGSFVLERFGAFDFAKPGSGKGLKIEDLDFTDEEMDLYVDLHPITNTSPYTVVETMSLAKAAVLFRALGLRHMLVVPKTPGRPPIVGILTRHDFIPEHIHGLFPNIHKSH

SEQ ID NO: 165467 - protein, 648 aa, Zea Mays
MLKQRYFTAFLAYGGCNLVLAAAAAAICAYIAPAAAGSGIPEVKAYLNGVDAYAILAPSTLFVKIFGSILGVSAGFVLGKEGPMVHTGACIANLLGQGGSRKYHLTCNWLRYFKNDRDRRDLITCGSAAGVAAAFRAPVGGVLFALEEAASWWRSALLWRTFFTTAVVAVVLRGLIQFCRSGKCGLFGQGGLIMFDLSSTVPSYSTQDIIAIIVLGIIGGVFGGLFNFLLDRILRAYSFINERGAPYKILLTVTISIITSACSYGLPWLAPCTPCPADAVEECPTIGRSGNFKNFQCPPGYYNGLASLFFNTNDDAIRNLFSSGTENEFHMSTLFVFFTAIYCLGLVTYGIAVPSGLFIPVILAGATYGRIVGTLLGPISDLDPGLFALLGAASFLGGTMRMTVSVCVILLELTNDLLMLPLVMLVLLISKTIADSFNKGVYDQIVVMKGLPFLEAHAEPYMTHLVASDVVSGPLISFSGVERVGNIVQALRITGHNGFPVVDEPPLSEAPELVGLVLRSHLLVLLKGKGFMKEKMKTSGSFVLERFGAFDFAKPGSGKGLKIEDLDFTDEEMDLYVDLHPITNTSPYTVVETMSLAKAAVLFRALGLRHMLVVPKTPGRPPIVGILTRHDFIPEHIHGLFPNIHKSH

SEQ ID NO: 165468 - protein, 134 aa, Zea Mays
MDHYRLLDRLNAYGLFEVRVSGDGNCQLKKCNTLYEGYVPMKYKKYCKKMKKSGEWGDHVTLQAAADKFAAKICLLTSFRDTCFVEIVPQYQAPQREIWLSFWSEIHYNSLYDARVQQLWYNLPSGGNPEWLSD

SEQ ID NO: 165469 - protein, 64 aa, Zea Mays
MSWSIQKENPLLRLTVENCELSSIGVIILLDCLTNAKQLLDVLSIADNHLGSPVAAALARFLGS

SEQ ID NO: 165470 - protein, 61 aa, Zea Mays
MSWSIQKENPLLRLTVENCELSSIGVIILLDCLTNAKQLLDVLSIADNHLGSCIGQILGFT

SEQ ID NO: 165471 - protein, 79 aa, Zea Mays
MAATSLSAARKFFPALVLVAAISLAMSSPLPWMPAPPSCCGQHPNPSAWLPSQPHPARLLRCRPPFQVVVPADLITRCS

SEQ ID NO: 165472 - protein, 228 aa, Zea Mays
MFCFDTVARHIVGKSCEIVLRSVTEQSPIPPDLAQIISLKFTFRVTIDNQSLFQQTSCPNVFRINSIVAAHGRQRSLPMQIGISDQQGPSTPQNKSKPMLLEDSPSTTLEKLSTTTPTTVVRKLLYSETDNTPKTHSISFTQLSFIHFKIYANKSNINSPEKDDGDKETAQNFDICSLIQYPLTKEKDQQIQLNRHLKGSNKGRYASEKKWTSNPPRTKVSLRSSSTF

SEQ ID NO: 165473 - protein, 227 aa, Zea Mays
MFNLHDVYDANTNKPILVLFVGCLPKFFKGVYLSGGPACRWYFNPTIPEAEPYLTSQSTKRIVLQLPQNLQHPPAMETKPIVEHKSLYELLTVNPYDFPETGFECTITIAEIPAEHKWWFPSCTKCNKATIPHTTGYHCESCNWDGYKFNANKSNINSPEKDDGDKETAQNFDICSLIQYPLTKEKDQQIQLNRHLKGSNKGRYASEKKWTSNPPRTKVSLRSSSTF

SEQ ID NO: 165474 - protein, 160 aa, Zea Mays
MVLQSNNSRGRTLSYQSTKRIVLQLPQNLQHPPAMETKPIVEHKSLYELLTVNPYDFPETGFECTITIAEIPAEHKWWFPSCTKCNKATIPHTTGYHCESCNWDGYKFKYKLKFLASDETDIAEMFCFDTVARHIVVAQTCSALILLLLHMGDNVLYQCK

SEQ ID NO: 165475 - protein, 168 aa, Zea Mays
METKPIVEHKSLYELLTVNPYDFPETGFECTITIAEIPAEHKWWFPSCTKCNKATIPHTTGYHCESCNWDGYKFNCPNVFRINSIVAAHGRQRSLPMQIGISDQQGPSTPQNKSKPMLLEDSPSTTLEKLSTTTPTTVVRKLLYSETDNTPKTHSISFTQLSFIHFKI

SEQ ID NO: 165476 - protein, 77 aa, Zea Mays
METKPIVEHKSLYELLTVNPYDFPETGFECTITIAEIPAEHKWWFPSCTKCNKATIPHTTGYHCESCNWDGYKFKNF

SEQ ID NO: 165477 - protein, 211 aa, Zea Mays
MFNLHDVYDANTNKPILVLFVGCLPKFFKGVYLSGGPACRWYFNPTIPEAEPYLTSQSTKRIVLQLPQNLQHPPAMETKPIVEHKSLYELLTVNPYDFPETGFECTITIAEIPAEHKWWFPSCTKCNKATIPHTTGYHCESCNWDGYKFNANKSNINSPEKDDGDKETAQLDTIPTNKGKGPADTIESPPKRFKQGTIRIGKEMDIKSSEN

SEQ ID NO: 165478 - protein, 175 aa, Zea Mays
MFNLHDVYDANTNKPILVLFVGCLPKFFKGVYLSGGPACRWYFNPTIPEAEPYLTSQSTKRIVLQLPQNLQHPPAMETKPIVEHKSLYELLTVNPYDFPETGFECTITIAEIPAEHKWWFPSCTKCNKATIPHTTDIAEMFCFDTVARHIVVAQTCSALILLLLHMGDNVLYQCK

SEQ ID NO: 165479 - protein, 505 aa, Zea Mays
MIVKQQFRWFPSSPQILLIVGVFQHLRVSTSPGYTQASNYRKIPLTYLHLIPDQVSYRTSLLGLITKLLLLSWSFHQNIKMEYTLLPDLAPHKIHAKIQVHVSRKWLFRGATDSGPLQHVDMVLSDREGNAIYAEIPGNLAEQKATNIEEGGVYDINRFRVCAAKTVFKIVDGDKMIQFTFHTIVKCATSPPTTFPLYVYRLTSFDLIEPHVQTTNNFVGVYLSGGPACRWYFNPTIPEAEPYLTSQSTKRIVLQLPQNLQHPPAMETKPIVEHKSLYELLTVNPYDFPETGFECTITIAEIPAEHKWWFPSCTKCNKATIPHTTGYHCESCNWDGYKFKYKLKFLASDETDIAEMFCFDTVARHIVGKSCEIVLRSVTEQSPIPPDLAQIISLKFTFRVTIDNQSLFQQTSCPNVFRINSIVAAHGRQRSLPMQIGISDQQGPSTPQNKSKPMLLEDSPSTTLEKLSTTTPTTVVRKLLYSETDNTPKTHSISFTQLSFIHFKI

SEQ ID NO: 165480 - protein, 274 aa, Zea Mays
MVLQSNNSRGRTLSYQSTKRIVLQLPQNLQHPPAMETKPIVEHKSLYELLTVNPYDFPETGFECTITIAEIPAEHKWWFPSCTKCNKATIPHTTGYHCESCNWDGYKFKYKLKFLASDETDIAEMFCFDTVARHIVGKSCEIVLRSVTEQSPIPPDLAQIISLKFTFRVTIDNQSLFQQTSCPNVFRINSIVAAHGRQRSLPMQIGISDQQGPSTPQNKSKPMLLEDSPSTTLEKLSTTTPTTVVRKLLYSETDNTPKTHSISFTQLSFIHFKI

SEQ ID NO: 165481 - protein, 204 aa, Zea Mays
MFNLHDVYDANTNKPILVLFVGCLPKFFKGVYLSGGPACRWYFNPTIPEAEPYLTSQSTKRIVLQLPQNLQHPPAMETKPIVEHKSLYELLTVNPYDFPETGFECTITIAEIPAEHKWWFPSCTKCNKATIPHTTGYHCESCNWDGYKFKYKLKFLASDETDIAEMFCFDTVARHIVGKSFAQTCSALILLLLHMGDNVLYQCK

SEQ ID NO: 165482 - protein, 315 aa, Zea Mays
MFNLHDVYDANTNKPILVLFVGCLPKFFKGVYLSGGPACRWYFNPTIPEAEPYLTSQSTKRIVLQLPQNLQHPPAMETKPIVEHKSLYELLTVNPYDFPETGFECTITIAEIPAEHKWWFPSCTKCNKATIPHTTGYHCESCNWDGYKFKYKLKFLASDETDIAEMFCFDTVARHIVGKSCEIVLRSVTEQSPIPPDLAQIISLKFTFRVTIDNQSLFQQTSCPNVFRINSIVAAHGRQRSLPMQIGISDQQGPSTPQNKSKPMLLEDSPSTTLEKLSTTTPTTVVRKLLYSETDNTPKTHSISFTQLSFIHFKI

SEQ ID NO: 165483 - protein, 111 aa, Zea Mays
MVLQSNNSRGRTLSYQSTKRIVLQLPQNLQHPPAMETKPIVEHKSLYELLTVNPYDFPETGFECTITIAEIPAEHKWWFPSCTKCNKATIPHTTGYHCESCNWDGYKFKNF

SEQ ID NO: 165484 - protein, 204 aa, Zea Mays
MIVKQQFRWFPSSPQILLIVGVFQHLRVSTSPGYTQASNYRKIPLTYLHLIPDQVSYRTRKMEYTLLPDLAPHKIHAKIQVHVSRKWLFRGATDSGPLQHVDMVLSDREGNAIYAEIPGNLAEQKATNIEEGGVYDINRFRVCAAKTVFKIVDGDKMIQFTFHTIVKCATSPPTTFPLYVYRLTSFDLIEPHVQTTNNFMFLVS

SEQ ID NO: 165485 - protein, 99 aa, Zea Mays
MFNLHDVYDANTNKPILVLFVGCLPKFFKGVYLSGGPACRWYFNPTIPEAEPYLTSLQKELCYSFPKIYNILQRWKRSQLSNINPSMNFLQLTHMISRI

SEQ ID NO: 165486 - protein, 324 aa, Zea Mays
MEYTLLPDLAPHKIHAKIQVHVSRKWLFRGATDSGPLQHVDMVLSDREGNAIYAEIPGNLAEQKATNIEEGGVYDINRFRVCAAKTVFKIVDGDKMIQFTFHTIVKCATSPPTTFPLYVYRLTSFDLIEPHVQTTNNFVGVYLSGGPACRWYFNPTIPEAEPYLTSQSTKRIVLQLPQNLQHPPAMETKPIVEHKSLYELLTVNPYDFPETGFECTITIAEIPAEHKWWFPSCTKCNKATIPHTTGYHCESCNWDGYKFKYKLKFLASDETDIAEMFCFDTVARHIVESQLTINLFSNKPVAQTCSALILLLLHMGDNVLYQCK

SEQ ID NO: 165487 - protein, 168 aa, Zea Mays
MEYTLLPDLAPHKIHAKIQVHVSRKWLFRGATDSGPLQHVDMVLSDREGNAIYAEIPGNLAEQKATNIEEGGVYDINRFRVCAAKTVFKIVDGDKMIQFTFHTIVKCATSPPTTFPLYVYRLTSFDLIEPHVQTTNNFVGVYLSGGPACRWYFNPTIPEAEPYLTTSL

SEQ ID NO: 165488 - protein, 373 aa, Zea Mays
MPNGGGKRWLLLLPLSRYVEVDEQQGVQLFYYFVRSERDPYEDPLLLWLSGGPGCSGISGLAYEIGPLKFDARGQGEFPTLLYRPETWTKVSNIIFVDSPVGTGFSYAKSEEGLETGDTKQVKQLVIFLRKWLQDHPRFVMNPLYIAGDSYSGLIIPTLALEIDRSIELGEKIFSGLKGYIAGNPLTGGQFDTDSQIPYFHAMGLVSDELYKNARENCGGKYSAPLNAVCAEAVQAINNCTRDINKQYILDPACPDDDLLSPKTVAETDGTSRLMLESADFLLGSKCAEALYILSYAWGNDDTVQESLGIRKGTIGAWKRYSHALPYNYDIQSVVDYHSRLATKGYRALIYRAATTMLLYPMLAHKHGLDTST

SEQ ID NO: 165489 - protein, 246 aa, Zea Mays
MPNGGGKRWLLLLPLSRYVEVDEQQGVQLFYYFVRSERDPYEDPLLLWLSGGPGCSGISGLAYEIGPLKFDARGQGEFPTLLYRPETWTKVSNIIFVDSPVGTGFSYAKSEEGLETGDTKQVKQLVIFLRKWLQDHPRFVMNPLYIAGDSYSGLIIPTLALEIDRSIELGEKIFSGLKGYIAGNPLTGGQFDTDSQIPYFHAMGLVSDELYKNARENCGGKYSAPLNAVCAEAVQAINNPVGATKQ

SEQ ID NO: 165490 - protein, 128 aa, Zea Mays
MSMMGELTYFLGFQVKQLKEETFLSQTKYTQDILKKFGMKDVKPAKTPMGTNSHLDLNIGGKYIDQKVYRSLSLCKYSRPDIILSVCMCARFQSDPKECHLVAMKRILRYLVHTPCIRLWYPKGLPLT

SEQ ID NO: 165491 - protein, 114 aa, Zea Mays
MYKFSKILSRSTRSRDQVSSPCGTYLLQGVADGLGEGDLAPAQVVEDMHILLLEVPKNGHPARLADHWAWAHHPAVLPAVLPCLGHIKLRMLVTILGCSTCFLRGRVGLAQLAR

SEQ ID NO: 165492 - protein, 287 aa, Zea Mays
MVFVFLKLDIMEGEVKGGTVWTVSQKAFVQEFLANLVADGSKTSTGFKRVHLSACAKALNNHFKINRTPEQIGNHLKTLKKKYIRINQLRSKSGANWDEENFIIRYDHEMYTSHFKDENGKEINKGDDEYINKPLPYYGNLATIFGDSVATGQFVKTSSEPLAVDVEEDEMNVGTPSSTSIDKEDTAGSGNRPSKRAKKDENIVDPLVHAFELGTQTIAGAIRDAASKRALPPGLFEAVDSLPGFELEHKAKYYSYLLNNPNVAQGFVEVPLLYKLSMLTEFINGNM

SEQ ID NO: 165493 - protein, 52 aa, Zea Mays
MYVCWAVSVFEFGSARKIIAIQPPFALFFSSHFVCSTYGVRPSIYVKPFLLN

SEQ ID NO: 165494 - protein, 181 aa, Zea Mays
MAFKCARGLPPEAAAEQIVKEAVEAKGLRDDTTCIVIDIISPEKPKRTIQSQRTPGKGLVLLKNFFLRKTTSDSLSLPDKDNYPEPDLEEVFEDGCPSLSRRLNSEYPVRDMFKLFACAICQIDLESGQGISIHEGLSRPGKLRPWDGPFLCHSCQEKKEAMEGKRHSRDSSSRNSGSSES

SEQ ID NO: 165495 - protein, 261 aa, Zea Mays
MSASRSGRRRTGSVALGDLLQREASAERAALGCGERPSVAAGQACRAKKGEDFALLKPACERRPGAPSTSFSAFALFDGHNGSAAAVYAKEHLLGNVLSCVPTDLAWDDWLAALPRALVAGFVKTDKDFQTKAHSSGTTVTLAIIDGSVVTVASVGDSRCVLEAEGSIYYLSADHRFDANEEEVGRVTECGGEVGRLNVVGGAEIGPLRCWPGGLCLSRSIGDQDVGEFIIPVPYVKQIKVHCWEVILHHFWTKLNCKLSL

SEQ ID NO: 165496 - protein, 270 aa, Zea Mays
MSASRSGRRRTGSVALGDLLQREASAERAALGCGERPSVAAGQACRAKKGEDFALLKPACERRPGAPSTSFSAFALFDGHNGSAAAVYAKEHLLGNVLSCVPTDLAWDDWLAALPRALVAGFVKTDKDFQTKAHSSGTTVTLAIIDGSVVTVASVGDSRCVLEAEGSIYYLSADHRFDANEEEVGRVTECGGEVGRLNVVGGAEIGPLRCWPGGLCLSRSIGDQDLSNAGGRLIISSDGVWDALTAEMAFKCARGLPPEAAAEQIVKVQY

SEQ ID NO: 165497 - protein, 407 aa, Zea Mays
MSASRSGRRRTGSVALGDLLQREASAERAALGCGERPSVAAGQACRAKKGEDFALLKPACERRPGAPSTSFSAFALFDGHNGSAAAVYAKEHLLGNVLSCVPTDLAWDDWLAALPRALVAGFVKTDKDFQTKAHSSGTTVTLAIIDGSVVTVASVGDSRCVLEAEGSIYYLSADHRFDANEEEVGRVTECGGEVGRLNVVGGAELSNAGGRLIISSDGVWDALTAEMAFKCARGLPPEAAAEQIVKEAVEAKGLRDDTTCIVIDIISPEKPKRTIQSQRTPGKGLVLLKNFFLRKTTSDSLSLPDKDNYPEPDLEEVFEDGCPSLSRRLNSEYPVRDMFKLFACAICQIDLESGQGISIHEGLSRPGKLRPWDGPFLCHSCQEKKEAMEGKRHSRDSSSRNSGSSES

SEQ ID NO: 165498 - protein, 228 aa, Zea Mays
MSASRSGRRRTGSVALGDLLQREASAERAALGCGERPSVAAGQACRAKKGEDFALLKPACERRPGAPSTSFSAFALFDGHNGSAAAVYAKEHLLGNVLSCVPTDLAWDDWLAALPRALVAGFVKTDKDFQTKAHSSGTTVTLAIIDGSVVTVASVGDSRCVLEAEGSIYYLSADHRFDANEEEVGRVTECGGEVGRLNVVGGAEIGPLRCWPGGLCLSRSIGDQDVAV

SEQ ID NO: 165499 - protein, 314 aa, Zea Mays
MRSDRHTLAGDMFWLPHLLTGVHVTLTSHPIVPSSLYKRMTVQHSTPHDSSDDVCGPWLSASIPLHLAPSQSIFSPSVYMDTMMGRRLLVSLVPLLMAVMVAAAFDISRGPPAFGVRRGAPKEYCDWRGPWGAAPFLLGSAAAIHLGNTNSCIAAYNFRTWSHEYYQLCMPSWVAVTDNGTVLSGEAAMNHATIGPRTAISGFTRLLDQKLTDDVGKSEMKLSPPYKFSERAGPVAMQFNHPSRRGQVIEFSPVDLAVVLVSELKHRAEAHLGRELSAAVIAMPRHLNYNERHDIVNVGRHDAGFHRGAKAIDR

SEQ ID NO: 165500 - protein, 258 aa, Zea Mays
MHQDAHEFLNFLLNELVDILEKESSAAKDSPQSSSPEKAPNGPVQPLANGVKKEPPVTLVHKSFQGILTNETRCLRCETVTARDETFLDLSVDIEQNSSITSCLKNFCSTETLNAEDKFFCDKCCSLQEAQKRMKIKKAPHILVIHLKRFKYIEQLGRYKKLSYRVVFPMELKLSNSSDDVDTEYSLFAVVVHVGSGPNHGHYVSLVKSHNHWLFFDDENVEMVEEQTLQTFFGTSHEYSGNTDHGYILFYEGLGGKS

SEQ ID NO: 165501 - protein, 243 aa, Zea Mays
MLAHEQKQQEPPQGESDSRSSESSRFIASEKGEKSATEEAAATAIPSSYLSLRSRTRIDPSRVLHRPPASSYPSPLPPPRARAGSHQTLGRQIRCDHPRWRPRRRPRGAAQGSGQGSGTSPAPPLAGGTGGWSWEPAAPSLRRPSETSSRKASATSASRTSATPATATVSFREQLLEYYANNKTPGDAEENLLTCLADLFMQISQAKKKTGVIAPKRFVQRVKKQNELFRSYMHQLQMAQFNL

SEQ ID NO: 165502 - protein, 447 aa, Zea Mays
MLDTNLRWGGGLVEIDRAIMEESGNCCIYAHGLPLKHRRQEMLQIKQEKEEMDRSYKGQLYSNDTTIKEKDSLIKQLEGSLDDNKSRLIYLDSRLQCMEQELKLKDDVCISLKGNLASSESEKNSLELMNKGHILEIKKLCQDNKDLNELFSSFMVKVTELDKEHASMSSHVSRLISSFERFYEMAQEEKMLMARSSKDKFEHLQSQYVDLTSENNALKTEIEELKSRLIELQRTQEIVMVQHVEECQVAEDKIRRLESEAEVSASNINQLEKLASELQGRIQKLLEDSTFAENHKQELLQKILKLESDNQELLGQMQSIMEEKSNNAESLHGEITKRDQQVDTLENQINQLRSVLDEKEQLYLCSVQKEKTLEEQKLQVEALLSATECKLSDAKKQYDLMLEGEKIELSKHLKELSLKNDQAINEIRKKYELEKIEITNAEKEKVS

SEQ ID NO: 165503 - protein, 839 aa, Zea Mays
MQKHSGLRSLEGFRSLVGSTSTAMKVANPRPSPDTGGISYGSFANLKITAEKLVKEQASVKTDLEMAHVKLRRATEQINIIEGKLQQALNENAKLKVKQTEDSKLWQGLDSKLSSTKTLCDQLTETLQQLASQTEQAEEDKKFFEEMLGKNSKALDEFNCLLRDLSTKLEYAEQKIISGRQEMLQIKQEKEEMDRSYKGQLYSNDTTIKEKDSLIKQLEGSLDDNKSRLIYLDSRLQCMEQELKLKDDVCISLKGNLASSESEKNSLELMNKGHILEIKKLCQDNKDLNELFSSFMVKVTELDKEHASMSSHVSRLISSFERFYEMAQEEKMLMARSSKDKFEHLQSQYVDLTSENNALKTEIEELKSRLIELQRTQEIVMVQHVEECQVAEDKIRRLESEAEVSASNINQLEKLASELQGRIQKLLEDSTFAENHKQELLQKILKLESDNQELLGQMQSIMEEKSNNAESLHGEITKRDQQVDTLENQINQLRSVLDEKEQLYLCSVQKEKTLEEQKLQVEALLSATECKLSDAKKQYDLMLEGEKIELSKHLKELSLKNDQAINEIRKKYELEKIEITNAEKEKAEKLIREIENKCNEKISQNKHDSQRYLICLKEEHGTTVARIQQDNEHKESTLRAYHKEELQRIQSQAENEMRERLSLLRKEHEVQIKSLRMHHEEECQRMQEELELQKSKEEKQRALLQLQWKVMGESQRVDQEVNSKKEYSVSSIRRSDPYGRKEQEVQLVSPETNRKDVNLPGILQSPISNMLRKVEKVSQDIPKHRKEPNSQKPLHNTTDKDVKKLKKVPTRSRAHPANIGELFSEGSLNPYADDPYAFD

SEQ ID NO: 165504 - protein, 871 aa, Zea Mays
MQKHSGLRSLEGFRSLVGSTSTAMKVANPRPSPDTGGISYGSFANLKITAEKLVKEQASVKTDLEMAHVKLRRATEQINIIEGKLQQALNENAKLKVKQTEDSKLWQGLDSKLSSTKTLCDQLTETLQQLASQTEQAEEDKKFFEEMLGKNSKALDEFNCLLRDLSTKLEYAEQKIISGRQEMLQIKQEKEEMDRSYKGQLYSNDTTIKEKDSLIKQLEGSLDDNKSRLIYLDSRLQCMEQELKLKDDVCISLKGNLASSESEKNSLELMNKGHILEIKKLCQDNKDLNELFSSFMVKVTELDKEHASMSSHVSRLISSFERFYEMAQEEKMLMARSSKDKFEHLQSQYVDLTSENNALKTEIEELKSRLIELQRTQEIVMVQHVEECQVAEDKIRRLESEAEVSASNINQLEKLASELQGRIQKLLEDSTFAENHKQELLQKILKLESDNQELLGQMQSIMEEKSNNAESLHGEITKRDQQVDTLENQINQLRSVLDEKEQLYLCSVQKEKTLEEQKLQVEALLSATECKLSDAKKQYDLMLEGEKIELSKHLKELSLKNDQAINEIRKKYELEKIEITNAEKEKAEKLIREIENKCNEKISQNKHDSQRYLICLKEEHGTTVARIQQDNEHKESTLRAYHKEELQRIQSQAENEMRERLSLLRKEHEVQIKSLRMHHEEECQRMQEELELQKSKVEEKQRALLQLQWKVMGESQRVDQEVNSKKIFQEYSVSSIRRSDPYGRKEQEVQLVSPETNRKDVNLPGILQSPISNMLRKVEKVSQDIPKHRKVTHHEYEVETANGRITKRRKTRSTVMFGEPNSQKPLHNTTDKDVKKLKKVPTRSRAHPANIGELFSEGSLNPYADDPYAFD

SEQ ID NO: 165505 - protein, 662 aa, Zea Mays
MQKHSGLRSLEGFRSLVGSTSTAMKVANPRPSPDTGGISYGSFANLKITAEKLVKEQASVKTDLEMAHVKLRRATEQINIIEGKLQQALNENAKLKVKQTEDSKLWQGLDSKLSSTKTLCDQLTETLQQLASQTEQAEEDKKFFEEMLGKNSKALDEFNCLLRDLSTKLEYAEQKIISGRQEMLQIKQEKEEMDRSYKGQLYSNDTTIKEKDSLIKQLEGSLDDNKSRLIYLDSRLQCMEQELKLKDDVCISLKGNLASSESEKNSLELMNKGHILEIKKLCQDNKDLNELFSSFMVKVTELDKEHASMSSHVSRLISSFERFYEMAQEEKMLMARSSKDKFEHLQSQYVDLTSENNALKTEIEELKSRLIELQRTQEIVMVQHVEECQVAEDKIRRLESEAEVSASNINQLEKLASELQGRIQKLLEDSTFAENHKQELLQKILKLESDNQELLGQMQSIMEEKSNNAESLHGEITKRDQQVDTLENQINQLRSVLDEKEQLYLCSVQKEKTLEEQKLQVEALLSATECKLSDAKKQYDLMLEGEKIELSKHLKELSLKNDQAINEIRKKYELEKIEITNAEKEKAEKLIREIENKCNEKISQNKHDSQRYLICLKEEHGTTVARIQQDNEHKESTLRAYHKEELQRIQSQAENEMREKRA

SEQ ID NO: 165506 - protein, 798 aa, Zea Mays
MQKHSGLRSLEGFRSLVGSTSTAMKVANPRPSPDTGGISYGSFANLKITAEKLVKEQASVKTDLEMAHVKLRRATEQINIIEGKLQQALNENAKLKVKQTEDSKLWQGLDSKLSSTKTLCDQLTETLQQLASQTEQGRQEMLQIKQEKEEMDRSYKGQLYSNDTTIKEKDSLIKQLEGSLDDNKSRLIYLDSRLQCMEQELKLKDDVCISLKGNLASSESEKNSLELMNKGHILEIKKLCQDNKDLNELFSSFMVKVTELDKEHASMSSHVSRLISSFERFYEMAQEEKMLMARSSKDKFEHLQSQYVDLTSENNALKTEIEELKSRLIELQRTQEIVMVQHVEECQVAEDKIRRLESEAEVSASNINQLEKLASELQGRIQKLLEDSTFAENHKQELLQKILKLESDNQELLGQMQSIMEEKSNNAESLHGEITKRDQQVDTLENQINQLRSVLDEKEQLYLCSVQKEKTLEEQKLQVEALLSATECKLSDAKKQYDLMLEGEKIELSKHLKELSLKNDQAINEIRKKYELEKIEITNAEKEKAEKLIREIENKCNEKISQNKHDSQRYLICLKEEHGTTVARIQQDNEHKESTLRAYHKEELQRIQSQAENEMRERLSLLRKEHEVQIKSLRMHHEEECQRMQEELELQKSKVEEKQRALLQLQWKVMGESQRVDQEVNSKKEYSVSSIRRSDPYGRKEQEVQLVSPETNRKDVNLPGILQSPISNMLRKVEKVSQDIPKHRKEPNSQKPLHNTTDKDVKKLKKVPTRSRAHPANIGELFSEGSLNPYADDPYAFD

SEQ ID NO: 165507 - protein, 826 aa, Zea Mays
MQKHSGLRSLEGFRSLVGSTSTAMKVANPRPSPDTGGISYGSFANLKITAEKLVKEQASVKTDLEMAHVKLRRATEQINIIEGKLQQALNENAKLKVKQTEDSKLWQGLDSKLSSTKTLCDQLTETLQQLASQTEQGRQEMLQIKQEKEEMDRSYKGQLYSNDTTIKEKDSLIKQLEGSLDDNKSRLIYLDSRLQCMEQELKLKDDVCISLKGNLASSESEKNSLELMNKGHILEIKKLCQDNKDLNELFSSFMVKVTELDKEHASMSSHVSRLISSFERFYEMAQEEKMLMARSSKDKFEHLQSQYVDLTSENNALKTEIEELKSRLIELQRTQEIVMVQHVEECQVAEDKIRRLESEAEVSASNINQLEKLASELQGRIQKLLEDSTFAENHKQELLQKILKLESDNQELLGQMQSIMEEKSNNAESLHGEITKRDQQVDTLENQINQLRSVLDEKEQLYLCSVQKEKTLEEQKLQVEALLSATECKLSDAKKQYDLMLEGEKIELSKHLKELSLKNDQAINEIRKKYELEKIEITNAEKEKAEKLIREIENKCNEKISQNKHDSQRYLICLKEEHGTTVARIQQDNEHKESTLRAYHKEELQRIQSQAENEMRERLSLLRKEHEVQIKSLRMHHEEECQRMQEELELQKSKVEEKQRALLQLQWKVMGESQRVDQEVNSKKEYSVSSIRRSDPYGRKEQEVQLVSPETNRKDVNLPGILQSPISNMLRKVEKVSQDIPKHRKVTHHEYEVETANGRITKRRKTRSTVMFGEPNSQKPLHNTTDKDVKKLKKVPTRSRAHPANIGELFSEGSLNPYADDPYAFD

SEQ ID NO: 165508 - protein, 583 aa, Zea Mays
MAASLRWWWSAVVFSVVVGVIPVVANTEGDALYSLRQSLKDNNNVLQSWDPTLVNPCTWFHVTCNPDNSVIRLDLGNAQLSGPLVPQLGQLKNMQYLELYSNNISGPIPPELGNLTNLVSLDLYLNNFTGGIPDTLGQLSKLRFLRLNNNSLSGQIPKTLTNINTLQVLDLSNNNLSGGVPSSGSFSLFTPISFANNPNLCGPGTTKPCPGAPPFSPPPPYNPPAPTSSKGVSSTGAVAGGVAAGTALLIAVPAIGYALWRRRKPEEQFFDVPAEEDPEVHLGQLKRFSLRELQVATDNFNNRNVLGRGGFGKVYKGRLTDGSLVAVKRLKEERTPGGELQFQTEVELISMAVHRNLLRLRGFCMTPTERLLVYPYMANGSVASRLRERAPNEPPLEWETRARIALGSARGLSYLHDHCDPKIIHRDVKAANILLDEDFEAVVGDFGLAKLMDYKDTHVTTAVRGTIGHIAPEYLSTGKSSEKTDVFGYGIMLLELITGQRAFDLARLANDDDVMLLDWGSPMERPKMSEVARMLEGDGLAERWEQWQKVEVMRQEAELAPRHNDWIVDSTYNLRAVELSGPR

SEQ ID NO: 165509 - protein, 618 aa, Zea Mays
MAASLRWWWSAVVFSVVVGVIPVVANTEGDALYSLRQSLKDNNNVLQSWDPTLVNPCTWFHVTCNPDNSVIRLDLGNAQLSGPLVPQLGQLKNMQYLELYSNNISGPIPPELGNLTNLVSLDLYLNNFTGGIPDTLGQLSNRLNNNSLSGQIPKTLTNINTLQVLDLSNNNLSGGVPSSGSFSLFTPISFANNPNLCGPGTTKPCPGAPPFSPPPPYNPPAPTSSKGVSSTGAVAGGVAAGTALLIAVPAIGYALWRRRKPEEQFFDVPAEEDPEVHLGQLKRFSLRELQVATDNFNNRNVLGRGGFGKVYKGRLTDGSLVAVKRLKEERTPGGELQFQTEVELISMAVHRNLLRLRGFCMTPTERLLVYPYMANGSVASRLRERAPNEPPLEWETRARIALGSARGLSYLHDHCDPKIIHRDVKAANILLDEDFEAVVGDFGLAKLMDYKDTHVTTAVRGTIGHIAPEYLSTGKSSEKTDVFGYGIMLLELITGQRAFDLARLANDDDVMLLDWVKALLKEKKLEQLVDPDLQGRYVDQEVESLIQVALLCTQGSPMERPKMSEVARMLEGDGLAERWEQWQKVEVMRQEAELAPRHNDWIVDSTYNLRAVELSGPR

SEQ ID NO: 165510 - protein, 1236 aa, Zea Mays
MAEGDAGKAEAGSCSAAAASGAGGCDAVKKRPEQSVAFHELFGFADPLDWLLMAAGSAGAVVHGAAMPVFFLLFGELVNGFGKNQHNLRRMTDEVSKYSLYFVYLGLVVCASSYLEIACWMYTGERQVGALRRRYLEAVLRQDVGFFDTDARTGDVVFSVSTDTLLVQDAIGEKVGNFIHYLATFLAGLVVGFVSAWRLALLSIAVIPGIAFAGGLYAYTLTGLTSKSRDSYANAGIIAEQAIAQVRTVYSYVGETKALNSYSEAIQNTLKLGYKAGMAKGLGIGCTYGIACMSWALVFWYAGVFIRNGQTDGGKAFTAIFSAIVGGLSLGQSFSNLGAFSKGKIAGYKLLEVIRQRPTIVQDTADGRCLDEVHGNIEFKEVAFSYPSRPDVMIFRDFSLFFPAGKTAAVVGGSGSGKSTVVALIERFYDPNQGQVLLDNVDIKTLQLKWLRDQIGLVNQEPALFATTILENILYGKPDATMAEVEAAATSANAHSFIALLPNGYNTHVGDRGLQLSGGQKQRIAIARAMLKNPKLLLLDEATSALDAGSESIVQEALDRLMVGRTTVVVAHRLSTIRCVDMIAVIQQGQVVETGTHDELLAKGSSGAYAALIRFQETARNRACPSTRKSSTGADGRIEMVSNADNDRKYPAPRGYFFKLLKLNAPEWPYTILGAVGSVLSGFIGPTFAIVMSNMIEVFYYRNPSKMESKTREYVFIYIGTGLYAVVAYLVQHYFFSIMGENLTTRVRRMMLAVILRNDVGWFDQEENNSNLVAARLSTDAADVKSAIAERISVILQNMTSLLVSFVVGFIIEWRVALLILVTFPLLVLANFAQQLSMKGFAGDTAKAHAKTSMIAGEGVSNIRTVAAFNAQDKILSLFCSELRVPQMHSLRRSQISGALFGLSQLSLYASEALILWFGAHLVRTHVSTFSKVIKVFVVLVITANSVAETVSLAPEIVRGGESIRSVFSVLNSRTRIDPDDPDAEQVESVRGEIDFRHVDFAYPTRPDVMVFKDLSLRIRAGQSQALVGASGSGKSTVIALVERFYDPLAGKVMIDGKDIRRLNLKSLRLRIGLVQQEPVLFATSILENIAYGRDGATEEEVVEAAKVANVHGFVSALPDGYRTPVGERGVQLSGGQKQRIAIARAVLKDPAVLLLDEATSALDAESECVLQEALERIMKGRTAVLVAHRLSTIRGVDSIAVVQDGRVVEQGSHGDLVSRPDGAYSRLLQLQLHHG

SEQ ID NO: 165511 - protein, 253 aa, Zea Mays
MAGGPAAVSFLTNIAKVAAGLGAAASLASASLYTVDGGERAVIFDRFRGVLPETVGEGTHFLVPWLQKPFIFDIRTRPHNFSSLGLEYDDKVLPSIGNEVLKAVVAQFNADQLLTDRPHVSALVRDALIRRAREFNIILDDVAITHLSYGIEFSLAVEKKQVAQQEAERSKFLVAKAEQERRAAIVRAEGESESARLISEATAMAGTGLIELRRIEAAKEIAAELARSPNVAYIPSGENGKMLLGLNATGFGR

SEQ ID NO: 165512 - protein, 523 aa, Zea Mays
MLRQMIADRRSSGCARDDMLDALLSGNEGTRAKLSDDQIIDLLITLIYSGYETVSTTSMKAEVPVRQPQSSRQIRKEHLDIRKAKSPEDPLDWNDYKSMTFTKAIELPLHSTDASGSSTMYMVVGEEGDYYNRGMRHGSLTLGVVEALDATRATAVTAEEARTTAKEMEKKAATTAKLAAIAMDKRRRGRRKPRAGEAREESRGPEEQQPVEVACAVAVRGKSSHNGAIIGGIVGGVAFMFLVGLLTFLLVRRSRKTKPRRGDILGATELQGPTSFHYNDLKAATNNFNEKSKLGEGGFGDVYKRPLQGRSTRGKTLVWVAFRRFTVAAPQALQQGGKRQQVRDLAGGGLGDDRPEADHQAGLHFLRRRVLHERSFFGFIQSSKEKHSTPKYGLIYHASSIGKASQKHNGKNLGLYLQKLLLLSDRMPLVLMRTTPLALRVDSRWPCDMLLLNNLRHSFKLLKDQQTICQRWIPCLEIVVPLGLIYGSDFENPDLNLEGRDGWAGEHAGSGGPQRLCLCLWLP

SEQ ID NO: 165513 - protein, 409 aa, Zea Mays
MAPPQTIPRRGLFIGGAWREPCLGRRLPVVNPATEATIGDIPAGTAEDVEIAVAAARDAFSRDGGRHWSRAPGAVRANFLRAIAAKIKDRKSELALLETLDSGKPLDEASGDMDDVAACFEYYADLAEALDGKQQSPISLPMENFKSYVLKEPIGVVGLITPWNYPLLMATWKVAPALAAGCTTILKPSELASVSCLELGAICMEIGLPPGVLNIITGLGPEAGAPLSSHSHVDKVAFTGSTETGKRIMISAAQMVKPVSLELGGKSPLIVFDDIGDIDKAVEWTMFGIFANAGQVCSATSRLLLHEKIAKKFLDRLVAWAKNIKVSDPLEEGCRLGSVISEGQYEKIKKFISTARSEGATILYGGGRPQMLVRQCKFGKRKSLDQLSVLRSLGQRVKLWNLQMILTMV

SEQ ID NO: 165514 - protein, 502 aa, Zea Mays
MSTPLCVRSPNSQRRAGQPERKRRRQQVTGSLLCPLVSRVQTTASPWRRRRRSPGAASSLAGPGGSRASGAACPSSTRPPRPPSATSRRARRRTWRSRSPRRGTRSPATAGGTGRAPLGPCAPTSSGRSPPRLKTGNLSWLCWRHLILESLWMKQVETWNYPLLMATWKVAPALAAGCTTILKPSELASVSCLELGAICMEIGLPPGVLNIITGLGPEAGAPLSSHSHVDKVAFTGSTETGKRIMISAAQMVKPVSLELGGKSPLIVFDDIGDIDKAVEWTMFGIFANAGQVCSATSRLLLHEKIAKKFLDRLVAWAKNIKVSDPLEEGCRLGSVISEGQYEKIKKFISTARSEGATILYGGGRPQHLRRGFFLEPTIITDVSTSMQIWQEEVFGPVICVKEFRTESEAVELANDTHYGLAGAVISNDQERCERISKALHSGIIWINCSQPCFVQAPWGGNKRSGFGRELGEWGLDNYLTVKQVTKYCSDEPWGWYQPPSKL

SEQ ID NO: 165515 - protein, 70 aa, Zea Mays
MHGAWHDDGVVDLFDPVLLLSFESRSHHQIATADLEEPEAKESLRDLLFPQTPAHQVGARGRYATGLHSF

SEQ ID NO: 165516 - protein, 64 aa, Zea Mays
MVHGMMMAWLIYSIQYYFCHSSQEAIIRSVQFSLLLPAPLQLLCNTAPAMALGNQASWSEILLS

SEQ ID NO: 165517 - protein, 69 aa, Zea Mays
MTTIVWALYNSYGGSGGARGQGVFEGSSLSANTSTPSWSSWSLRHRTAQFLTEIEEEPKQPQVFNIFVF

SEQ ID NO: 165518 - protein, 116 aa, Zea Mays
MKKRPVLSIGRNNAITGVAKTIKTHFKKHPLAIVNIKNRADGTPIQQLISELEEATGSVLVSRETNKVILYRGWGAEVAQKSSRESSTDEGEKEVISPQLLEAIRLECGLLPADSG

SEQ ID NO: 165519 - protein, 661 aa, Zea Mays
MQVPGRLRRVLRAPPPRILLYRAISSPPPGGGSGVAVKQVTRGNMEEALEKLRGRVREAAFVGLDLEMSGVTSAPWRDTFELDRADVRYLKLRDSAERFAALQLGVCPFRWDPAKSAFVAHPHNFFIFPRKELPSDCSSHEFLCQTTSIEFLAKYQFDFNTCFREGISYLSRAQEEEALQKFNMLHHGRTVTSSTNSEEDGDMPLKSASDILFTERMKMNFKEWRDAIASKPMVDNHLSGNIKCGSGQFQTVFFKMRPAIILNGFSSHQLKLIQQVLRKNFRDLIFVCTFGEDDTSEKKVVYSDTDEDRILLMKDVQEDLLKNREERIKSAIGIRHVIDLLSSERKLIVGHSCFLDTRHLMSVNQAVQKLMKHKSKSLSSAFLLLCPASYSSVEKPSSHSPVTIEVEGDETMSSRFISGAKHEAGYDAYMTGCIFAQLCAYLGIQFEQFSPLDNLATNTKLQKHINFLSPSWNSGTVLDLSTGMETPDPGYTRRYPAAVYDNIVVIWGFLSKVRPKEIKDCICKVFGSGSVTTVFSIDSTAALVQFKKQESVNDFLDLKAVLERADSAISILHPLSTILEGGQTRAAKYDTYRDICSSSESKYLFADQAEAVCATSKNQLIENVDGNLISDVLDGVALASVTEEDGIIPSSKNQNVAEATC

SEQ ID NO: 165520 - protein, 117 aa, Zea Mays
MHAEVLSSNSRGNEFQAEIKKIPLTDSATKHGLRLGPRSHGQLGRHERVEERRFRGFLDLHEIFPIRFRSLRHMRKTEQHALVFLQMKSTFREVFTTWRLYAMLESRFMTKEKWTVF

SEQ ID NO: 165521 - protein, 123 aa, Zea Mays
MLKICKILGMAALVEVHDEREMDRVLGIDGVQLIGINNRNLETFEVDITNTKKLLEGERGQVIAQKDVIVVGESALFTPDDISFVQNAGVKAVLVGESLIKQEDPGKAIAGLFGKDISHAGAT

SEQ ID NO: 165522 - protein, 360 aa, Zea Mays
MEALAIGSAPRRPGARYSQLRRPGTLAVTTTATVACRPLTAPSMDAAVGRPSRAPIRCTSAETDSVDEVATSSHAAEANAGGTTEQEGNGSPVAAAAAYSPVVAGVDGIRIRRRPVTGPAVHYVGPFQFRLENEGNTPRNILEKIIWNKDVEVSQMKERRPLYMLKGPLEAAPPARDFVGALKASYDRTGLPALIAEVKKASPSRGVIRENFDPIAQAYEKNGAACLSVLTDEKYFQGSFYNLEAIRNAGVQVHDEREMDRVLGIDGVQLIGINNRNLETFEVDITNTKKLLEGERGQVIAQKDVIVVGESALFTPDDISFVQNAGVKAVLVGESLIKQEDPGKAIAGLFGKDISHAGAT

SEQ ID NO: 165523 - protein, 610 aa, Zea Mays
MEEAPTREPKRLRQDAAVTSAAAAAEEPQYVYLPIADAMKVPGVRVCLFAVVSEIGITDRSRGTDFTLRLRIVDQSCMDGISVTVFADKTTLLPCVKSSGDVISLHNVMITMHGEFFVSFNKEVSSFALFESKVAECSPYQTSVKYHGSKHDKELLTQMRTWLAYNPLGLKDFELQLRSLKSDSTFDLVCKVVHVHEDNDKLIFYVWDGTDTPAVEFQATLDPKAVESPPLFEGPPLPREVLCTMPIIGTVLRIFSDMPIKEVSHMQNRVYWARFCNITCKEEFGIWKGILLASSKVRLLSHEDGSVVDRRKMYAIRKANQVLCQPMASFPSNVTDVEYEEEWHSTLMQSLTHKEVTHKLKTLARVVGAYPCQASGLRLLSTGNIHLRLTLEDPTARIHAYVHKNYLVQIAQAYEKNGAACLSVLTDEKYFQGSFYNLEAIRNAGVQCPLLCKEFIIDAWQLYYARSKGADAVLLIAAVLPDRDIKYMLKICKILGMAALVEVHDEREMDRVLGIDGVQLIGINNRNLETFEVDITNTKKLLEGERGQVIAQKDVIVVGESALFTPDDISFVQNAGVKAVLVGESLIKQEDPGKAIAGLFGKDISHAGAT

SEQ ID NO: 165524 - protein, 240 aa, Zea Mays
MFGMELIPLLLSFRQHMPIKEVSHMQNRVYWARFCNITCKEEFGIWKGILLASSKVRLLSHEDGSVVDRRKMYAIRKANQVLCQPMASFPSNVTVLSDVEYEEEWHSTLMQSLTHKEVTHKLKTLARVVGAYPCQASGLRLLSTGNIHLRLTLEDPTARIHAYVHKNYLVQFFGGFLTEEAITKKMNKLLGIPEPEDSEEGAPLTRNPPWIWCCLTSFYMDKNNPWDSRKYRIFATEMRD

SEQ ID NO: 165525 - protein, 362 aa, Zea Mays
MEEAPTREPKRLRQDAAVTSAAAAAEEPQYVYLPIADAMKVPGVRVCLFAVVSEIGITDRSRGTDFTLRLRIVDQSCMDGISVTVFADKTTLLPCVKSSGDVISLHNVMITMHGEFFVSFNKEVSSFALFESKVAECSPYQTSVKYHGSKHDKELLTQMRTWLAYNPLGLKDFELQLRSLKSDSTFDLVCKVVHVHEDNDKLIFYVWDGTDTPAVEFQATLDPKAVESPPLFEGPPLPREVLCTMPIIGTVLRIFSDMPIKEVSHMQNRVYWARFCNITCKEEFGIWKGILLASSKVRLLSHEDGSVVDRRKMYAIRKANQVLCQPMASFPSNVTGIEHSPIFCIAPDESILFYRSDHEFSF

SEQ ID NO: 165526 - protein, 220 aa, Zea Mays
MEEAPTREPKRLRQDAAVTSAAAAAEEPQYVYLPIADAMKVPGVRVCLFAVVSEIGITDRSRGTDFTLRLRIVDQSCMDGISVTVFADKTTLLPCVKSSGDVISLHNVMITMHGEFFVSFNKEVSSFALFESKVAECSPYQTSVKYHGSKHDKELLTQMRTWLAYNPLGLKDFELQLRSLKSDSTFDLVCKVVHVHEDNDKLIFYVWDGTDTPAVEFQAT

SEQ ID NO: 165527 - protein, 237 aa, Zea Mays
MPIIGTVLRIFSDMPIKEVSHMQNRVYWARFCNITCKEEFGIWKGILLASSKVRLLSHEDGSVVDRRKMYAIRKANQVLCQPMASFPSNVTVLSDVEYEEEWHSTLMQSLTHKEVTHKLKTLARVVGAYPCQASGLRLLSTGNIHLRLTLEDPTARIHAYVHKNYLVQFFGGFLTEEAITKKMNKLLGIPEPEDSEEGAPLTRNPPWIWCCLTSFYMDKNNPWDSRKYRIFATEMRD

SEQ ID NO: 165528 - protein, 95 aa, Zea Mays
MINLLRKKVCRADIVVVEEVKDKKKEEEEKKKKEEEEKKKKAEEEAKKKKEEEELKKKLCPYLYPPPPCSGACCRGPSPPMFLCEPEQPAGCHIM

SEQ ID NO: 165529 - protein, 197 aa, Zea Mays
MRRSQGTMKRLVSTALAARGLLRSHGLPTTTSVMYQPAFQQFMNYSSPHGGDPNANTNSTTTRIAADPDTHQDFEPKSRISDMTLHDAIAQDIKENPVLIYMKGFPESPMCGFSALAVKVFQQYGVPVCGRDILGDLKLKECVKAHTNWPTFPQIFIKGEFVGGSDIILSLHQKGELKDLLGDIAQRDEQKVHAHDS

SEQ ID NO: 165530 - protein, 327 aa, Zea Mays
MSHPRTRMANRRLWVRTCVRECQATGIVGENVISHCQSKENYTSVGVSWYNQEQIYIQWKELNCRTDCRYFCMMQREGERQSLGLSPVKYHGKWPFLRVSVFQEPLSTALSAVNLLMHFTGWLSFFLLVNYKLPLRPQTKRTYYEYTSLWHIYAILSMNAWFWSSIFHTRDIELTEKLDYSSAVALLGYSLILSLLRAFNVKDEASRVMFAAPILAFVTTHILYLNFYELDYGWNMKVCVVMAAVQLLTWAVWAGVSRHPSRLKLWTVVFGGALVMLLELYDFPPYMGFADAHSLWHASTIPLTYLWWSFIKDDAKFRTSTLSKKAK

SEQ ID NO: 165531 - protein, 346 aa, Zea Mays
MGRSALAVRLASLLAFGLVLVSVEASLGDVDPRYRTCVRECQATGIVGENVISHCQSKENYTSVGVSWYNQEQIYIQWKELNCRTDCRYFCMMQREGERQSLGLSPVKYHGKWPFLRVSVFQEPLSTALSAVNLLMHFTGWLSFFLLVNYKLPLRPQTKRTYYEYTSLWHIYAILSMNAWFWSSIFHTRDIELTEKLDYSSAVALLGYSLILSLLRAFNVKDEASRVMFAAPILAFVTTHILYLNFYELDYGWNMKVCVVMAAVQLLTWAVWAGVSRHPSRLKLWTVVFGGALVMLLELYDFPPYMGFADAHSLWHASTIPLTYLWWSFIKDDAKFRTSTLSKKAK

SEQ ID NO: 165532 - protein, 229 aa, Zea Mays
MGRSALAVRLASLLAFGLVLVSVEASLGDVDPRYRTCVRECQATGIVGENVISHCQSKENYTSVGVSWYNQEQIYIQWKELNCRTDCRYFCMMQREGERQSLGLSPVKYHGKWPFLRVSVFQEPLSTALSAVNLLMHFTGWLSFFLLVNYKLPLRPQTKRTYYEYTSLWHIYAILSMNAWFWSSIFHTRDIELTEKLDYSSAVALLGYSLILSLLRAFNVKDEASRDGT

SEQ ID NO: 165533 - protein, 365 aa, Zea Mays
MPIVLYLQLTRRSITHAAGQQSAASRLVASSGVGSLVSELVIRTLAASAVMGRSALAVRLASLLAFGLVLVSVEASLGDVDPRYRTCVRECQATGIVGENVISHYCRYFCMMQREGERQSLGLSPVKYHGKWPFLRVSVFQEPLSTALSAVNLLMHFTGWLSFFLLVNYKLPLRPQTKRTYYEYTSLWHIYAILSMNAWFWSSIFHTRDIELTEKLDYSSAVALLGYSLILSLLRAFNVKDEASRVMFAAPILAFVTTHILYLNFYELDYGWNMKVCVVMAAVQLLTWAVWAGVSRHPSRLKLWTVVFGGALVMLLELYDFPPYMGFADAHSLWHASTIPLTYLWWSFIKDDAKFRTSTLSKKAK

SEQ ID NO: 165534 - protein, 170 aa, Zea Mays
MNAWFWSSIFHTRDIELTEKLDYSSAVALLGYSLILSLLRAFNVKDEASRVMFAAPILAFVTTHILYLNFYELDYGWNMKVCVVMAAVQLLTWAVWAGVSRHPSRLKLWTVVFGGALVMLLELYDFPPYMGFADAHSLWHASTIPLTYLWWSFIKDDAKFRTSTLSKKAK

SEQ ID NO: 165535 - protein, 192 aa, Zea Mays
MGRSALAVRLASLLAFGLVLVSVEASLGDVDPRYRDIELTEKLDYSSAVALLGYSLILSLLRAFNVKDEASRVMFAAPILAFVTTHILYLNFYELDYGWNMKVCVVMAAVQLLTWAVWAGVSRHPSRLKLWTVVFGGALVMLLELYDFPPYMGFADAHSLWHASTIPLTYLWWSFIKDDAKFRTSTLSKKAK

SEQ ID NO: 165536 - protein, 172 aa, Zea Mays
MKPFGFAAKLSTKCANENARVEELDLRSDQMKELQVEEQVIPQKRSAKIHDFCLGIPFGGLLFSMGLLGYIFSRSTISLVLGIAPGLATLLLGTLSLKFWRSGRSSFLLILAQAAISAFLAWKYSHAYFLTNRLLPWGFYASLSTAMGCFYAYVLLAGGNPPPKKLAAIPPQ

SEQ ID NO: 165537 - protein, 171 aa, Zea Mays
MAAAAQLHGSAAATVAYRGTRAYSVPSSCRWPQSGSPKLSISTSGVSMKPFGFAAKLSTKCANENARVEELDLRSDQMKELQVEEQVIPQKRSAKIHDFCLGIPFGGLLFSMGLLGYIFSRSTISLVLGIAPGLATLLLGTLSLKFWRSGRSSFLLILAQADSFLGASTRH

SEQ ID NO: 165538 - protein, 212 aa, Zea Mays
MCYLREEIPRLRSWQPFHRSRKSRRGIRFRISFSTTGPTKAQLSRSNRFGASHPSDRPAFKLGFTPPAPRKQTSVSSAGGLALSPPPHLLYARTAKMKLVRFLMKLNNETVTIELKNGTVVHGTITGVDISMNTHLKTVKLTLKGKNPVTLDHLSVRGNNIRYYILPDSLNLETLLVEETPRVKPKKPTTGKPLGRGRGRGRGRGRGRGPPR

SEQ ID NO: 165539 - protein, 301 aa, Zea Mays
MLIFGGVQLLLSFIPDFHDMAWLSVVAAAMSFSYAFIGLGLGLARTIANGTIKGSITGVRMRTPMQKVWRVSQAIGDIAFAYPYSLILLEIQDTLKSPPAENKTMKRASMISILVTTFFYLCCGCLGYAAFGSDAPGNLLTGFGLYGPYWLIDFANACIILHLLGGYQPADIPVRGAALGGAVPGQRVRERRLLHRPVRVPAGVPGEPAARVPPDAVRGLHDGGGRGVTLLQRGAGAAGRAQLLAAGHLLPRGDVLHPAERAPVVRPLGRPADLQRRLPARQRLRARRLHRGANQQEARLG

SEQ ID NO: 165540 - protein, 993 aa, Zea Mays
MASKTCPVCKVFASTSNTTLNAHIDQCLSAESNTELVETVLVKPKVKPRKKRLMVDIYKTALPCTLEDLDQRNGTNWAVELSMSPVSREVCTENRSPEMVSFDRRDDEREGDVYVDSNGIKIRILSKCNDVPLVLRDDLGSRKVAKHGTGKGILMSKKMLKSKLLKNKKLKMHGKKYNKTSPLNSQVQAYPHDDINEETSEEEWHARNPFESTSNCCSRTMQQWVCSKRSDIAKSLSRNHSGKAFDKVIPGAQKSDRNNMLGFNDSQVPESPAGAFSSESPEYMATTSEAIGVEQSNGPSKVLRSIPTWSSKTHRLQSSVMPKTPRSAAALAKRKIKEIGRREATKLDNYNIVRNPTSVKRSETRTLSFTAGPSNGSNRLASTSKKIRKHRSLLRTGKRAFSPFSTRVVHGFGEERELDTRHVNKKFRITSNEVPKKFLKHTEEDTADNDFSLASDMTVSGQQNDQYDVAQETEGTQMDCEGEDAETDVPYDSVSRSDPADCCNQISDVSLSPENNRTTDDDVLVEGYSVAVEDPNSSEKLAHGHESNCATNNEMDEWQMDPTSTKESSPCLVSNRDMGPGGPQDNSSITSNGENFNQEHGLPLGQDSLDSPVSTASTMSPPAALKDSRINDEEPGPSTGRTVEEQITGCLNQEAKSIPMAREGELPKEKPFRCSCQENISRESHQSVVARPTLNFTGKQVPQLHIGSRASSSFSMYQRTSAKPNPCLDSHEHLSAAKVAAESAVSLPSYSTDCISPSLQTQLPSPSNPILRLMGKDLMVMNNEESVHPQAPSSDYILRGNYEAPVGFMPPSYQHLGNSGFISMPPTAASHQIPLPSVQASGLVAPPLHSVSMMQPEHHSQQKSYRNIMPAMHHPTYMMKEVIVIKDSPERSRTEPQASMLFPPAPPPALSIPNNTPPRPFYCLPPQIPILPRERAAGSMPVYANFGALAGVSPSSQESQTGVTNPYMPNPFFVQSRTGYMNHPPVYYSQNLG

SEQ ID NO: 165541 - protein, 178 aa, Zea Mays
MRSGRACSALASLLLLWLGVAAAQKASSWKTLSGKAPAIVAKGGFSGLFPDSSEYAYQFALLASSPDTILYCDVRLTKDEIGICLPDIKMDNCTNIPDFYAQGQKSYLVNGVPTSGWFSVDYNGTELEQVTLKQSINSRTPRFDSSFFPLLAVEDVQSKFKPSGIWLNVQHDSFYSQS

SEQ ID NO: 165542 - protein, 381 aa, Zea Mays
MDTSWIMNGLGFAEKIRSATRSLTLRFGELFARPRARCTNCDCDIDVSDVSLVWPALPAGVKFDPTDLELLQHLQGKSSLPNSVSHSLIDEFIPTIQEKEGICYTHPKNLPVRNAYDTGNRKRRRIVVATVGDDVSDGGGVAASGNSRWHKTGSSKPVFDEDGVRQGWKKILVLYRAPKKVGGKPESENWVMHQYHLGAREDETDGEFAVCKVFYQSPLRKNGRPAKTDAAAAAAAESDASVGKINPRTPMTTDPPRPRRLNSSPCNTEQYTPIQEDQGEEEEEEECGTSKMKAEPSECSACYAEASPTIPTSDEPMQATDDALDAGLDTPLPVDGPSMDLFHGLPDLDNAHPFTGLGTWISLDDILGPQDGLAAWPDGFL

SEQ ID NO: 165543 - protein, 395 aa, Zea Mays
MDTSWIMNGLGFAEKIRSATRSLTLRFGELFARPRARCTNCDCDIDVSDVSLVWPALPAGVKFDPTDLELLQHLQGKSSLPNSVSHSLIDEFIPTIQEKEGICYTHPKNLPGMKMDGSCLHFFNRVRNAYDTGNRKRRRIVVATVGDDVSDGGGVAASGNSRWHKTGSSKPVFDEDGVRQGWKKILVLYRAPKKVGGKPESENWVMHQYHLGAREDETDGEFAVCKVFYQSPLRKNGRPAKTDAAAAAAAESDASVGKINPRTPMTTDPPRPRRLNSSPCNTEQYTPIQEDQGEEEEEEECGTSKMKAEPSECSACYAEASPTIPTSDEPMQATDDALDAGLDTPLPVDGPSMDLFHGLPDLDNAHPFTGLGTWISLDDILGPQDGLAAWPDGFL

SEQ ID NO: 165544 - protein, 418 aa, Zea Mays
MAHRGHLDGLTAQAPALMRHGSFAAGSLSSHSPLESSSTLEMLENKLAMQTAEVEKLIMENQRLASSHVVLRQDIVDTEKEMQIIRTHLGEVQTETDLHIRDLLERIRLMEADIHSGDAVKKELHQVHMEAKRLITERQMLTLETEDVNKELQKLSASGDSKSLPELLAELDGLRKEHLNLRSQFEFEKNTNIKQVEQMRTMEMNLMTMTKQAEKLRGDVANAERRAQAAVAKATGHAAGAQVTASQPGTAQATAVPAAATDPYAGAYASYPPAYQQGAQAGAYQQGAQAGAYQQGAQAGAYQQGAQAGTYQQGNQAGAYPYAYDAATAYTYAGYSGYPVAGYAQSAVPNYSYAAPPQPISSGAATDAASLYGAVGSAGYPTAQVQPSSGPANAAPPPPPPPAAPYPSTYDQTRGAQR

SEQ ID NO: 165545 - protein, 416 aa, Zea Mays
MLENKLAMQTAEVEKLIMENQRLASSHVVLRQDIVDTEKEMQIIRTHLGEVQTETDLHIRDLLERIRLMEADIHSGDAVKKELHQVHMEAKRLITERQMLTLETEDVNKELQKLSASGDSKSLPELLAELDGLRKEHLNLRSQFEFEKNTNIKQVEQMRTMEMNLMTMTKQAEKLRGDVANAERRAQAVAKATGHAAGAQVTASQPGTAQATAVPAAATDPYAGAYASYPPAYQQGAQAGAYQQGAQAGTYQQGAGTQAGGYQQGAQAGAYQQGAGAQAGAYQQGAQAGAYQQGAQAGAYQQGAQAGTYQQGNQAGAYPYAYDAATAYTYAGYSGYPVAGYAQSAVPNYSYAAPPQPISSGAATDAASLYGAVGSAGYPTAQVQPSSGPANAAPPPPPPPAAPYPSTYDQTRGAQR

SEQ ID NO: 165546 - protein, 440 aa, Zea Mays
MRHGSFAAGSLSSHSPLESSSTLEMLENKLAMQTAEVEKLIMENQRLASSHVVLRQDIVDTEKEMQIIRTHLGEVQTETDLHIRDLLERIRLMEADIHSGDAVKKELHQVHMEAKRLITERQMLTLETEDVNKELQKLSASGDSKSLPELLAELDGLRKEHLNLRSQFEFEKNTNIKQVEQMRTMEMNLMTMTKQAEKLRGDVANAERRAQAVAKATGHAAGAQVTASQPGTAQATAVPAAATDPYAGAYASYPPAYQQGAQAGAYQQGAQAGTYQQGAGTQAGGYQQGAQAGAYQQGAGAQAGAYQQGAQAGAYQQGAQAGAYQQGAQAGTYQQGNQAGAYPYAYDAATAYTYAGYSGYPVAGYAQSAVPNYSYAAPPQPISSGAATDAASLYGAVGSAGYPTAQVQPSSGPANAAPPPPPPPAAPYPSTYDQTRGAQR

SEQ ID NO: 165547 - protein, 409 aa, Zea Mays
MAHRGHLDGLTAQAPALMRHGSFAAGSLSSHSPLESSSTLEMLENKLAMQTAEVEKLIMENQRLASSHVVLRQDIVDTEKEMQIIRTHLGEVQTETDLHIRDLLERIRLMEADIHSGDAVKKELHQVHMEAKRLITERQMLTLETEDVNKELQKLSASGDSKSLPELLAELDGLRKEHLNLRSQFEFEKNTNIKQVEQMRTMEMNLMTMTKQAEKLRGDVANAERRAQAAVAKATGHAAGAQVTASQPGTAQATAVPAAATDPYAGAYASYPPAYQQGAQAGAYQQGAQAGAYQQGAQAGTYQQGNQAGAYPYAYDAATAYTYAGYSGYPVAGYAQSAVPNYSYAAPPQPISSGAATDAASLYGAVGSAGYPTAQVQPSSGPANAAPPPPPPPAAPYPSTYDQTRGAQR

SEQ ID NO: 165548 - protein, 350 aa, Zea Mays
MAHRGHLDGLTAQAPALMRHGSFAAGSLSSHSPLESSSTLEMLENKLAMQTAEVEKLIMENQRLASSHVVLRQDIVDTEKEMQIIRTHLGEVQTETDLHIRDLLERIRLMEADIHSGDAVKKELHQVHMEAKRLITERQMLTLETEDVNKELQKLSASGDSKSLPELLAELDGLRKEHLNLRSQFEFEKNTNIKQVEQMRTMEMNLMTMTKQAEKLRGDVANAERRAQAAVAKATGHAAGAQVTASQPGTAQATAVPAAATDPYAGYSGYPVAGYAQSAVPNYSYAAPPQPISSGAATDAASLYGAVGSAGYPTAQVQPSSGPANAAPPPPPPPAAPYPSTYDQTRGAQR

SEQ ID NO: 165549 - protein, 245 aa, Zea Mays
MAHRGHLDGLTAQAPALMRHGSFAAGSLSSHSPLESSSTLEMLENKLAMQTAEVEKLIMENQRLASSHVVLRQDIVDTEKEMQIIRTHLGEVQTETDLHIRDLLERIRLMEADIHSGDAVKKELHQVHMEAKRLITERQMLTLETEDVNKELQKLSASGDSKSLPELLAELDGLRKEHLNLRSQFEFEKNTNIKQVEQMRTMEMNLMTMTKQAEKLRGDVANAERRAQGLAVLVGAEGSGGESGS

SEQ ID NO: 165550 - protein, 192 aa, Zea Mays
MARRSAPLLRRLVSASSPPALQSLTDHVGVLARRTVTYMPRPGDGAPRAVTLIPGDGIGPLVTGAVRQVMEAMHAPVYFETYDVHGDMPTVPPAIIESIRRNKVCIKGGLATPVGGGVSSLNMQLRKELDLYASLVHCSNLPGLPTRHEGVDIVVIRENTEGEYSGLEHEVVPGVVESLKFLSEPFFHYYSY

SEQ ID NO: 165551 - protein, 263 aa, Zea Mays
MARRSAPLLRRLVSASSPPALQSLTDHVGVLARRTVTYMPRPGDGAPRAVTLIPGDGIGPLVTGAVRQVMEAMHAPVYFETYDVHGDMPTVPPAIIESIRRNKVCIKGGLATPVGGGVSSLNMQLRKELDLYASLVHCSNLPGLPTRHEGVDIVVIRENTEGEYSGLEHEVVPGVVESLKVITKFCSERIAKYAFEYAYLNNRKKVTAVHKANIMKLADGLFLESCREVASKYPGIQYNEMIVDNCSMQLVSKPEQFDVMVCI

SEQ ID NO: 165552 - protein, 216 aa, Zea Mays
MSKLSLRIPPYIRTDFVQLTLRHSLKKKCVRWTLRVTSIHGLRAPLPFLQSVKVSFPERPDLKSVVLKEQPFSLQRETSMNKPFFMLLTLNFSDGCSCLSSSIGWPVDFQKRKDSFVRDRALVLRELYSAAQRESCIGQQEILERENLPRAETSIHGIVTNIVRYDTEDEKLAPPKNDLMNHSRSNPAKRHVEGTDCHSSLPKKLKYFLKDKKLNC

SEQ ID NO: 165553 - protein, 380 aa, Zea Mays
MALVELERAGFLKFVISQNVDSLHLRSGFPREKLAELHGNSFKEICPCCKTEYLRDFEIETIGLKDTPRRCSDKNCGARLKDTVLDWDDALPPEEMNLATEHCRSADLVLCLGTSLQITPACNMPLMSIKNGGRVAIVNLQATPKDKKASLVIHGLVDKVIAGVMSKLSLRIPPYIRTDFVQLTLRHSLKKKCVRWTLRVTSIHGLRAPLPFLQSVKVSFPERPDLKSVVLKEQPFSLQRETSMNKPFFMLLTLNFSDGCSCLSSSIGWPVDFQKRKDSFVRDRALVLRELYSAAQRESCIGQQEILERENLPRAETSIHGIVTNIVRYDTEDEKLAPPKNDLMNHSRSNPAKRHVEGTDCHSSLPKKLKYFLKDKKLNC

SEQ ID NO: 165554 - protein, 296 aa, Zea Mays
MAALAPWILRRRPVRSVASLVSIRDSWHRRCGSSSSYPSASFKCLWGWFGPEAHGRRRPWFQQPVRCGSTTITLDTDGKFARFGVGDMGVTKQKWRQQPPPKKKMSRKAKVNQLKWYRLKAKKKMKSPNPEVRIRYKLEKAKRKEEWLIEKLRKYEVPRTPEPVHDPEILTEEEKFYLKRTGEKKKNYVPVGRRGVFGGVVLNMHLHWKKHETVKVVCKPCRPGQVYEYAEELTRLSKGTVIDIKPNNTIMFYRGKNYVQPKVMSPPETLSKQKAFHFLGLPCYIKDNEIVILELE

SEQ ID NO: 165555 - protein, 279 aa, Zea Mays
MAALAPWILRRRPVRSVASLVSIRDSWHRRCGSSSSYPSASFKCLWGWFGPEAHGRRRPWFQQPVRCGSTTITLDTDGKFARFGVGDMGVTKQKWRQQPPPKKKMSRKAKVNQLKWYRLKAKKKMKSPNPEVRIRYKLEKAKRKEEWLIEKLRKYEVPRTPEPVHDPEILTEEEKFYLKRTGEKKKNYVPVGRRGVFGGVVLNMHLHWKKHETVKVVCKPCRPGQVYEYAEELTRLSKGTVIDIKPNNTIMFYRGKNYVQPKVMSPPETLSKQKVLGRS

SEQ ID NO: 165556 - protein, 79 aa, Zea Mays
MLRAGSQSVHCSGSSSTEESAKDISTGSRASIDARVHDDVERPSFLTLSVSADCPFLWLQPPAQAASPGASMMADRERS

SEQ ID NO: 165557 - protein, 1456 aa, Zea Mays
MTTAAPPPLLMAHREGGDVPISLFLDTDLGTHLALLVAPDTDIRGLKSQVAVEHAVAFPDLGPVTVKSFQVRRKGVLYRLSDSMTVMSAFTKIKGGCFLHVNMAEATAATHCCQDAPATDTRRLNGVSLGIYEKNHVQELPAVAPDVACDMLPRGLEGCNDDAVLNTVQTHDVLPNCTLVPSSSQLNTEVPKNNAVGLASYTEAGIAQVIDKAKSYSGQIKHANQTEGAYIISTSKACVDKSLNESNMSHAVEELHASRDHGVGDDVSDKKQVMVEEQLLEEIQAKDNLSQAKEHKKCRTSSFDTSCMDLLETGTTSLVESLNTSNHQEVHDTLHEESIQLENPSTVGKKKKRKRRQLSPSKSASAQETTEPSATAVDLLIPTGEVLSNNSPGIQIHNIHAMDNLSQEKEQKKSRTSSPDTSNRHLLETNPTSLRETLNTSNHQGHDTLDEEFIQPENPSAAGKKKKKRRQLVPSKYASAQITTEPSSGAAPADLSKSTGDKAYNAELTSKGETVVEASGLPLSSYEHNDGNQGGKSVKFVSDDQASTDLISEQEKFDHALKGCRDPLIADDIYSTGVPETSNMEKDGKSTDVSDKRQTSQNTSQVKKRKKSKVGSVDMPSVDASGEKDHRYSENATKQDTASTKREIVHEPSMQQMSNIVHQGDSNVIENPSGDGKKKKKRRHHSESLKGMNPSQDLTKSSGFVTNESSIQCTGAAPINAKQTNLVIIEGETVTGHRKLSENLDVAATHVVDEVLADLRSKDGLSKDLDENLLPGQTHLGSNQNGIEVPESIAVKVGSTTAALPPKYPATVHSASPVNSPRQRKSKGKKLKVLSTMADSSHQSSGVPEEDANRKLKESDSLRFADKTSDHEDIVTANVVAQADEKRKATKRQRKKGSVKQVLDTLDLKEVNDTEENLVQGGSVVDTPLSTAGNVEQKDWSSETLSPKEQETNCSTHGLDSHTAKDSQDEYVTDTIGTHDNENAAGTPALHVVQKDAMALKSASPNSQKEQETSLNSELQSQDCPLEHGFSADLVNSRTEKGVRTTSSASAVKSDYNTMFHPANGRINVLDHFSRSNLNDGSSIVAESKQNNEDGSLREVKNKKKKRKQGTGSVEPNDVIESLPSEIASLTGHFGTSKAVVSSVATENMNGGNENVNKGKEKKRKGKSNMEVPTAGKDHPNCDTQFIDIGTQESLISIVQKERTGQDNGKESNSKATQNASIMQHEPEDATWNRSPEKNHHQSVDDDQNKLLTEKDHAHINKEVRKFTPQTKAHAKIRKPDGSTIKEKVAPNPKPVTNLVKDFSMSPRASSDSTEGMPQSANRYRVAVRKVPSKRYEETSGNSNKASRKVGSGAIFNDSISEGSGDELDTKTVMERSPNKSSTSADSGISSAASGESEVPDDDGTVSLSQKSFKGLHISSILRGSRSYKKALKRQMELLDDDTIVPDSQPADGLWG

SEQ ID NO: 165558 - protein, 145 aa, Zea Mays
MNPPPHERGGRSRYGPASAQQQHYPFVVVDPTEAAGAAAVRAFFPAPGAGEPPPSSSSAAVRALPTAMHQGHGYGGGAPEISLAHGAHGHHHHHGIHHRYHQFGVEGRQDGGPSSSASLPPHSSSPPGFFSSPVMDNGDFHIEGT

SEQ ID NO: 165559 - protein, 64 aa, Zea Mays
MPPAVQPAINHAAKCDHHNFLSFTQFCTWAAVLSWSDQMLLYGWIGMRTSHRRLSFNNLLHSKV

SEQ ID NO: 165560 - protein, 53 aa, Zea Mays
MFLCLRRVLWPDLTLGAQHFTLLLSISCRHLFDGDSNSDVYTSYSWSHDVYEC

SEQ ID NO: 165561 - protein, 357 aa, Zea Mays
MVHSNALLWKKGPVHTVWKASFCKESELSRDKVAGTDIVASVGEIMLDVRSPHGLHLAVLAKLLFGIVRIFSKKMEFLLHDFNELSRSFRLSQLAEPTLPSGRLTLGVLKQANKDVRVGRLVVGQQNTCKVQKTVHAVRTTEVSSAISSEGHSVRVETEVTLGISVVIKETRLPDGLPTFTIPRSFELDSFNLGIAEDIDDEGDDHHQLAHQDILLRDERHHAPYFYEPYQRVSCSYAVDSAGFLPEYIALPNNILDFTEGGKSEIENKNADSAWFTPLKDVLPPEMMGMVAEAKDLAKESKTGDNSVRQVNMNENNRGSDCTMISIPLQESQELQCSDNALENMACGSRSANYTTT

SEQ ID NO: 165562 - protein, 325 aa, Zea Mays
MTIGTRYSKLGEIMLDVRSPHGLHLAVLAKLLFGIVRIFSKKMEFLLHDFNELSRSFRLSQLAEPTLPSGRLTLGVLKQANKDVRVGRLVVGQQNTCKVQKTVHAVRTTEVSSAISSEGHSVRVETEVTLGISVVIKETRLPDGLPTFTIPRSFELDSFNLGIAEDIDDEGDDHHQLAHQDILLRDERHHAPYFYEPYQRVSCSYAVDSAGFLPEYIALPNNILDFTEGGKSEIENKNADSAWFTPLKDVLPPEMMGMVAEAKDLAKESKTGDNSVRQVNMNENNRGSDCTMISIPLQESQELQCSDNALENMACGSRSANYTTT

SEQ ID NO: 165563 - protein, 134 aa, Zea Mays
MMMAEVANHSKRNHTDSYFSGKAVAVPAAAATSSEEFGSMSSKKPRNASPRLAPVSPKEKKDKIGERVAALQQLVSPFGKTDTASVLQEASGYIKFLHQQLEVLSSPYMRAPPAAGAAPEKPSSSTRSLCNTCM

SEQ ID NO: 165564 - protein, 176 aa, Zea Mays
MMMAEVANHSKRNHTDSYFSGKAVAVPAAAATSSEEFGSMSSKKPRNASPRLAPVSPKVRTHARTVRCQCPLSPVRTYVRLRSPMAICLAQVFFLVGAAAAAATTVQEKKDKIGERVAALQQLVSPFGKEASGYIKFLHQQLEVLSSPYMRAPPAAGAAPEVSFRRPSSSSPLMSS

SEQ ID NO: 165565 - protein, 268 aa, Zea Mays
MAMAKAGAPRVSAAQLVTLGLSLLCAVAGPAAAQNCGCQPNVCCSKFGYCGTTDEYCGDGSGGGGANVASVVTGSFFNGIKSQAGSGCEGKNFYTRSAFLSAVKAYPGFAHGGSQVQGKREIAAFFAHATHETGHFCYISEINKSNAYCDPTKRQWPCAAGQKYYGRGPLQISWNYNYGPAGRAIGFDGLGDPGRVARDAVVAFKAALWFWMNSVHGVVPQGFGATTRAINGALECGGNNPAQMNARVGYYRQYCRQLGVDPGPNLTC

SEQ ID NO: 165566 - protein, 55 aa, Zea Mays
MASPSALRGNPAPILEAVGVVLSEAICQGRDSLLCTCKLFSTKLFYSLHQYITST

SEQ ID NO: 165567 - protein, 82 aa, Zea Mays
MGANGHPPLASTRAHNGSHSGGSGGGGGGGGGANPSNGGTAAALRHDPGLAREWLTEEHAILDELLVKYASDLPVVRYAKLQ

SEQ ID NO: 165568 - protein, 161 aa, Zea Mays
MLTEALLPLFRQSSATSRILNISSQLGLLNKVGDPSLKALLLDEERLTEAGIEAMVSRFLAQVKDGTWGEQGWPKVWTDYSVSKLALNAYSRLLARRLEARGVSVNCFCPGFTRTDMTRGWGKRTAGEAADVGARLALLPPTELPTGTFFKWRTPQLYSKL

SEQ ID NO: 165569 - protein, 137 aa, Zea Mays
MPQEEELKRGELEADKDKMMREYRAQLDAERAQKLANGRNHSRSNSKSSSSKKERKDKDAKKRSKKRRKHKSSSESSSSSSSESSSSDDEDRGSRKSRSRSRSKRTRKEKKSRSRSKRRGSESEEEGPVRLSKFFGK

SEQ ID NO: 165570 - protein, 267 aa, Zea Mays
MSTIPPYHQPSSHNSRQAETRTTRPAAERKGSPVPRPRLLPFRFQSGLAGPGGEGEMGKNQAYKAMQRARLGSSSGAPGAADAPEDGMTDGSFHSPEWHAARLASLNKTHTLTWEEFKKKQKEEELKRGELEADKDKMMREYRAQLDAERAQKLANGRNHSRSNSKSSSSKKERKDKDAKKRSKKRRKHKSSSESSSSSSSESSSSDDEDRGSRKSRSRSRSKRTRKEKKSRSRSKRRGSESEEEGPVRLSKFFGKLSEPFTMVFSI

SEQ ID NO: 165571 - protein, 137 aa, Zea Mays
MSMVHSLQVESSSDNVHVYDFHAVYSFSYKVPVLYFRGYHTSGQLLTLDEVKEGLPSHSQKVLSESKWTFITQEEHPHLSKPWLALHPCATSGWMKLLLEETEATDKEHSVQYLPAWLSVVGQAVGLKIPLELHSNS

SEQ ID NO: 165572 - protein, 157 aa, Zea Mays
MATAAAAAAPLDDAKAKNVIRQVEFYFSDSNLPRDGFLRRTVEESEDGLVSLALICSFSRMRSHLGLEGDAKPETVPEETVLAVADILRRSTALRVSEDGKKVGRSKELSKPDEVIEQVDSRTVAASPLPYNLNFQKKMRQKAFLRKISFLLGQTWK

SEQ ID NO: 165573 - protein, 405 aa, Zea Mays
MATAAAAAAPLDDAKAKNVIRQVEFYFSDSNLPRDGFLRRTVEESEDGCLEGDAKPETVPEETVLAVADILRRSTALRVSEDGKKVGRSKELSKPDEVIEQVDSRTVAASPLPYNVKLEEVESFFAQCGKVNSVRLPRHVSDKRHFCGTALVEFSEEDEAKGVFEKNLIFAGADLEIRPKKEFDTEREAKKEAYEKSHPNKSSHGEGYPKGLILAFKLKKTADDEKSSVENDEKITENKGNVSEEQADAVEELKGLSAGETLQSVPKVDKSPSNKDQDIISREDLKEEFTKFGTVRYVDFSIGEDSGFIRFEDPAAADKARAFAAIADEGGLTMKGHIVILEPVSGQAEKDYWSAIRGVQEKYKDSRNNRGRDWKNNRGGKQFGGGKRGRHFDSRDRASNKAQKV

SEQ ID NO: 165574 - protein, 403 aa, Zea Mays
MATAAAAAAPLDDAKAKNVIRQVEFYFSDSNLPRDGFLRRTVEESEDGLVSLALICSFSRMRSHLGLEGDAKPETVPEETVLAVADILRRSTALRVSEDGKKVGRSKELSKPDEVIEQVDSRTVAASPLPYNVKLEEVESFFAQCGKVNSVRLPRHVSDKRHFCGTALVEFSEEDEAKGVFEKNLIFAGADLEIRPKKEFDTEREAKKEAYEKSHPNKSSHGEGYPKGLILAFKLKKTADDGETGKSGGGKVDDTDLTKNNGASDATEKSSVENDEKITENKGNVSEEQADAVEELKGLSAGETLQSVPKVDKSPSNKDQDIISREDLKEEFTKFGTVRVKLKRIIGVQFGAFRRNIKIAETTEDGTGRTTEAESSLAVGSGVATSTPVTGPPIKLRKFRCRI

SEQ ID NO: 165575 - protein, 407 aa, Zea Mays
MATAAAAAAPLDDAKAKNVIRQVEFYFSDSNLPRDGFLRRTVEESEDGLVSLALICSFSRMRSHLGLEGDAKPETVPEETVLAVADILRRSTALRVSEDGKKVGRSKELSKPDEVIEQVDSRTVAASPLPYNVNSVRLPRHVSDKRHFCGTALVEFSEEDEAKGVFEKNLIFAGADLEIRPKKEFDTEREAKKEAYEKSHPNKSSHGEGYPKGLILAFKLKKTADDEKSSVENDEKITENKGNVSEEQADAVEELKGLSAGETLQSVPKVDKSPSNKDQDIISREDLKEEFTKFGTVRYVDFSIGEDSGFIRFEDPAAADKARAFAAIADEGGLTMKGHIVILEPVSGQAEKDYWSAIRGVQEKYKDSRNNRGRDWKNNRGGKQFGGGKRGRHFDSRDRASNKAQKV

SEQ ID NO: 165576 - protein, 422 aa, Zea Mays
MATAAAAAAPLDDAKAKNVIRQVEFYFSDSNLPRDGFLRRTVEESEDGLVSLALICSFSRMRSHLGLEGDAKPETVPEETVLAVADILRRSTALRVSEDGKKVGRSKELSKPDEVIEQVDSRTVAASPLPYNVKLEEVESFFAQCGKVNSVRLPRHVSDKRHFCGTALVEFSEEDEAKGVFEKNLIFAGADLEIRPKKEFDTEREAKKEAYEKSHPNKSSHGEGYPKGLILAFKLKKTADDEKSSVENDEKITENKGNVSEEQADAVEELKGLSAGETLQSVPKVDKSPSNKDQDIISREDLKEEFTKFGTVRYVDFSIGEDSGFIRFEDPAAADKARAFAAIADEGGLTMKGHIVILEPVSGQAEKDYWSAIRGVQEKYKDSRNNRGRDWKNNRGGKQFGGGKRGRHFDSRDRASNKAQKV

SEQ ID NO: 165577 - protein, 466 aa, Zea Mays
MATAAAAAAPLDDAKAKNVIRQVEFYFSDSNLPRDGFLRRTVEESEDGLVSLALICSFSRMRSHLGLEGDAKPETVPEETVLAVADILRRSTALRVSEDGKKVGRSKELSKPDEVIEQVDSRTVAASPLPYNVKLEEVESFFAQCGKVNSVRLPRHVSDKRHFCGTALVEFSEEDEAKGVFEKNLIFAGADLEIRPKPLRTPQKYSSSCCIDWFWKEFDTEREAKKEAYEKSHPNKSSHGEGYPKGLILAFKLKKTADDGETGKSGGGKVDDTDLTKNNGASDATEKSSVENDEKITENKGNVSEEQADAVEELKGLSAGETLQSVPKVDKSPSNKDQDIISREDLKEEFTKFGTVRYVDFSIGEDSGFIRFEDPAAADKARAFAAIADEGGLTMKGHIVILEPVSGQAEKDYWSAIRGVQEKYKDSRNNRGRDWKNNRGGKQFGGGKRGRHFDSRDRASNKAQKV

SEQ ID NO: 165578 - protein, 284 aa, Zea Mays
MLLPRRLGFPPAWASCLAPAPDAGEHVEGCDASVLIQGNGTERTDPANLSLGGFNVIDAAKRLLEAVCPATVSCSDIVVLAARDAVVFTGGPAVPVALGRRDGLVSLASNVRRNIIDTGFSVDAMAASFTAKGLTLDDLVTLSGGHTIGSAHCNTFRERFQQVANGSMTPVDGSMNADYANELIQACSANGTVPAGTAAVGCDSGSASVFDNTYFANLLGGRGLLRTDAALVQNATTRAKVAEFAQSQDGFFASWASSYARLTSLGVKVGADGEVRRTCSSVNG

SEQ ID NO: 165579 - protein, 83 aa, Zea Mays
MEPGGGVLFLPSRCRTFLVVCFFLGLVRRPRPVRLSEEPYTITFIFLLPSRGGGFIHCAIDEPLEPGIWQRHRQESTRMDADP

SEQ ID NO: 165580 - protein, 303 aa, Zea Mays
MAAKGKLSEKPVSDESPQETSKVDQNVNCLGQEGSSPNSTPTTAISNGAAPVDNVKSPDGPDSSKQKQELTSGDEQTPDSSKQKQELTSGDEQTPDSSKQKPELTSLDKQTKSSEQLISCDQEVREPVTVETEKLSDVNSKKDHKLCSSIGSEMAEQSKVVKDNESIVASEELSPGTNDVDKKQITETGNITTEESSKPSDTKPAVVKPKRGRPPAAKSQEKKPAGKKHASDLKSAKLDPITDSGGRATRHLNKDAAKSSSTKAAEGESEKKQHKTSMKLQKEDAVSDKDTNEDISLKSFTVT

SEQ ID NO: 165581 - protein, 580 aa, Zea Mays
MAEDAPPAAPAMTPEEVQAETELRMRDIGQRFGAIPEDHDELLRLLEEAETWLSRVDQSPPEGMYNALRPTMAVLITNELLEHPDPNVKVALTSCLTEVTRITAPEAPYDDDVMKDVFKRIVETFAELDDMNNPSFARRVSILDSVARVRCCVLMLDLDLDHMILDMFRHFFKTASTRHSEQVTHCMEIIMMFVIQESDDVHAELASCLLQNLTREAQETLPASFGLAERVLGLCRDKLKPVLHELLKGTPLDEYSNVVTTLFQDAGENNVDASGEDMAAKGKLSEKPVSDESPQETSKVDQNVNCLGQEGSSPNSTPTTAISNGAAPVDNVKSPDGPDSSKQKQELTSGDEQTPDSSKQKQELTSGDEQTPDSSKQKPELTSLDKQTKSSEQLISCDQEVREPVTVETEKLSDVNSKKDHKLCSSIGSEMAEQSKVVKDNESIVASEELSPGTNDVDKKQITETGNITTEESSKPSDTKPAVVKPKRGRPPAAKSQEKKPAGKKHASDLKSAKLDPITDSGGRATRHLNKDAAKSSSTKAAEGESEKKQHKTSMKLQKEDAVSDKDTNEDISLKSFTVT

SEQ ID NO: 165582 - protein, 430 aa, Zea Mays
MAEQSKVVKDNESIVASEELSPGTNDVDKKQITETGNITTEESSKPSDTKPAVVKPKRGRPPAAKSQEKKPAGKKHASDLKSAKLDPITDSGGRATRHLNKDAAKSSSTKAAEGESEKKQHKTSMKLQKEDAVSDKDTNEDISLKEMMSPTKIDKSKGQQEDNGASSKRKSLQEAQETPLSKKNKILDENLIGSRIKVWWPDDKMFYAGVVESFDASSKKHKVSYDDGDVEVLMLKKERWEFISEEQDTDPDAVSNMPRGRKAKGSSGPQMKGGKTGTPQSDVKNPPKKRGRPKGMHDSNNMPNADSSVTPARLKGKSVEKDTQVTPKTGNNSKKEGARHSRSTTGKAQNAVVKASSKDEPDSTDNSKDDAGSEDKNSKDEVKSSEGNDGSKTNGLSTKRKLEENEGESSEEKGSAKTTTRKKRRRKSRN

SEQ ID NO: 165583 - protein, 797 aa, Zea Mays
MYNALRPTMAVLITNELLEHPDPNVKVALTSCLTEVTRITAPEAPYDDDVMKDVFKRIVETFAELDDMNNPSFARRVSILDSVARVRCCVLMLDLDLDHMILDMFRHFFKTASTRHSEQVTHCMEIIMMFVIQESDDVHAELASCLLQNLTREAQETLPASFGLAERVLGLCRDKLKPVLHELLKGTPLDEYSNVVTTLFQDAGENNVDASGEDMAAKGKLSEKPVSDESPQETSKVDQNVNCLGQEGSSPNSTPTTAISNGAAPVDNVKSPDGPDSSKQKQELTSGDEQTPDSSKQKQELTSGDEQTPDSSKQKPELTSLDKQTKSSEQLISCDQEVREPVTVETEKLSDVNSKKDHKLCSSIGSEMAEQSKVVKDNESIVASEELSPGTNDVDKKQITETGNITTEESSKPSDTKPAVVKPKRGRPPAAKSQEKKPAGKKHASDLKSAKLDPITDSGGRATRHLNKDAAKSSSTKAAEGESEKKQHKTSMKLQKEDAVSDKDTNEDISLKEMMSPTKIDKSKGQQEDNGASSKRKSLQEAQETPLSKKNKILDENLIGSRIKVWWPDDKMFYAGVVESFDASSKKHKVSYDDGDVEVLMLKKERWEFISEEQDTDPDAVSNMPRGRKAKGSSGPQMKGGKTGTPQSDVKNPPKKRGRPKGMHDSNNMPNADSSVTPARLKGKSVEKDTQVTPKTGNNSKKEGARHSRSTTGKAQNAVVKASSKDEPDSTDNSKDDAGSEDKNSKDEVKSSEGNDGSKTNGLSTKRKLEENEGESSEEKGSAKTTTRKKRRRKSRN

SEQ ID NO: 165584 - protein, 387 aa, Zea Mays
MSAQVAVVPNGGPGAVPAVVSPGAVGVAQPLPTTSLYVGDLEGAVSDSQLYELFSQAGQVVSVRVCRDVTSRRSLGYAYVNYSNPLDAARALEVLNFAALNNKPIRVMYSNRDPSSRRSGSANIFIKVAVDEAGQSKGFGFVQYDKEEAAQNAIKSLNGMLINDKPVFVGPFVRKQERDHSFDKTKFNNVFVKNLSESTTKEDLLKIFGEYGDITSAVVMIGMDGKSRCFGFINFENPDAASHAVQELNGKKINDKEWYVGRAQKKSEREMELKRRFEQSLKDAADKYQGLNLYLKNLDDSIGDDQLCELFSNFGKITSYKVMRDQNGLSKGSGFVAFSTREEASQALTEMNGKMISGKPLYVAFAQRKEDRKAMLQVTVLKPVEFV

SEQ ID NO: 165585 - protein, 380 aa, Zea Mays
MSAQVAVVPNGGPGAVPAVVSVRVCRDVTSRRSLGYAYVNYSNPLDAARALEVLNFAALNNKPIRVMYSNRDPSSRRSGSANIFIKNLDKTIDNKTLHETFSSFGTILSCKVAVDEAGQSKGFGFVQYDKEEAAQNAIKSLNGMLINDKPVFVGPFVRKQERDHSFDKTKFNNVFVKNLSESTTKEDLLKIFGEYGDITSAVVMIGMDGKSRCFGFINFENPDAASHAVQELNGKKINDKEWYVGRAQKKSEREMELKRRFEQSLKDAADKYQGLNLYLKNLDDSIGDDQLCELFSNFGKITSYKVMRDQNGLSKGSGFVAFSTREEASQALTEMNGKMISGKPLYVAFAQRKEDRKAMLQNLVLFLVVPIWLVAPSWSP

SEQ ID NO: 165586 - protein, 194 aa, Zea Mays
MAVARGCPDLQELVLIGVNPTVLSLRMLGEHCRLLERLALCGCETVGDAEIICLAERWAALKKLCIKGCPVSDRGMEALNGGCPSLVKVKLKRCRGVSYECIENLKVTRGESFSISLDVVLEHDAGSTSENGAQENGQTQITELAGQMTGMDLLTNAAGTQSSIHTINRMRSVMSAIRRFHAHKTKIDYSNDGC

SEQ ID NO: 165587 - protein, 466 aa, Zea Mays
MCNVKLDIGYSYVLFSLDICKRLRAYWKKYIVFGICEARRRGWMLPTISPLSKDCVVEESSSAMDLVGLFPYWLDVNQGNAILNDVHMHSLFVLTGPNGGGKSSMLRSVCAAVLLGICGLMVPSTSAVIPHFDSIMLHMKAYDSPADGKSSFQIEMSEIRALVSRATARSLVLIDEICRGTETAKGTCIAGSIIERLDNVGCLGIISTHLHGIFDLPLSLSNTDFKAMGTEVVDGCIHPTWKLIDGICRESLAFQTARREGMPDLIITRAEELYLSMSTNNKQGASVAHNEPPNGSPSVNGLVEEPESLKNRLEMLPGTFEPLRKEVESAVTTMCKKILSDLYNKSSIPELVEVVCVAVGAREQPPPSTVGRSSIYVIIRSDNRLYVGQTDDLLGRLNAHRSKEGMRDATVLYVLVPGKSVACQLETLLINQLPSRGFKLINKADGKHRNFGISRISGEAVATGRN

SEQ ID NO: 165588 - protein, 665 aa, Zea Mays
MLMNRDAELSAILHELLVPASVATGFKVEADMLMNGCSIISQRIAEVISLGVESDQAITSLEYIPKEFFNDMESSWKGRVKRIHAEEEFANVDRAAEALSIAVIEDFMPIISRVKSVVSSNGGLKGEIGYAKEHEAVWFKGKRFIPNVWANTPGEQQIKQLKPAIDSKGRKVGEEWFTTSKVENALARYHEADNARNKVLELLRGLSSELQDKINILVFCSTLLIIAKALFGHVSEARRRGWMLPTISPLSKDCVVEESSSAMDLVGLFPYWLDVNQGNAILNDVHMHSLFVLTGPNGGGKSSMLRSVCAAVLLGICGLMVPSTSAVIPHFDSIMLHMKAYDSPADGKSSFQIEMSEIRALVSRATARSLVLIDEICRGTETAKGTCIAGSIIERLDNVGCLGIISTHLHGIFDLPLSLSNTDFKAMGTEVVDGCIHPTWKLIDGICRESLAFQTARREGMPDLIITRAEELYLSMSTNNKQGASVAHNEPPNGSPSVNGLVEEPESLKNRLEMLPGTFEPLRKEVESAVTTMCKKILSDLYNKSSIPELVEVVCVAVGAREQPPPSTVGRSSIYVIIRSDNRLYVGQTDDLLGRLNAHRSKEGMRDATVLYVLVPGKSVACQLETLLINQLPSRGFKLINKADGKHRNFGISRISGEAVATGRN

SEQ ID NO: 165589 - protein, 539 aa, Zea Mays
MEAALEAARAKDTKERLAGVERLHEALDAAARRGLAAAEVTALVDTCMDLTRDANFRIAQGGLQALSAAAVVAGDHFKIHLNALVPAAVERLGDGKQPVRDAARQLLITLMEVSSPTIIVERAGSYAWTHKSWRVREEFVRTVASAVGLFASTEISLQRVLLSPVLQLMNDSNQSVRDAAISCIEEMYKHMGSQFHEELQRHNLPSYMLKEINSRLDKIEPKVRSSDTAMQYKAVESRSVSANPKRGSPRTKNIPRESTLYGGDTDVTEKPVEPVKVHSEKELLREFEKIAATLVPEKDWSLRIAAMQRIEALVYGGAIDNPSFLMLLKQLVPPLSTQLSDRRSSIVKQACHLLNILSKELLGDFEPFAELFIPMLFKLVVITVLVIAESADTCIKTILRNCKVARILPRIVDTAKNDRSAILRARCCEYALLVLEYWADAPEIQRSADLYQDMIKCCVADAMSEVRATARTCYRMFAKTWPERSRRLFMSFDPAIQRIINDEDGGVHKSYCRNGQECSYFFRFIFSIKHSSVITVKDD

SEQ ID NO: 165590 - protein, 863 aa, Zea Mays
MQRIEALVYGGAIDNPSFLMLLKQLVPPLSTQLSDRRSSIVKQACHLLNILSKELLGDFEPFAELFIPMLFKLVVITVLVIAESADTCIKTILRNCKVARILPRIVDTAKNDRSAILRARCCEYALLVLEYWADAPEIQRSADLYQDMIKCCVADAMSEVRATARTCYRMFAKTWPERSRRLFMSFDPAIQRIINDEDGGVHKRYASPSLRDRVVQPSRASSHSSGTHVPGYGTSAIVAMDKSAAISSDSSFPSNTLRLSQSKTIDRSSERSLESVLSSSKEKVSAIESLLKGVSMSGQNFSAARSTSLDLAPASNVLSLQNSALLDSSLPTIPPSSRNGGSRLLDTMTTHLPTKERSRSPYLSNMSSESMSGLSLPYSRKSLERLQEGGRMDESYDIRSTRRIPQMHLDRNYVDMPYRDSHNNHVPNFQRPLLRKQVMSRASASGRHSFDDSHVPLGDVPGYTDSLASLNDALSEGLSPSSDWVARVSAFEFIRNLLKQGQKGIQEIIQNFEKVMKLFFRHLDDPHHKVAQAAFSTLAEIIPACKKPFESYVERILPYVFSRLIDPKELVKKPCSITLEIVGRTYAIDMLLPALVRSLDEQRSPKAKLAVLEFANKSFSKYSVDSDGYSNSGFLKLWLSKLAPLVNEKNAKLKEASISGIISVYSHFDSTAVLNFILSLSVEDQNLLRRALKIKTPRIEVDLVNYLQSKKERPRPKPYDQVDFGTSSEDGYALTSKKSYPFGRFSSSSLDAEGGKMISSMQEPALHNVSIGRTVSDMSMDHAIQSLESSTGAEVHLTRGREPKNNSNLVAEAARSWTSYPEKTDASVDGETATGTPRLDFGRFITSDGHNTVGSTTEGSVQD

SEQ ID NO: 165591 - protein, 579 aa, Zea Mays
MSGQNFSAARSTRVDPPSSRDPPVPLAAPASNVLSLQNSALLDSSLPTIPPSSRNGGSRLLDTMTTHLPTKERSRSPYLSNMSSESMSGLSLPYSRKSLERLQEGGRMDESYDIRSTRRIPQMHLDRNYVDMPYRDSHNNHVPNFQRPLLRKQVMSRASASGRHSFDDSHVPLGDVPGYTDSLASLNDALSEGLSPSSDWVARVSAFEFIRNLLKQGQKGIQEIIQNFEKVMKLFFRHLDDPHHKVAQAAFSTLAEIIPACKKPFESYVERILPYVFSRLIDPKELVKKPCSITLEIVGRTYAIDMLLPALVRSLDEQRSPKAKLAVLEFANKSFSKYSVDSDGYSNSGFLKLWLSKLAPLVNEKNAKLKEASISGIISVYSHFDSTAVLNFILSLSVEDQNLLRRALKIKTPRIEVDLVNYLQSKKERPRPKPYDQVDFGTSSEDGYALTSKKSYPFGRFSSSSLDAEGGKMISSMQEPALHNVSIGRTVSDMSMDHAIQSLESSTGAEVHLTRGREPKNNSNLVAEAARSWTSYPEKTDASVDGETATGTPRLDFGRFITSDGHNTVGSTTEGSVQD

SEQ ID NO: 165592 - protein, 264 aa, Zea Mays
MVALTAGISVATGVVFSPAGRRRGRGHAAFRCSSSSAGERQALFSRIAPVYDHLNDVLSLGQHRTWKRICVSWSRAKMGDRVLDLCCGSGDLAFLLSQKVGLDGEVMAVDFSSQQLQTAAGRQEQRWKLCYKNIKWIEGDALDLPFTDCYFDAVTVGYGLRNVVDKSKAMQEIYRVLKPGSRASILDFNKSSSLFTASLQSWAIDNVVVPLASGYGLTEEYKYLKSSISQYLTELEKLAKEAGFCAAKHYELGGGLMGNLVATR

SEQ ID NO: 165593 - protein, 135 aa, Zea Mays
MVALTAGISVATGVVFSPAGRRRGRGHAAFRCSSSSAGERQALFSRIAPVYDHLNDVLSLGQHRTWKRICVSWSRAKMGDRVLDLCCGSGDLAFLLSQKVGLDGEVMAVDFSSQQLQTAAGRQEQRWKLCYKNIK

SEQ ID NO: 165594 - protein, 135 aa, Zea Mays
MTLCGTPTSDTGTCRWIEGDALDLPFTDCYFDAVTVGYGLRNVVDKSKAMQEIYRVLKPGSRASILDFNKSSSLFTASLQSWAIDNVVVPLASGYGLTEEYKYLKSSISQYLTGMCVYFPHQERVHERAWYCVSF

SEQ ID NO: 165595 - protein, 627 aa, Zea Mays
MEKCAICFASMRSGHGQALFTAECSHMFHFQCISSNVKHGNYVCPVCRAKWKEIPYRSLSSTSPHGRIGGDHTRSPQQDPHLALHQQVSNRRREVRRLRTSEPADYNDDEPLQRMEAFDDLNFGSSKTAEISSYPEFQAVPQSTCLDGFDILIHVKAPTSSSDDATGSLVNGSSLRLSRRVPIDIVTVLDVSGSMAGTKMALLKQAMGFVIQHLRPSDRLSVIAFSSTARRLFPLQRMSHHGRQQALQAINSLGAGGGTNIADALKKAVKVIADRSYKNSVCSIILLSDGQDTYNISSNFQGTSAGRRSLVPSANPNELHMVPLHTFGFGADHDSDTLHSISEASGGTFSFIEDEGVMQDAFAQCIGGLLSVAVREMRLSMECVDPGVLLCSIKSGSYPSKVARDGRNGFVDIAHLYADEEKDILLSVTIPKSCEQTSLLRVACAYKDPVSNETIKIQGDEVKIKRPASTVSVPVSIEVDRERNRIRATNSMESAWAAAERGALSEAVTILEDCRRALSQCVASQNGDRLCMALVAELREMQERMANRQLYEASGRAYMLSGLSSHSWQRATARGDSTDSTTLVHSYQTPSMVQMLEHSQNFGSLPQGRRPQVQGAGSVLEKPSKGR

SEQ ID NO: 165596 - protein, 303 aa, Zea Mays
MQTLNISICMLDMTMWRDGENFVTSQTDKAALVDQFYSNLIGQSGFRERTIDLEALGLPTHNLSALDYPCTEQEVWETIRNLPSTKASGPDGFTGRFYKACWNIIKVEVLNAISAVWNSNFTKLDRLNSAFITMIPKKDDADQVKDFRPISLVHNFAKLVTKILANRLASNLNGLVSPNQSAFIKGRFIQDNFMLVQQTSRFLHQQNKASLLFKLDITKGFDVVSWPFLIEVLQQLGFGQKWRDIFFFLEYVGELRIIILSRIRWGEVLKNLIQLYTPPNKKKEKENEQEHQYTKHTRDQLLK

SEQ ID NO: 165597 - protein, 95 aa, Zea Mays
MFPLRVRIAHFHSPIQCPSEMKFLQGNTVHDVQLCSFTRITLSIGIHHWQYLPLDNLISHSAILNCYLVADLEELLTQFGMRKAEIVLKNLKKGD

SEQ ID NO: 165598 - protein, 97 aa, Zea Mays
MSKGDMVRKTARSFLYELCAANYWKPPEFELCNDEGPSHLRKFTCKVLIEITGTSVSLLECYSDPKLQKRAAQEHAAEGALWYLKHLGYLPRDENRF

SEQ ID NO: 165599 - protein, 1055 aa, Zea Mays
MSEDEAESSSSGAAASEPKDPRTIARKYQLDLCKRAVDENIIVYLGTGCGKTHIAVLLMYELGHLIRKPSREVCVFLAPTIPLVRQQAMVIADSTNFKVQRYYGSGKHSRDHQAWEKEMGEYEVLVMTPQILLHNLRHCFIRMDLIALLIFDECHHAQAQKRHPYAQIMKEFYNNADKHPRVFGMTASPIIGKGGSNKLTYTKCINSLEELLNAKVCSVDNVELESVIASPKVEVYFYGPVGHSNLTTAYIKELGGYKFQSECMLRESVCNFNESLKKLKSLWRLHENLIFCLQEVGLFGALQAARTFLSSSSVSLDGKGADINDYANKAMSLLSRDILEGPDADSFDLETIEEPFFSKKFAVLINVLSRYRLEENMKCIVFVKRIIVARVVVQILQNLKCLDFWRCEFLVGCHSGLRNMSRDKMSSIIEKFSSGEVNLLVATSVGEEGLDIQTCCLVVRFDLPETVNSFIQSRGRARMSKSKYVFLLERGNHSQEKLLDDYITGEIIMDKEINLRTSNDMFNCLEENIYRVNDTGASISTACSVSLLHRYCDNLPRDIFFVPSPSFFFVDDVDGIVCKLILPPNAAFRQVNGQPCPSKDEAKRDACLKACIKLHELGALTDFLLPGQGSRKIKVSTTNNSESNKDDDESFREELYEMLIPAVLRPSRCKLDSSFKLHFYYIEFIPIPADRRYQMFGLFVINRLPEESEKLDVELHLARARIVKAGIKYLGKIEFNKEEMILAHNFQEMFLKVLLDRSEFTPSYILLGNDGALDMDSTFYLLLPIKQKFYGDNMIDWPAVKRCLSSPAFQDPMGLSLHDSYLPNESLKLLGGTYNKADVIGSLVYTPHTDLFFFVDAILDGTNAKSELNGATYAEHFKQRLHIKLSHPEQPLLKAKQLFCLRNLLHNRQLESTESEARELMEHFVELPPELCSLKIIGFSKDMGSSLSLLPSLMYRLENLLVAIELKDVMSSYFPEASQISASGILESLTTERCLERISLERLEVLGDAFLKYVVGRHNFISYEGLDEGQLTRRRSDIVSNSNLYELSIRRNLQV

SEQ ID NO: 165600 - protein, 779 aa, Zea Mays
MQAARTFLSSSSVSLDGKGADINDYANKAMSLLSRDILEGPDADSFDLETIEEPFFSKKFAVLINVLSRYRLEENMKCIVFVKRIIVARVVVQILQNLKCLDFWRCEFLVGCHSGLRNMSRDKMSSIIEKFSSGEVNLLVATSVGEEGLDIQTCCLVVRFDLPETVNSFIQSRGRARMSKSKYVFLLERGNHSQEKLLDDYITGEIIMDKEINLRTSNDMFNCLEENIYRVNDTGASISTACSVSLLHRYCDNLPRDIFFVPSPSFFFVDDVDGIVCKLILPPNAAFRQVNGQPCPSKDEAKRDACLKACIKLHELGALTDFLLPGQGSRKIKVSTTNNSESNKDDDESFREELYEMLIPAVLRPSRCKLDSSFKLHFYYIEFIPIPADRRYQMFGLFVINRLPEESEKLDVELHLARARIVKAGIKYLGKIEFNKEEMILAHNFQEMFLKVLLDRSEFTPSYILLGNDGALDMDSTFYLLLPIKQKFYGDNMIDWPAVKRCLSSPAFQDPMGLSLHDSYLPNESLKLLGGTYNKADVIGSLVYTPHTDLFFFVDAILDGTNAKSELNGATYAEHFKQRLHIKLSHPEQPLLKAKQLFCLRNLLHNRQLESTESEARELMEHFVELPPELCSLKIIGFSKDMGSSLSLLPSLMYRLENLLVAIELKDVMSSYFPEASQISASGILESLTTERCLERISLERLEVLGDAFLKYVVGRHNFISYEGLDEGQLTRRRSDIVSNSNLYELSIRRNLQTSNVLVLVLLTWLVERLNLKHKMAKV

SEQ ID NO: 165601 - protein, 441 aa, Zea Mays
MSEDEAESSSSGAAASEPKDPRTIARKYQLDLCKRAVDENIIVYLGTGCGKTHIAVLLMYELGHLIRKPSREVCVFLAPTIPLVRQQAMVIADSTNFKVQRYYGSGKHSRDHQAWEKEMGEYEVLVMTPQILLHNLRHCFIRMDLIALLIFDECHHAQAQKRHPYAQIMKEFYNNADKHPRVFGMTASPIIGKGGSNKLTYTKCINSLEELLNAKVCSVDNVELESVIASPKVEVYFYGPVGHSNLTTAYIKELGGYKFQSECMLRESVCNFNESLKKLKSLWRLHENLIFCLQEVGLFGALQAARTFLSSSSVSLDGKGADINDYANKAMSLLSRDILEGPDADSFDLETIEEPFFSKKFAVLINVLSRYRLEENMKCIVFVKRIIVARVVVQILQNLKCLDFWRCEFLVGCHSGLRNMSRDKMSSIIEKFSSGKPFGCY

SEQ ID NO: 165602 - protein, 521 aa, Zea Mays
MLRESVCNFNESLKKLKSLWRLHENLIFCLQEVGLFGALQAARTFLSSSSVSLDGKGADINDYANKAMSLLSRDILEGPDADSFDLETIEEPFFSKKFAVLINVLSRYRLEENMKCIVFVKRIIVARVVVQILQNLKCLDFWRCEFLVGCHSGLRNMSRDKMSSIIEKFSSGEVNLLVATSVGEEGLDIQTCCLVVRFDLPETVNSFIQSRGRARMSKSKYVFLLERGNHSQEKLLDDYITGEIIMDKEINLRTSNDMFNCLEENIYRVNDTGASISTACSVSLLHRYCDNLPRDIFFVPSPSFFFVDDVDGIVCKLILPPNAAFRQVNGQPCPSKDEAKRDACLKACIKLHELGALTDFLLPGQGSRKIKVSTTNNSESNKDDDESFREELYEMLIPAVLRPSRCKLDSSFKLHFYYIEFIPIPADRRYQMFGLFVINRLPEESEKLDVELHLARARIVKAGIKYLGKIEFNKEEALSCLSVQMPTQNFQGAMPDMSFFFYLTDDTRTQFSRNVFESSPG

SEQ ID NO: 165603 - protein, 784 aa, Zea Mays
MSEDEAESSSSGAAASEPKDPRTIARKYQLDLCKRAVDENIIVYLGTGCGKTHIAVLLMYELGHLIRKPSREVCVFLAPTIPLVRQQAMVIADSTNFKVQRYYGSGKHSRDHQAWEKEMGEYEVLVMTPQILLHNLRHCFIRMDLIALLIFDECHHAQAQKRHPYAQIMKEFYNNADKHPRVFGMTASPIIGKGGSNKLTYTKCINSLEELLNAKVCSVDNVELESVIASPKVEVYFYGPVGHSNLTTAYIKELGGYKFQSECMLRESVCNFNESLKKLKSLWRLHENLIFCLQEVGLFGALQAARTFLSSSSVSLDGKGADINDYANKAMSLLSRDILEGPDADSFDLETIEEPFFSKKFAVLINVLSRYRLEENMKCIVFVKRIIVARVVVQILQNLKCLDFWRCEFLVGCHSGLRNMSRDKMSSIIEKFSSGEVNLLVATSVGEEGLDIQTCCLVVRFDLPETVNSFIQSRGRARMSKSKYVFLLERGNHSQEKLLDDYITGEIIMDKEINLRTSNDMFNCLEENIYRVNDTGASISTACSVSLLHRYCDNLPRDIFFVPSPSFFFVDDVDGIVCKLILPPNAAFRQVNGQPCPSKDEAKRDACLKACIKLHELGALTDFLLPGQGSRKIKVSTTNNSESNKDDDESFREELYEMLIPAVLRPSRCKLDSSFKLHFYYIEFIPIPADRRYQMFGLFVINRLPEESEKLDVELHLARARIVKAGIKYLGKIEFNKEEALSCLSVQMPTQNFQGAMPDMSFFFYLTDDTRTQFSRNVFESSPG

SEQ ID NO: 165604 - protein, 153 aa, Zea Mays
MRKILMILAHNFQEMFLKVLLDRSEFTPSYILLGNDGALDMDSTFYLLLPIKQKFYGDNMIDWPAVKRCLSSPAFQDPMGLSLHDSYLPNESLKLLGGTYNKADVIGSLVYTPHTDLFFFVDAILDGTNAKSELNGATYAEHFKQRHGVRTFF

SEQ ID NO: 165605 - protein, 894 aa, Zea Mays
MSEDEAESSSSGAAASEPKDPRTIARKYQLDLCKRAVDENIIVYLGTGCGKTHIAVLLMYELGHLIRKPSREVCVFLAPTIPLVRQQAMVIADSTNFKVQRYYGSGKHSRDHQAWEKEMGEYEVLVMTPQILLHNLRHCFIRMDLIALLIFDECHHAQAQKRHPYAQIMKEFYNNADKHPRVFGMTASPIIGKGGSNKLTYTKCINSLEELLNAKVCSVDNVELESVIASPKVEVYFYGPVGHSNLTTAYIKELGGYKFQLLMCFEQSECMLRESVCNFNESLKKLKSLWRLHENLIFCLQEVGLFGALQAARTFLSSSSVSLDGKGADINDYANKAMSLLSRDILEGPDADSFDLETIEEPFFSKKFAVLINVLSRYRLEENMKCIVFVKRIIVARVVVQILQNLKCLDFWRCEFLVGCHSGLRNMSRDKMSSIIEKFSSGEVNLLVATSVGEEGLDIQTCCLVVRFDLPETVNSFIQSRGRARMSKSKYVFLLERGNHSQEKLLDDYITGEIIMDKEINLRTSNDMFNCLEENIYRVNDTGASISTACSVSLLHRYCDNLPRDIFFVPSPSFFFVDDVDGIVCKLILPPNAAFRQVNGQPCPSKDEAKRDACLKACIKLHELGALTDFLLPGQGSRKIKVSTTNNSESNKDDDESFREELYEMLIPAVLRPSRCKLDSSFKLHFYYIEFIPIPADRRYQMFGLFVINRLPEESEKLDVELHLARARIVKAGIKYLGKIEFNKEEMILAHNFQEMFLKVLLDRSEFTPSYILLGNDGALDMDSTFYLLLPIKQKFYGDNMIDWPAVKRCLSSPAFQDPMGLSLHDSYLPNESLKLLGGTYNKADVIGSLVYTPHTDLFFFVDAILDGTNAKSELNGATYAEHFKQRHGVRTFF

SEQ ID NO: 165606 - protein, 173 aa, Zea Mays
MSEDEAESSSSGAAASEPKDPRTIARKYQLDLCKRAVDENIIVYLGTGCGKTHIAVLLMYELGHLIRKPSREVCVFLAPTIPLVRQQAMVIADSTNFKVQRYYGSGKHSRDHQAWEKEMGEYEVLVMTPQILLHNLRHCFIRMDLIALLIFDECHHAQAQKRHPYAQIMKFIT

SEQ ID NO: 165607 - protein, 234 aa, Zea Mays
MQGGATAKQQSPVTVMRPVRGDLEEHLPKPYLARALVAPDIYHPDGTAADEHGHHHMSVLQQHVAFFDRDDNGIIYPWETYSGCRALGFNMILSLLIALVVNGTMSYATLPGWLPSPLFPIYVHNIHKSKHGSDSGTYDNEGRFMPVNFENLFSKYARTSPDRLTYRELWSMTEGFRDAFDLYGWIAAKLEWTILYVLARDDEGYLSREAMRRVYDGSLFEYVERQRAQHAKMS

SEQ ID NO: 165608 - protein, 235 aa, Zea Mays
MQGGATAKQQASPVTVMRPVRGDLEEHLPKPYLARALVAPDIYHPDGTAADEHGHHHMSVLQQHVAFFDRDDNGIIYPWETYSGCRALGFNMILSLLIALVVNGTMSYATLPGWLPSPLFPIYVHNIHKSKHGSDSGTYDNEGRFMPVNFENLFSKYARTSPDRLTYRELWSMTEGFRDAFDLYGWIAAKLEWTILYVLARDDEGYLSREAMRRVYDGSLFEYVERQRAQHAKMS

SEQ ID NO: 165609 - protein, 651 aa, Zea Mays
MAAANPSPQRKFRIRFKNNSVQGSSSQNNGCSILPAALDTDHIFKQAEAAQILELSKDYKAKFSLQKPDSTRISVDSEKRAGKHGFDQSRSISNNISCSVTGGRNPTFQVKDGEVGQQDAGHQSANFLDIGPGFPTIQVGKPGYRLCTRTTDKLKGVTGADVCPGSSSGEVKGDLITNKVIAGPTSPLRVFPRRHVGQKRLVRNGCISPSNIAKTDAKVNEKQEMCSLSEHLDHPHQPDAFDGGDVIDLTENSPIMTRQRSEVNNKLMSGHNMDTRAAKKLRTDRFGRTLVRQSKCHANNSSCSEVSLSGLNNNGKGIDCDILDSDQTGEANLRGVDLSTAGTYLNKNFSDISTEQGWRTTHNHTSKLPISFMGNITSSSGWESGSSTTRSNQNHGSAGGKHSSVSGANIIVPDKIGNKTIMLGRERRKQTSTSSHIGESSSAADEPREAQLESDELLARQLQEQLYNESARFAPTEEIDAIVAMSLQHEEDTHRTSRTLRRFQNHTRGARATRLSSYRNALRAELATANNMISRQRNTAPINLGLRAALARYPGALHIQPNIDLNDYDALLALDENNHQHTGASESQINNLPQSVVQSNSIEDPCSVCLENPSVGDTIRHLPCFHKFHKECIDEWLRRKKLCPVCKFGIN

SEQ ID NO: 165610 - protein, 724 aa, Zea Mays
MTDMNSDEILEVPDTPDRLQQSKYHVSSSIVGRDGTMAAANPSPQRKFRIRFKNNSVQGSSSQNNGCSILPAALDTDHIFKQAEAAQILELSKDYKAKFSLQKPDSTRISVDSEKRAGKHGFDQSRSISNNISCSVTGGRNPTFQVKDGEVGQQDAGHQSANFLDIGPGFPTIQVGKPGYRLCTRTTDKLKGVTGADVCPGSSSGEVKGDLITNKVIAGPTSPLRVFPRRHVGQKRLVRNGCISPSNIAKTDAKVNEKQEMCSLSEHLDHPHQPDAFDGGDVIDLTENSPIMTRQRSEVNNKLMSGHNMDTRAAKKLRTDRFGRTLVRQSKCHANNSSCSEVSLSGLNNNGKGIDCDILDSDQTGEANLRGVDLSTAGTYLNKNFSDISTEQGWRTTHNHTSKLPISFMGNITSSSGWESGSSTTRSNQNHGSAGGKHSSVSGANIIVPDKIGNKTIMLGRERRKQTSTSSHIGESSSAADEPRGDLQSSKISAGPNHSSHQHNIPVINIDDVSPEARPSSSGFTNRTLDPTIEAQLESDELLARQLQEQLYNESARFAPTEEIDAIVAMSLQHEEDTHRTSRTLRRFQNHTRGARATRLSSYRNALRAELATANNMISRQRNTAPINLGLRAALARYPGALHIQPNIDLNDYDALLALDENNHQHTGASESQINNLPQSVVQSNSIEDPCSVCLENPSVGDTIRHLPCFHKFHKEARQVHIQT

SEQ ID NO: 165611 - protein, 707 aa, Zea Mays
MTDMNSDEILEVPDTPDRLQQSKYHVSSSIVGRDGTMAAANPSPQRKFRIRFKNNSVQGSSSQNNGCSILPAALDTDHIFKQAEAAQILELSKDYKAKFSLQKPDSTRISVDSEKRAGKHGFDQSRSISNNISCSVTGGRNPTFQVKDGEVGQQDAGHQSANFLDIGPGFPTIQVGKPGYRLCTRTTDKLKGVTGADVCPGSSSGEVKGDLITNKVIAGPTSPLRVFPRRHVGQKRLVRNGCISPSNIAKTDAKVNEKQEMCSLSEHLDHPHQPDAFDGGDVIDLTENSPIMTRQRSEVNNKLMSGHNMDTRAAKKLRTDRFGRTLVRQSKCHANNSSCSEVSLSGLNNNGKGIDCDILDSDQTGEANLRGVDLSTAGTYLNKNFSDISTEQGWRTTHNHTSKLPISFMGNITSSSGWESGSSTTRSNQNHGSAGGKHSSVSGANIIVPDKIGNKTIMLGRERRKQTSTSSHIGESSSAADEPRGDLQSSKISAGPNHSSHQHNIPVINIDDVSPEARPSSSGFTNRTLDPTIEAQLESDELLARQLQEQLYNESARFAPTEERGARATRLSSYRNALRAELATANNMISRQRNTAPINLGLRAALARYPGALHIQPNIDLNDYDALLALDENNHQHTGASESQINNLPQSVVQSNSIEDPCSVCLENPSVGDTIRHLPCFHKFHKECIDEWLRRKKLCPVCKFGIN

SEQ ID NO: 165612 - protein, 687 aa, Zea Mays
MTDMNSDEILEVPDTPDRLQQSKYHVSSSIVGRDGTMAAANPSPQRKFRIRFKNNSVQGSSSQNNGCSILPAALDTDHIFKQAEAAQILELSKDYKAKFSLQKPDSTRISVDSEKRAGKHGFDQSRSISNNISCSVTGGRNPTFQVKDGEVGQQDAGHQSANFLDIGPGFPTIQVGKPGYRLCTRTTDKLKGVTGADVCPGSSSGEVKGDLITNKVIAGPTSPLRVFPRRHVGQKRLVRNGCISPSNIAKTDAKVNEKQEMCSLSEHLDHPHQPDAFDGGDVIDLTENSPIMTRQRSEVNNKLMSGHNMDTRAAKKLRTDRFGRTLVRQSKCHANNSSCSEVSLSGLNNNGKGIDCDILDSDQTGEANLRGVDLSTAGTYLNKNFSDISTEQGWRTTHNHTSKLPISFMGNITSSSGWESGSSTTRSNQNHGSAGGKHSSVSGANIIVPDKIGNKTIMLGRERRKQTSTSSHIGESSSAADEPREAQLESDELLARQLQEQLYNESARFAPTEEIDAIVAMSLQHEEDTHRTSRTLRRFQNHTRGARATRLSSYRNALRAELATANNMISRQRNTAPINLGLRAALARYPGALHIQPNIDLNDYDALLALDENNHQHTGASESQINNLPQSVVQSNSIEDPCSVCLENPSVGDTIRHLPCFHKFHKECIDEWLRRKKLCPVCKFGIN

SEQ ID NO: 165613 - protein, 444 aa, Zea Mays
MDGRTGDVADDHYHRYVGDLEILQSLGVNAYRFSISWARVLPRGRVGGVNAGGVAFYNRLIDALLQKGIQPFVTLNHFDMPRELEVRYGGWLDAGIREEYEHYADVCFGAFGDRVRLWTTFNEPNLLVKFQYMLGAYPPSRCSPPFGSCGSGDSRREPYAAAHNIIMSHAAAVRAYREKYQATQGGSVGIVAAMKWYEPLTNSTDDILAARRAQAFETDWFLEPIFLGDYPGAMREILGSDLPTFTAEEKALLLRYKADFIGLNHYTAIYARDCLRSPCNLGSYEGNAFVSATGERDDGVKIGGDTALAGFFDVPEAIELAIQYVNGRYKGTPVYITENGYSQWSDASREELIDDVRRKNYLQGYITYLSKAVRNGANVRGYFVWTLLDNFEWAFGYRLKYGLYHVDFDTQERTPRMSARWYQGFLTARTSQRDEAAQARRADS

SEQ ID NO: 165614 - protein, 404 aa, Zea Mays
MGEGSTKRPGWWRQCRRGSFLQPPDRCAPAERNTAIRHSEPFRHAARAGGPVRWLAGRWDPGGVRALRGRLLRGVRRPGAALDDLQRAQPAGQVPVHAGRVPAQPLLPAVRQLRERRLAPGAVRRGAQHHHVPRRRRPRLQGEVPGDAGRLRRDRGRHEMVRAADELHGRHPGRAARAGFRDGLVSGADILGRLPRSDAGDPGIGPADLHRGGEGAAAAVQGGLHRAEPLHGDLRQGLPALPVQPRVVRRERLRLGDRGKGRRGQDRGRCFFDVPEAIELAIQYVNGRYKGTPVYITENGYSQWSDASREELIDDVRRKNYLQGYITYLSKAVRNGANVRGYFVWTLLDNFEWAFGYRLKYGLYHVDFDTQERTPRMSARWYQGFLTARTSQRDEAAQARRADS

SEQ ID NO: 165615 - protein, 468 aa, Zea Mays
MAGRARARRFVLAGALMIAWLLCLLPRATAAAVRRSDFPPSFLFGTATSSYQIEGAYLEGNKSLSNWDVFSHVPGRIEDGSTGDVADDHYHRYEDDIELMHSLGTNAYRFSISWARILPRGRFGEVNPAGIAFYNRLIDSLLLKGIEPFVTLSHYDIPQELEDRYGAWLGGAEARRDFGHLADVCFAAFGDRVRHWATFNEPNVAVTRGYMLGTYPPGRCSRSCARGNSDAEPYVAAHNVVLAHAAAVQIYKTKYQSKQKGLIGIVMSTVWFVPLTDAPADRLATERALAFDVPWFLDPIIYGDYPPEMRRLLGSRLPTFSPEERRTLGYGLDFIGINHYTTLYARDCMISPGYCPSGQEFHQSLAAYTGERDGIPIGPPTAMPTFYVVPDGIEKMVTYIMNRYSNLPMFITENGYAQGGDGYTTRAEDWLDDQGRIQYLEGYLAKLAKVIRLRTRWGWLYYPCRGLA

SEQ ID NO: 165616 - protein, 394 aa, Zea Mays
MAGRARARRFVLAGALMIAWLLCLLPRATAAAVRRSDFPPSFLFGTATSSYQIEGAYLEGNKSLSNWDVFSHVPGRIEDGSTGDVADDHYHRYEDDIELMHSLGTNAYRFSISWARILPRGRFGEVNPAGIAFYNRLIDSLLLKGIEPFVTLSHYDIPQELEDRYGAWLGGAEARRDFGHLADVCFAAFGDRVRHWATFNEPNVAVTRGYMLGTYPPGRCSRSCARGNSDAEPYVAAHNVVLAHAAAVQIYKTKYQSKQKGLIGIVMSTVWFVPLTDAPADRLATERALAFDVPWFLDPIIYGDYPPEMRRLLGSRLPTFSPEERRTLGYGLDFIGINHYTTLYARDCMISPGYCPSGQEFHQSLAAYTGERDGIPIGPPFWAADSDADVLRRS

SEQ ID NO: 165617 - protein, 421 aa, Zea Mays
MFLIQSRGMIRPHTPPSQATPPPLCSAITGTKAAINALHRRQHRQSWKVAEDPHPPPPLLRDYGPLLRDYGDPRLNAKRRRRQEERLPRRPRSVWGCASTSNPIDEMEDASTVALRFADVPVRLHASRHDLASLDLDVDALRLSTHIFGIFYGHDGVEWPTTAGRGSRGWMMRCQGKQAGLSVASMSHGRWPPRTWAQMRLSPVCSSHAVVANCGDSHVVLRRGKETIESSIDRTSDIKDEQARIEALGLGCKVIQWNGYRVSGILAVVDWCTRSTSEKELVRKQVFVLGRMGNAKEALSTIINKLEVMQMQEVVEIVTEQHDDELWEELIRQCHKKPEMLRKINFGSDQCYSDCYDPIYQCGHGCSKSTILIHRLFPSSNNFFYLFMDHFGFSWLSTFSQSPVNTSRMTLHIRQLWGCAT

SEQ ID NO: 165618 - protein, 78 aa, Zea Mays
MQESGGLEDEELQVQDAVASGSKRSKDSAAAATRSANVSSPSVVHSHPAILPAPAQQIPEVKQADTTHMHSMPAARFT

SEQ ID NO: 165619 - protein, 107 aa, Zea Mays
MLEKLKHKSGRCEPALEKAIVELEHGINGLKYFVCLDPRLQVCSATDTRYNFMSGLKVVFDRERKVLGWKNFDCYSVGNSRSNLPVNPNPSGVPPAPGLGPNSYTHS

SEQ ID NO: 165620 - protein, 207 aa, Zea Mays
MSMAEEGSEAEEGSEAEALEKDGSKASSPSGPASRLVSSNAAGVGSLEVGAATDTSNASRQGLDLGKKGPGAMSMAEEGSEAEEGSEAEALEKDGSKASSPSGPASRLVSSNAAGVGSLEVGAAADTSNASRQGLDLGKKGPGAMSMAEEGSEAEEGSEAEALEKDGSKASSPSGPSKHHGQGRKASRVVVSRCVGMAVLSLPLGSS

SEQ ID NO: 165621 - protein, 202 aa, Zea Mays
MQESGGLEDEELQVQDAVASGSKRSKDSAAAATRSANVSSPSVVHSHPAILPAPAQQIPEVKQAVCIPYGFHRLKSLEYSKLVSQCLNTEWTATIGQSEETEELSKITLENKDIQLDINIREESRSSSQQGNFDTEGTSSSEAFLLGTVASEKMLEKLKHKSGRCEPALEKAIVELEHGINGLKYFVCLDPRLQVCSATDTR

SEQ ID NO: 165622 - protein, 93 aa, Zea Mays
MFCLRTLRSPAASDSPDPASPAISAAAPATSITPTRDIPPRTPSTRSGPSPNVVCFFVCSSSQPTRLQQCGRGRLAGGGRRRRHLQRLQAGIR

SEQ ID NO: 165623 - protein, 129 aa, Zea Mays
MLEKLKHKSGRCEPALEKAIVELEHGINGLKYFVCLDPRLQVCSATDTRRIKETLPWYMPVATMDKRRLVLYNFMSGLKVVFDRERKVLGWKNFDCYSVGNSRSNLPVNPNPSGVPPAPGLGPNSYTHS

SEQ ID NO: 165624 - protein, 95 aa, Zea Mays
MFCLRTLRSPAASDSPDPASPAISAAAPATSITPTRDIPPRTPSTRSGPSPNVVCFFVCSSSQPTRLQQCGRGRLAGGGRRRRHLQRLQAGIRRS

SEQ ID NO: 165625 - protein, 118 aa, Zea Mays
MSMAEEGSEAEEGSEAEALEKDGSKASSPSGPASRLVSSNAAGVGSLEVGAATDTSNASRQGLDLGKKGPGAMSMAEEGSEAEEGSEAEALEKDGSKASSPSGPDTTHMHSMPAARFT

SEQ ID NO: 165626 - protein, 93 aa, Zea Mays
MFCLRTLRSPAASDSPDPASPAISAAAPATSITPTRDIPPRTPSTRSGPSPNVVCFFVCSSSQPTRLQQCGRGRLAGGGRRRRHLQRLQAGIS

SEQ ID NO: 165627 - protein, 89 aa, Zea Mays
MLAKLPRRDREVVRHRRQAARADGQRDQERLAHAPQEAAGAHHQAAGAGAARGACRWWRRQEAQQAQARGCQEDDDGRRRPGHHRAGVA

SEQ ID NO: 165628 - protein, 775 aa, Zea Mays
MRVETIEARSTLRCFHQRRRLGAIDLYVIRVSGDAHATCYPAAVIWRGLRIRVWLYSKAAAAWMFVDVLAQLWSDWGLRFSVISSLVTIVVLSLLSWTRRRSTSGRWRSILLWFVTRVVWLAYQGAEIAATGALGSLSLSGSDGSAEEQQVIAFWAPFLLLHLGGPDTMAAYALEDSALSVRKFLEMVFQVGGAFYAQYKYIYRARTWTPLATASAIMLPIGIVRYVEKWYALWKSKSMMEEEEGEEEEEEKKKVAGAGPGPGRFTSATSSNDALCLAQDLFHVCRRALSDSSVLPGTEKQRASEEIFLLGWERMCKVVEMELSLMYEALYTKAIVLHTCPVAGYLNRLVSPLATAAAVLLFNQYIGSRSRRAIIIRRSFVDITYLLLVVAFAMDLMWLLRALGSTWTYAALREARPWAWWLRHHLLCSGRWRRIHRAVDALHPLSWLFGSDPVSYYRTWSGTIGRYNLLQACSVAAAHRGARRPWWTRFGSWLEKKLELEETEYLRELPQDVKESLIQRVQRILVSTKNNNADKKTDENGIGCRYTLVDIRTLWGQQALEDAKTNLFGRGRKNGRKTSNKKPKLPSFGREFEEDVLMWHMATCILFSSSSGKESIVSIPGGSSADAADAHVTAIKVMSEYLMFFVAVRRHMLPGLVLHSLLEKIRQTLHEIWDDGKKKTTGGSSSSSSTAAKDTPPPQDKLAEMLLERLKAVCRSDSKCRSCWSSSSTCGWTSCSMRPPDAAWRAMPSSSAAAATSPPYCGLLSNMLPYFASEN

SEQ ID NO: 165629 - protein, 108 aa, Zea Mays
MSGRLQFPIHFRTPYFPIHTQPVVLLGFSSFHHRPCLPQRWPPPPAERTTRRGSAPSPPPPSPPRRPRTSPSTAPSSPPRAASPPPCSSSASLPPWRSSPSRGRASPR

SEQ ID NO: 165630 - protein, 135 aa, Zea Mays
MGLKSKPSITSAFLFFLRAWTKSPNQSMSGRLQFPIHFRTPYFPIHTQPVVLLGFSSFHHRPCLPQRWPPPPAERTTRRGSAPSPPPPSPPRRPRTSPSTAPSSPPRAASPPPCSSSASLPPWRSSPSRGRASPR

SEQ ID NO: 165631 - protein, 714 aa, Zea Mays
MATGTAAASASGVGADSLESGAMLLRRRHAGGLAGAGDDDGVGNAEEVAASVEQAFADEPVPSWREQLTVRAFVVGFILAVLFSVIVMKLNLTTGVIPSLNVSASLLGYFLVRLWTKAIESVGLLKHPFTRQENTVIQTCVVSAYGLAFSGGFGSYLFGMSRTIAIQATEANDAQNIKDPQLGWMIGFMFLVSFVGLFVLVPLRKVMIVDYKLTYPSGTATAYLINGFHTPQGAERAKKQVRTLGKYFSLSFLWAFFQWFYTAGDDCGFASFPTLGLEAYKNKFYFDFSATYVGVGMICPYIVNVSLLLGGIISWGLMWPLISTKKGSWYPESLPDSSLHGLNGYKVFITIAVILGDGLYNFLKVFGHTIGALISMYWKKHANRLPVSDNMTPPATVETESFDDKRRIELFVKDQIPKTVALGGYVVLAATSIGCLPLIIPQIKWYQIFVAYIFAPILAFCNAYGSGLTDWSLASTYGKLAIFVIGAWAGASHGGVLVGLAACGVMMSIVGTASDLMQDFKTGYLTLASPRSMFISQVIGTAIGCVTAPCVFWLFYKSFDIGASGGAYPAPYAIMYRNMSILGVDGLSLLPKNCLTLCYIFFAVSFTINLIKDLVPKKVAKFIPIPMAAAIPFYLGPYFAIDMFLGSVILFFWEWKNKAEADSFGPAVASGLMCGDGLWALPQAVLSLANVKPPICMKFLSRSLNAKVDTFLGN

SEQ ID NO: 165632 - protein, 505 aa, Zea Mays
MIVDYKLTYPSGTATAYLINGFHTPEGAKLAKKQVKTLGKFFLMSFLWGFFQWFYTGGDNCGFQNFPTLGLQAYKNKFYFDFSPTYVGVGMICPHIVNVSVLLGGILSWGIMWPLIGNQKGNWYDASLPESSLHGLQGYRVFISIAIILGDGLYNFVKVLIRTTAGFISMMKKNSTLPVSNNGSPITEGVSFDDERRRDLFLKDQIPRSVAYGGYVAVAAISIGTLPQVFPQLKWYYILVAYIFAPVLAFCNAYGTGLTDWSLASTYGKLAIFIFGAWAGASNGGVLVGLAACGVMMSIVSTAADLMQDLKTGYLTLASPRSMFISQVIGTAMGCVIAPCVFWLFYKAFADIGLSGSEYPAPYAIVYRNMAILGVDGFSSLPKNCLTLCYIFFAAAIVVNLVRDLVPKKVARFIPLPMAMAIPFYLGSFFAIDMFIGTVILFAWETINKAKANAFAPAVASGLICGDGIWTLPQSILALAKVKPPICMKFLSRSVNAQVDGFLGS

SEQ ID NO: 165633 - protein, 92 aa, Zea Mays
MLFVSTRKVAFRSDRPITVTSPGGGGDTARVTYKVAIPLRRIRRVRPSENVHRPEEKYIHVSTVDGFEFWFMGFVSYQRSCKYMQQAVSEMR

SEQ ID NO: 165634 - protein, 355 aa, Zea Mays
MDPQIPPRLLSSCLTSLAAFRHFWGGCVPALQAAEMVGGSKPLGESVFAVHAVAGAAAISASAVAVYPLDTVKTLLQLGATGQKQKMGLRQVVDRLMAASGPAGFYNGIGWSILGKLPGLGARFGTYELLTAFYKDGREDNYVYYSEAMKAGIAAGAVEAVFCTPFELFKLRNQHPWMLTGSGKPPLPSDVHLPSRVILLEGWGALWRGLRSGIARDCVFGGMFFSTWQFLHTVMLTWKAVNMSPKPRNLEAAGPVPPFASSVAAGFAGAIAAAASHTFDTAKSRSECTVVPKYIAMERKFLKWKAPGTWIERKTGISPADRNVLFRGIGLRTARSGIASFVLVGSYYLAVNHLS

SEQ ID NO: 165635 - protein, 125 aa, Zea Mays
MAPKAEKKPAAKKPAEEEPAAEKAPAGKKPKAEKRVPAGKSAAKEGGEGKRGKKKGKKSVETYKIYIFKVLKQLAAEAAKLARYNKKPTITSREIQTSVRLVLPGELAKHAVSEGTKAVTKFTSA

SEQ ID NO: 165636 - protein, 77 aa, Zea Mays
MMELGAKTRRQSRDLGSRTGACGGGSRTGTGCREGTARARARLKGKDDARAVAGLQGGRRRGRGWSGGTVRVVDALA

SEQ ID NO: 165637 - protein, 63 aa, Zea Mays
MSVMLPLNFYTFIQVLANTCTSQGSTISRDGYTFFLAKKMHHVYRHLDVDILFSALMGYAFNL

SEQ ID NO: 165638 - protein, 65 aa, Zea Mays
MSVNLFGGSVAALRFLPRAPTTAENEATGNGQAAARVLRPVGGLVSRCPPLQPPIRAKNFVTVRL

SEQ ID NO: 165639 - protein, 113 aa, Zea Mays
MGLGTQRITQSLNVYTSRIHPELYFSMHQDDSDEQSEGDDWFRRPPHQCGDDLVLVSKVRFVFSSLHPFSGFKKMGRGRFRPSVILSRIAESKKLASRLPCHADACQSSPPPP

SEQ ID NO: 165640 - protein, 56 aa, Zea Mays
MFPDKSQNLNALPQKIREIQKHMKLDNYQTSMATSITNQLEKVNNKGSTGLQTETK

SEQ ID NO: 165641 - protein, 71 aa, Zea Mays
MKKIEEQLEKKKAEYAEKMKNKVAMIHREAEEKRAMVEAKRGEEVLKAEEMAAKYRATGHAPKKPIGCFGA

SEQ ID NO: 165642 - protein, 200 aa, Zea Mays
MTEEEAKKVEVEVEVTKAAPAKENAAEEKAVIPATEPPAAQEKPPAPADDSKALAIVENKSTPEKPIAEKQGGSSIRDLALARVETEKRNSLIKAWEDNEKAKADNKATKKVSVILSWENTKKANIEAEMKKIEEQLEKKKAEYAEKMKNKVAMIHREAEEKRAMVEAKRGEEVLKAEEMAAKYRATGHAPKKPIGCFGA

SEQ ID NO: 165643 - protein, 128 aa, Zea Mays
MDSLFRILAPSKLCSSPLFSARLNRLLRISITNTNNIGERESPWRSPLRCLIGIPGDPFKSTCVEEEARILEIILRHTGPNPRYESTSIKKAQETESNALEISNFKSKLETLFLWRDLIECCTNIKLS

SEQ ID NO: 165644 - protein, 208 aa, Zea Mays
MQLTNRTDDYIGFKVKTTSPKKYCVRPNSGIVPPRSTSDVIVTMQAQKEAPPDMQCKDKFLVQSVVVAEGTLVKDITGDMLKVVYIPPPKPPSPVHEESEEGSSPRPSLSDGINLNYQEMQTTRESDESLLFSAVKTHIDQKDYTSETSALISKLTEERNSAIQQNNKLREELDLTRREANKQNGGFSFVVVVAIALLGMLLGYIMKR

SEQ ID NO: 165645 - protein, 219 aa, Zea Mays
MQLTNRTDDYIGFKVKTTSPKKYCVRPNSGIVPPRSTSDVIVTMQAQKEAPPDMQCKDKFLVQSVVVAEGTLVKDITGDMFTKESANVVDEVKLKVVYIPPPKPPSPVHEESEEGSSPRPSLSDGINLNYQETTRESDESLLFSAVKTHIDQKDYTSETSALISKLTEERNSAIQQNNKLREELDLTRREANKQNGGFSFVVVVAIALLGMLLGYIMKR

SEQ ID NO: 165646 - protein, 152 aa, Zea Mays
MDPRKNVPLHTRSTAREIYARPFSASTFNGGRRSNRTRPPPPYSHLPLYSLPATSTHYTRVDLMVIQLLGSAQSIMEFPQSHNNPFTTDTAPLHVLLHYAAAAVICSPYVFPIEQIKESRPPCDTPRDLFSLPFTFPNPNHGTKHHHYVLHC

SEQ ID NO: 165647 - protein, 443 aa, Zea Mays
MSGMSDSAGGGRAGAELMVEQFHLKVLHAVRTPRPLAAAAAAASSSSSFRRRDRWFHLPLHDPPPPEAAGRLDELAPGQPRVVDVLLCPATASGVGDRGEVVERWTVACEPWPDAASGEEVAVNRAYKHCFTLLRSVYAALRVLPAYRVFRLLCANASYNYEMGHHVDTFAEPFSRPQEAAMRSQRFVPVETQLGRLVVSVHYLPSLAGVAAFNLEITPLSPSMIIPDYVGSPAAEPMRTFPASLTEATGSGFPPSYEQQRPHSWASPAFWPHTPAHQARFSPPPVFYASPTPSPPHFPPGLMRWESAPMPIPQVSERRSPAHLQNMLPPPSPRRADTGAAGALEFPSESGRLIGRMEELRLADLHATSSPRHKGKDNKDESGRFSALSSCDSPRQDDLDDVDYHFDVDDVDTPVSQPRHIIDLVKILHMMRLVLLRGFKTLA

SEQ ID NO: 165648 - protein, 186 aa, Zea Mays
MLPPPSPRRADTGAAGALEFPSESGRLIGRMEELRLADLHATSSPRHKGKDNKDESGRFSALSSCDSPRQDDLDDVDYHFDVDDVDTPVSQPRSTSGKETGDQVGSLPHKSQDAQVGYLVNLLRNARPLRNPSNPSQTPRAQSTRVTSASSVTTSDALEVLQSFKETRERLLSRSSAKHQEPPGKP

SEQ ID NO: 165649 - protein, 500 aa, Zea Mays
MSPARSHMEQSRNTLLFASCAKEVVTNAQVNVVMSDKALVKQLQKELARLESELRCPASYSGLEALVREKDNQIRKMDKEIKELKLHRDLAQSRLQDLLKVVGDNHGSKHPLASSARNFTFDVPQPCEDEQSTTSEAISSGQNFRLQGRLTTQRDYRSQQSENDVQFATPLSYSISSPPFSGMPPTNGRNDNSHISDEDSEDLCKEVRCIETNETEENECLESSAVGSNSLQDSNLASSMHGNDNTNRSVNSGRNDASSITLEQHLENVKKPFANPGMDLGSSTRNSSSSKVIGRSRSCRSLMGSTLLEDLEKEVCTPPSRSFMDYPGRPETCQRRVPALNYDAESEALSRAGSMLSEITTTRGGLKENSSAAGDTEFVAGIGEFVAELKEMAQGHNGELAEGTIRSVGLDPIMDILQSPSRWPLEFEKKQQEIIDLWHGCNVSLVHRTYFFLLFKGDPADAIYMEVELRRLSFLKNTYSNGSMGYDMVAGSLSTSLVSR

SEQ ID NO: 165650 - protein, 926 aa, Zea Mays
MGAIGGDAPVQWDKVDGAEVANGGGGGAAGRLEKILVSVRLRPLSDKEISRGDPAEWECINDTTIISRSTFPDRPTAPTAYSFDRVFRSDCTTKEVYEEGTKAVALSVVSGINSSVFAYGQTSSGKTYTMTGITEYTAADIYDYIAKHEERAFVLKFSAIEIYNEVVRDLLSAENTSLRLWDDAEKGTYVENLTEVTLRDSDHLKELISTCEAQRRTGETYLNENSSRSHQILKLTIESSAHEFLGKDKSTTLVASVNFVDLAGSERASQALSAGTRLKEGCHINRSLLTLGTVIRKLSKVRNGHIPYRDSKLTRILQPSLGGNARTAIICTMSPARSHMEQSRNTLLFASCAKEVVTNAQVNVVMSDKALVKQLQKELARLESELRCPASYSGLEALVREKDNQIRKMDKEIKELKLHRDLAQSRLQDLLKVVGDNHGSKHPLPCEDEQSTTSEAISSGQNFRLQGRLTTQRDYRSQQSENDVQFATPLSYSISSPPFSGMPPTNGRNDNSHISDEDSEDLCKEVRCIETNETEENECLESSAVGSNSLQDSNLASSMHGNDNTNRSVNSGRNDASSITLEQHLENVKKPFANPGMDLGSSTRNSSSSKVIGRSRSCRSLMGSTLLEDLEKEVCTPPSRSFMDYPGRPETCQRRVPALNYDAESEALSRAGSMLSEITTTRGGLKENSSAAGDTEFVAGIGEFVAELKEMAQGHNGELAEGTIRSVGLDPIMDILQSPSRWPLEFEKKQQEIIDLWHGCNVSLVHRTYFFLLFKGDPADAIYMEVELRRLSFLKNTYSNGSMGYDMVAGSLSTSLVSSAKKLQREREMLCRQMQKRLTIQERESLYTKWGVSLSSKRRRLQVARRLWTETRDLEHVRESASLVARLIGLLEPGKALREMFGLSFAPQQSTRRSHSSWRYGRSSLD

SEQ ID NO: 165651 - protein, 316 aa, Zea Mays
MDSSAVKVVQGGPDVGVQLMEHRWDKVLFTGSPRIARAVMAAASRHLTPVALELGGKCPCIFDAMGSARDLQISVNRMIAGKWSSCAGQACIAIDYVLVEERFAPILIKVLKSTLKRFFPEADHMARIVNERHFERLSNLLKDRSVAPSVLHGGSMDSKNLYIEPTILLNPPLDSAIMTEEIFGPLLPIITVKNIEDSIAFVKAMPKPLAIYAFTRDAALRRRIVDETSSGSVTFNDAYAIDGLPFGGVGQSGFGQYHGKYSFEMFSHKKAVMKRGYLVELTLRYPPWDESKVTLMRYLYRFNYFAFVLSFLGLRR

SEQ ID NO: 165652 - protein, 493 aa, Zea Mays
MGRTEAADDGAESGGLGLGVGVGVGETVRELREAYESGRTRSLAWRQAQLRGLLRLLEEKEVEAFQALHKDLGKHHAEAYRDEVGVLIKSANGALQQLGKWMAPEKVRVPLIAWPATAQVVPEPLGVVLVFSCWNVPLGLSLEPLIGAIAAGNAVALKPSELSPCTARFLGDNIGRYMDSSAVKVVQGGPDVGVQLMEHRWDKVLFTGSPRIARAVMAAASRHLTPVALELGGKCPCIFDAMGSARDLQISVNRMIAGKWSSCAGQACIAIDYVLVEERFAPILIKVLKSTLKRFFPEADHMARIVNERHFERLSNLLKDRSVAPSVLHGGSMDSKNLYIEPTILLNPPLDSAIMTEEIFGPLLPIITVKNIEDSIAFVKAMPKPLAIYAFTRDAALRRRIVDETSSGSVTFNDAYAIDGLPFGGVGQSGFGQYHGKYSFEMFSHKKAVMKRGYLVELTLRYPPWDESKVTLMRYLYRFNYFAFVLSFLGLRR

SEQ ID NO: 165653 - protein, 305 aa, Zea Mays
MPLHTPKRKGEAYSDALLSTSSTMNLQQVCKDLLCVNRLDDFIHANNGIAGYGASHGCKHWRQGRWTLGHARAARWKASPAPWSEEHSPWPAEPAPGRRARLDGVVRRLPRAAGAAAAGPPCPPGRGCAPAPRPPAVDPRLRSRPRLAKRGRRGREQLGRARARAYHGRAAAPALRHAQPPRPLPHRGRIRSTSVVARAGDGAPALSRGCARAPEGPRLLPRPGAAAPGSAQGRCRAGTPVPPRVPRGRASLHRAAEGPHAGAARTATGGCTHEPSREPRAAAWGRAPARRGGPRAAVSQGRRRL

SEQ ID NO: 165654 - protein, 61 aa, Zea Mays
MAREASARARRGGDRGAGVSGRASVDSMGFSEGKERGREGTACRTRGGVPSVGVGGLETWR

SEQ ID NO: 165655 - protein, 53 aa, Zea Mays
MRRGTRDPVTVRVARAALPASIRRRRVKARRRAHAFLVAPFVWSRGPPMVRIA

SEQ ID NO: 165656 - protein, 303 aa, Zea Mays
MALDDMQRDEVFNRDNIPTWLSYAGYAALSLIAVIAIPIMFREVRWYYVVVAYALAPALGFCNAYGTGLTDMNMGYNYGKVALFVLAAWAGKDSGVVAGLVGCGLVKQLVLVSADLMHDFKTGHLTLTSPRSMLVGQAVGTLMGCVLAPLTFMLFYRAFDVGEPDGYWKAPYALIYRNMAILGVEGFSALPRHCLQLCAGFFAFAVLANLARDLLPRRLARLVPLPMAMAVPFLVGASFAVDMCVGSLVVFAWHKLDGKKAALLVPAVASGLICGDGIWTFPSSLLALAKVKPPICMKFTPGS

SEQ ID NO: 165657 - protein, 558 aa, Zea Mays
MHEHMDGVVAWSGSFFFCVNKQMNSHLRLHTAAAAAAAAVSELELLVPRGRGAGAMDQLRPEPAAGAHEIEKTAAPDVESEPAAAVPEPERVPPWREQVTARGMVAALLIGFVYTVIVMKLSLTTGLTPTMNVSAALLAFLALRGWTRALGRLGIACRPFTRQENTVVQTCVVACYTIGFGGGFGSFLLGLDKKTYELSGVSTPGNVPGSYREPAIGWMTGFLLAVSFVGLLTLLPLRKVLVIDYKLTYPSGTATAVLINGFHTPQGDKNAKIQVRGFLKYFGISFLWSFFQWFYTAGDHCGFAQFPTFGLQAFNQTFSFDFSLTYVGAGMICSHLVNLSLLFGAVVSWGVMWPLIGKQKGNWYPADASQNSMTGIYGYKAFLCIALLVGDGLYNFVKVIAITVKNIRERSRRKNLNRGRSTWASRTGTGRPPTRSSTATWPSSAWRASRRCPGTACSCARGSSRSRCWRTWRGTCCRAGSRGSCRCPWPWPCRSSWAPASPSTCAWGASWCSRGTSSTARRPRCWCRPSPRGSSAATGSGRSRRLCSRWPRSSRPSA

SEQ ID NO: 165658 - protein, 503 aa, Zea Mays
MDQLRPEPAAGAHEIEKTAAPDVESEPAAAVPEPERVPPWREQVTARGMVAALLIGFVYTVIVMKLSLTTGLTPTMNVSAALLAFLALRGWTRALGRLGIACRPFTRQENTVVQTCVVACYTIGFGGGFGSFLLGLDKKTYELSGVSTPGNVPGSYREPAIGWMTGFLLAVSFVGLLTLLPLRKVLVIDYKLTYPSGTATAVLINGFHTPQGDKNAKIQVRGFLKYFGISFLWSFFQWFYTAGDHCGFAQFPTFGLQAFNQTFSFDFSLTYVGAGMICSHLVNLSLLFGAVVSWGVMWPLIGKQKGNWYPADASQNSMTGIYGYKAFLCIALLVGDGLYNFVKVIAITVKNIRERSRRKNLNRGRSTWASRTGTGRPPTRSSTATWPSSAWRASRRCPGTACSCARGSSRSRCWRTWRGTCCRAGSRGSCRCPWPWPCRSSWAPASPSTCAWGASWCSRGTSSTARRPRCWCRPSPRGSSAATGSGRSRRLCSRWPRSSRPSA

SEQ ID NO: 165659 - protein, 636 aa, Zea Mays
MHEHMDGVVAWSGSFFFCVNKQMNSHLRLHTAAAAAAAAVSELELLVPRGRGAGAMDQLRPEPAAGAHEIEKTAAPDVESEPAAAVPEPERVPPWREQVTARGMVAALLIGFVYTVIVMKLSLTTGLTPTMNVSAALLAFLALRGWTRALGRLGIACRPFTRQENTVVQTCVVACYTIGFGGGFGSFLLGLDKKTYELSGVSTPGNVPGSYREPAIGWMTGFLLAVSFVGLLTLLPLRKVLVIDYKLTYPSGTATAVLINGFHTPQGDKNAKIQVRGFLKYFGISFLWSFFQWFYTAGDHCGFAQFPTFGLQAFNQTFSFDFSLTYVGAGMICSHLVNLSLLFGAVVSWGVMWPLIGKQKGNWYPADASQNSMTGIYGYKAFLCIALLVGDGLYNFVKVIAITVKNIRERSRRKNLNRVADADTMALDDMQRDEVFNRDNIPTWLSYAGYAALSLIAVIAIPIMFREGVRRGRAGRVLEGPLRAHLPQHGHPRRGGLLGAAQALPAAVRGVLRVRGAGEPGAGPAAAPARAARAAAHGHGRAVPRGRQLRRRHVRGEPRGVRVAQARRQEGRAAGAGRRLGAHLRRRDLDVPVVSARAGQGQAAHLHEVHARELEGALTMRTEQRASFVVCGVESV

SEQ ID NO: 165660 - protein, 176 aa, Zea Mays
MRPKVCASLKQKIKVEDMDAYAPKDLLVVTTGSQGEPRAALNLASYGGSHTLKLSKEDVLLYSAKVIPGNETRVMKMMNRLTDLGPKIIMGKDSGLHTSGHAYREELEEVLRIVKPQHFLPVHGELLFLKEHESLGRSTGIRHTTVIKNGEMLGVSHLRNRRVLSNGFVSLGKEDL

SEQ ID NO: 165661 - protein, 107 aa, Zea Mays
MVGKKRGIISPLDHLAGLLEVRVVRGVDLAICDLRSSDPYVVLRIGKALKVKTRVVKKSINPEWNEDLTLSRGCASLVPLKFFSADIVPYGYPKYAYWYRHKLHCHL

SEQ ID NO: 165662 - protein, 89 aa, Zea Mays
MPPARFLKDCDRPSAVVKVVSLNHQVTNSRQPLHICGEKACLCLSLPQTPLKLEPPVQGLPCLIHTPQSTSRNFINEGTRVVFNTGTAC

SEQ ID NO: 165663 - protein, 560 aa, Zea Mays
MALRDVLLSIAQTPHRLRRRALVTWTPTQELNEVRDRSGARMKRRLEWYDLVGLGVGGMLGAGVFVTTGRVARDTAGPAVFASYVVAGVSALLSSLCYAEFSVRVPVAGGAFSYLRVTFGEFVGFFGGANILMEYVLSNAAVARSFTDYLASTFGVTERNAWRIVVDGIADGYNELDVPAVALILLITVCLCYSTKESSMLNMVLTVFHLLFFAFIVAAGLWNGSARNLVRPHGLAPYGVRGVLDGAAVVYFSYIGYDSACTMAEEIRDPSRALPVGIAGSVLVVSGLYCLMSVALCVMLPYTEISEAAPFSSAFREKVGWRWASSVVGAGASIGIVASLMVAMLGQARYLCVIARARLVPLWFAKVHPSTGTPMNATIFLGFCTASLALFTELQIVFEMISIGTLLVFYLVANALIYHRYVKVGTNRPLHVLLFLLLLTLSSLGFSLSRKIDGWCQWGMTLFGAVSIAITTIFHCTARQDIAGPSLEWSVPLMPWPAAASVFLNVFLITTLKVRSYQRFGIWSLVTIVFYVCYGVHSTYSAEENEIVNAMIHHANLDIS

SEQ ID NO: 165664 - protein, 434 aa, Zea Mays
MALRDVLLSIAQTPHRLRRRALVTWTPTQELNEVRDRSGARMKRRLEWYDLVGLGVGGMLGAGVFVTTGRVARDTAGPAVFASYVVAGVSALLSSLCYAEFSVRVPVAGGAFSYLRVTFASYILSGEFVGFFGGANILMEYVLSNAAVARSFTDYLASTFGVTERNAWRIVVDGIADGYNELDVPAVALILLITVCLCYSTKESSMLNMVLTVFHLLFFAFIVAAGLWNGSARNLVRPHGLAPYGVRGVLDGAAVVYFSYIGYDSACTMAEEIRDPSRALPVGIAGSVLVVSGLYCLMSVALCVMLPYTEISEAAPFSSAFREKVGWRWASSVVGAGASIGIVASLMVAMLGQARYLCVIARARLVPLWFAKVHPSTGTPMNATIFLGFCTASLALFTELQIVFEMISIGTLLVFYLVANALIYHRSMGGASGG

SEQ ID NO: 165665 - protein, 428 aa, Zea Mays
MEYVLSNAAVARSFTDYLASTFGVTERNAWRIVVDGIADGYNELDVPAVALILLITVCLCYSTKESSMLNMVLTVFHLLFFAFIVAAGLWNGSARNLVRPHGLAPYGVRGVLDGAAVVYFSYIGYDSACTMAEEIRDPSRALPVGIAGSVLVVSGLYCLMSVALCVMLPYTEISEAAPFSSAFREKVGWRWASSVVGAGASIGIVASLMVAMLGQARYLCVIARARLVPLWFAKVHPSTGTPMNATIFLGFCTASLALFTELQIVFEMISIGTLLVFYLVANALIYHRYVKVGTNRPLHVLLFLLLLTLSSLGFSLSRKIDGWCQWGMTLFGAVSIAITTIFHCTARQDIAGPSLEWSVPLMPWPAAASVFLNVFLITTLKVRSYQRFGIWSLVTIVFYVCYGVHSTYSAEENEIVNAMIHHANLDIS

SEQ ID NO: 165666 - protein, 70 aa, Zea Mays
MLQIVGQQPRSCIADGLNRTTDTPAFWWQGAAVRASSKSRKGAGPDETEGGANRERLIPLTPSSSAYIYK

SEQ ID NO: 165667 - protein, 244 aa, Zea Mays
MHEEKLYYLSESSEEDLLYHSETPIGSFEIGSGSVLLRHPNSKSLEEESKTSSIPADNKSYITSESYSDSASFVVHSGNKAAINLNLPTARPKKSPLHMEDNARRDKLHYENQHVLESVDSPLVSVDLEDVINYTNFMKYLTKEDRRQLLKFLPPVDSLTPPESLRSMFSCIQFSDAIDSYQMLLREGILDPSLCGDEEWKKVKTLALTNLTKCSWLECYKQKKLKKPGEWGASVDRKALPSLL

SEQ ID NO: 165668 - protein, 496 aa, Zea Mays
MHRNDNIDDDEPRVSKLKPPTSKLKSQKKKTNHIIMENGPFSGQNFRKMGDVDPSYRSSSGSAVSYSESCAPYGAADASEMTGSAQSHAWESLVPSRKRSCVTRPKPSPVEKLAKELNYIMHEEKLYYLSESSEEDLLYHSETPIGSFEIGSGSVLLRHPNSKSLEEESKTSSIPADNKSYITSESYSDSASFVVHSGNKAAINLNLPTARPKKSPLHMEDNARRDKLHYENQHVLESVDSPLVSVDLEDVINYTNFMKYLTKEDRRQLLKFLPPVDSLTPPESLRSMFSCIQFSDAIDSYQMLLREGILDPSLCGDEEWKKVKTLALTNLTKCSWLECYKQKKGAKETGGVGGISGPEGFTKSTMKPLKRPRDTHFQSDAELDGTMRSPLRVLKSGALALQFESSSLPKSGYATEDSTCTGGAPNLFMLPLEKLPLLVPSQYAVSDQDLLLEIPLNARHPEAELLCQPSQLMSSITSSSTSMGGVAEGEGYLKQP

SEQ ID NO: 165669 - protein, 278 aa, Zea Mays
MEDNARRDKLHYENQHVLESVDSPLVSVDLEDVINYTNFMKYLTKEDRRQLLKFLPPVDSLTPPESLRSMFSCIQFSDAIDSYQMLLREGILDPSLCGDEEWKKVKTLALTNLTKCSWLECYKQKKGAKETGGVGGISGPEGFTKSTMKPLKRPRDTHFQSDAELDGTMRSPLRVLKSGALALQFESSSLPKSGYATEDSTCTGGAPNLFMLPLEKLPLLVPSQYAVSDQDLLLEIPLNARHPEAELLCQPSQLMSSITSSSTSMGGVAEGEGYLKQP

SEQ ID NO: 165670 - protein, 65 aa, Zea Mays
MLATLQICFSIISLYLLFGFYYVFFLVFAVCHLEFPGVVLRTFIARLTLSCVTLTSLRLLRAQIL

SEQ ID NO: 165671 - protein, 221 aa, Zea Mays
MRLRAEEGERRAPVLRFESHSECLNRLQNRIEVQYDGSNLEHQKALEALWRSSFPGTELLGLVSDQWKEMGWQGKDPSTDFRGGGFISLENLLYFSRNYPKSFQELLRKQNGDRALWEYPFAVAGVNITFMLIQMLDLQAAKPTSLVGAVFLNLLLENDRAFDILYCITFKLMDQKWLEMHASYMDFNTVIKSTRRQLERELLLEDIQRIEDMPSYRFLAC

SEQ ID NO: 165672 - protein, 91 aa, Zea Mays
METVKKRNLPESSVFFGEEEMLDVQDVTVLWLPGGVTAYVDISEDGILCIGVGWYSEEGINLVMERDYGTDGRLREVRSKTEVKRRGRCTS

SEQ ID NO: 165673 - protein, 253 aa, Zea Mays
MMEDRCLTPSTAVALSKEATTSDEAACELPGGPVLWLFGKRVVVSNLFDQQPSSNTGSLQLQRVADMELDASAPESPTSCGTGKKLSSHAAEEAKTWHPWLTGTRQFMHCLPQGEQFSVHSACRPLSYGDGSMPYTAWNAQTVTSNKQQDNQPSQAAADCEVTRAQGSWTEPSVTTSSSSVVETAQNSDSVESTKVNNDGDKVAPVPGSRKCASVVPDCLRGFAPCKRTPQSKMLLQSEAPGEADREMTRLCL

SEQ ID NO: 165674 - protein, 357 aa, Zea Mays
MAVPGAVYKVIRESSGGDSNGNGNGVAAPPQIQIPPPRPKRRPTHPYPRKLGSSVGKDDASAIKRLQEPQLQAQSPSLSEQETCSPKSVLTTAEGSGSPASSVYMMEDRCLTPSTAVALSKEATTSDEAACELPGGPVLWLFGKRVVVSNLFDQQPSSNTGSLQLQRVADMELDASAPESPTSCGTGKKLSSHAAEEAKTWHPWLTGTRQFMHCLPQGEQFSVHSACRPLSYGDGSMPYTAWNAQTVTSNKQQDNQPSQAAADCEVTRAQGSWTEPSVTTSSSSVVETAQNSDSVESTKVNNDGDKVAPVPGSRKCASVVPDCLRGFAPCKRTPQSKMLLQSEAPGEADREMTRLCL

SEQ ID NO: 165675 - protein, 183 aa, Zea Mays
MFGKEYRLAPVRLTKEQQEMHQNRRSRAYQWKRPTVFLREGDSLPPDVDPDTVRWIPANHPFSAASSEVDEETAKQNVYQKDGIPSRVKAEHEALQARLEASNDVTRLPSDPRSIQRNERPMRLSGKPSEHLQSSKFENQDRQLATESGKHSSESLMDVYNQTSRKGNKNCVLQLFEDICFVT

SEQ ID NO: 165676 - protein, 206 aa, Zea Mays
MAIAAVPASLPFVLLPPRLFRGRAVRWPRPIRASASTNAGDVAGGERKFGALVSRVGDLRALVASVPPAVASMQKNIGPNFVAGFCVSMAFVAAAARQISLRSREHVSKGSVADLVRRGQLKSGQRGIAKLRTYDDPFNNPLVKIDEGTSTAQMFGKEYRLAPVRLTKEQQEMHQNRRSRAYQWKRPTVFLREGYQTPFGSKEYSA

SEQ ID NO: 165677 - protein, 550 aa, Zea Mays
MATSPLPTATASASKKRRSRGGTLALDEVKKLGTELLSSRSHLNHAPALLALLSPTAPLDLALEALISLQSFFVPLIPSIPSASAAANAGDAGSDPELVFGAWLRQRFDELVAALVELSVSPHSDDAIRDVALDALMDFVKLGKDGKFHSAIYHKFLYAVVHAADPVDMLLELLVSKYFKYTDIRYFTYTSLDKIANSLGSKTTGSGKDALQNGSDESKNRSSIFIHNIYNLLAHVPLMDFQKESTFDMWSTVGLSSKGENDSSKDTSTYINKKLKLKFTKAWLSFLKLPLPLDVYKEVLASIHQNVIPSMSNPSILCDFLTRSYDIGGVISVMALSGLFILMTQHGLEYPKFYEKLYALLTPAVFMAKHRSVFLQLLDTCLKSSYLPAYLAAAFAKRLSRLALSVPPAGALIIIALIHNLLRRHPSVNFLVHWEVDESDSNATREASQSKKIGSDPFNQNDADPAKSGAMRSSLWEIDTLRHHYSSAVSRFVVSLEEDLTVRAKTTEMKITDFSSGSYATVFRDEGQYPKRADASIMDGWRNWNIGENT

SEQ ID NO: 165678 - protein, 492 aa, Zea Mays
MATSPLPTATASASKKRRSRGGTLALDEDVALDALMDFVKLGKDGKFHSAIYHKFLYAVVHAADPVDMLLELLVSKYFKYTDIRYFTYTSLDKIANSLGSKTTGSGKDALQNGSDESKNRSSIFIHNIYNLLAHVPLMDFQKESTFDMWSTVGLSSKGENDSSKDTSTYINKKLKLKFTKAWLSFLKLPLPLDVYKEVLASIHQNVIPSMSNPSILCDFLTRSYDIGGVISVMALSGLFILMTQHGLEYPKFYEKLYALLTPAVFMAKHRSVFLQLLDTCLKSSYLPAYLAAAFAKRLSRLALSVPPAGALIIIALIHNLLRRHPSVNFLVHWEVDESDSNATREASQSKKIGSDPFNQNDADPAKSGAMRSSLWEIDTLRHHYSSAVSRFVVSLEEDLTVRAKTTEMKITDFSSGSYATVFRDEVRRRLKQVPLAFYRTTPTSLFLGSDFPGWTFGDQHNSTVETTVEGNGKVEAVGASDSTPSKRLRMET

SEQ ID NO: 165679 - protein, 502 aa, Zea Mays
MATSPLPTATASASKKRRSRGGTLALDEVKKLGTELLSSRSHLNHAPALLALLSPTAPLDLALEALISLQSFFVPLIPSIPSASAAANAGDAGSDPELVFGAWLRQRFDELVAALVELSVSPHSDDAIRDVALDALMDFVKLGKDGKFHSAIYHKFLYAVVHAADPVDMLLELLVSKYFKYTDIRYFTYTSLDKIANSLGSKTTGSGKDALQNGSDESKNRSSIFIHNIYNLLAHVPLMDFQKESTFDMWSTVGLSSKGENDSSKDTSTYINKKLKLKFTKAWLSFLKLPLPLDVYKEVLASIHQNVIPSMSNPSILCDFLTRSYDIGGVISVMALSGLFILMTQHGLEYPKFYEKLYALLTPAVFMAKHRSVFLQLLDTCLKSSYLPAYLAAAFAKRLSRLALSVPPAGALIIIALIHNLLRRHPSVNFLVHWEVDESDSNATREASQSKKIGSDPFNQNDADPAKSGAMRSSLWEIDTLRHHYSSAVSRRISLSGPKLLR

SEQ ID NO: 165680 - protein, 540 aa, Zea Mays
MATSPLPTATASASKKRRSRGGTLALDEVKKLGTELLSSRSHLNHAPALLALLSPTAPLDLALEALISLQSFFVPLIPSIPSASAAANAGDAGSDPELVFGAWLRQRFDELVAALVELSVSPHSDDAIRDVALDALMDFVKLGKDGKFHSAIYHKFLYAVVHAADPVDMLLELLVSKYFKYTDIRYFTYTSLDKIANSLGSKTTGSGKDALQNGSDESKNRSSIFIHNIYNLLAHVPLMDFQKESTFDMWSTVGLSSKGENDSSKDTSTYINKKLKLKFTKAWLSFLKLPLPLDVYKEVLASIHQNVIPSMSNPSILCDFLTRSYDIGGVISVMALSGLFILMTQHGLEYPKFYEKLYALLTPAVFMAKHRSVFLQLLDTCLKSSYLPAYLAAAFAKRLSRLALSVPPAGALIIIALIHNLLRRHPSVNFLVHWEVDESDSNATREASQSKKIGSDPFNQNDADPAKSGAMRSSLWEIDTLRHHYSSAVSRFVVSLEEDLTVRAKTTEMKITDFSSGSYATVFRDEIFLDGPLGTNTIAP

SEQ ID NO: 165681 - protein, 461 aa, Zea Mays
MATSPLPTATASASKKRRSRGGTLALDEVHAADPVDMLLELLVSKYFKYTDIRYFTYTSLDKIANSLGSKTTGSGKDALQNGSDESKNRSSIFIHNIYNLLAHVPLMDFQKESTFDMWSTVGLSSKGENDSSKDTSTYINKKLKLKFTKAWLSFLKLPLPLDVYKEVLASIHQNVIPSMSNPSILCDFLTRSYDIGGVISVMALSGLFILMTQHGLEYPKFYEKLYALLTPAVFMAKHRSVFLQLLDTCLKSSYLPAYLAAAFAKRLSRLALSVPPAGALIIIALIHNLLRRHPSVNFLVHWEVDESDSNATREASQSKKIGSDPFNQNDADPAKSGAMRSSLWEIDTLRHHYSSAVSRFVVSLEEDLTVRAKTTEMKITDFSSGSYATVFRDEVRRRLKQVPLAFYRTTPTSLFLGSDFPGWTFGDQHNSTVETTVEGNGKVEAVGASDSTPSKRLRMET

SEQ ID NO: 165682 - protein, 323 aa, Zea Mays
MATSPLPTATASASKKRRSRGGTLALDEVKKLGTELLSSRSHLNHAPALLALLSPTAPLDLALEALISLQSFFVPLIPSIPSASAAANAGDAGSDPELVFGAWLRQRFDELVAALVELSVSPHSDDAIRDVALDALMDFVKLGKDGKFHSAIYHKFLYAVVHAADPVDMLLELLVSKYFKYTDIRYFTYTSLDKIANSLGSKTTGSGKDALQNGSDESKNRSSIFIHNIYNLLAHVPLMDFQKESTFDMWSTVGLSSKGENDSSKDTSTYINKKLKLKFTKAWLSFLKLPLPLDVYKEVLASIHQNVIPSMSNPSILCFLTHA

SEQ ID NO: 165683 - protein, 361 aa, Zea Mays
MATSPLPTATASASKKRRSRGGTLALDEVKKLGTELLSSRSHLNHAPALLALLSPTAPLDLALEALISLQSFFVPLIPSIPSASAAANAGDAGSDPELVFGAWLRQRFDELVAALVELSVSPHSDDAIRDVALDALMDFVKLGKDGKFHSAIYHKFLYAVVHAADPVDMLLELLVSKYFKYTDIRYFTYTSLDKIANSLGSKTTGSGKDALQNGSDESKNRSSIFIHNIYNLLAHVPLMDFQKESTFDMWSTVGLSSKGENDSSKDTSTYINKKLKLKFTKAWLSFLKLPLPLDVYKEVLASIHQNVIPSMSNPSILWRLMRVIAMPQEKLVNLRRLVLILLTRMMQTLRSLVQCAVLCGK

SEQ ID NO: 165684 - protein, 158 aa, Zea Mays
MDVGLGGAGSSGRGGGGGRSGSGGGRDSPFALGGGGASAAAWTRLVSSGVEDELVAASGGRGGGGGRAGARAGGLPQGHFLDACFLCRKPLPSNRDIFMGDIPFCTEECRTEQIEMDEEMERKESTQKKKLAPRAPSPKDVESAPRPPKARAGSILAG

SEQ ID NO: 165685 - protein, 103 aa, Zea Mays
MSPPNVRVHKVGCGLRLDCLAVFGLFSTVYVSPITANTVNRSCASHKARISLFFYYFVLFFLPFFLLYLFALFQFIFLCVTTINHLITYFYYLCSTFSFFYIR

SEQ ID NO: 165686 - protein, 73 aa, Zea Mays
MGATSLGSYVGGTQGNTLPCMLNMCRDTLPHIQLFIGLGFGQISLPALSSSHSPLWGRGDPGVLLVLTFPTAT

SEQ ID NO: 165687 - protein, 275 aa, Zea Mays
MAKATATAFARKYRRTRGRVRTIPPDIAPTGSSEEESGEGNSKETIREQSSADDHSPDLRQKRCRKRSGPQGSPAGTIGSIDYSFEENDELVGGKEILATSPLQGEMLAWGKNGARSQNRHGSVGSNGRTGRSGRIAKLVDYLHTADEMDKEFQLFLLLLPVDGQTIPNLEKPYLSCRPTLSIKHLAQFVALQLSCEVEELEMYIRMDRHRVSVGSRPSSTGEAKSRPFDDLERLNEEKLVSELHPSFVSSNGDMVRSSLNRFNAIILACLVLFR

SEQ ID NO: 165688 - protein, 405 aa, Zea Mays
MRAGTMDEFMLVKLAEIRKEVQCPICLGIIRKTRTVMECLHRFCRDCIDKSMRLGNNECPACRTHCASRRSLRDDPNYDALIAALYPDIDKYEEEEFAFSEQERIRNKKIQETIEETFRRQSDAIGKKRSMAKATATAFARKYRRTRGRVRTIPPDIAPTGSSEEESGEGNSKETIREQSSADDHSPDLRQKRCRKRSGPQGSPAGTIGSIDYSFEENDELVGGKEILATSPLQGEMLAWGKNGARSQNRHGSVGSNGRTGRSGRIAKLVDYLHTADEMDKEFQLFLLLLPVDGQTIPNLEKPYLSCRPTLSIKHLAQFVALQLSCEVEELEMYIRMDRHRVSVGSRPSSTGEAKSRPFDDLERLNEEKLVSELHPSFVSSNGDMVRSSLNRFNAIILACLVLFR

SEQ ID NO: 165689 - protein, 261 aa, Zea Mays
MDVRDLHQQPQQQQAPPRVGSPPQAGAGGVMMQHAAAFGAAPPPSGLPQASAANVMHGMSLAFNPMASPDASSPISSMKIVDMPLGSMYRPDSGATGLQQQQPGSGGVGASGGAIVAVSGGDLVKKKRGRPRKYGPDGSIGLGLKTAAAGVTEATGAQSGGGGSTPNPDGKRRGRPPGSGKKKQLDALGSSGTSFTPHIITVKPNEDVASKIMAFSQQGPRTTCIISANGALCTATLRQPATSGGIVTYERMVTLAAEQVV

SEQ ID NO: 165690 - protein, 181 aa, Zea Mays
MAIDDESPIRVNSRGGGAMGGGECDGAENQRWPPWLKPLLGTSFFGQCKLHADAHKSECNMYCLACMNGALCSQCLAYHRDHHAIQIVGTSGDLRIRKKQAVVKKHQKKKKQQAQQHRGAALDSEDDSSSTSTSRGSDRSSVVQSFTPSTPPATANSFRTGKRRKGVPHRSPFGSLMVEEF

SEQ ID NO: 165691 - protein, 111 aa, Zea Mays
MAPPRAIGAADSPGPRPSARGVVPSSSACSDRVPLHGGFGSSLHAVGSEFGSQTNTLLDSLARHFSRPLTKEQMEAIMELATQGKEKEGIKKKGSKVTPLQAPIIEASEMR

SEQ ID NO: 165692 - protein, 151 aa, Zea Mays
MSGAPEDSSANSSSSGKSRGNSTIIHRTVSGAPRKSGLRNSPASGIRFGCSAIIHRTVRCNCGATTTSRQRSPATAINARQSTQKSGTRVVAHRTINSTCPVRHRTSRRAQKTELQRSKPNGFGDVAGAPDCPVCTGLSGAPFDRQPPPND

SEQ ID NO: 165693 - protein, 74 aa, Zea Mays
MQKQNESWMRGHSGAAGCGLQVRLSLFLLRFVSLQSIVSSPLLSLVQCLFRSSQFFFRSFFCISRLQWCAWSDD

SEQ ID NO: 165694 - protein, 327 aa, Zea Mays
MALRGSIQMDTGSGPALQYLLCLAWVAATLPIAAAALPIPAAAGGRFIHGLLCAFSSRGKTVRPSSSSSSKARFTVSQKCFLHFYVVGAVVTTSLLLAIWFYAYMKMTPLMPEQSSYSTIASHLVGGSNSFHLANFWSSRPMEHKYRVWRTVFVLILMEIQVLRRLYETEHVFHYSPSAQMHIIGYLTGIFYYVAAPLSLASSCLPEAIQYLRYQIAEFIVKGRARMPDLSIDPSHLLKPLLKLGWCQWIGAVIFIWGSLHQIRCHAILVIYFGMLVASGGSDIPVWFLYLFVITNLSFAAVQTHKWYLQKFEDYPRSRYAIVPFVC

SEQ ID NO: 165695 - protein, 53 aa, Zea Mays
MLVASGGSDIPVWFLYLFVITNLSFAAVQTHKWYLQKFEDYPRSRYAIVPFVC

SEQ ID NO: 165696 - protein, 351 aa, Zea Mays
MALRGSIQMDTGSGPALQYLLCLAWVAATLPIAAAALPIPAAAGGRFIHGLLCAFSSRGKTVRPSSSSSSKARFTVSQKCFLHFYVVGAVVTTSLLLAIWFYAYMKMTPLMPEQSSYSTIASHLVGGSNSFHLANFWSSRPMEHKYRVWRTVFVLILMEIQVLRRLYETEHVFHYSPSAQMHIIGYLTGIFYYVAAPLSLASSCLPEAIQYLRYQIAEFIVKGRARMPDLSIDPSHLLKPLLKLGWCQWIGAVIFIWGSLHQIRCHAILGSLREHKDSDEYVIPCGDWFSLVSCPHYLAELVIYFGMLVASGGSDIPITNLSFAAVQTHKWYLQKFEDYPRSRYAIVPFVC

SEQ ID NO: 165697 - protein, 213 aa, Zea Mays
MALRGSIQMDTGSGPALQYLLCLAWVAATLPIAAAALPIPAAAGGRFIHGLLCAFSSRGKTVRPSSSSSSKARFTVSQKCFLHFYVVGAVVTTSLLLAIWFYAYMKMTPLMPEQSSYSTIASHLVGGSNSFHLANFWSSRPMEHKYRVWRTVFVLILMEIQVLRRLYETEHVFHYSPSAQMHIIGYLTATMWPHLYHLLVLVFLKQYSIFDIK

SEQ ID NO: 165698 - protein, 476 aa, Zea Mays
MVNFGKKLMADQVEEWKGYYINYKLMKKMLKQYVQQTQHGGKDREQVLKEFSRILDDQIERIVLFLLQQQGHLASRIEELGEKRSALEEYDISQVYQLHDAYREVGLDLIKLLRFVDVNATGIRKILKKFDKRFGYKFTDYYVTTRANHPYSQLQQVFKQVGIVAVVGALSRNLEYLQHHEGSFVSIYDRPAVTLKDPIIDQVNHAVQKLTHATNFMQFLGQHSLIVQEDAQSGSEDLVDDQSYHFMSLMLNLVNTFLYMVNTYIIVPTADDYAVSLGAAATVCGIIIGSMAVAQVFSSVYFSAWSNKSYFKPLVFSSIVLSLGNLLYALAFDLNSLSVLLIGRLLCGLGSARAVNRRYISDCVPLKMRLQASAGFVSASALGMACGPALAGFLQTKFKIYSITFNQSTLPGWVMCIAWLIYLLWLWFTFKEPEHFTKTLVNEHPSESGPAVDILHAQVRNGDTTLRIKRCHHILF

SEQ ID NO: 165699 - protein, 67 aa, Zea Mays
MLSALLARSEKKTCAEFLVLMNIDLGRYSNQLRKRPSDKRTQHATTDFLCRLLASCMAFPVPAVPVR

SEQ ID NO: 165700 - protein, 166 aa, Zea Mays
MLSALLARSEKKTCAEFLVLMNIDLGRYSNQLRKRPSDKRTQHATTDFLVACFVHGLPGSRCTCTLGHRAASSTTFRSRSCRSRRRPAGALGLALANRSAAAVVRDLQRADCTLRTYSAMQGKGEGGGRSVELADAEQPGVHRARRRRHRPQPSLVGGACSCSFEG

SEQ ID NO: 165701 - protein, 100 aa, Zea Mays
MASIDSLLTKGNSLCSYCRRHILRADSIPVRVHNAYMHNTVKKHSTVKKQQFFESNPLYFVGFRQQLFTGFTRLWETGARSRKRGNNIQARVLCYKILYL

SEQ ID NO: 165702 - protein, 128 aa, Zea Mays
MGVGASSVGAAEGCGRGWGPRHTSLGDMPESCVAAVLLYLDPAEICQVACLNRAFRGAASADCIWAAKLPANHRYLAALAAAADDDDCSCGCDGVAAEGSCSTVAIKKELYARLCRPTPFDGGTKLFE

SEQ ID NO: 165703 - protein, 167 aa, Zea Mays
MGVGASSVGAAEGCGRGWGPRHTSLGDMPESCVAAVLLYLDPAEICQVACLNRAFRGAASADCIWAAKLPANHRYLAALAAAADDDDCSCGCDGVAAEGSCSTVAIKKELYARLCRPTPFDGGTKEFWIEKKGGFCMSISSKAMSITGRNDRRYWSDLSTEESRSGG

SEQ ID NO: 165704 - protein, 194 aa, Zea Mays
MAPAAPDADAYDIPWVEKYRPSRVADVVGNSDAVARLEVIARDGNMPNLILSGPPGTGKTTSILALAHELLGPSYRDAVLELNASDDRGLDVVRNKIKMFAQKKVTLQPGRHKIVILDEADSMTSGAQQALRRTMEIYSNTTRFALACNTSSKIIEPIQSRCAIVRFSRLSDQEILGRLMIVVAAEKGDCPSAE

SEQ ID NO: 165705 - protein, 343 aa, Zea Mays
MGGGGRNGTVVRRYIRSKEPRIKWSADLHRSFVQAIDCLGGQHTWLANCRSSWRCKIAEATPKLILQFMATRGLTISHVKSHLQMYRAARLGAGRRGMQAQLLQRRHSCTGDEQEEFLRPPPPLKRARMGYESMQGLGSHGVSDARTAAAAGGLYCIDDYMQAMAAMGWRIKEEGLTRWQWQRRDAAAPSDLQAMGCLVQEPDPFKQMRRPEARRLGSALRNQQDDSSEEDGNGCPLLSSSSFSNAANDDEPSDEQCSLSLSLGLDTKGARAMATSSPSGESSCILTAASPARRSSSDCCCSGHSGCFVGPGVSLELSLSISGSYLDHSDSVHRPGPAGCSRW

SEQ ID NO: 165706 - protein, 539 aa, Zea Mays
MLIATTMPRGFAFAAPCRSLQTTTVRCKATGAADRRDVLLGLGGAAASGLLRSSSSSSSGGAPIQAPDLRNCHPPDLPDTAEDVNCCPSPGIVDFTPSPRLRVRPAAHLVDAEYVAKYEKAVALMKQLPDDDPRSFAQQWRVHCAYCDGAFDQVGFPDLEIQIHNCWLFFQWHRFYLYFHERILGKLVGDDKFALPFWNWDAPGGMSLPAIYADKSSPLYDERRDPAHQPPFTLDLDYDGTEPTIPRAQQIDQNLMIMYRQKELFFGMPYRQGDQPDPGAGTVESIPHNPVHFWSGDPRQPNGEDMGNFYSAARDPLFFAHHGNIDRMWSVWNGLRPGNSDFTDPSWLDASFLFYDEEARLVRVRVRDCLDTAALGYAYQDVALPWLNAKPAKEAGSPAPTAGALPATLNQTVRVAVTRPKTSRTRKEKDAKEEVLVVQGIEIADHSSRFVKFDVFVNDSQSGGGMPAAAQCAGSVALTPHAVRPGKGKGTVKTVARFGICDLLDDIGADGDKTIIVSLVPRCAGDMVTVGGVGIEYVG

SEQ ID NO: 165707 - protein, 302 aa, Zea Mays
MMASNSPAAAFFGVRDGDQQDHQIKPLISPQQQQQLAAALPSVASGQGAPTAAAQPPPKKKRTMPDPDAEVIALSPKTLMATNRFVCEVCSKGFQREQNLQLHRRGHNLPWKLKQKDPLQAQRRRVYLCPEPTCAHHDPARALGDLTGIKKHFSRKHGEKKWKCDKCSKRYAVQSDWKAHSKICGTREYRCDCGTLFSRRDSFITHRAFCDALAQESARLPPTSSLSNLTSHLYGAATNAGNMALSLSQVIYRGTYWFRFWSQMQKAEDDKELIKTACLKMENVVMEIFSKYGWRFTNRICS

SEQ ID NO: 165708 - protein, 199 aa, Zea Mays
MMASNSPAAAFFGVRDGDQQDHQIKPLISPQQQQQLAAALPSVASGQGAPTAAAQPPPKKKRTMPDPDAEVIALSPKTLMATNRFVCEVCSKGFQREQNLQLHRRGHNLPWKLKQKDPLQAQRRRVYLCPEPTCAHHDPARALGDLTGIKKHFSRKHGEKKWKCDKCSKRYAVQSDWKAHSKICGTREYRCDCGTLFSR

SEQ ID NO: 165709 - protein, 579 aa, Zea Mays
MKVLIYFWFCRIIASLRANQFCERLPSPNGESTVDCHQISKMPNLAFTIANKTFTLTPEQYIVKLEQAGQTICINGFMAFDVKHEEVIGLGLGVVGAEHPGAVRGEGSQQPPGVRVPGAPGRHQRLQPPAQGRRGGFGSVYKGVVRLPGGPAGGTVVAIKNSIPMVIRSSRLSHSGISHLPADEVKPLVKYDNDEDAHSPGGRGRGRGGRGRGRGRGRGGRGNGFNEYADAGWEDDHAPAYMGNGYARGRGRSFRGRGRRGDDDNQPEYQHVGGFKGMRVMRVKNLNLYAFGLYMQPTSIREKLGPKYASFPTDKLMENPDFYRNGFNEYDDAGWEDDHSPAYMGNGYARGRGRSFRGRGRRGGDNNQPEYQQVGGYYECSCSSFRFSPFVMELKPASHRSGNLFLVVNIYMVYPVVLCTSNFVHIEPVRMTSSLKVIEMLQSSNGIQHIPCAAISALISRAGNANWNRKGLLLIQSNWAPMVKAYGHSRLKNSEYLEARQLVDAEGLAAALARKDAVGRGAQLQLAGAALSEVFLRQARTGQLSRPSCGVTDRPTLKSSTTLTPYEVWSLSWWRFTPR

SEQ ID NO: 165710 - protein, 478 aa, Zea Mays
MGADTLLRSGGEPGSIERRRRGEYLGFLGTRAPAHRHRARGHCSLPFSSVAATAEASTTRDQLAAAPAGADGLHALAEQVVQLVLADGSGASSPRVAFADGVFVDSSLKLKPAFEEVAVGKYRADTQSVDFQKKVDLIPFPPSSRTLVSCYRSSYSYDSGHINQNLSRKCEALVVSGLAEYGDEIDGIAPADIMKIQPILQEDLKLDFSKSRTNKTGNAEITKRRRMVVIDEVLSQDETPFLYSLVFGEGVVNDTTSVVLFNAIQNFDPGNISGAKLLNFISSFLYLFGSSTILGVASGLLSAYTIKKLYFGRHSTYREVSIMMLMAYLSYMLAELLDLSGILTVFFCGVVMSHYTWHNVTESSRVTTKHAFATLSFISETFLFLYVGMDALDIEKWKIVGQTYSPVKSIALSSTILALVLVSRAAFVFPLSFLSNLTKKTPNGKISFRQQVLWQCEAFWEVVLLDFWRCMPGVRQCF

SEQ ID NO: 165711 - protein, 369 aa, Zea Mays
MGADTLLRSGGEPGSIERRRRGEYLGFLGTRAPAHRHRARGHCSLPFSSVAATAEASTTRDQLAAAPAGADGLHALAEQVVQLVLADGSGASSPRVAFADGVFVDSSLKLKPAFEEVAVGKYRADTQSVDFQKKVDLIPFPPSSRTLVSCYRSSYSYDSGHINQNLSRKCEALVVSGLAEYGDEIDGIAPADIMKIQPILQEDLKLDFSKSRTNKTGNAEITKRRRMVVIDEVLSQDETPFLYSLVFGEGVVNDTTSVVLFNAIQNFDPGNISGAKLLNFISSFLYLFGSSTILGVASGLLSAYTIKKLYFGRHSTYREVSIMMLMAYLSYMLAELLDLSGILTVFFCGVVMSHYTWHNVTESSRVTTK

SEQ ID NO: 165712 - protein, 787 aa, Zea Mays
MGADTLLRSGGEPGSIERRRRGEYLGFLGTRAPAHRHRARGHCSLPFSSVAATAEASTTRDQLAAAPAGADGLHALAEQVVQLVLADGSGASSPRVAFADGVFVDSSLKLKPAFEEVAVGKYRADTQSVDFQKKVDLIPFPPSSRTLVSCYRSSYSYDSGHINQNLSRKCEALVVSGLAEYGDEIDGIAPADIMKIQPILQEDLKLDFSKSRTNKTGNAEITKRRRMVVIDEVLSQDETPFLYSLVFGEGVVNDTTSVVLFNAIQNFDPGNISGAKLLNFISSFLYLFGSSTILGVASGLLSAYTIKKLYFGRHSTYREVSIMMLMAYLSYMLAELLDLSGILTVFFCGVVMSHYTWHNVTESSRVTTKHAFATLSFISETFLFLYVGMDALDIEKWKIVGQTYSPVKSIALSSTILALVLVSRAAFVFPLSFLSNLTKKTPNGKISFRQQVIVWWAGLMRGVVSIALAYNKAAVPHKFVWCRCCLIFGGACRVFDNVSEVLWQCEAFWEGHHHAQLEVVRDHNSERGEAKNEDSRTLQFNYGSFKHKALDKFLTKKVVAVCECGLDYDRLQFCPTDMQKKYFEKQFELAEAVKLPIFLHMCAAGEDFYEIMTQNLHRFPGGVTHSFTDSTEDQDRLLSFEKMFIGVNGSSLKTNRNLEVLRGIPVERLMMETYSPYCDIINTHAGSQYVKSVWPSKKKEKYEPDSTVKGRNEPCLVRYFEKQFELAEAVKLPMFLHMRAVGEDLCEIMTQNLHRFPGGVTHSFTDSAEDRDRLLSFEKMFIGKFLR

SEQ ID NO: 165713 - protein, 367 aa, Zea Mays
MGADTLLRSGGEPGSIERRRRGEYLGFLGTRAPAHRHRARGHCSLPFSSVAATAEASTTRDQLAAAPAGADGLHALAEQVVQLVLADGSGASSPRVAFADGVFVDSSLKLKPAFEEVAVGKYRADTQSVDFQKKVDLIPFPPSSRTLVSCYRSSYSYDSGHINQNLSRKCEALVVSGLAEYGDEIDGIAPADIMKIQPILQEDLKLDFSKSRTNKTGNAEITKRRRMVVIDEVLSQDETPFLYSLVFGEGVVNDTTSVVLFNAIQNFDPGNISGAKLLNFISSFLYLFGSSTILGVASGLLSAYTIKKLYFGRHSTYREVSIMMLMAYLSYMLAEKVQGSQPSMPLQHCRLSPRLFCFFMLVWMHWI

SEQ ID NO: 165714 - protein, 750 aa, Zea Mays
MGADTLLRSGGEPGSIERRRRGEYLGFLGTRAPAHRHRARGHCSLPFSSVAATAEASTTRDQLAAAPAGADGLHALAEQVVQLVLADGSGASSPRVAFADGVFVDSSLKLKPAFEEVAVGKYRADTQSVDFQKKVDLIPFPPSSRTLVSCYRSSYSYDSGHINQNLSRKCEALVVSGLAEYGDEIDGIAPADIMKIQPILQEDLKLDFSKSRTNKTGNAEITKRRRMVVIDEVLSQDETPFLYSLVFGEGVVNDTTSVVLFNAIQNFDPGNISGAKLLNFISSFLYLFGSSTILGVASGLLSAYTIKKLYFGRHSTYREVSIMMLMAYLSYMLAELLDLSGILTVFFCGVVMSHYTWHNVTESSRVTTKHAFATLSFISETFLFLYVGMDALDIEKWKIVGQTYSPVKSIALSSTILALVLVSRAAFVFPLSFLSNLTKKTPNGKISFRQQVIVWWAGLMRGVVSIALAYNKAAVPHKFVWCRCCLIFGGACRVFDNVSEVLWQCEAFWEGHHHAQLEVVRDHNSERGEAKNEDSRTLQFNYGSFKHKALDKFLTKKVVAVCECGLDYDRLQFCPTDMQKKYFEKQFELAEAVKLPIFLHMCAAGEDFYEIMTQNLHRFPGGVTHSFTDSTEDQDRLLSFEKMFIGVNGSSLKTNRNLEVLRGIPVERLMMETYSPYCDIINTHAGSQYVKSVWPSKKKEKYEPDSTVKGRNEPCLVRFPGGVTHSFTDSAEDRDRLLSFEKMFIGKFLR

SEQ ID NO: 165715 - protein, 305 aa, Zea Mays
MGADTLLRSGGEPGSIERRRRGEYLGFLGTRAPAHRHRARGHCSLPFSSVAATAEASTTRDQLAAAPAGADGLHALAEQVVQLVLADGSGASSPRVAFADGVFVDSSLKLKPAFEEVAVGKYRADTQSVDFQKKVDLIPFPPSSRTLVSCYRSSYSYDSGHINQNLSRKCEALVVSGLAEYGDEIDGIAPADIMKIQPILQEDLKLDFSKSRTNKTGNAEITKRRRMVVIDEVLSQDETPFLYSLVFGEGVVNDTTSVVLFNAIQNFDPGNISGAKLLNFISSFLYLFGSSTILGVAVSYMLFRF

SEQ ID NO: 165716 - protein, 371 aa, Zea Mays
MGADTLLRSGGEPGSIERRRRGEYLGFLGTRAPAHRHRARGHCSLPFSSVAATAEASTTRDQLAAAPAGADGLHALAEQVVQLVLADGSGASSPRVAFADGVFVDSSLKLKPAFEEVAVGKYRADTQSVDFQKKVDLIPFPPSSRTLVSCYRSSYSYDSGHINQNLSRKCEALVVSGLAEYGDEIDGIAPADIMKIQPILQEDLKLDFSKSRTNKTGNAEITKRRRMVVIDEVLSQDETPFLYSLVFGEGVVNDTTSVVLFNAIQNFDPGNISGAKLLNFISSFLYLFGSSTILGVASGLLSAYTIKKLYFGRHSTYREVSIMMLMAYLSYMLAELLDLSGILTVFFCGVVMSHYTWHNVTESSRVTTKFC

SEQ ID NO: 165717 - protein, 109 aa, Zea Mays
MPFEHTCQSTGKVEKNCMATNHWVKDRVLDWLAKDNKIGAKELKKRLEEQYHLKLSYWVVWDGRKKALEQLKGKWDDSFECIFSFKTEVEKTNPGSLVDIEYEKVGKKM

SEQ ID NO: 165718 - protein, 53 aa, Zea Mays
MAGPLYVYIILDGSILHNYTAYSHFSDTVYINLVTIKDLSLFLNLNLVLLPLS

SEQ ID NO: 165719 - protein, 200 aa, Zea Mays
MGVALPPDAPPASAVQSRRVSLQGSLCPLEYATEIAKEADQYNGFNLILADVNSGTMVYISNRPGGDPVIQTVAPGLHVLSNAAINSPWPKAMRLGQSFKRYLTIHDDAEASLKQMVEELMMDTARPDRSMVPDTGDDPEWEYKLSSIFIDTAKEQARYGTRSMVALAAKLEGEVTFYERYLENSLWKENLIQFQMEKAQ

SEQ ID NO: 165720 - protein, 79 aa, Zea Mays
MRHGANSTLQNPSRIVSLGLTCIRAIAAAAKVTNPRRRPTVTILSPVRPRYLAAALNAEAEGGDAGGAPAQHRLACGDW

SEQ ID NO: 165721 - protein, 542 aa, Zea Mays
MGCKGSKLDDQEAVALCRARAELLAAAVRHRYALADAHAALADSIDSVAAPLHRLLRLQAQPRGLVLPSARKGGGAPANRLLPRSFDPSSALPAHGHSSQPQFGASPGSEPAPTADSPPRRRRRVPEQLPHPHYAAYGYDYATQPAYAYPAPASSLQFYYARSRPPPASVAVTQRAPGTSERVHFGSFDAAGGYPQHYAYSAQRAQAPPPVAPQRSAPPSPPKASSWDFLNVFENYDSYEHDSYYYDSATAPAAPAAPFMPSRSSREVREEEGIPDLEDDGEEDSVGVVVKEVAGQYSAPGNGGARSRRNSLGGASSTAELDQPENAIAHKDVIGEFRRRPTAHGNVSVHAPPPPARRVVDNASVAGEIKAQLVRTAEAARQLAPMLEVGRPSYQGRSSVYQCSSKMMSAISVAHLGCKDMDVLDVGVVGKMVDTRSLSSALDKLYFWERKLYAEVKAEEKTRLLIAKNSKRLKLLDQKGTEPEKIDETRNLLRKLSTKIRIAVRVIAKISRKINKLRDEELWPQVNALIQGWKWPGFGVRA

SEQ ID NO: 165722 - protein, 941 aa, Zea Mays
MDQQRKSSLRSYGSNASSQSGSFDFNHDQDTERAGQPGGDDRREVVVKIDAEPHSPVSLHAAGGVSGHSSAASTPRAGGAAVRILAPSASGSSASTSSVGGDASGSGESFSFRKRPPQSPAGGDSGEDPPSRLIGSFLRKQAAAGGELSLDPDFEVEEMRRPPRAPTSVNASRELRVSFQDPRKRMSPSTSSASSSSYGAGGDSRNQSTIDVDAAEVLRCTSTSTGSSLLARSRTRSRLMDPPPPSTSSSAPANEGDPRKSFVSKGLPPKSGQLRSGLIGKSGLIGKSGPIGKTGAFDDEDDDPFMDEGMTSDFKRDTMDCLLIMEWVSLVVIVGALICSVTIPSLSVKKLSGLHLWKWELLVFVLICGRLVSGWVIRIAVFFVERNFLLRKKVLYFVYGVRRAVRNVLWLGVALVSWHLLFDKAAKRETHTLVLPYVTKVLCCLLVATVIRLVKTLLLKVLASSFHVSSYFDRIQEALFNQYVIETLSGPPLVDESRMMAEVQRLQSAGASIPSELEATAMPGKSRPLPKSGRLTTVASKRGGGGAAAASKQLHRQKTERHLDDGISIDQLHKLSQKNISAWSMKRLMKIVRYGALTTMDEQLKHATGEDELATEIHSEYEAKVAAKRIFQNVAKPGSKHIYLSDLMRFMRQEEALKAMDLFEGAQEHNRVSKRSLKNWVVNAFRERKALALTLNDTKTAVNKLHQMANVVVALIVLALWLLILGIATSKFFVLLSSQLLVAVFMFGNTLRTIFEAIVFLFVMHPFDVGDRCEVDGMQVVVEEMNIMTTIFLRYDNLKVYYPNSQLAQLPIMNYYRSPDMGDSVDFSVHVATPVEKLSLMKERLLHYLDNKKEHWYPGSMVVLRDVDDTNKLKVSIWCRQTINFHDMGMRFERRELLLQEMIKVLRDLEIEYRMLPLDVNVRSAPTIQSSRMPATWTFNY

SEQ ID NO: 165723 - protein, 51 aa, Zea Mays
MGKLSLGWTNTRKAGPQWEWRDGESSLYPPWQETGRWGAVLSETWRAPWRG

SEQ ID NO: 165724 - protein, 231 aa, Zea Mays
MKKCLPGSSIRRIAEAVQVKNYEPGDYVAREGEPVNGLYIIVDGQAEVSAPANAEEANRPDYVLNKYDYFGYGTNSSVHQVNVVALSKLTCFILPNQYGHLLQPKTIWNAEETPEHSLLEQILHLEPLEVDIFRGFTLPEAPTFRQVFGGQFIGQALAAASKTVDCLKMVHSLHAIFLVAGDNNIPIIYQVHRARDGSSFATRKVEAKQKGLVVFTLIASFQKEEVGFEHQ

SEQ ID NO: 165725 - protein, 63 aa, Zea Mays
MVHSLHAIFLVAGDNNIPIIYQVHRARDGSSFATRKVEAKQKGLVVFTLIASFQKEEVGFEHQ

SEQ ID NO: 165726 - protein, 68 aa, Zea Mays
MDHEEVTEFLGQVPLLQCLPGSSIRRIAEAVQVKNYEPGDYVAREGEPVNGLYIIVDGQKKQIAQTMC

SEQ ID NO: 165727 - protein, 203 aa, Zea Mays
MASNIFCYFNDILIILKAEVSAPANAEEANRPDYVLNKYDYFGYGTNSSVHQVNVVALSKLTCFILPNQYGHLLQPKTIWNAEETPEHSLLEQILHLEPLEVDIFRGFTLPEAPTFRQVFGGQFIGQALAAASKTVDCLKMVHSLHAIFLVAGDNNIPIIYQVHRARDGSSFATRKVEAKQKGLVVFTLIASFQKEEVGFEHQ

SEQ ID NO: 165728 - protein, 302 aa, Zea Mays
MPVKRAHLKPHAADIKRNPHVHELYKLVYRLPENLSWLLAPPEIPKRPASKKKKQKDEIVAGNSFGVILEWEGVVVDDDDPDLEPRVWYVLSLEEGKSFPPDALLKKIEGMRTDQAIAEVLCWSEDPAEIQRLATHKEVIYQKLQGGYYQLRPHVLDFLNTLVGFDIPIAIAAPRSRKSLEEGIKTVGLQGYFDAIVALEDFCLGKPDGEMFEVAAEQLGLEPDACVVFGNSNLTTESAHNAGMRCVAVAGRHPAYELQSANHVVRWLDQLSIVDLQRLANGEVIGRRGRESDMDMEIVIEE

SEQ ID NO: 165729 - protein, 167 aa, Zea Mays
MAAASSATSVHDFTVKDSSGKDVDLSVYRGKVLLIVNVASQCGLTNSNYTQQAQLYEKYKNQGFEILAFPCNQFGGQEPGTNEEIAQFACTRFKADYPIFDKVDVNGNNAAPIYKFLKSSKGGLFGDSIKWNFSKFLVDKEGRVVDRYAPTTSPLSIEAININLQSR

SEQ ID NO: 165730 - protein, 170 aa, Zea Mays
MAAASSATSVHDFTVKDSSGKDVDLSVYRGKVLLIVNVASQCGLTNSNYTQQAQLYEKYKNQGLFLIHCSCFEILAFPCNQFGGQEPGTNEEIAQFACTRFKADYPIFDKVDVNGNNAAPIYKFLKSSKGGLFGDSIKWNFSKFLVDKEGRVVDRYAPTTSPLSIEGPRD

SEQ ID NO: 165731 - protein, 803 aa, Zea Mays
MCESSMFLMSPSPSPSPPQPSRPPPEYKHFCRVCNKGFTCGSALGGHMRAHGASDVDGFGVDDDDSLDEEPTAPARCTGADQWDVAGTSSATHAYALRANPNRLIRSCQVCKNCGKEFTSWDLFLQHGKCNSSEGGEGEEGEMDGSDSLRSSLPASEAGGGGEEDPAVAAAAWSKGKRSRRVVRTDDPSSTMVSAERCTSGDEDEELANFLVMLSSSKSNNNDDQTIVITADHHKEPVCASTGEGGGGGEPLPFQSQTISLFTQTQTQEPVVPLLPSTVAATVSQYIAPISRGVFECKACKKVFTSHQALGGHRASHKKVKGCFAARFDNNATETAINNPTIAADTNSKAVVVNNADASVDAATRVFAITSVDTDVGTSNEATSSSLSMAHAVPIRHNPASATTTTFTVAAHCKKNVKMHECSVCHRLFTSGQALGGHKRCHWLTSNTSDPCNPLAIPPLTEDLVVGEVKHHDDTLQPTVDATEPLLDLTIAANPAVALAASTMRPDIASTVHLKQLVVAAPSNNVSHRKKTAATGSHTTDAVVEEDEADSIIIKKAKISDLKDVVNMDGKAATRPLQPHAQATVKHPQATVKRNLCLLLICPKVLQVLVGGGTSASGTPCTAASSVASWPDSSYSTHSDKVQGSGSMPATLPPLIHIFQVIVLLFCRPSTRTKILLENHIVDSEISLTATVILVGADVHRDAREGVLEFERAFRERFSAYTLAAKRHIDSTTIFDVQGVIYVVFALRIYCLSYICLLFCITTSLANLYDMRPRSCHFAYACFNSSQGLTWIILERKQTLRSR

SEQ ID NO: 165732 - protein, 905 aa, Zea Mays
MEISESMDILTKRALRHISLKTVKETLDVPRISLQLLSSVGKLDFPTERLRGQWQKRQANVLEELLLFSASLEYDTSNTLRIVLSKLKSTEDWVVTVPEGRVEVLTIIERYNTKLCSLTKKFDIKDETYHWTHNYHFNFRLYEKLLCSVFDILEDGQLVEEADEILEITKLTWPILGVTEKLHHIFYAWVLFQKFSQTGEILLLKHASLQIREFRLYHDVKEIELYTNSFICSVDAYGGNKVLSLVDSVLLKINVWCRRQLGNYHAHYSKNNYSIFEATLNLVLLLVTNSSEDDFEETMFIESPVGSTPELKLIHLLIVRSIHAAYKQALISSNGRSDSEFKHPLTILANELKAVAEKECTDFSPILNKHYPEAQRVALIFLHMLYGKQLELFLERTDNSENSKEILAASNNFELFIAQKLYSVYGETVGSSFSNYLKPYMVGHFSSPLVLQWLHAQHENVLEWTKRTIEIEDWTPLSAHEKQARSVVEVFRIVEETVDQFFNTSLPLEIVHLRSLLIGITRSLEVYLLHMENQQVPGSTLLPSAPVLTRYAESMNPFAKRKLIEPTVPEEKVAMKLNNLAVPKLCVKLNTLQFIRDQLDAIEEGVKQSWVSVLSAVRLLDYLSCMASGRALSESLTSSDESVDELFTIFDDVRMTAVKITDVILNFIGTRAVFWDMRDSFIFSLYRDSVEGARMQIFIPTIDQVLDQVCDLIVDVLRDQVVLRIFQACMDGLIWVLLDGGPSRAFFETDVDLMQQDLAILKDLFIAEGQGLPIDIVEKEARQTHQILDLYMLKADAVIDMLINASDQMPHDPEATNARRRYVHDANTLLRVLCHKKDKIASTFLRIQYHLPRCSDYDDVPVKDVSSKVPIFSDMLKRGTSFNWSETGQQSFRIMKKKLQEATWQ

SEQ ID NO: 165733 - protein, 639 aa, Zea Mays
MHTINNYSIFEATLNLVLLLVTNSSEDDFEETMFIESPVGSTPELKLIHLLIVRSIHAAYKQALISSNGRSDSEFKHPLTILANELKAVAEKECTDFSPILNKHYPEAQRVALIFLHMLYGKQLELFLERTDNSENSKEILAASNNFELFIAQKLYSVYGETVGSSFSNYLKPYMVGHFSSPLVLQWLHAQHENVLEWTKRTIEIEDWTPLSAHEKQARSVVEVFRIVEETVDQFFNTSLPLEIVHLRSLLIGITRSLEVYLLHMENQQVPGSTLLPSAPVLTRYAESMNPFAKRKLIEPTVPEEKVAMKLNNLAVPKLCVKLNTLQFIRDQLDAIEEGVKQSWVSVLSAVRLLDYLSCMASGRALSESLTSSDESVDELFTIFDDVRMTAVKITDVILNFIGTRAVFWDMRDSFIFSLYRDSVEGARMQIFIPTIDQVLDQVCDLIVDVLRDQVVLRIFQACMDGLIWVLLDGGPSRAFFETDVDLMQQDLAILKDLFIAEGQGLPIDIVEKEARQTHQILDLYMLKADAVIDMLINASDQMPHDPEATNARRRYVHDANTLLRVLCHKKDKIASTFLRIQYHLPRCSDYDDVPVKDVSSKVPIFSDMLKRGTSFNWSETGQQSFRIMKKKLQEATWQ

SEQ ID NO: 165734 - protein, 568 aa, Zea Mays
MDAASMLELYRRDRRRLLSFLLSAGGGGGRALDLSRVDLDAVSADYALECVASGAHFNASEATRRYFDERRYPIMIGSSSGNSYFLLSRPMPSDSSPKEAAPSIGPQAPVQDNSSSTGQPTEPRDFFRDALSTSGIGYDTEDDKLADISPQQVNKVDILSLGLPRLTTELSDDDIRETAYEVLLASLFVSGKVHFSEEKREKKHKFLKGRRTKTEGSNPSPQVEDGYAHILDLTRVQMEISESMDILTKRALRHISLKTVKETLDVPRISLQLLSSVGKLDFPTERLRGQWQKRQANVLEELLLFSASLEYDTSNTLRIVLSKLKSTEDWVVTVPEGRVEVLTIIERYNTKLCSLTKKFDIKDETYHWTHNYHFNFRLYEKLLCSVFDILEDGQLVEEADEILEITKLTWPILGVTEKLHHIFYAWVLFQKFSQTGEILLLKHASLQIREFRLYHDVKEIELYTNSFICSVDAYGGNKVLSLVDSVLLKINVWCRRQLGNYHAHYSKNNYSIFEATLNLVLLLVTNSSEDDFEETMFIESPVGSTPELKLIHLLIVRSIHAAYKQLTL

SEQ ID NO: 165735 - protein, 899 aa, Zea Mays
MDILTKRALRHISLKTVKETLDVPRISLQLLSSVGKLDFPTERLRGQWQKRQANVLEELLLFSASLEYDTSNTLRIVLSKLKSTEDWVVTVPEGRVEVLTIIERYNTKLCSLTKKFDIKDETYHWTHNYHFNFRLYEKLLCSVFDILEDGQLVEEADEILEITKLTWPILGVTEKLHHIFYAWVLFQKFSQTGEILLLKHASLQIREFRLYHDVKEIELYTNSFICSVDAYGGNKVLSLVDSVLLKINVWCRRQLGNYHAHYSKNNYSIFEATLNLVLLLVTNSSEDDFEETMFIESPVGSTPELKLIHLLIVRSIHAAYKQALISSNGRSDSEFKHPLTILANELKAVAEKECTDFSPILNKHYPEAQRVALIFLHMLYGKQLELFLERTDNSENSKEILAASNNFELFIAQKLYSVYGETVGSSFSNYLKPYMVGHFSSPLVLQWLHAQHENVLEWTKRTIEIEDWTPLSAHEKQARSVVEVFRIVEETVDQFFNTSLPLEIVHLRSLLIGITRSLEVYLLHMENQQVPGSTLLPSAPVLTRYAESMNPFAKRKLIEPTVPEEKVAMKLNNLAVPKLCVKLNTLQFIRDQLDAIEEGVKQSWVSVLSAVRLLDYLSCMASGRALSESLTSSDESVDELFTIFDDVRMTAVKITDVILNFIGTRAVFWDMRDSFIFSLYRDSVEGARMQIFIPTIDQVLDQVCDLIVDVLRDQVVLRIFQACMDGLIWVLLDGGPSRAFFETDVDLMQQDLAILKDLFIAEGQGLPIDIVEKEARQTHQILDLYMLKADAVIDMLINASDQMPHDPEATNARRRYVHDANTLLRVLCHKKDKIASTFLRIQYHLPRCSDYDDVPVKDVSSKVPIFSDMLKRGTSFNWSETGQQSFRIMKKKLQEATWQ

SEQ ID NO: 165736 - protein, 1068 aa, Zea Mays
MIGSSSGNSYFLLSRPMPSDSSPKEAAPSIGPQAPVQDNSSSTGQPTEPRDFFRDALSTSGIGYDTEDDKLADISPQQVNKVDILSLGLPRLTTELSDDDIRETAYEVLLASLFVSGKVHFSEEKREKKHKFLKGRRTKTEGSNPSPQVEDGYAHILDLTRVQMEISESMDILTKRALRHISLKTVKETLDVPRISLQLLSSVGKLDFPTERLRGQWQKRQANVLEELLLFSASLEYDTSNTLRIVLSKLKSTEDWVVTVPEGRVEVLTIIERYNTKLCSLTKKFDIKDETYHWTHNYHFNFRLYEKLLCSVFDILEDGQLVEEADEILEITKLTWPILGVTEKLHHIFYAWVLFQKFSQTGEILLLKHASLQIREFRLYHDVKEIELYTNSFICSVDAYGGNKVLSLVDSVLLKINVWCRRQLGNYHAHYSKNNYSIFEATLNLVLLLVTNSSEDDFEETMFIESPVGSTPELKLIHLLIVRSIHAAYKQALISSNGRSDSEFKHPLTILANELKAVAEKECTDFSPILNKHYPEAQRVALIFLHMLYGKQLELFLERTDNSENSKEILAASNNFELFIAQKLYSVYGETVGSSFSNYLKPYMVGHFSSPLVLQWLHAQHENVLEWTKRTIEIEDWTPLSAHEKQARSVVEVFRIVEETVDQFFNTSLPLEIVHLRSLLIGITRSLEVYLLHMENQQVPGSTLLPSAPVLTRYAESMNPFAKRKLIEPTVPEEKVAMKLNNLAVPKLCVKLNTLQFIRDQLDAIEEGVKQSWVSVLSAVRLLDYLSCMASGRALSESLTSSDESVDELFTIFDDVRMTAVKITDVILNFIGTRAVFWDMRDSFIFSLYRDSVEGARMQIFIPTIDQVLDQVCDLIVDVLRDQVVLRIFQACMDGLIWVLLDGGPSRAFFETDVDLMQQDLAILKDLFIAEGQGLPIDIVEKEARQTHQILDLYMLKADAVIDMLINASDQMPHDPEATNARRRYVHDANTLLRVLCHKKDKIASTFLRIQYHLPRCSDYDDVPVKDVSSKVPIFSDMLKRGTSFNWSETGQQSFRIMKKKLQEATWQ

SEQ ID NO: 165737 - protein, 1127 aa, Zea Mays
MRRRCWSCIAATGAGSSASCSPPAVEAAGPSISPASTSTPSAPTTRSSASPPAPILMLRKPRGGTSTRGGTLSWPMPSDSSPKEAAPSIGPQAPVQDNSSSTGQPTEPRDFFRDALSTSGIGYDTEDDKLADISPQQVNKVDILSLGLPRLTTELSDDDIRETAYEVLLASLFVSGKVHFSEEKREKKHKFLKGRRTKTEGSNPSPQVEDGYAHILDLTRVQMEISESMDILTKRALRHISLKTVKETLDVPRISLQLLSSVGKLDFPTERLRGQWQKRQANVLEELLLFSASLEYDTSNTLRIVLSKLKSTEDWVVTVPEGRVEVLTIIERYNTKLCSLTKKFDIKDETYHWTHNYHFNFRLYEKLLCSVFDILEDGQLVEEADEILEITKLTWPILGVTEKLHHIFYAWVLFQKFSQTGEILLLKHASLQIREFRLYHDVKEIELYTNSFICSVDAYGGNKVLSLVDSVLLKINVWCRRQLGNYHAHYSKNNYSIFEATLNLVLLLVTNSSEDDFEETMFIESPVGSTPELKLIHLLIVRSIHAAYKQALISSNGRSDSEFKHPLTILANELKAVAEKECTDFSPILNKHYPEAQRVALIFLHMLYGKQLELFLERTDNSENSKEILAASNNFELFIAQKLYSVYGETVGSSFSNYLKPYMVGHFSSPLVLQWLHAQHENVLEWTKRTIEIEDWTPLSAHEKQARSVVEVFRIVEETVDQFFNTSLPLEIVHLRSLLIGITRSLEVYLLHMENQQVPGSTLLPSAPVLTRYAESMNPFAKRKLIEPTVPEEKVAMKLNNLAVPKLCVKLNTLQFIRDQLDAIEEGVKQSWVSVLSAVRLLDYLSCMASGRALSESLTSSDESVDELFTIFDDVRMTAVKITDVILNFIGTRAVFWDMRDSFIFSLYRDSVEGARMQIFIPTIDQVLDQVCDLIVDVLRDQVVLRIFQACMDGLIWVLLDGGPSRAFFETDVDLMQQDLAILKDLFIAEGQGLPIDIVEKEARQTHQILDLYMLKADAVIDMLINASDQMPHDPEATNARRRYVHDANTLLRVLCHKKDKIASTFLRIQYHLPRCSDYDDVPVKDVSSKVPIFSDMLKRGTSFNWSETGQQSFRIMKKKLQEATWQ

SEQ ID NO: 165738 - protein, 1142 aa, Zea Mays
MDAASMLELYRRDRRRLLSFLLSAGGGGGRALDLSRVDLDAVSADYALECVASGAHFNASEATRRYFDERRYPIMIGSSSGNSYFLLSRPMPSDSSPKEAAPSIGPQAPVQDNSSSTGQPTEPRDFFRDALSTSGIGYDTEDDKLADISPQQVNKVDILSLGLPRLTTELSDDDIRETAYEVLLASLFVSGKVHFSEEKREKKHKFLKGRRTKTEGSNPSPQVEDGYAHILDLTRVQMEISESMDILTKRALRHISLKTVKETLDVPRISLQLLSSVGKLDFPTERLRGQWQKRQANVLEELLLFSASLEYDTSNTLRIVLSKLKSTEDWVVTVPEGRVEVLTIIERYNTKLCSLTKKFDIKDETYHWTHNYHFNFRLYEKLLCSVFDILEDGQLVEEADEILEITKLTWPILGVTEKLHHIFYAWVLFQKFSQTGEILLLKHASLQIREFRLYHDVKEIELYTNSFICSVDAYGGNKVLSLVDSVLLKINVWCRRQLGNYHAHYSKNNYSIFEATLNLVLLLVTNSSEDDFEETMFIESPVGSTPELKLIHLLIVRSIHAAYKQALISSNGRSDSEFKHPLTILANELKAVAEKECTDFSPILNKHYPEAQRVALIFLHMLYGKQLELFLERTDNSENSKEILAASNNFELFIAQKLYSVYGETVGSSFSNYLKPYMVGHFSSPLVLQWLHAQHENVLEWTKRTIEIEDWTPLSAHEKQARSVVEVFRIVEETVDQFFNTSLPLEIVHLRSLLIGITRSLEVYLLHMENQQVPGSTLLPSAPVLTRYAESMNPFAKRKLIEPTVPEEKVAMKLNNLAVPKLCVKLNTLQFIRDQLDAIEEGVKQSWVSVLSAVRLLDYLSCMASGRALSESLTSSDESVDELFTIFDDVRMTAVKITDVILNFIGTRAVFWDMRDSFIFSLYRDSVEGARMQIFIPTIDQVLDQVCDLIVDVLRDQVVLRIFQACMDGLIWVLLDGGPSRAFFETDVDLMQQDLAILKDLFIAEGQGLPIDIVEKEARQTHQILDLYMLKADAVIDMLINASDQMPHDPEATNARRRYVHDANTLLRVLCHKKDKIASTFLRIQYHLPRCSDYDDVPVKDVSSKVPIFSDMLKRGTSFNWSETGQQSFRIMKKKLQEATWQ

SEQ ID NO: 165739 - protein, 267 aa, Zea Mays
MEISESMDILTKRALRHISLKTVKETLDVPRISLQLLSSVGKLDFPTERLRGQWQKRQANVLEELLLFSASLEYDTSNTLRIVLSKLKSTEDWVVTVPEGRVEVLTIIERYNTKLCSLTKKFDIKDETYHWTHNYHFNFRLYEKLLCSVFDILEDGQLVEFSQTGEILLLKHASLQIREFRLYHDVKEIELYTNSFICSVDAYGGNKVLSLVDSVLLKINVWCRRQLGNYHAHYSKFIESPVGSTPELKLIHLLIVRSIHAAYKQLT

SEQ ID NO: 165740 - protein, 403 aa, Zea Mays
MDAASMLELYRRDRRRLLSFLLSAGGGGGRALDLSRVDLDAVSADYALECVASGAHFNASEATRRYFDERRYPIMIGSSSGNSYFLLSRPMPSDSSPKEAAPSIGPQAPVQDNSSSTGQPTEPRDFFRDALSTSGIGYDTEDDKLADISPQQVNKVDILSLGLPRLTTELSDDDIRETAYEVLLASLFVSGKVHFSEEKREKKHKFLKGRRTKTEGSNPSPQVEDGYAHILDLTRVQMEISESMDILTKRALRHISLKTVKETLDVPRISLQLLSSVGKLDFPTERLRGQWQKRQANVLEELLLFSASLEYDTSNTLRIVLSKLKSTEDWVVTVPEGRVEVLTIIERYNTKLCSLTKKFDIKDETYHWTHNYHFNFRLYEKLLCSVFDILEDGQLVECSITSS

SEQ ID NO: 165741 - protein, 387 aa, Zea Mays
MATPRSPSPRAEAPLDSAPLLGGASGGGSRRRGGALRRPSLRGAAQLLRRGGRRAMREPSVLVREAAAEHLEERQADWAYSRPVVALDLLWNLAFITVAAVVLVLSRDEDSPMPLRTWVAGYALQCVIHMVCVAIEYRMRHGQRGGAGAAPADEERGSDGSSSSSDEDDRELDRHGRRTDYASIAKHLESANTMFSFIWWIIGFYWISAGGEEVIRDAPQLYWLCIVFLAFDVFFVVFCVALACIIGIAVCCCLPCIIAILYAVSDQEGASEDDIRQIPRYKFRRTDEPEKQDVDPMGPFGGIMTECGTNQPIEKVLAAEDASCGNSLVGTISTAPASISGFTSMQHAPCASTTFGKATVAVEVKKYECNRLTMPICLNFVPVSLLM

SEQ ID NO: 165742 - protein, 229 aa, Zea Mays
MATPRSPSPRAEAPLDSAPLLGGASGGGSRRRGGALRRPSLRGAAQLLRRGGRRAMREPSVLVREAAAEHLEERQADWAYSRPVVALDLLWNLAFITVAAVVLVLSRDEDSPMPLRTWVAGYALQCVIHMVCVAIEYRMRHGQRGGAGAAPADEERGSDGSSSSSDEDDRELDRHGRRTDYASIAKHLESANTMFSFIWWIIGFYWISAGGEEVIRDAPQLYCNSLCSI

SEQ ID NO: 165743 - protein, 562 aa, Zea Mays
MGLLSSLPPHRRGAFSGGGWQWSFLDVVWGVFLIAVVVFLALVFTPRRGDPILTTPSVARAGGTVPPCAASEVDLLPCEDPRRSSRLSREMNYYRERHCPTRGEALACLVPPPRGYRIPVPWPESLHKIWHDNMPYGKIAERKGHQGWMKHEGSYFIFPGGGTMFPDGAEQYIEKLSQYVPMKTGVIRTGLDMGCGVASFGGFLLKENIMTLSFAPRDSHKSQIQFALERGVPAFLLMLGTRRLPFPAQSFDFVHCSRCLIPFTAYSPPVRWKNQEKEWDELQAMAGALCYKLITVDGNTAIWKKPAEASCLPNQNGFGLDLCSTDYDPDEAWYFKLNKCVSKISVAEETAIGSILKWPDRLSKPSARASVINNGANLFEVDSQKWVRRVSYYKKSLGVKLGSTNIRNVMDMNAFFGGFAAAIISDPVWVMNVVPGQKPLTLGVIYDRGLIGVYHDWCEPFSTYPRTYDLIHADAIDSLISGPISGTSRCDLFDVMLEMDRILRPEGTAVIRASPDVVAKAAQIAQSIRWKAQVHDSEPESGSTEKILVATKTFWKLPLTKQ

SEQ ID NO: 165744 - protein, 165 aa, Zea Mays
MEYGYGAHEFPTSGVFEVEPKSCPGFTYRRSVWMGTTDLSRAEFRSFIENLAGKYNGNTYHLISKNCNHFTDDVCKNLTRKSISGWVNRLARVGSFFNCLLPESIQVSTVRHVPTHPAFSDDDMDSVSSSVIGDSDLEELDQHLLPSTADVHSIDVPPKLAKDLL

SEQ ID NO: 165745 - protein, 154 aa, Zea Mays
MEAQNGSGVGAPVVLNVYDLTPMNNYLYWFGLGIFHSGIEVHGMEYGYGAHEFPTSGVFEVEPKSCPGFTYRRSVWMGTTDLSRAEFRSFIENLAGKYNGNTYHLISKNCNHFTDDVCKNLTRKSISGFIFQLSSTRKHPSFHSKTRPYSSCIF

SEQ ID NO: 165746 - protein, 185 aa, Zea Mays
MEAQNGSGVGAPVVLNVYDLTPMNNYLYWFGLGIFHSGIEVHGMEYGYGAHEFPTSGVFEVEPKSCPGFTYRRSVWMGTTDLSRAEFRSFIENLAGKYNGNTYHLISKNCNHFTDDVCKNLTRKSISGWVNRLARVGSFFNCLLPESIQVSTMMIWIRYLHRLLETVIWKSWTNTFCHQLLTSIL

SEQ ID NO: 165747 - protein, 463 aa, Zea Mays
MGSSPPPLRRAGSERRSPQPAAKRRQAGEGERWKRSGAPANRICSGFFVAQPSPQRHRRRRTSDREDQEVSYGLNWAIAGKGVIVKDKVLHNLETSELQKGGATYPDFLSGIPLHVRGDVIGGVPGVSKAQFAKLLKLVTFHLSSISCLYVQDGAIGSSAECDAKVRVISDNPSAVMLLSNVLWKIPDRAISHDTSPLTIYATSSISNNVKTVLGSGTQYANGFAVADIERSSLILCGKAFADSAIVKDALTAMTAPILSARGGLPVPGWILNFGGSTVLLFAPVEIMMSCVEIHNALLSIDCGAVISSKGSTVLFPTKASREQKLLTKPTAVIIVSSDSSGAIPSVCKLSPGQAAYHFLAGYHDGKFVPAYNRAPSPADPLALASSLFSHLKEDDTPSYLINAKHSGKYIDGNGFMKLLKLALSHDLPDIKTEGSRVGELKGKYRSFLSSKFGQCLPEEFSF

SEQ ID NO: 165748 - protein, 293 aa, Zea Mays
MLLSNVLWKIPDRAISHDTSPLTIYATSSISNNVKTVLGSGTQYANGFAVADIERSSLILCGKAFADSAIVKDALTAMTAPILSARGGLPVPGWILNFGGSTVLLFAPVEIMMSCVEIHNALLSIDCGAVISSKGSTVLFPTKASREQKLLTKPTAVIIVSSDSSGAIPSVCKLSPGQAAYHFLAGYHDGKFVPAYNRAPSPADPLALASSLFSHLKEDDTPSYLINAKHSGKYIDGNGFMKLLKLALSHDLPDIKTEGSREIGLYYSVGSLRSRFPVTTKWSKAALHHSAVS

SEQ ID NO: 165749 - protein, 262 aa, Zea Mays
MLLSNVLWKIPDRAISHDTSPLTIYATSSISNNVKTVLGSGTQYANGFAVADIERSSLILCGKAFADSAIVKDALTAMTAPILSARGGLPVPGWILNFGGSTVLLFAPVEIMMSCVEIHNALLSIDCGAVISSKGSTVLFPTKASREQKLLTKPTAVIIVSSDSSGAIPSVCKLSPGQAAYHFLAGYHDGKFVPAYNRAPSPADPLALASSLFSHLKEDDTPSYLINAKHSGKYIDGNGFMKLLKLALSHDLPDIKTEGSRG

SEQ ID NO: 165750 - protein, 288 aa, Zea Mays
MLLSNVLWKIPDRAISHDTSPLTIYATSSISSNNVKTVLGSGTQYANGFAVADIERSSLILCGKAFADSAIVKDALTAMTAPILSARGGLPVPGWILNFGGSTVLLFAPVEIMMSCVEIHNALLSIDCGAVISSKGSTVLFPTKASREQKLLTKPTAVIIVSSDSSGAIPSVCKLSPGQAAYHFLAGYHDGKFVPAYNRAPSPADPLALASSLFSHLKEDDTPSYLINAKHSGKYIDGNGFMKLLKLALSHDLPDIKTEGSRVGELKGKYRSFLSSKFGQCLPEEFSF

SEQ ID NO: 165751 - protein, 151 aa, Zea Mays
MLLSNVLWKIPDRAISHDTSPLTIYATSSISNNVKTVLGSGTQYANGFAVADIERSSLILCGKAFADSAIVKDALTAMTAPILSARGGLPVPGWILNFGGSTVLLFAPVEIMMSCVEIHNALLSIDCGAVISSKGSTVLFPTKLWRHTICM

SEQ ID NO: 165752 - protein, 206 aa, Zea Mays
MDGHLENYTSDYTLQVLVGYCAVYIFMQTFMIPGTIFMSLLAGALFGQLRGVALVVFAATAGASSCYFLSKMIGKPLVFTLWPDKLSFFQRQGDPNIAKYLHQLGFTDSRCPLPHILTGNSHWPYPSFLCDCQGWNRSWRINFAKRPLRHPVDSAAIPDRCCFSHTSIVGQGRGTRKTIRNGCRRVVITKAPSTCTYQHAAMQWLH

SEQ ID NO: 165753 - protein, 165 aa, Zea Mays
MPICPMIICTQVVCILLMDGHLENYTSDYTLQVLMIGKPLVFTLWPDKLSFFQRQVAKRREKLLNYMLFLRVTPTLPNTFINLASPIVDVPYHIFLLGTLIGLIPASYVTVRAGIALGELTSLSDLYDTQSIALLFLIGVVSVTPALLGKDEAQEKPSEMAVGAS

SEQ ID NO: 165754 - protein, 221 aa, Zea Mays
MGRDERFPVWEAALGAGVAAAFAAGLVGVYLSMPDSDYSFLKLPRNLQELQILTGHLENYTSDYTLQLRGVALVVFAATAGASSCYFLSKMIGKPLVFTLWPDKLSFFQRQVAKRREKLLNYMLFLRVTPTLPNTFINLASPIVDVPYHIFLLGTLIGLIPASYVTVRAGIALGELTSLSDLYDTQSIALLFLIGVVSVTPALLGKDEAQEKPSEMAVGAS

SEQ ID NO: 165755 - protein, 549 aa, Zea Mays
MASTHVYKKNYRCDRSLQQFYTGGPFAVGLAPGGDGEGGAEAEAFLACACGGEVRVVSAADASAIGEPVDGDSEAITALALSPDSRLIFAAGHSRLIRVWDLASRTCIRSWKGHDGPIMAMACHASGGLLATAGADKKVCVWDVDGGFCTHFLRGHMGVVTTIMFHKDPKRLLLFSGSEDGTVRVWNLETKKCVAVLKEHFSAVTSLALSDDGQTLLSAGRDKIVTAWDIRKYSSKKTIPTYEMIEAVSFIGSGSELLACLGIELANIKEKSAGYFLTVGERGVVRVWCLESCVCVFEQQTSDVTVNSENEETRRGFTSAVMLPNDQGLLCVTADQQFLFYCPKRTDDGDFELSLYRRLIGYNDEILDLKFIGEEEQYLAVATNLEQVRVYDVASMSCSYVLAGHTEIVVCIDTCVSASGKTLVVTGSKDHTVRLWDAERKGCIGIGKGHLGAVGSVAFSKKTNNFFVSGSSDRTIKVWTWDDALGDAEDEVPLKAKAVVAAHDKDINSLAISPNDGLVCSGSEDRTACIWKLPNLVLSVVLKGHKRGI

SEQ ID NO: 165756 - protein, 153 aa, Zea Mays
MLHHFLNTLSRIRLTPHASPRLRPGNSHPPPKPPTDLRPPLGRLYGRSPQPGRPRRLRGFAHLPSRGPPRPPPTVDPRPAVQSTPDLRLRPLPGRPYSRRPQPRLRPPDSAPPPGVLRHSARPPRAAAAAAGERLSSLSYCPVHALGSGACSV

SEQ ID NO: 165757 - protein, 55 aa, Zea Mays
MQSGDELSQVAYITFKDNQGAETAMLLTVYLLSHLKVLEDSNYFSWIDDSLSVLS

SEQ ID NO: 165758 - protein, 338 aa, Zea Mays
MFKIKAKAESGDGYTRLAPLRFESPSGQLLIQILQSHPHLIPATVDQQLENLQSEKSAQSEEASKVPQDLLYKRIAEVKEKERQNALEEIIYCWVTYRFMENDIYMTPALSPGGGPVRDISALPNQEDKLRNIHSADAFEMIQNHLNLIMGEKIASPPDTVVEISNLNLGKLYAASIMYGYFLKRVDERFQLEKTMKTLPPKPNQQIVFENLQPNPFWDMESLVQITPDGEEISLDDEKSNPNKLRSYVSQLDADTLQRYATIRSKEAVSLIEKQTQALFGRPDIKVLDDGSVNAKDGRMITITFTELNHLVLEAVAFGSFLWEAESYVESKYHFVNS

SEQ ID NO: 165759 - protein, 198 aa, Zea Mays
MIQNHLNLIMGEKIASPPDTVVEISNLNLGKLYAASIMYGYFLKRVDERFQLEKTMKTLPPKPNQQIVFENLQPNPFWDMESLVQITPDGEEISLDDEKSNPNKLRSYVSQLDADTLQRYATIRSKEAVSLIEKQTQALFGRPDIKVLDDGSVNAKDGRMITITFTELNHLVLEAVAFGSFLWEAESYVESKYHFVNS

SEQ ID NO: 165760 - protein, 88 aa, Zea Mays
MIFFLRPVQLLYMLLWRYPFWTFLVLVTSLINARCNQLLCCSFQSAVAVTVSATPFCGCVPPHDQLGRRILESSSTGCFCYHTGSVLF

SEQ ID NO: 165761 - protein, 115 aa, Zea Mays
MAMGLINANPIIHEKKERRARQAPETTDENAAEPIDQLEIFDHIRDIKDPEHPYSLEQLNVVTEDSIELNDESNYVRVTFTPTVEHCSMATIIGLCIRVKLVRSLPPRYKGRSQL

SEQ ID NO: 165762 - protein, 156 aa, Zea Mays
MDRFPRSRSGSQLATKQCMRGGPTLPEFFFLVKSYCIHFTVMAMGLINANPIIHEKKERRARQAPETTDENAAEPIDQLEIFDHIRDIKDPEHPYSLEQLNVVTEDSIELNDESNYVRVTFTPTVEHCSMATIIGLCIRVKLVRSLPPRYKGRSQL

SEQ ID NO: 165763 - protein, 617 aa, Zea Mays
MCTFSNHESMVYCEMCGVFRETFVKSAKDGLLKAVAVSSEPRTSAASKNDSAKAPVKTRAVNSDGDSMRKHASMSYDKANSTQLPSAGSSLGAEKKKKTPVLSEEVPVERIALLASDGFQSKGNQNSGASSSSQNDNVIQKLSSDVGQLNVNKNNVNVTKSCLPDEYKPEKWMLADLESRALSQLNLAIVGHVDSGKSTLSGRLLHLLGRISKKYMHKNEKESKEKGKGSFAFAWAMDESSEERERGVTMTVAVAYLETKKFRVVLLDSPGHKDFVPNMISGATQADAAILVVDASTGSFEAGMDGEGGKSVGQTKEHAQLVRSFGVEQLVVAVNKMDAVDYAKERFDFIKLQLGSFLRSCNFKDSAITWIPLSAVENQNLIKAPSDARLTSWYQGFCLLDAIDFLQLPSRDVSKPLIIPICDVIKSQSTGQLAAYGKLETGAIQIGSKVLVLPSGQEATVKAIERDSNSCTVARAGDNVAICLQGIDGKQLIPGGVLCHPGFPVPVANHLELKVLVLDITTPILVGSQVEFHIHHVKEAARVTKIVALLDKTGKPSKSAPRFLKSKQNSVIQVTLDGAVCVQEFSKSRALGRAYLRSAGRTIAVGVVNRIIGQDQN

SEQ ID NO: 165764 - protein, 228 aa, Zea Mays
MCTFSNHESMVYCEMCGVFRETFVKSAKDGLLKDTAVAVSSEPRTSAASKNDSAKAPVKTRAVNSDGDSMRKHASMSYDKANSTQLPSAGSSLGAEKKKKTPVLSEEVPVERIALLASDGFQSKGNQNSGASSSSQNDNVIQKLSSDVGQLNVNKNNVNVTKSCLPDEYKPEKWMLADLESRALSQLNLAIVGHVDSGKSTLSGRLLHLLGRISKKYMHKNEKESKEK

SEQ ID NO: 165765 - protein, 583 aa, Zea Mays
MCTFSNHESMVYCEMCGVFRETFVKSAKDGLLKDTAVAVSSEPRTSAASKNDSAKAPVKTRAVNSDGDSMRKHASMSYDKANSTQLPSAGSSLGAEKKKKTPVLSEEVPVERIALLASDGFQSKGNQNSGASSSSQNDNVIQKLSSDVGQLNVNKNNVNVTKSCLPDEYKPEKWMLADLESRALSQLNLAIVGHVDSGKSTLSGRLLHLLGRISKKYMHKNEKESKEKGKGSFAFAWAMDESSEERERGVTMTVAVAYLETKKFRVVLLDSPGHKDFVPNMISGATQADAAILVVDASTGSFEAGMDGEGGKSVGQTKEHAQLVRSFGVEQLVVAVNKMDAVDYAKERFDFIKLQLGSFLRSCNFKDSAITWIPLSAVENQNLIKAPSDARLTSWYQGFCLLDAIDFLQLPSRDVSKPLIIPICDVIKSQSTGQLAAYGKLETGAIQIGSKVLVLPSGQEATVKAIERDSNSCTVARAGDNVAICLQGIDGKQLIPGGVLCHPGFPVPVANHLELKVLVLDITTPILVGSQVEFHIHHVKEAARVTKIVALLDKTGKPRILQEPSSWEGILEVGWAHHCCWRC

SEQ ID NO: 165766 - protein, 412 aa, Zea Mays
MCTFSNHESMVYCEMCGVFRETFVKSAKDGLLKDTAVAVSSEPRTSAASKNDSAKAPVKTRAVNSDGDSMRKHASMSYDKANSTQLPSAGSSLGAEKKKKTPVLSEEVPVERIALLASDGFQSKGNQNSGASSSSQNDNVIQKLSSDVGQLNVNKNNVNVTKSCLPDEYKPEKWMLADLESRALSQLNLAIVGHVDSGKSTLSGRLLHLLGRISKKYMHKNEKESKEKGKGSFAFAWAMDESSEERERGVTMTVAVAYLETKKFRVVLLDSPGHKDFVPNMISGATQADAAILVVDASTGSFEAGMDGEGGKSVGQTKEHAQLVRSFGVEQLVVAVNKMDAVDYAKERFDFIKLQLGSFLRSCNFKDSAITWIPLSAVENQNLIKAPSDARLTSWTIGSLWKIGNWSHPNWF

SEQ ID NO: 165767 - protein, 591 aa, Zea Mays
MCTFSNHESMVYCEMCGVFRETFVKSAKDGLLKDTAVAVSSEPRTSAASKNDSAKAPVKTRAVNSDGDSMRKHASMSYDKANSTQLPSAGSSLGAEKKKKTPVLSEEVPVERIALLASDGFQSKGNQNSGASSSSQNDNVIQKLSSDVGQLNVNKNNVNVTKSCLPDEYKPEKWMLADLESRALSQLNLAIVGHVDSGKSTLSGRLLHLLGRISKKYMHKNEKESKEKGKGSFAFAWAMDESSEERERGVTMTVAVAYLETKKFRVVLLDSPGHKDFVPNMISGATQADAAILVVDASTGSFEAGMDGEGGKSVGQTKEHAQLVRSFGVEQLVVAVNKMDAVDYAKESAVENQNLIKAPSDARLTSWYQGFCLLDAIDFLQLPSRDVSKPLIIPICDVIKSQSTGQLAAYGKLETGAIQIGSKVLVLPSGQEATVKAIERDSNSCTVARAGDNVAICLQGIDGKQLIPGGVLCHPGFPVPVANHLELKVLVLDITTPILVGSQVEFHIHHVKEAARVTKIVALLDKTGKPSKSAPRFLKSKQNSVIQVTLDGAVCVQEFSKSRALGRAYLRSAGRTIAVGVVNRIIGQDQN

SEQ ID NO: 165768 - protein, 419 aa, Zea Mays
MCTFSNHESMVYCEMCGVFRETFVKSAKDGLLKDTAVAVSSEPRTSAASKNDSAKAPVKTRAVNSDGDSMRKHASMSYDKANSTQLPSAGSSLGAEKKKKTPVLSEEVPVERIALLASDGFQSKGNQNSGASSSSQNDNVIQKLSSDVGQLNVNKNNVNVTKSCLPDEYKPEKWMLADLESRALSQLNLAIVGHVDSGKSTLSGRLLHLLGRISKKYMHKNEKESKEKGKGSFAFAWAMDESSEERERGVTMTVAVAYLETKKFRVVLLDSPGHKDFVPNMISGATQADAAILVVDASTGSFEAGMDGEGGKSVGQTKEHAQLVRSFGVEQLVVAVNKMDAVDYAKERFDFIKLQLGSFLRSCNFKDSAITWIPLSAVENQNLIKAPSDARLTSCLSQQDNWQLMENWKLEPSKLVLRC

SEQ ID NO: 165769 - protein, 63 aa, Zea Mays
MFVLLLPLLKTSDHSYCILPRIASFVLLQIFSTWQGEVSRSSLDPLSSVCLDMTLSCTFQCCT

SEQ ID NO: 165770 - protein, 82 aa, Zea Mays
MWSDMYARSVATAWAPRRTATSAPSVASPCAAPATSTIARMTPRRARSARPTSATKVSRSSLDPLSSVCLDMTLSCTFQCCT

SEQ ID NO: 165771 - protein, 88 aa, Zea Mays
MRTNSAFSFGWFFLCYLIHIGFCIIAAIAPPIVFHGKSLTGILAAIDTFSEHVIIGIFYFVGFALFCLETLLSIGVLQKVYMYFRGNK

SEQ ID NO: 165772 - protein, 192 aa, Zea Mays
MGDSRSKVKELSSWESDLKRREADIKRREEALKNAGVPMEEKNWPPFFPIIHHDIANEIPANVQKLQYLAFASWLGIVLCLSWNFVAVIVCWIKEGDSKLFFLATIYALLGIPLSYLIWYRPLYRAMRTNSAFSFGWFFLCYLIHIGFCIIAAIAPPIVFHGKSLTGILAAIDTFSEHVIIGKVYMYFRGNK

SEQ ID NO: 165773 - protein, 176 aa, Zea Mays
MEEKNWPPFFPIIHHDIANEIPANVQKLQYLAFASWLGIVLCLSWNFVAVIVCWIKEGDSKLFFLATIYALLGIPLSYLIWYRPLYRAMRTNSAFSFGWFFLCYLIHIGFCIIAAIAPPIVFHGKSLTGILAAIDTFSEHVIIGIFYFVGFALFCLETLLSIGVLQKVYMYFRGNK

SEQ ID NO: 165774 - protein, 184 aa, Zea Mays
MGDSRSKVKELSSWESDLKRREADIKRREEALKNAGVPMEEKNWPPFFPIIHHDIANEIPANVQKLQYLAFASWLGIVLCLSWNFVAVIVCWIKEGDSKLFFLATIYALLGIPLSYLIWYRPLYRAMRTNSAFSFGWFFLCYLIHIGFCIIAAIAPPIVFHGKSLTGILAAIDTFSEHVIIGVS

SEQ ID NO: 165775 - protein, 217 aa, Zea Mays
MGDSRSKVKELSSWESDLKRREADIKRREEALKNAGVPMEEKNWPPFFPIIHHDIANEIPANVQKLQYLAFASWLGIVLCLSWNFVAVIVCWIKEGDSKLFFLATIYALLGIPLSYLIWYRPLYRAMRTNSAFSFGWFFLCYLIHIGFCIIAAIAPPIVFHGKSLTGILAAIDTFSEHVIIGIFYFVGFALFCLETLLSIGVLQACLRGGVIGQRGM

SEQ ID NO: 165776 - protein, 207 aa, Zea Mays
MGDSRSKVKELSSWESDLKRREADIKRREEALKNAGVPMEEKNWPPFFPIIHHDIANEIPANVQKLQYLAFASWLGIVLCLSWNFVAVIVCWIKEGDSKLFFLATIYALLGIPLSYLIWYRPLYRAMRTNSAFSFGWFFLCYLIHIGFCIIAAIAPPIVFHGKSLTGILAAIDTFSEHVIIGIFYFVGFALFCLETLLSIGVLQMGP

SEQ ID NO: 165777 - protein, 148 aa, Zea Mays
MGDSRSKVKELSSWESDLKRREADIKRREEALKNAGVPMEEKNWPPFFPIIHHDIANEIPANVQKLQYLAFASWLGIVLCLSWNFVAVIVCWIKEGDSKLFFLATIYALLGIPLSYLIWYRPLYRAMRTNSAFSFGWFFLCYLMMSFF

SEQ ID NO: 165778 - protein, 60 aa, Zea Mays
MSRSRRQRCQRGQRWSRLEKGLRRPRSRWLPRPRRCNSGGWSLARSSAIGTNPGVTLPRP

SEQ ID NO: 165779 - protein, 95 aa, Zea Mays
MSMHMMSCQVLVSSNTRDVTSTISSVSNILHRSGLPYNLDLELYFWSGVFCCCPKLYKIQSFLNSLKVVQRIDHCRPTAHGPCKLPTQGISQIQM

SEQ ID NO: 165780 - protein, 326 aa, Zea Mays
MGWGTVVYEGAVVGSSLVGLGWAGLWFLNRRLYKEYEERRVLVQILFGLVFAFSCNLFELVLFEILPVLSKHARFLNWHLDLFCLILLLVFVLPYYHCYLLLRNSGMRRDRAWLVAALFLLVFLYGFWRMGIHFPMPSPEKGFFTMPQLVSRIGVIGVSVMAVLSGFGAVNLPYSYLSLFIREIDETDIKTLERQLMQSIETCTAKKKKIILSQMEMERIQGSEEKLKARSFLKRIVGTVVRSVQEDQTEQDIKNLEAEVQALEELSKQLFLEIYELRQAKIAAAYSRTWRGHLQNLLGYALSVYCVYKMLKSLQSVVFKEALLIL

SEQ ID NO: 165781 - protein, 321 aa, Zea Mays
MGWGTVVYEGAVVGSSLVGLGWAGLWFLNRRLYKEYEERRVLVQILFGLVFAFSCNLFELVLFEILPVLSKHARFLNWHLDLFCLILLLVFVLPYYHCYLLLRNSGMRRDRAWLVAALFLLVFLYGFWRMGIHFPMPSPEKGFFTMPQLVSRIGVIGVSVMAVLSGFGAVNLPYSYLSLFIREIDETDIKTLERQLMQSIETCTAKKKKIILSQMEMERIQGSEEKLKARSFLKRIVGTVVRSVQEDQTEQDIKNLEAEVQALEELSKQLFLEIYELRQAKIAAAYSRTWRGHLQNLLGYALSVYCVYKMLKVLLQIALVI

SEQ ID NO: 165782 - protein, 294 aa, Zea Mays
MGWGTVVYEGAVVGSSLVGLGWAGLWFLNRRLYKEYEERRVLVQILFGLVFAFSCNLFELVLFEILPVLSKHARFLNWHLDLFCLILLLVFVLPYYHCYLLLRNSGMRRDRAWLVAALFLLVFLYGFWRMGIHFPMPSPEKGFFTMPQLVSRIGVIGVSVMAVLSGFGAVNLPYSYLSLFIREIDETDIKTLERQLMQSIETCTAKKKKIILSQMEMERIQGSEEKLKARSFLKRIVGTVVRSVQEDQTEQDIKNLEAEVQALEELSKQLFLEIYELRQAKVFLCVQCMISNYQ

SEQ ID NO: 165783 - protein, 523 aa, Zea Mays
MEGQPLHLLIAQFHHPCLRGLIPNYPTHYLPTSRLRLRVQRRKPKQLAAVPSRRPSGSQADAPGLVPVPNTVAALVLQLTVCSLLFLFPNRARALALPPPPGAAAVVEATQEEEEEDQEWEAALQKWKTKTYALSVPLRVVALRGSFPPSWIKDFVEAQGKRLKFSPELRANLDGIFSEMSQCMDKGQVQPKSAMAADVVSLGDSWLGYAIRKGLLEPIKNAEEQDWFHSLSDRWKNGEADPNGTIWGVPYRWGTMVIAYKKDKFKRHNLKPIQDWEDLWRPELAGRISMVDSPREVIGAVLKHLGSSYNTVDMEMDVNGGRAAVLNSFTQLQKQVQLFDSMNYLKSFSVGDVWVAVGWSSDVIPAAKRMSNVAVVVPKSGSSLWADLWAIPCATRFQTDQIGSRARGPSPLVHQWFDFCLQSARSLPFRQDVIPGASPLHLESPVPEVPQDKNKRKPKLDTNLVRGVPPPEILERCEFLEPLSGKALEDYQWLMSRVQRPRLGLFGNMLQKMSAVLDFKRRS

SEQ ID NO: 165784 - protein, 311 aa, Zea Mays
MRLSHDRGIRLSPGSLGPMSVGASPSQFTPPNYHMQIPANSTGTHGSGSPASGVIHGSPLGKAAAVGPYNMRRNLPMPPHDYVSQHGQGRFRDGVSFSHSDACAQGHTGHSHNAAVPSSYHSGWRPKIGSRSGISLEASSSHVPSKAPSQSFDFSASSTLDPANWDPNYSDESLLQEDNSLSADLSSNLHFGDATGQDHIFATSNPVPTNQRGDQLFHVSSQGVSAHSSVLINYGGYNPQNYPQQNARPRHGQPILHQRYNQATSSPMRPMGSHHNGQPAWPSSFGMGDGVPWGGTRGHSFTTRKDYGSIF

SEQ ID NO: 165785 - protein, 751 aa, Zea Mays
MSNRRFIVKEMLGQGTFGQVVKCWDTETNDYVAVKVIKNQPAFYHQAIMEVSLLRTLNQKFDPDDQHNIVRMLDYLSFQNHLCIAFEMLGQNLYELLKRNHLRGLKLKYVQAFSKQILDAMVVMREAGIIHCDLKPENILLAPSVATAAAVKVIDFGSACLEGKTVYSYIQSRYYRSPEVLLGYPYTTAIDMWSFGCIVAELFLGLPLFPGATEYDVLQRMVKILGGQPPDELLREAKNTVRFFKHVGSIYAGNAAPIGLSSAYRILSEEEVEARDSKRQKMGKWYFPHLKLDRLICTYPWNNSELAETEKTDRLGLVDFLKGLLEFDPNKRWSPLQALHHPFITGESFTGPYEPIPETARIPVARAAAIDHNPGGGHWLHSGLSPQVGSVNRYLPLNNVYPPKVPFSYGSSYGSFGSHGSYTGSSGLTQIGPSPDVRLRMRLSHDRGIRLSPGSLGPMSVGASPSQFTPPNYHMQIPANSTGTHGSGSPASGVIHGSPLGKAAAVGPYNMRRNLPMPPHDYVSQHGQGRFRDGVSFSHSDACAQGHTGHSHNAAVPSSYHSGWRPKIGSRSGISLEASSSHVPSKAPSQSFDFSASSTLDPANWDPNYSDESLLQEDNSLSADLSSNLHFGDATGQDHIFATSNPVPTNQRGDQLFHVSSQGVSAHSSVLINYGGYNPQNYPQQNARPRHGQPILHQRYNQATSSPMRPMGSHHNGQPAWPSSFGMGDGVPWGGTRGHSFTTRKDYGSIF

SEQ ID NO: 165786 - protein, 58 aa, Zea Mays
MKGNWIAETKEKKTRTFVDHQIFKDPIKPIARSITMVTGMYSQTCSAYSSHRQSLRKK

SEQ ID NO: 165787 - protein, 943 aa, Zea Mays
MLKTDTQKGISGDDSDLLARKNAFGSNTYPRKKGRSFLAFVWDACKDLTLIILMVAAAVSLALGITTEGIKEGWYDGASIAFAVLLVVFVTAISDYKQSLQFQNLNEEKQNIRLEVVRGGRRITVSIYDLVVGDVVPLKIGDQVPTDGILISGHSLSIDESSMTGESKIVHKDQKSPFLMSGCKVADGYGTMLVTAVGINTEWGLLMASISEDSGEETPLQVRLNGVATFIGMVGLSVALAVLVVLLARYFTGHTYNPDGSVQYVKGNMGVGQTIRGIVKIFTVAVTIVVVAVPEGLPLAVTLTLAFSMRKMMKDKALVRRLSACETMGSATTICSDKTGTLTLNQMTVVEAYFGGKKMDSPDNAQMLSADVTSLIVEGIAQNTSGSIFEPEQGGQEPEVTGSPTEKAILSWGLKLGMKFSETRSKSSILHVFPFNSEKKRGGVAVYLAGSEVHIHWKGAAEIILDSCTSWVDTGGSKHSMTPEKVAEFKKFIEDMAAASLRCVAFAYRTHEMDDVPDEDRREEWQLPEDNLIMLGIVGIKDPCRPGVRDSVRLCQAAGIKVRMVTGDNLQTARAIALECGILDDPNVSEPVIIEGKTFRALSDLEREDAAEKISVMGRSSPNDKLLLVKALRARGHVVAVTGDGTNDAPALHEADIGLSMGIQGTEVAKESSDIIILDDNFASVVRVVRWGRSVYANIQKFIQFQLTVNVAALIINVVAAVSSGNVPLNAVQLLWVNLIMDTLGALALATEPPTNHLMERPPVGRREPLVTNIMWRNLIIMATFQVSVLLSLNFKGISLLQLKNDDPAHADKVKNTFIFNTFVLCQVFNEFNSRKPDELNIFKGISGNHLFIGIIVITVILQALIVEFLGKFASTVRLSWQLWLVSIGLAFFSWPLAFVGKLIPIPKRPLGEFFACCCNCKGSKQGPDDATSNGKEDNKLEP

SEQ ID NO: 165788 - protein, 705 aa, Zea Mays
MTGESKIVHKDQKSPFLMSGCKVADGYGTMLVTAVGINTEWGLLMASISEDSGEETPLQVRLNGVATFIGMVGLSVALAVLVVLLARYFTGHTYNPDGSVQYVKGNMGVGQTIRGIVKIFTVAVTIVVVAVPEGLPLAVTLTLAFSMRKMMKDKALVRRLSACETMGSATTICSDKTGTLTLNQMTVVEAYFGGKKMDSPDNAQMLSADVTSLIVEGIAQNTSGSIFEPEQGGQEPEVTGSPTEKAILSWGLKLGMKFSETRSKSSILHVFPFNSEKKRGGVAVYLAGSEVHIHWKGAAEIILDSCTSWVDTGGSKHSMTPEKVAEFKKFIEDMAAASLRCVAFAYRTHEMDDVPDEDRREEWQLPEDNLIMLGIVGIKDPCRPGVRDSVRLCQAAGIKVRMVTGDNLQTARAIALECGILDDPNVSEPVIIEGKTFRALSDLEREDAAEKISVMGRSSPNDKLLLVKALRARGHVVAVTGDGTNDAPALHEADIGLSMGIQGTEVAKESSDIIILDDNFASVVRVVRWGRSVYANIQKFIQFQLTVNVAALIINVVAAVSSGNVPLNAVQLLWVNLIMDTLGALALATEPPTNHLMERPPVGRREPLVTNIMWRNLIIMATFQVSVLLSLNFKGISLLQLKNDDPAHADKVKNTFIFNTFVLCQVLRFSFYAYKRSFCLFFVYCNSGALYNKCSSGLTCAFLSC

SEQ ID NO: 165789 - protein, 371 aa, Zea Mays
MESLSSGGELARRQSSGGGSSGWGSFSGDADPFDIPAKGAPLERLRKWRQAALVLNASRRFRYTLDLKKEEQKEEIRRKIRAQAHVIRAAFRFKEAGRIHVQSEETKVPCADGALGFGIKEDQITALTRDHNYSGLQQYGGVSGVAHMLKTDTQKGISGDDSDLLARKNAFGSNTYPRKKGRSFLAFVWDACKDLTLIILMVAAAVSLALGITTEGIKEGWYDGASIAFAVLLVVFVTAISDYKQSLQFQNLNEEKQNIRLEVVRGGRRITVSIYDLVVGDVVPLKIGDQVPTDGILISGHSLSIDESSMTGESKIVHKDQKSPFLMSGCKVADGYGTMLAPAEPLQLHEHMLNGTARLHWSLPTLLNCIK

SEQ ID NO: 165790 - protein, 115 aa, Zea Mays
MTKAPDRRFHNNDRQRAGAARDGQCLSASRRMATGTGSQQRRRTCARDRGKSPLASSPLCCVHLSPSLLGSTSKLLVYCSKERVQLLLTGRSDDFRLLLTVECGPIRDSSVENLR

SEQ ID NO: 165791 - protein, 424 aa, Zea Mays
MGSRFASHQLSNGLYVSGRPEQPKEKAPTICSTAMPYTGGDIKKSGELGKMFDLHVEKSRKSGPLGNAPSRNTSFGGAASNSGPVSNAGGRSNYSGSLSSSVPGAGGSARAKSNSGPLNKHGEPTKRSSGPQSGGVTPMARQNSGPLPPVLPTTGLITSGPISSGPLNSSGVPRKVSGPLDSAASMKMRATSFAHNQAVTNLNTEDGYSIQGSFPKPILWAVILLFVMGFIAGGFILGAVHNAILLIVVVVIFGFVAALLIWNACWGSRGAVGFVNRYPDADLRTAKDGQYVKVTGVVTCGNFPLESSFQRVPRCVYTSTSLYEYRGWDSKAANTEHRRFTWGLRSMERHAVDFYISDFQSGLRALVKTGYGARVTPYVDESVIIDINPDNKDMSPDFLRWLRERNLSSDDRTMRLKEGLRFLD

SEQ ID NO: 165792 - protein, 295 aa, Zea Mays
MARRSSSSSSGAWRYLNPAYYLKRPKRLALLFFIFVAATFAFWDRQSLVSEYESEISRLEDDINRLHDQLRRAGVHLDENPVISNKNSRKNPVEIDHVNNERREKVKEAMLHAWNSYVKYAWGMDELQPQSKDGINSFGGLGATLVDSLDTLYIMGLKDEFQKARDWVAESLDFDKDYDASVFETTIRVVGGLLSAYDLSGDKVFLDKAKDITDRLLPAWDTTSGIPYNRINLAHGRAHNPGWTNGDSILADSGTEQLEFIALSQRTGDPKYQQKRTSSHSFRRYIPVMVCFLFT

SEQ ID NO: 165793 - protein, 357 aa, Zea Mays
MGSRFASHQLSNGLYVSGRPEQPKEKAPTICSTAMPYTGGDIKKSGELGKMFDLHVEKSRKSGPLGNAPSRNTSFGGAASNSGPVSNAGGRSNYSGSLSSSVPGAGGSARAKSNSGPLNKHGEPTKRSSGPQSGGVTPMARQNSGPLPPVLPTTGLITSGPISSGPLNSSGVPRKVSGPLDSAASMKMRATSFAHNQAVTNLNTEDGYSIQGSFPKPILWAVILLFVMGFIAGGFILGAVHNAILLIVVVVIFGFVAALLIWNACWGSRGAVGFVNRYPDADLRTAKDGQYVKVTGVVTCGNFPLESSFQRVPRCVYTSTSLYEYRGWDSKAANTEHRRFTWGLRSMEIFSPGFEHW

SEQ ID NO: 165794 - protein, 425 aa, Zea Mays
MGSRFASHQLSNGLYVSGRPEQPKEKAPTICSTAMPYTGGDIKKSGELGKMFDLHVEKSRKSGPLGNAPSRNTSFGGAASNSGPVSNAGGRSNYSGSLSSSVPGAGGSARAKSNSGPLNKHGEPTKRSSGPQSGGVTPMARQNSGPLPPVLPTTGLITSGPISSGPLNSSGVPRKVSGPLDSAASMKMRATSFAHNQAVTNLNTEDGYSIQGSFPKPILWAVILLFVMGFIAGGFILGAVHNAILLIVVVVIFGFVAALLIWNACWGSRGAVGFVNRYPDADLRTAKDGQYVKVTGVVTCGNFPLESSFQRVPRCVYTSTSLYEYRGWDSKAANTEHRRFTWGLRSMERHAVDFYISDFQSGLRALVKTGYGARVTPYVDESVIIDINPDNKDMSPDFLRWLRERNLSSDDRTMRLKEGYRSKKK

SEQ ID NO: 165795 - protein, 85 aa, Zea Mays
MARLFAARALTLARPSAAPSALRFCPSRALSDKVDFIEIDLSEESPSSSSGGGGIELHYRAGVAIRGVLCGRLLLKRQLGTVKVF

SEQ ID NO: 165796 - protein, 318 aa, Zea Mays
MKLHQVWQLGVKDMKAVPLPRPRSAPKRPRELTDEERASRVVFRQILTTPPVLSKNSKIAFMFLTPGTLPFERLWEKFFEGHEGRYTIYIHASREKPEHVSPIFVGREIHSEKVTWGKISMVDAERRLMANALQDIDNQHFVLLSDSCVPLHSFDYVYDYLMGANLSFIDCFYDPGPHGNFRYSQNMLPEVTETDFRKGSQPGMEDGRNCYADEHYLPTVFRMMDPDGIANWSVTHVDWSEGKWHPKAYRAKHVNLELLKNIASIDVSHHVTSDGKKVVTENPCLWNGAKRPCYLFARKFYPESINNLLTLFANYTLI

SEQ ID NO: 165797 - protein, 66 aa, Zea Mays
MPLFEFSYLCLHKQVLHKHLNPHLCSSSAMSSLYYRCADPIQFSEYVDNLNLVQAIPSLYYRCLTR

SEQ ID NO: 165798 - protein, 54 aa, Zea Mays
MLPFILKRGQYTLLVVVVHKKLEKFLQAGSCEDCYLVTNNVSDCCGLGTRFTSR

SEQ ID NO: 165799 - protein, 671 aa, Zea Mays
MRDDTSTPNGTAHSVDPNEVAHADRLEKIKGILSGETSIQLALQFLYSHNRSDLLILKTIKQAVEMRNSVCHSATICANAIMHAGTTVDTFLRENLEWLSRATNWAKFSATAGLGVIHRGHLQQGRALMAPYLPQSGAVGGGSPYSEGGALYALGLIHANHGEGIKQFLRESLRNSSAEVIQHGACLGLGLAALGTADEEIYEDIKNVLYTDSAVAGEAAGIGMGLLMVGTASEKASEMLAYAHDTQHEKIIRGLSLGIALTVYGREEEADTLIEQMTRDQDPILRYGDVSDDVRRTAVMALGFVLYNEPEQTPRIVSLLSESYNPHVRYGAALAVGISCAGSGLSDAISLLEPLTSDVVDFVRQGALIAMAMVMIQTNESFDSRVGAFRRQLEKIILDKHEDTMSKMGAILASGILDAGGRNVTIKLLSRNKHDKLTAVIGLAVFSQFWYWYPLLYFISLAFSPTAFIGLNSDLKVPKFEFLSHAKPSLFEYPKPTTQQTTTSTVKLPAAILSTYAKAKSRAKKDAESKANQEKATEEASGSTSSKTAKAQEKDADAMQVDNASEKKAPEPEATYQLLTNPARVIPAQEKFIKLLENSRYVPVKPAPSGFILLRDLQPTEAEDLALTDAPTTVAGSTGNTAPAAGQQGSGSSAMAVDDEPQPPQPFEYTS

SEQ ID NO: 165800 - protein, 828 aa, Zea Mays
MGNINRPWVWLLNAEGWISWRKRLLGVITFRGLYHIASIFLINTLITVLRCLVKIYQTLPNPDYLSICQCLMFLGEPETVACILDKLLSGNKDDALLAYQIAFDLVENENQAFLLNVRNRLSSPTPVPSNPDSGPAVQDDQTASTVGTDTEAAGDVQMRDDTSTPNGTAHSVDPNEVAHADRLEKIKGILSGETSIQLALQFLYSHNRSDLLILKTIKQAVEMRNSVCHSATICANAIMHAGTTVDTFLRENLEWLSRATNWAKFSATAGLGVIHRGHLQQGRALMAPYLPQSGAVGGGSPYSEGGALYALGLIHANHGEGIKQFLRESLRNSSAEVIQHGACLGLGLAALGTADEEIYEDIKNVLYTDSAVAGEAAGIGMGLLMVGTASEKASEMLAYAHDTQHEKIIRGLSLGIALTVYGREEEADTLIEQMTRDQDPILRYGDVSDDVRRTAVMALGFVLYNEPEQTPRIVSLLSESYNPHVRYGAALAVGISCAGSGLSDAISLLEPLTSDVVDFVRQGALIAMAMVMIQTNESFDSRVGAFRRQLEKIILDKHEDTMSKMGAILASGILDAGGRNVTIKLLSRNKHDKLTAVIGLAVFSQFWYWYPLLYFISLAFSPTAFIGLNSDLKVPKFEFLSHAKPSLFEYPKPTTQQTTTSTVKLPAAILSTYAKAKSRAKKDAESKANQEKATEEASGSTSSKTAKAQEKDADAMQVDNASEKKAPEPEATYQLLTNPARVIPAQEKFIKLLENSRYVPVKPAPSGFILLRDLQPTEAEDLALTDAPTTVAGSTGNTAPAAGQQGSGSSAMAVDDEPQPPQPFEYTS

SEQ ID NO: 165801 - protein, 560 aa, Zea Mays
MAMEAVATVSSASGLLAMLQEPAPELKLHALARLNSVVHLFWPEISTSVPTIESLYEDEEFEQRQLAALVVSKVFYYLGELNDSLSYALGAGPLFDVSDDSDYAHALLAKALDEYASIKTRALKATEEEENIDPRLEAIVERMLEKCIFDGKYQQAMGMAVECRRLDKLEEAIVGCDNIQGALSYCINLSHQYVNHREYRFEVLRCLVKIYQTLPNPDYLSICQCLMFLGEPETVACILDKLLSGNKDDALLAYQIAFDLVENENQAFLLNVRNRLSSPTPVPSNPDSGPAVQDDQTASTVGTDTEAAGDVQMRDDTSTPNGTAHSVDPNEVAHADRLEKIKGILSGETSIQLALQFLYSHNRSDLLILKTIKQAVEMRNSVCHSATICANAIMHAGTTVDTFLRENLEWLSRATNWAKFSATAGLGVIHRGHLQQGRALMAPYLPQSGAVGGGSPYSEGGALYALGLIHANHGEGIKQFLRESLRNSSAEVIQHGACLGLGLAALGTADEEIYEDIKNVLYTDSAVAGEAAGIGMGLLMVGTASEKASEMLAYAHWAQL

SEQ ID NO: 165802 - protein, 983 aa, Zea Mays
MAMEAVATVSSASGLLAMLQEPAPELKLHALARLNSVVHLFWPEISTSVPTIESLYEDEEFEQRQLAALVVSKVFYYLGELNDSLSYALGAGPLFDVSDDSDYAHALLAKALDEYASIKTRALKATEEEENIDPRLEAIVERMLEKCIFDGKYQQAMGMAVECRRLDKLEEAIVGCDNIQGALSYCINLSHQYVNHREYRFEVLRCLVKIYQTLPNPDYLSICQCLMFLGEPETVACILDKLLSGNKDDALLAYQIAFDLVENENQAFLLNVRNRLSSPTPVPSNPDSGPAVQDDQTASTVGTDTEAAGDVQMRDDTSTPNGTAHSVDPNEVAHADRLEKIKGILSGETSIQLALQFLYSHNRSDLLILKTIKQAVEMRNSVCHSATICANAIMHAGTTVDTFLRENLEWLSRATNWAKFSATAGLGVIHRGHLQQGRALMAPYLPQSGAVGGGSPYSEGGALYALGLIHANHGEGIKQFLRESLRNSSAEVIQHGACLGLGLAALGTADEEIYEDIKNVLYTDSAVAGEAAGIGMGLLMVGTASEKASEMLAYAHDTQHEKIIRGLSLGIALTVYGREEEADTLIEQMTRDQDPILRYGDVSDDVRRTAVMALGFVLYNEPEQTPRIVSLLSESYNPHVRYGAALAVGISCAGSGLSDAISLLEPLTSDVVDFVRQGALIAMAMVMIQTNESFDSRVGAFRRQLEKIILDKHEDTMSKMGAILASGILDAGGRNVTIKLLSRNKHDKLTAVIGLAVFSQFWYWYPLLYFISLAFSPTAFIGLNSDLKVPKFEFLSHAKPSLFEYPKPTTQQTTTSTVKLPAAILSTYAKAKSRAKKDAESKANQEKATEEASGSTSSKTAKAQEKDADAMQVDNASEKKAPEPEATYQLLTNPARVIPAQEKFIKLLENSRYVPVKPAPSGFILLRDLQPTEAEDLALTDAPTTVAGSTGNTAPAAGQQGSGSSAMAVDDEPQPPQPFEYTS

SEQ ID NO: 165803 - protein, 111 aa, Zea Mays
MIQHRPYDQKVDVYSFGIVLWELITGMLPFANMTAVQAAFAVVNKGVRPAIPQDCLPTLGEIMTRCWDPNPDVRPPFTEVVRMLEHAEVEILSTVRKARFRCCISQPMTTD

SEQ ID NO: 165804 - protein, 304 aa, Zea Mays
MVGRMERQTASSSASCSPAAAATTSSSSCGGKKRPDILNMIRGRSKLSTNKVTHGFHLVEGKSGHDMEDYHVAEYKYVKNHELGLFAIFDGHLGDKVPSYLKANLFSNIMKEPLFWSSPQEAIKNAYCSTNKYILENTKQLGPGGSTAVTAIVVDGKDMWIANVGDSRAVVCERGSAKQLTVDHEPHETNERQRIEKHGGFVTTFPGDVPRVNGQLAVARAFGDQSLKAHLSSEPDISHVPINSSIEFVILASDGLWKVMKNQEAVDLVKSIKDPQAAAKRLTTEALARKSKDDISCIVIRFRC

SEQ ID NO: 165805 - protein, 267 aa, Zea Mays
MHDVARFLNRLLGLSPNIQNRLFDLFTSILDIVLHNARIEGQLDSGIVDIKAKNVEMTESPRTVHTDSLSGALTVLFTFTIDRGVTWESAKTMLEEREKFGAGTSIDGFYESRREWMGRRHFILSLEGSTEGMYKIIRPAIGEALREMPSSELKSKYRKVSSIDKVSKGWQEEYDASSKQCMHGSKCKIGSYCTVGRRLQELNILGGLILPVWGTIEKALAKQERLIHKRIRVVRLVTTNDSQRIVGLLIPNSAVESVLTGLQWVGH

SEQ ID NO: 165806 - protein, 392 aa, Zea Mays
MNIVNNRMLLFTNLGGEKRFASIVAKRLESLGALTQGDRRAGPSLSAFNYDSNYGKKALTMMYRGIMEQDSFPVVPPGCSDDETSIQEFINEAKAALVSVGIIRDAFICNGKDPGKLSGRIVDSDMHDVARFLNRLLGLSPNIQNRLFDLFTSILDIVLHNARIEGQLDSGIVDIKAKNVEMTESPRTVHTDSLSGALTVLFTFTIDRGVTWESAKTMLEEREKFGAGTSIDGFYESRREWMGRRHFILSLEGSTEGMYKIIRPAIGEALREMPSSELKSKYRKVSSIDKVSKGWQEEYDASSKQCMHGSKCKIGSYCTVGRRLQELNILGGLILPVWGTIEKALAKQERLIHKRIRVVRLVTTNDSQRIVGLLIPNSAVESVLTGLQWVGH

SEQ ID NO: 165807 - protein, 247 aa, Zea Mays
MMLLVFSTAFWGCLQTSKTEGQLDSGIVDIKAKNVEMTESPRTVHTDSLSGALTVLFTFTIDRGVTWESAKTMLEEREKFGAGTSIDGFYESRREWMGRRHFILSLEGSTEGMYKIIRPAIGEALREMPSSELKSKYRKVSSIDKVSKGWQEEYDASSKQCMHGSKCKIGSYCTVGRRLQELNILGGLILPVWGTIEKALAKQERLIHKRIRVVRLVTTNDSQRIVGLLIPNSAVESVLTGLQWVGH

SEQ ID NO: 165808 - protein, 394 aa, Zea Mays
MEMINMHEKQQFMDDKKLIAIISEAGSAGVSLHADRRAKNQRRRVHITLELPWSADRAIQQFGRTHRSNQTSAPQYRLLFTNLGGEKRFASIVAKRLESLGALTQGDRRAGPSLSAFNYDSNYGKKALTMMYRGIMEQDSFPVVPPGCSDDETSIQEFINEAKAALVSVGIIRDAFICNGKDPGKLSGRIVDSDMHDVARFLNRLLGLSPNIQNRLFDLFTSILDIVLHNARIEGQLDSGIVDIKAKNVEMTESPRTVHTDSLSGALTVLFTFTIDRGVTWESAKTMLEEREKFGAGTSIDGFYESRREWMGRRHFILSLEGSTEGMYKIIRPAIGEALREMPSSELKSKYRKVSSIDKVSKGWQEEYDASSKQVLVCHHHPHRWPLRRLCPSS

SEQ ID NO: 165809 - protein, 342 aa, Zea Mays
MAGDSSPSPASAPVQVRCAGCRSILAVGLGVTEFICPKCRMAQRLPPQLMAKSTSPSSPLPKAPSKPSLPPTQPRMGAPSAQGVDPTKIQLPCAGCQAVLNVPHGLARFRCPQCGVDLAVDHAKLQNFLAASNSATSSGHAPTSVRTQPPLATFLSVLPLQLVPGATISMVLPAAEPHEEINEVAIDVERDEDEGGTVGETFTDYRPSKLSLGLSHPDPVVETSSLSAVQPPEPTYCLNIMDELDETNALSCLQIETIVYACQRHLHHLPTGHRAGFFIGDGAGVGKGRTIAGLIWENWQQGRHKAVWVSVGSDLKYDARRDLDDVGAKCVQAIGSMVWARV

SEQ ID NO: 165810 - protein, 783 aa, Zea Mays
MAGDSSPSPASAPVQVRCAGCRSILAVGLGVTEFICPKCRMAQRLPPQLMAKSTSPSSPLPKAPSKPSLPPTQPRMGAPSAQGVDPTKIQLPCAGCQAVLNVPHGLARFRCPQCGVDLAVDHAKLQNFLAASNSATSSGHAPTSVRTQPPLATFLSVLPLQLVPGATISMVLPAAEPHEEINEVAIDVERDEDEGGTVGETFTDYRPSKLSLGLSHPDPVVETSSLSAVQPPEPTYCLNIMDELDETNALSCLQIETIVYACQRHLHHLPTGHRAGFFIGDGAGVGKGRTIAGLIWENWQQGRHKAVWVSVGSDLKYDARRDLDDVGAKCVQVHPLNKLPYSKLDSKAIGIKNGVIFVTYSSLIASSERGRSRLQQLVQWCGQEFDGLLVFDECHKAKNLIPDAGSQPTRTGKTVLEIQEKLHEARVVYCSATGASEPRNLGYMVRLGLWGEGTSFQTFPQFLGALEKGGVGALELVAMDMKARGMYVCRTLSYKGADFYIVEAPLEERMMNMYRRAAEFWAELRLELLSASELFADGNSNQIWRLYWASHQRFFRHMCMSAKVPAVVRLAKEALAENKCVVIGLQSTGEARTEEAVTKYGVEMEDFVSGPRELLLKLVEENYPLPPKPDSFQQGEETVTEIQRKRALDVSFKGRVRKVAKVVDVSDDDTDDYSPSESDHESTESDEEFHMCQICNTEESLLLHCSGCSRHVHPHCLTPPWTGTITDDWACYTCKIVEDEEKKQDAHVADCLKRISLLMSMKRIPCSGGKDVVISCMELPEKD

SEQ ID NO: 165811 - protein, 567 aa, Zea Mays
MAGDSSPSPASAPVQVRCAGCRSILAVGLGVTEFICPKCRMAQRLPPQLMAKSTSPSSPLPKAPSKPSLPPTQPRMGAPSAQGVDPTKIQLPCAGCQAVLNVPHGLARFRCPQCGVDLAVDHAKLQNFLAASNSATSSGHAPTSVRTQPPLATFLSVLPLQLVPGATISMVLPAAEPHEEINEVAIDVERDEDEGGTVGETFTDYRPSKLSLGLSHPDPVVETSSLSAVQPPEPTYCLNIMDELDETNALSCLQIETIVYACQRHLHHLPTGHRAGFFIGDGAGVGKGRTIAGLIWENWQQGRHKAVWVSVGSDLKYDARRDLDDVGAKCVQVHPLNKLPYSKLDSKAIGIKNGVIFVTYSSLIASSERGRSRLQQLVQWCGQEFDGLLVFDECHKAKNLIPDAGSQPTRTGKTVLEIQEKLHEARVVYCSATGASEPRNLGYMVRLGLWGEGTSFQTFPQFLGALEKGGVGALELVAMDMKARGMYVCRTLSYKGADFYIVEAPLEERMITCTEEQLNSGLNCALNFYQQVNYLLMAIQIKYGDCIGPAISVSSGTCACLQRYLLL

SEQ ID NO: 165812 - protein, 746 aa, Zea Mays
MAGDSSPSPASAPVQVRCAGCRSILAVGLGVTEFICPKCRMAQRLPPQLMAKSTSPSSPLPKAPSKPSLPPTQPRMGAPSAQGVDPTKIQLPCAGCQAVLNVPHGLARFRCPQCGVDLAVDHAKLQNFLAASNSATSSGHAPTSVAIDVERDEDEGGTVGETFTDYRPSKLSLGLSHPDPVVETSSLSAVQPPEPTYCLNIMDELDETNALSCLQIETIVYACQRHLHHLPTGHRAGFFIGDGAGVGKGRTIAGLIWENWQQGRHKAVWVSVGSDLKYDARRDLDDVGAKCVQVHPLNKLPYSKLDSKAIGIKNGVIFVTYSSLIASSERGRSRLQQLVQWCGQEFDGLLVFDECHKAKNLIPDAGSQPTRTGKTVLEIQEKLHEARVVYCSATGASEPRNLGYMVRLGLWGEGTSFQTFPQFLGALEKGGVGALELVAMDMKARGMYVCRTLSYKGADFYIVEAPLEERMMNMYRRAAEFWAELRLELLSASELFADGNSNQIWRLYWASHQRFFRHMCMSAKVPAVVRLAKEALAENKCVVIGLQSTGEARTEEAVTKYGVEMEDFVSGPRELLLKLVEENYPLPPKPDSFQQGEETVTEIQRKRALDVSFKGRVRKVAKVVDVSDDDTDDYSPSESDHESTESDEEFHMCQICNTEEEQSLLLHCSGCSRHVHPHCLTPPWTGTITDDWACYTCKIVEDEEKKQDAHVADCLKRISLLMSMKRIPCSGGKDVVISCMELPEKD

SEQ ID NO: 165813 - protein, 63 aa, Zea Mays
MATEGEASPPRKRMLLELPCDEEGVNVSQTVGVSASSATPARASQELVNFMMNLLYCVLVFFV

SEQ ID NO: 165814 - protein, 653 aa, Zea Mays
MQISSRVKSRKIGQILNLMTKVLLTSQIPPLMMKTRQMNHKIQITSWQILRAILTRETLWTRTLLWRILTCKSRRILTTKRVKILMADQEELKFMKIKKGQMKTVLQLLMKRSWPWRLVVYISATFHMQPDDLVELCRQYGDVEQAHIVVNKATKISTGRGYVLFSLPDSAVRALDELDNSSFQGRVLRVKAAKPLNKLESFHETAVEKVSLKQKRLEQKKASEISGDTRAWNSFYMRQDTVVENIARKNGISKSELLDREADDLAVRIALGETHVIAETKKFLSRSGVNVAALEEHASKRNEKFKRSNYVILVKNLPFNSTEEELATLFQKHGSLDKIILPPTRVFALVVFVEATEAQYAFKKLLYTRYKDTPLYLEWAPENILSPTSAPVDEEVKNEVGERILTKANIDQTVEGVSAEEIDPDRVESRSVFVKNLNFKTTDESLKQHFSTKLKSGSLKSATVKKHVKKGKNVSMGFGFVEFDSVETATGVCKDLQGTVLDGHALILQLCHVKKDGQAAKKNGKDKSSTKLLVRNVAFEATEKDLRQLFSPFGQIKSLRLPMKFGSHRGFAFVEYVTKQEAQNALQALASTHLYGRHLVIERAKEGETLEELRERTAAQFVDESSGFQSLSSKRKRSILVDEGSVKVSRIAE

SEQ ID NO: 165815 - protein, 599 aa, Zea Mays
MSSRLCVKNLPKGADERRLRDVFSRKGEVTDAKVIRTKDGKSRQFAFIGYRTNEEADEALKYFNNTYIDTCKITCEVARKIGDPDAPRPWSRHSLKKSEYGSKDKNNAGAVDAPPKGSNAQGTSAHASGSKGSVANDPKFLEFLEAMQPRSKAKMWANDTAATLDTAAKDSVVAAKESKGPLKNVLTSENDSSSEDTSDEKVANDLSSENASEQLKTENKQDKNMTDADFFKSKVKKNWSDSESDDEGSAHQSNTTTDDEDSSDESQDSDNQLADTKGDPDKRNIVDKDTLVENTDLQEPEDLDNKESEDLDGRPRGTEIHEDQERADENGAPITDEKKLALETGRLYICNLPYATSEDDLVELCRQYGDVEQAHIVVNKATKISTGRGYVLFSLPDSAVRALDELDNSSFQGRVLRVKAAKPLNKLESFHETAVEKVSLKQKRLEQKKASEISGDTRAWNSFYMRQDTVVENIARKNGISKSELLDREADDLAVRIALGETHVIAETKKFLSRSGVNVAALEEHASKRNEKFKRSNYVILVKNLPFNSTEEELATLFQKHGSLDKIILPPTRVFALVVFVEATEAQYAFKKLLYTRYK

SEQ ID NO: 165816 - protein, 886 aa, Zea Mays
MSSRLCVKNLPKGADERRLRDVFSRKGEVTDAKVIRTKDGKSRQFAFIGYRTNEEADEALKYFNNTYIDTCKITCEVARKIGDPDAPRPWSRHSLKKSEYGSKDKNNAGAVDAPPKGSNAQGTSAHASGSKGSVANDPKFLEFLEAMQPRSKAKMWANDTAATLDTAAKDSVVAAKESKGPLKNVLTSENDSSSEDTSDEKVANDLSSENASEQLKTENKQDKNMTDADFFKSKVKKNWSDSESDDEGSAHQSNTTTDDEDSSDESQDSDNQLADTKGDPDKRNIVDKDTLVENTDLQEPEDLDNKESEDLDGRPRGTEIHEDQERADENGAPITDEKKLALETGRLYICNLPYATSEDDLVELCRQYGDVEQAHIVVNKATKISTGRGYVLFSLPDSAVRALDELDNSSFQGRVLRVKAAKPLNKLESFHETAVEKVSLKQKRLEQKKASEISGDTRAWNSFYMRQDTVVENIARKNGISKSELLDREADDLAVRIALGETHVIAETKKFLSRSGVNVAALEEHASKRNEKFKRSNYVILVKNLPFNSTEEELATLFQKHGSLDKIILPPTRVFALVVFVEATEAQYAFKKLLYTRYNLLWCRDTPLYLEWAPENILSPTSAPVDEEVKNEVGERILTKANIDQTVEGVSAEEIDPDRVESRSVFVKNLNFKTTDESLKQHFSTKLKSGSLKSATVKKHVKKGKNVSMGFGFVEFDSVETATGVCKDLQGTVLDGHALILQLCHVKKDGQAAKKNGKDKSSTKLLVRNVAFEATEKDLRQLFSPFGQIKSLRLPMKFGSHRGFAFVEYVTKQEAQNALQALASTHLYGRHLVIERAKEGETLEELRERTAAQFVDESSGFQSLSSKRKRSILVDEGSVKVSRIAE

SEQ ID NO: 165817 - protein, 58 aa, Zea Mays
MSYFFCYKIMFLFSFYSIGLQLIHFFVQTHYVFMFAFSYIFCLCRTDTMELRCLVLHI

SEQ ID NO: 165818 - protein, 110 aa, Zea Mays
MDPESRVTRSILIQSMDTNFTLSRMYTAILNLETSVNVLDCQTREKLRTCILKRTNLIIQENYQIIPSWILLMSLIDMIYRKVPMHWDMLCKIQKAERIMKTLHCPSLTI

SEQ ID NO: 165819 - protein, 158 aa, Zea Mays
MDSFEGSDHITQRKVVPAKHIALVDGKNEPAVEGLPNGWLKECRPRKNRYGSRVKSDTFYIDPINGYEFHSLKDVHRYLESGDISKCIRLPNKRKIEDLHTKEDQSHHENYQIIPSWILLMSLIDMIYRKVPMHWDMLCKIQKAERIMKTLHCPSLTI

SEQ ID NO: 165820 - protein, 97 aa, Zea Mays
MLPCAISISLIHRKLSGGRLGNTFCCLCFCSTNLIMHSLVALLRVRAASIVNIPGSDLGCTLSMSIHLCITTCNLVDFQRASWHRTKLYQCVCFEIR

SEQ ID NO: 165821 - protein, 437 aa, Zea Mays
MASLSESELTNRGTMWELDQNLDQPMDEEAGRLKNMYREKKFSSALLLRLAFQSLGVVFGDLGTSPLYVFYNIFPRGIGGTFALYSLLCRHAKINTIPNQHRTDEELTTYSRQTYEENSVAAKIKRWIESHAYKRNILLILVLIGTCTAIGDGILTPAISVLSASGGIKVQNQNMSTDVVVLVAVVILIGLFSMQHYGTDKVGWLFAPIVLLWFILIGSVGAINIHKYDSSVLKAYNPMYIYRFFRRRKNSDVWTSLGGIMLSITGTEALFADLCHFPVLAIQIAFTLIVFPCLLLAYTGQAAYIISNKTHVADAFYRSIPAAIYWPAFIIATAAAIVASQATISATYSIIKQALALGCFPRVKIVHTSKKFLGQIYIPDINWILLVLCIAVTAGFKNQSQIGNAYGTAVVIVMLVTTFLMVPIMLLVWKSHWILVV

SEQ ID NO: 165822 - protein, 476 aa, Zea Mays
MASLSESELTNRGTMWELDQNLDQPMDEEAGRLKNMYREKKFSSALLLRLAFQSLGVVFGDLGTSPLYVFYNIFPRGIGEGEDEDVIGALSLIIYTLTLIPLLKYVFVVLRANDNGQGGTFALYSLLCRHAKINTIPNQHRTDEELTTYSRQTYEENSVAAKIKRWIESHAYKRNILLILVLIGTCTAIGDGILTPAISVLSASGGIKVQNQNMSTDVVVLVAVVILIGLFSMQHYGTDKVGWLFAPIVLLWFILIGSVGAINIHKYDSSVLKAYNPMYIYRFFRRRKNSDVWTSLGGIMLSITGTEALFADLCHFPVLAIQIAFTLIVFPCLLLAYTGQAAYIISNKTHVADAFYRSIPAAIYWPAFIIATAAAIVASQATISATYSIIKQALALGCFPRVKIVHTSKKFLGQIYIPDINWILLVLCIAVTAGFKNQSQIGNAYGTAVVIVMLVTTFLMVPIMLLVWKSHWILVV

SEQ ID NO: 165823 - protein, 327 aa, Zea Mays
MASLSESELTNRGTMWELDQNLDQPMDEEAGRLKNMYREKKFSSALLLRLAFQSLGVVFGDLGTSPLYVFYNIFPRGIGEGEDEDVIGALSLIIYTLTLIPLLKYVFVVLRANDNGQGGTFALYSLLCRHAKINTIPNQHRTDEELTTYSRQTYEENSVAAKIKRWIESHAYKRNILLILVLIGTCTAIGDGILTPAISVLSASGGIKVQNQNMSTDVVVLVAVVILIGLFSMQHYGTDKVGWLFAPIVLLWFILIGSVGAINIHKYDSSVLKAYNPMYIYRFFRRRKNSDVWTSLGGIMLSITGTEALFADLCHFPVLAIQGRPPT

SEQ ID NO: 165824 - protein, 267 aa, Zea Mays
MASLSESELTNRGTMWELDQNLDQPMDEEAGRLKNMYREKKFSSALLLRLAFQSLGVVFGDLGTSPLYVFYNIFPRGIGEGEDEDVIGALSLIIYTLTLIPLLKYVFVVLRANDNGQGGTFALYSLLCRHAKINTIPNQHRTDEELTTYSRQTYEENSVAAKIKRWIESHAYKRNILLILVLIGTCTAIGDGILTPAISVLSASGGIKVQNQNMSTDVVVLVAVVILIGLFSMQHYGTDKVGWLFAPIVLLWFILIGSVGAINIHKN

SEQ ID NO: 165825 - protein, 615 aa, Zea Mays
MTCLTLLHILHLLISRLSDSDTASGISSDDVDLETSSSMPTRTATLLDLYSGCGGMSTGLCLGAALSGLKLETRWAVDFNSFACQSLKYNHPQTEVRNEKADEFLALLKEWAVLCKKYVQDVDSNLASSEDQADEDSPLDKDEFVVEKLVGICYGGSDRENGIYFKVQWEGYGPEEDTWEPIDNLSDCPQKIRDFVQEGHKRKILPLPGDVDVICGGPPCQGISGFNRYRNRDEPLKDEKNKQMVTFMDIVAYLKPKYVLMENVVDILKFADGYLGKYALSCLVAMKYQARLGMMVAGCYGLPQFRMRVFLWGALSSMVLPKYPLPTYDVVVRGGAPNAFSQCMVAYDETQKPSLKKALLLGDAISDLPKVQNHQPNDVMEYGGSPKTEFQRYIRLSRKDMLDWSFGEGAGPDEGKLLDHQPLRLNNDDYERVQQIPVKKGANFRDLKGVRVGANNIVEWDPEIERVKLSSGKPLVPDYAMSFIKGKSLKPFGRLWWDETVPTVVTRAEPHNQVIIHPTQARVLTIRENARLQGFPDYYRLFGPIKEKYIQVGNAVAVPVARALGYCLGQAYLGESEGSDPLYQLPPSFTSVGGRTAGQARASPVGTPAGEVVEQ

SEQ ID NO: 165826 - protein, 608 aa, Zea Mays
MTCLTLLHILHLLISRLKMGSQTVIPLRVFLLMMWIWRRHLVCQRGQQPFLICILAVGACLLVFAWRWAVDFNSFACQSLKYNHPQTEVRNEKADEFLALLKEWAVLCKKYVQDVDSNLASSEDQADEDSPLDKDEFVVEKLVGICYGGSDRENGIYFKVQWEGYGPEEDTWEPIDNLSDCPQKIRDFVQEGHKRKILPLPGDVDVICGGPPCQGISGFNRYRNRDEPLKDEKNKQMVTFMDIVAYLKPKYVLMENVVDILKFADGYLGKYALSCLVAMKYQARLGMMVAGCYGLPQFRMRVFLWGALSSMVLPKYPLPTYDVVVRGGAPNAFSQCMVAYDETQKPSLKKALLLGDAISDLPKVQNHQPNDVMEYGGSPKTEFQRYIRLSRKDMLDWSFGEGAGPDEGKLLDHQPLRLNNDDYERVQQIPVKKGANFRDLKGVRVGANNIVEWDPEIERVKLSSGKPLVPDYAMSFIKGKSLKPFGRLWWDETVPTVVTRAEPHNQVIIHPTQARVLTIRENARLQGFPDYYRLFGPIKEKYIQVGNAVAVPVARALGYCLGQAYLGESEGSDPLYQLPPSFTSVGGRTAGQARASPVGTPAGEVVEQ

SEQ ID NO: 165827 - protein, 559 aa, Zea Mays
MTCLTLLHILHLLISRLRWAVDFNSFACQSLKYNHPQTEVRNEKADEFLALLKEWAVLCKKYVQDVDSNLASSEDQADEDSPLDKDEFVVEKLVGICYGGSDRENGIYFKVQWEGYGPEEDTWEPIDNLSDCPQKIRDFVQEGHKRKILPLPGDVDVICGGPPCQGISGFNRYRNRDEPLKDEKNKQMVTFMDIVAYLKPKYVLMENVVDILKFADGYLGKYALSCLVAMKYQARLGMMVAGCYGLPQFRMRVFLWGALSSMVLPKYPLPTYDVVVRGGAPNAFSQCMVAYDETQKPSLKKALLLGDAISDLPKVQNHQPNDVMEYGGSPKTEFQRYIRLSRKDMLDWSFGEGAGPDEGKLLDHQPLRLNNDDYERVQQIPVKKGANFRDLKGVRVGANNIVEWDPEIERVKLSSGKPLVPDYAMSFIKGKSLKPFGRLWWDETVPTVVTRAEPHNQVIIHPTQARVLTIRENARLQGFPDYYRLFGPIKEKYIQVGNAVAVPVARALGYCLGQAYLGESEGSDPLYQLPPSFTSVGGRTAGQARASPVGTPAGEVVEQ

SEQ ID NO: 165828 - protein, 910 aa, Zea Mays
MAPSSPSPAAPTRVSGRKRAAKAEEIHQNKEEEEEEEEVVAASSAKRSRKAASSGKKPKSPPKQAKPGRKKKGDAEMKEPVEDDVCAEEPDEEELAMGEEEAEEQAMREEVVAVAAGSPGKKRVGRRNAAAAAGDHEPEFIGSPVAADEARSNWPKRYGRSTAAKKPDEEEELKARCHYRSAKVDNVVYCLGDDVYVKAGENEADYIGRITEFFEGTDQCHYFTCRWFFRAEDTVINSLVSISVDGHKHDPRRVFLSEEKNDNVLDCIISKVKIVHVDPNMDPKAKAQLIESCDLYYDMSYSVAYSTFANISSDSDTASGISSDDVDLETSSSMPTRTATLLDLYSGCGGMSTGLCLGAALSGLKLETRWAVDFNSFACQSLKYNHPQTEVRNEKADEFLALLKEWAVLCKKYVQDVDSNLASSEDQADEDSPLDKDEFVVEKLVGICYGGSDRENGIYFKVQWEGYGPEEDTWEPIDNLSDCPQKIRDFVQEGHKRKILPLPGDVDVICGGPPCQGISGFNRYRNRDEPLKDEKNKQMVTFMDIVAYLKPKYVLMENVVDILKFADGYLGKYALSCLVAMKYQARLGMMVAGCYGLPQFRMRVFLWGALSSMVLPKYPLPTYDVVVRGGAPNAFSQCMVAYDETQKPSLKKALLLGDAISDLPKVQNHQPNDVMEYGGSPKTEFQRYIRLSRKDMLDWSFGEGAGPDEGKLLDHQPLRLNNDDYERVQQIPVKKGANFRDLKGVRVGANNIVEWDPEIERVKLSSGKPLVPDYAMSFIKGKSLKPFGRLWWDETVPTVVTRAEPHNQVIIHPTQARVLTIRENARLQGFPDYYRLFGPIKEKYIQVGNAVAVPVARALGYCLGQAYLGESEGSDPLYQLPPSFTSVGGRTAGQARASPVGTPAGEVVEQ

SEQ ID NO: 165829 - protein, 702 aa, Zea Mays
MAPSSPSPAAPTRVSGRKRAAKAEEIHQNKEEEEEEEEVVAASSAKRSRKAASSGKKPKSPPKQAKPGRKKKGDAEMKEPVEDDVCAEEPDEEELAMGEEEAEEQAMREEVVAVAAGSPGKKRVGRRNAAAAAGDHEPEFIGSPVAADEARSNWPKRYGRSTAAKKPDEEEELKARCHYRSAKVDNVVYCLGDDVYVKAGENEADYIGRITEFFEGTDQCHYFTCRWFFRAEDTVINSLVSISVDGHKHDPRRVFLSEEKNDNVLDCIISKVKIVHVDPNMDPKAKAQLIESCDLYYDMSYSVAYSTFANISSENGQSDSDTASGISSDDVDLETSSSMPTRTATLLDLYSGCGGMSTGLCLGAALSGLKLETRWAVDFNSFACQSLKYNHPQTEVRNEKADEFLALLKEWAVLCKKYVQDVDSNLASSEDQADEDSPLDKDEFVVEKLVGICYGGSDRENGIYFKVQWEGYGPEEDTWEPIDNLSDCPQKIRDFVQEGHKRKILPLPGDVDVICGGPPCQGISGFNRYRNRDEPLKDEKNKQMVTFMDIVAYLKPKYVLMENVVDILKFADGYLGKYALSCLVAMKYQARLGMMVAGCYGLPQFRMRVFLWGALSSMVLPKYPLPTYDVVVRGGAPNAFSQCMVAYDETQKPSLKKALLLGDAISDLPKPNDVMEYGGSPKTEFQRYIRLSRKDMLDWSFG

SEQ ID NO: 165830 - protein, 123 aa, Zea Mays
MIASAIGPRRSPPPARLLPTCGCTDHPGRDRAARRSNSDDRPAMSYQAPPPGTAAYPPPGTAYPPPGQQAYPPPAYGAPPPMAAGGYPPPPPPQPQDSKRSNDGFLKGCLAALCCCCMLDMCF

SEQ ID NO: 165831 - protein, 73 aa, Zea Mays
MRCSLWSQPPRLTIRMAMRVSRQYQCGIFFELPASGTLPSSPPRERPRFTLVERACGSREERFRYTGPWLPIN

SEQ ID NO: 165832 - protein, 295 aa, Zea Mays
MVFESEEKAYEYYVSYAGNMGFSVRKGWWEKTAKNSNRSRVYVCSREGFRSKNDTKKPRSETRVGCPARIAIKVARGGKYRVTEFVEDHNHQLAAPFDIEMLKSQRMLTKVRLGSQNASNIPPGYKNYLRSKSTKDMKPGDLRTLMDYFRRMKSDNPSFYYAIQVDENDKAANVFWADAKSIMDYHYFCDVVCLDMIHKTNDCSRPLALFLGMNHHRQMTIFGAAFLYDESVESFKWLLETFKSAMCGKHPKTILTDGSSALKEALGLTWPGTVHRSCVVKYTRALLSHWHICLV

SEQ ID NO: 165833 - protein, 477 aa, Zea Mays
MATPSTAGDPAPAGEPVPTPLQGPAQRRISTSRISHIVRTYLDLSSSRKRRSAPKNQPKAGDKERDAAAAETDGSKAGPSSSHPSRLLRELGIRVSRYTHEERRDIILRYMQKRSGRQIVNRAASKVPSRQALAVRRRRGAGGKFLGKDDAQITDKLEEKAEEEPELPPEVVSNAGGVPIVGMVFESEEKAYEYYVSYAGNMGFSVRKGWWEKTAKNSNRSRVYVCSREGFRSKNDTKKPRSETRVGCPARIAIKVARGGKYRVTEFVEDHNHQLAAPFDIEMLKSQRMLTKVRLGSQNASNIPPGYKNYLRSKSTKDMKPGDLRTLMDYFRRMKSDNPSFYYAIQVDENDKAANVFWADAKSIMDYHYFCDVVCLDMIHKTNDCSRPLALFLGMNHHRQMTIFGAAFLYDESVESFKWLLETFKSAMCGKHPKTILTDGSSALKEALGLTWPGTVHRSCVVKYTRALLSHWHICLV

SEQ ID NO: 165834 - protein, 696 aa, Zea Mays
MFCIPFNAYFGGIMNFIVYLANCSTCIPIRFLGNNSLTGGLPSSIGPSIKYLDFSYNYLSGNLPSWASHNLQLNLVANYFVINKSKDSVLPAGLECLQRNTSCFLGSPQSSSFTVDCGSSRSVFASDNSMYQPDDANLGVASYYISSPPRWGVSNVGRFMDTSNGSYIVNSSRRFQNTLDSKLFQTARMSASTLRYYGFGLENGDYTVTLQFGEFDFEDLQTWKSVGRRVFDIYLQGERKEQNFNIKKAAKEAGEASTSYTAVKKQYTVPVTKNILEIHLFWAGKGTCCIPNQGDYGPTISALSATLNTKKKGNKIGVIIGVVIGATVLGLAILATLCVWRHKRRKVSLEQQELYNIVRIPNVFCYTYGELRTATENFSSANLLGEGGYGSVYKGKLVDGSVVAIKQLSETSRQGKKEFVAEIETISRVQHRNLVKLFGFCLEGNKPLLVYEYMESGSLDKALFGNGRLNLNWSTRYKICLGIARGLAYLHEESSIRIVHRDIKASNVLLDATLNPKISDFGLAKLYDDKKTHVSTKVAGTFGYLSPEYAMRGHMTEKVDIFAFGVVMLEIIAGRPNYDGKLDQDMAYLLEWVWQLYEEDHPLDIADPKLTEFDSVELLRAIRIALLCIQSSPRQRPSMSRVVSMLTGDSEAPEAVSKPSYVAEWQSNTEGTSSSVSTAEAVSVAPFLNPVVDDGR

SEQ ID NO: 165835 - protein, 256 aa, Zea Mays
MLQVQRPLKFFACLIMHRNLVANYFVINKSKDSVLPAGLECLQRNTSCFLGSPQSSSFTVDCGSSRSVFASDNSMYQPDDANLGVASYYISSPPRWGVSNVGRFMDTSNGSYIVNSSRRFQNTLDSKLFQTARMSASTLRYYGFGLENGDYTVTLQFGEFDFEDLQTWKSVGRRVFDIYLQGERKEQNFNIKKAAKEAGEASTSYTAVKKQYTVPVTKNILEIHLFWAGKGTCCIPNQGDYGPTISALSATLSILF

SEQ ID NO: 165836 - protein, 306 aa, Zea Mays
MNPGIKCDCSDHNNTICHITELKMNKLDVVGPIPEELRNLSHLTTLNLQQNYLTGPLPSFLGELTALQQMSLSGNALSGTIPKELGNLVNLIILSLGTNNLTGSLPSELGNLVKLEHMYIDSAGLSGPIPSSFSKLTRLKTLCASDNDFTGKIPDYIGSWSNLTDLRFQGNSFQGPLPSTLANLVQLTSLRIGDIVTGSSSLAFISNMTSLNLLILRNCRIFGTLALVNFSKFTGLTLLDLSFNNIIGEVPQALLNMNSLTLLFLGNNSLTGGLPSSIGPSIKYLDFSYNYLSGNLPSWASHNLQL

SEQ ID NO: 165837 - protein, 302 aa, Zea Mays
MLQVQRPLKFFACLIMHRNLVANYFVINKSKDSVLPAGLECLQRNTSCFLGSPQSSSFTVDCGSSRSVFASDNSMYQPDDANLGVASYYISSPPRWGVSNVGRFMDTSNGSYIVNSSRRFQNTLDSKLFQTARMSASTLRYYGFGLENGDYTVTLQFGEFDFEDLQTWKSVGRRVFDIYLQGERKEQNFNIKKAAKEAGEASTSYTAVKKQYTVPVTKNILEIHLFWAGKGTCCIPNQGDYGPTISALSATLNTKKKGNKIGVIIGVVIGATVLGLAILATLCVWRHKRRKVSLEQQGKMIC

SEQ ID NO: 165838 - protein, 244 aa, Zea Mays
MNPGIKCDCSDHNNTICHITELKMNKLDVVGPIPEELRNLSHLTTLNLQQNYLTGPLPSFLGELTALQQMSLSGNALSGTIPKELGNLVNLIILSLGTNNLTGSLPSELGNLVKLEHMYIDSAGLSGPIPSSFSKLTRLKTLCASDNDFTGKIPDYIGSWSNLTDLRFQGNSFQGPLPSTLANLVQLTSLILRNCRIFGTLALVNFSKFTGLTLLDLSFNNIIAHAFRSDFLGTIVLQEAFQAL

SEQ ID NO: 165839 - protein, 868 aa, Zea Mays
MNPGIKCDCSDHNNTICHITELKMNKLDVVGPIPEELRNLSHLTTLNLQQNYLTGPLPSFLGELTALQQMSLSGNALSGTIPKELGNLVNLIILSLGTNNLTGSLPSELGNLVKLEHMYIDSAGLSGPIPSSFSKLTRLKTLCASDNDFTGKIPDYIGSWSNLTDLRFQGNSFQGPLPSTLANLVQLTSLILRNCRIFGTLALVNFSKFTGLTLLDLSFNNIIGEVPQALLNMNSLTLLDFSYNYLSGNLPSWASHNLQFVLPAGLECLQRNTSCFLGSPQSSSFTVDCGSSRSVFASDNSMYQPDDANLGVASYYISSPPRWGVSNVGRFMDTSNGSYIVNSSRRFQNTLDSKLFQTARMSASTLRYYGFGLENGDYTVTLQFGEFDFEDLQTWKSVGRRVFDIYLQGERKEQNFNIKKAAKEAGEASTSYTAVKKQYTVPVTKNILEIHLFWAGKGTCCIPNQGDYGPTISALSATLNTKKKGNKIGVIIGVVIGATVLGLAILATLCVWRHKRRKVSLEQQELYNIVRIPNVFCYTYGELRTATENFSSANLLGEGGYGSVYKGKLVDGSVVAIKQLSETSRQGKKEFVAEIETISRVQHRNLVKLFGFCLEGNKPLLVYEYMESGSLDKALFGNGRLNLNWSTRYKICLGIARGLAYLHEESSIRIVHRDIKASNVLLDATLNPKISDFGLAKLYDDKKTHVSTKVAGTFGYLSPEYAMRGHMTEKVDIFAFGVVMLEIIAGRPNYDGKLDQDMAYLLEWVWQLYEEDHPLDIADPKLTEFDSVELLRAIRIALLCIQSSPRQRPSMSRVVSMLTGDSEAPEAVSKPSYVAEWQSNTEGTSSSVSTAEAVSVAPFLNPVVDDGR

SEQ ID NO: 165840 - protein, 567 aa, Zea Mays
MYQPDDANLGVASYYISSPPRWGVSNVGRFMDTSNGSYIVNSSRRFQNTLDSKLFQTARMSASTLRYYGFGLENGDYTVTLQFGEFDFEDLQTWKSVGRRVFDIYLQGERKEQNFNIKKAAKEAGEASTSYTAVKKQYTVPVTKNILEIHLFWAGKGTCCIPNQGDYGPTISALSATLNTKKKGNKIGVIIGVVIGATVLGLAILATLCVWRHKRRKVSLEQQELYNIVRIPNVFCYTYGELRTATENFSSANLLGEGGYGSVYKGKLVDGSVVAIKQLSETSRQGKKEFVAEIETISRVQHRNLVKLFGFCLEGNKPLLVYEYMESGSLDKALFGNGRLNLNWSTRYKICLGIARGLAYLHEESSIRIVHRDIKASNVLLDATLNPKISDFGLAKLYDDKKTHVSTKVAGTFGYLSPEYAMRGHMTEKVDIFAFGVVMLEIIAGRPNYDGKLDQDMAYLLEWVWQLYEEDHPLDIADPKLTEFDSVELLRAIRIALLCIQSSPRQRPSMSRVVSMLTGDSEAPEAVSKPSYVAEWQSNTEGTSSSVSTAEAVSVAPFLNPVVDDGR

SEQ ID NO: 165841 - protein, 929 aa, Zea Mays
MNPGIKCDCSDHNNTICHITELKMNKLDVVGPIPEELRNLSHLTTLNLQQNYLTGPLPSFLGELTALQQMSLSGNALSGTIPKELGNLVNLIILSLGTNNLTGSLPSELGNLVKLEHMYIDSAGLSGPIPSSFSKLTRLKTLCASDNDFTGKIPDYIGSWSNLTDLRFQGNSFQGPLPSTLANLVQLTSLRIGDIVTGSSSLAFISNMTSLNLLILRNCRIFGTLALVNFSKFTGLTLLDLSFNNIIGEVPQALLNMNSLTLLFLGNNSLTGGLPSSIGPSIKYLDFSYNYLSGNLPSWASHNLQLNLVANYFVINKSKDSVLPAGLECLQRNTSCFLGSPQSSSFTVDCGSSRSVFASDNSMYQPDDANLGVASYYISSPPRWGVSNVGRFMDTSNGSYIVNSSRRFQNTLDSKLFQTARMSASTLRYYGFGLENGDYTVTLQFGEFDFEDLQTWKSVGRRVFDIYLQGERKEQNFNIKKAAKEAGEASTSYTAVKKQYTVPVTKNILEIHLFWAGKGTCCIPNQGDYGPTISALSATLNTKKKGNKIGVIIGVVIGATVLGLAILATLCVWRHKRRKVSLEQQELYNIVRIPNVFCYTYGELRTATENFSSANLLGEGGYGSVYKGKLVDGSVVAIKQLSETSRQGKKEFVAEIETISRVQHRNLVKLFGFCLEGNKPLLVYEYMESGSLDKALFGNGRLNLNWSTRYKICLGIARGLAYLHEESSIRIVHRDIKASNVLLDATLNPKISDFGLAKLYDDKKTHVSTKVAGTFGYLSPEYAMRGHMTEKVDIFAFGVVMLEIIAGRPNYDGKLDQDMAYLLEWVWQLYEEDHPLDIADPKLTEFDSVELLRAIRIALLCIQSSPRQRPSMSRVVSMLTGDSEAPEAVSKPSYVAEWQSNTEGTSSSVSTAEAVSVAPFLNPVVDDGR

SEQ ID NO: 165842 - protein, 636 aa, Zea Mays
MNSLTLLDFSYNYLSGNLPSWASHNLQFVLPAGLECLQRNTSCFLGSPQSSSFTVDCGSSRSVFASDNSMYQPDDANLGVASYYISSPPRWGVSNVGRFMDTSNGSYIVNSSRRFQNTLDSKLFQTARMSASTLRYYGFGLENGDYTVTLQFGEFDFEDLQTWKSVGRRVFDIYLQGERKEQNFNIKKAAKEAGEASTSYTAVKKQYTVPVTKNILEIHLFWAGKGTCCIPNQGDYGPTISALSATLNTKKKGNKIGVIIGVVIGATVLGLAILATLCVWRHKRRKVSLEQQELYNIVRIPNVFCYTYGELRTATENFSSANLLGEGGYGSVYKGKLVDGSVVAIKQLSETSRQGKKEFVAEIETISRVQHRNLVKLFGFCLEGNKPLLVYEYMESGSLDKALFGNGRLNLNWSTRYKICLGIARGLAYLHEESSIRIVHRDIKASNVLLDATLNPKISDFGLAKLYDDKKTHVSTKVAGTFGYLSPEYAMRGHMTEKVDIFAFGVVMLEIIAGRPNYDGKLDQDMAYLLEWVWQLYEEDHPLDIADPKLTEFDSVELLRAIRIALLCIQSSPRQRPSMSRVVSMLTGDSEAPEAVSKPSYVAEWQSNTEGTSSSVSTAEAVSVAPFLNPVVDDGR

SEQ ID NO: 165843 - protein, 335 aa, Zea Mays
MESAFKQMKGEFVGLLIRREVMQGRFSSFLLFWVEPRGVIPLELSGCISQVWSPWFKGDPCVGAATDGTSIYADKMNPGIKCDCSDHNNTICHITELKMNKLDVVGPIPEELRNLSHLTTLNLQQNYLTGPLPSFLGELTALQQMSLSGNALSGTIPKELGNLVNLIILSLGTNNLTGSLPSELGNLVKLEHMYIDSAGLSGPIPSSFSKLTRLKTLCASDNDFTGKIPDYIGSWSNLTDLRFQGNSFQGPLPSTLANLVQLTSLILRNCRIFGTLALVNFSKFTGLTLLDLSFNNIIGEVPQALLNMNSLTLLYVLYPFQCLFWGHNEFHCLSC

SEQ ID NO: 165844 - protein, 359 aa, Zea Mays
MESAFKQMKGEFVGLLIRREVMQGRFSSFLLFWVEPRGVIPLELSGCISQVWSPWFKGDPCVGAATDGTSIYADKMNPGIKCDCSDHNNTICHITELKMNKLDVVGPIPEELRNLSHLTTLNLQQNYLTGPLPSFLGELTALQQMSLSGNALSGTIPKELGNLVNLIILSLGTNNLTGSLPSELGNLVKLEHMYIDSAGLSGPIPSSFSKLTRLKTLCASDNDFTGKIPDYIGSWSNLTDLRFQGNSFQGPLPSTLANLVQLTSLRIGDIVTGSSSLAFISNMTSLNLLILRNCRIFGTLALVNFSKFTGLTLLDLSFNNIIGEVPQALLNMNSLTLLYVLYPFQCLFWGHNEFHCLSC

SEQ ID NO: 165845 - protein, 520 aa, Zea Mays
MNPGIKCDCSDHNNTICHITELKMNKLDVVGPIPEELRNLSHLTTLNLQQNYLTGPLPSFLGELTALQQMSLSGNALSGTIPKELGNLVNLIILSLGTNNLTGSLPSELGNLVKLEHMYIDSAGLSGPIPSSFSKLTRLKTLCASDNDFTGKIPDYIGSWSNLTDLRFQGNSFQGPLPSTLANLVQLTSLILRNCRIFGTLALVNFSKFTGLTLLDLSFNNIIGEVPQALLNMNSLTLLFLGNNSLTGGLPSSIGPSIKYLDFSYNYLSGNLPSWASHNLQLNLVANYFVINKSKDSVLPAGLECLQRNTSCFLGSPQSSSFTVDCGSSRSVFASDNSMYQPDDANLGVASYYISSPPRWGVSNVGRFMDTSNGSYIVNSSRRFQNTLDSKLFQTARMSASTLRYYGFGLENGDYTVTLQFGEFDFEDLQTWKSVGRRVFDIYLQGERKEQNFNIKKAAKEAGEASTSYTAVKKQYTVPVTKNILEIHLFWAGKGTCCIPNQGDYGPTISALSATLSILF

SEQ ID NO: 165846 - protein, 650 aa, Zea Mays
MESAFKQMKGEFVGLLIRREVMQGRFSSFLLFWVEPRGVIPLELSGCISQVWSPWFKGDPCVGAATDGTSIYADKMNPGIKCDCSDHNNTICHITELKMNKLDVVGPIPEELRNLSHLTTLNLQQNYLTGPLPSFLGELTALQQMSLSGNALSGTIPKELGNLVNLIILSLGTNNLTGSLPSELGNLVKLEHMYIDSAGLSGPIPSSFSKLTRLKTLCASDNDFTGKIPDYIGSWSNLTDLRFQGNSFQGPLPSTLANLVQLTSLILRNCRIFGTLALVNFSKFTGLTLLDLSFNNIIGEVPQALLNMNSLTLLDFSYNYLSGNLPSWASHNLQFVLPAGLECLQRNTSCFLGSPQSSSFTVDCGSSRSVFASDNSMYQPDDANLGVASYYISSPPRWGVSNVGRFMDTSNGSYIVNSSRRFQNTLDSKLFQTARMSASTLRYYGFGLENGDYTVTLQFGEFDFEDLQTWKSVGRRVFDIYLQGERKEQNFNIKKAAKEAGEASTSYTAVKKQYTVPVTKNILEIHLFWAGKGTCCIPNQGDYGPTISALSATLNTKKKGNKIGVIIGVVIGATVLGLAILATLCVWRHKRRKVSLEQQELYNIVRIPNVFCYTYGELRTATENFSSANLLGEGGYGSVYKVCSFVVHNA

SEQ ID NO: 165847 - protein, 573 aa, Zea Mays
MESAFKQMKGEFVGLLIRREVMQGRFSSFLLFWVEPRGVIPLELSGCISQVWSPWFKGDPCVGAATDGTSIYADKMNPGIKCDCSDHNNTICHITELKMNKLDVVGPIPEELRNLSHLTTLNLQQNYLTGPLPSFLGELTALQQMSLSGNALSGTIPKELGNLVNLIILSLGTNNLTGSLPSELGNLVKLEHMYIDSAGLSGPIPSSFSKLTRLKTLCASDNDFTGKIPDYIGSWSNLTDLRFQGNSFQGPLPSTLANLVQLTSLILRNCRIFGTLALVNFSKFTGLTLLDLSFNNIIGEVPQALLNMNSLTLLDFSYNYLSGNLPSWASHNLQLNLVANYFVINKSKDSVLPAGLECLQRNTSCFLGSPQSSSFTVDCGSSRSVFASDNSMYQPDDANLGVASYYISSPPRWGVSNVGRFMDTSNGSYIVNSSRRFQNTLDSKLFQTARMSASTLRYYGFGLENGDYTVTLQFGEFDFEDLQTWKSVGRRVFDIYLQGERKEQNFNIKKAAKEAGEASTSYTAVKKQYTVPVTKNILEIHLFWAGKGTCCIPNQGDYGPTISALSATLSILF

SEQ ID NO: 165848 - protein, 233 aa, Zea Mays
MNPGIKCDCSDHNNTICHITELKMNKLDVVGPIPEELRNLSHLTTLNLQQNYLTGPLPSFLGELTALQQMSLSGNALSGTIPKELGNLVNLIILSLGTNNLTGSLPSELGNLVKLEHMYIDSAGLSGPIPSSFSKLTRLKTLCASDNDFTGKIPDYIGSWSNLTDLRFQGNSFQGPLPSTLANLVQLTSLRIGDIVTGSSSLAFISNMTSLNLLYSQLIIHFMNQTAPSFAPL

SEQ ID NO: 165849 - protein, 980 aa, Zea Mays
MRPGSTPGPSSRRCIHGSAAALPTLLLLLLLLLAASSAQAQQTSRMKTDPVEAAAVNAVFAKLGQAATSAWNISGDPCTGAATDGTNIDNDPTFNPAIKCECSVQNNRTVCHVTKLKIYALNAFGPIPQELQNLTRLTNLNLAQNYLTGPLPSFLGNLTAMQYMSLGINALSGSVPKELGNLVNLVSLGIGSNYLNGSLPSELGNLAKLEQLYIDSAGLSGPLPSSFSRLTRMKTLWASDNDFTGEIPDYIGSWTNLTELILRNCRISDSLASVNFSQFAKLNLLDLSFNNITGQVPEALVKLNSLSFLFLGNNSLSGSLPSSIGTSLKNLDFSYNQLSGNFPSWTTQNNLQLNLVANNFETNSVLPSGLSCLQRDTPCFLGSPQSASLAVDCGSSRSISGYQPDAASLGAASYYVTGAQTWGVSNVGKFMEASNGSYIIYSLHQFQNTLDSELFQTARMSPSSLRYYGIGLENGNYTVTLQFAEFDFEDSQTWKSVGRRVFDIYLQGERKEKNFDIRKASGGKSYTAVEKQYIVPVTRNFLEIHLFWAGKGTCCIPAQGYYGPAISALSATPNFTPTVRNSAQKKNSSKTGVIVGVVIGAAVLGVLALAGICMWRQKRRKLLLEQQELYSIVGRPNVFVYGELRTATENFSSNNLLGEGGYGSVYKGKLADGRVVAVKQLSETSHQGKQQFAAEIETISRVQHRNLVKLYGCCLEGNKPLLVYEYLENGSLDKALFGNGKLNLDWPTRFEICLGIARGLAYLHEESSIRVVHRDIKASNVLLDANLNPKISDFGLAKLYDDKKTHVSTKVAGTFGYLAPEYAMRGHMTEKVDVFAFGVVILETLAGRPNFDNTLDEDKVYILEWVWQLYEENHPLDMLDPKLAEFNSDEVLRAIHVALLCTQGSPHQRPSMSRAVSILAGDVEVGQVANKPSYITEWQIKGGNTSSFMSSNVSGQSGVAPRSASHASSQFLGSVIEEGR

SEQ ID NO: 165850 - protein, 1024 aa, Zea Mays
MRPGSTPGPSSRRCIHGSAAALPTLLLLLLLLLAASSAQAQQTSRMKTDPVEAAAVNAVFAKLGQAATSAWNISGDPCTGAATDGTNIDNDPTFNPAIKCECSVQNNRTVCHVTKLKIYALNAFGPIPQELQNLTRLTNLNLAQNYLTGPLPSFLGNLTAMQYMSLGINALSGSVPKELGNLVNLVSLGIGSNYLNGSLPSELGNLAKLEQLYIDSAGLSGPLPSSFSRLTRMKTLWASDNDFTGEIPDYIGSWTNLTELRFQGNSFQGPLPATLSNLVQLTSLRIGDIVNGSSSMIFISNMTSLNTLILRNCRISDSLASVNFSQFAKDLSFNNITGQVPEALVKLNSLSFLFLGNNSLSGSLPSSIGTSLKNLDFSYNQLSGNFPSWTTQNNLQLNLVANNFETNSVLPSGLSCLQRDTPCFLGSPQSASLAVDCGSSRSISGYQPDAASLGAASYYVTGAQTWGVSNVGKFMEASNGSYIIYSLHQFQNTLDSELFQTARMSPSSLRYYGIGLENGNYTVTLQFAEFDFEDSQTWKSVGRRVFDIYLQGERKEKNFDIRKASGGKSYTAVEKQYIVPVTRNFLEIHLFWAGKGTCCIPAQGYYGPAISALSATPNFTPTVRNSAQKKNSSKTGVIVGVVIGAAVLGVLALAGICMWRQKRRKLLLEQQELYSIVGRPNVFVYGELRTATENFSSNNLLGEGGYGSVYKGKLADGRVVAVKQLSETSHQGKQQFAAEIETISRVQHRNLVKLYGCCLEGNKPLLVYEYLENGSLDKALFGNGKLNLDWPTRFEICLGIARGLAYLHEESSIRVVHRDIKASNVLLDANLNPKISDFGLAKLYDDKKTHVSTKVAGTFGYLAPEYAMRGHMTEKVDVFAFGVVILETLAGRPNFDNTLDEDKVYILEWVWQLYEENHPLDMLDPKLAEFNSDEVLRAIHVALLCTQGSPHQRPSMSRAVSILAGDVEVGQVANKPSYITEWQIKGGNTSSFMSSNVSGQSGVAPRSASHASSQFLGSVIEEGR

SEQ ID NO: 165851 - protein, 1028 aa, Zea Mays
MRPGSTPGPSSRRCIHGSAAALPTLLLLLLLLLAASSAQAQQTSRMKTDPVEAAAVNAVFAKLGQAATSAWNISGDPCTGAATDGTNIDNDPTFNPAIKCECSVQNNRTVCHVTKLKIYALNAFGPIPQELQNLTRLTNLNLAQNYLTGPLPSFLGNLTAMQYMSLGINALSGSVPKELGNLVNLVSLGIGSNYLNGSLPSELGNLAKLEQLYIDSAGLSGPLPSSFSRLTRMKTLWASDNDFTGEIPDYIGSWTNLTELRFQGNSFQGPLPATLSNLVQLTSLRIGDIVNGSSSMIFISNMTSLNTLILRNCRISDSLASVNFSQFAKLNLLDLSFNNITGQVPEALVKLNSLSFLFLGNNSLSGSLPSSIGTSLKNLDFSYNQLSGNFPSWTTQNNLQLNLVANNFETNSVLPSGLSCLQRDTPCFLGSPQSASLAVDCGSSRSISGYQPDAASLGAASYYVTGAQTWGVSNVGKFMEASNGSYIIYSLHQFQNTLDSELFQTARMSPSSLRYYGIGLENGNYTVTLQFAEFDFEDSQTWKSVGRRVFDIYLQGERKEKNFDIRKASGGKSYTAVEKQYIVPVTRNFLEIHLFWAGKGTCCIPAQGYYGPAISALSATPNFTPTVRNSAQKKNSSKTGVIVGVVIGAAVLGVLALAGICMWRQKRRKLLLEQQELYSIVGRPNVFVYGELRTATENFSSNNLLGEGGYGSVYKGKLADGRVVAVKQLSETSHQGKQQFAAEIETISRVQHRNLVKLYGCCLEGNKPLLVYEYLENGSLDKALFGNGKLNLDWPTRFEICLGIARGLAYLHEESSIRVVHRDIKASNVLLDANLNPKISDFGLAKLYDDKKTHVSTKVAGTFGYLAPEYAMRGHMTEKVDVFAFGVVILETLAGRPNFDNTLDEDKVYILEWVWQLYEENHPLDMLDPKLAEFNSDEVLRAIHVALLCTQGSPHQRPSMSRAVSILAGDVEVGQVANKPSYITEWQIKGGNTSSFMSSNVSGQSGVAPRSASHASSQFLGSVIEEGR

SEQ ID NO: 165852 - protein, 288 aa, Zea Mays
MAGSSDPDKLMSKADKLTKLSFTRWNADWKSATSLYEQAAIAYRFRKDNEKAKDAFEKASKGQEMISSPWDAAKHMESAAALAKELGRWNEVSDFYHRASELYRECGRPQPASDALAKGASALEEKSPEEAIKMYDEACSVLEEDGKEQMAFDLYRAAAALYIKMEKYSDAAALFLRLGSAADKCNAINSQCKAYLSAIIIYLYTHDFQQAQKCYNDCSDDQNRCATKLLSAYEEGDAEEIKRMAQSSAFNHLDHVVIRLARKLPTDDLQAIKKADDGEESLDEDDLT

SEQ ID NO: 165853 - protein, 776 aa, Zea Mays
MASGGGGIRATTSGRMKSRGWGDSSDDFGTPAIALRRGGDCSGTASSDSSAVFFAVAFCAPSPGLSVTAAAAMVEMRQRRKPLVLASTQALLDSLPGDRPPPPPQKPVRLKAGVLRFPSGGGGAEFGELASFVGIPAPALRRLAVVTGTPVLVKNTDNNVGRIVKAVLFGNPSLDKSCSEHTDQVVSASLSGHAMGFLPCRTFPAIGFTSMDEDVGYVSPLLAFNLGLHVSCLKLLIQREGQPFKFCSRAEEIDATASSGSDLSLHLDLLPCPQVPKYALHLRVSVVRIPDCGVLASLKIYSSFGGSEYQDMVDQALNEYFKFDRFLARGDVFGIQNSWKCGSSCCLACNKQDNKLNPRNMIYFKVTGMEPSDEPILRVNCNETALVLGGAASAAIPPYSFFASSGNSVPLHSEVVEHLASVIAPALCPSDILPKIKFSTFLYGPPGCGKRTVVRHVANHLGLHVVECSCHDLMTSSESGAPAALATAFKEAQKYSPCIILLRHFDAIGNASSNEGPQSEQSGIASNIESVIKQYIGQRWVAKDSLPGKDVNGSSYLVEPECVSSLQIILVATADSSEGMQQSIRRCFRYEIDMKTMNEEQRNELISETLQGIPKVADESICDKFIKDLAAQTSGFMPRDILALVADAGVSFAHKIAAGKDSKAISKHTEVLPESSSATQNEEHHFSKEDIMSSLERAKKRNRAALGTPKVPNVKWEDVGGLEDVKKVILDTIQLPLMYKHLFSSKLRKRSGVLLYGPPGTGKGCFPVTCGDRWVE

SEQ ID NO: 165854 - protein, 764 aa, Zea Mays
MASGGGGIRATTSGRMKSRGWGDSSDDFGTPAIALRRGGDCSGTASSDSSAVFFAVAFCAPSPGLSVTAAAAMVEMRQRRKPLVLASTQALLDSLPGDRPPPPPQKPVRLKAGVLRFPSGGGGAEFGELASFVGIPAPALRRLAVVTGTPVLVKNTDNNVGRIVKAVLFGNPSLDKSCSEHTDQVVSASLSGHAMGFLPCRTFPAIGFTSMDEDVGYVSPLLAFNLGLHVSCLKLLIQREGQPFKFCSRAEEIDATASSGSDLSLHLDLLPCPQVPKYALHLRVSVVRIPDCGVLASLKIYSSFGGSEYQDMVDQALNEYFKFDRFLARGDVFGIQNSWKCGSSCCLACNKQDNKLNPRNMIYFKVTGMEPSDEPILRVNCNETALVLGGAASAAIPPYSFFASSGNSVPLHSEVVEHLASVIAPALCPSDILPKIKFSTFLYGPPGCGKRTVVRHVANHLGLHVVECSCHDLMTSSESGAPAALATAFKEAQKYSPCIILLRHFDAIGNASSNEGPQSEQSGIASNIESVIKQYIGQRWVAKDSLPGKDVNGSSYLVEPECVSSLQIILVATADSSEGMQQSIRRCFRYEIDMKTMNEEQRNELISETLQGIPKVADESICDKFIKDLAAQTSGFMPRDILALVADAGVSFAHKIAAGKDSKAISKHTEVLPESSSATQNEEHHFSKEDIMSSLERAKKRNRAALGTPKVPNVKWEDVGGLEDVKKVILDTIQLPLMYKHLFSSKLRKRSGVLLYGPPGTGKN

SEQ ID NO: 165855 - protein, 852 aa, Zea Mays
MASGGGGIRATTSGRMKSRGWGDSSDDFGTPAIALRRGGDCSGTASSDSSAVFFAVAFCAPSPGLSVTAAAAMVEMRQRRKPLVLASTQALLDSLPGDRPPPPPQKPVRLKAGVLRFPSGGGGAEFGELASFVGIPAPALRRLAVVTGTPVLVKNTDNNVGRIVKAVLFGNPSLDKSCSEHTDQVVSASLSGHAMGFLPCRTFPAIGFTSMDEDVGYVSPLLAFNLGLHVSCLKLLIQREGQPFKFCSRAEEIDATASSGSDLSLHLDLLPCPQVPKYALHLRVSVVRIPDCGVLASLKIYSSFGGSEYQDMVDQALNEYFKFDRFLARGDVFGIQNSWKCGSSCCLACNKQDNKLNPRNMIYFKVTGMEPSDEPILRVNCNETALVLGGAASAAIPPYSFFASSGNSVPLHSEVVEHLASVIAPALCPSDILPKIKFSTFLYGPPGCGKRTVVRHVANHLGLHVVECSCHDLMTSSESGAPAALATAFKEAQKYSPCIILLRHFDAIGNASSNEGPQSEQSGIASNIESVIKQYIGQRWVAKDSLPGKDVNGSSYLVEPECVSSLQIILVATADSSEGMQQSIRRCFRYEIDMKTMNEEQRNELISETLQGIPKVADESICDKFIKDLAAQTSGFMPRDILALVADAGVSFAHKIAAGKDSKAISKHTEVLPESSSATQNEEHHFSKEDIMSSLERAKKRNRAALGTPKVPNVKWEDVGGLEDVKKVILDTIQLPLMYKHLFSSKLRKRSGVLLYGPPGTGKTLLAKAVATECSLNFLSVKGPELINMYVGESEKNVRDIFEKGCFPGIISFVPEAVSQLLTSLLLNYWASVFSLPPFSCLLVTCGDRWVE

SEQ ID NO: 165856 - protein, 823 aa, Zea Mays
MASGGGGIRATTSGRMKSRGWGDSSDDFGTPAIALRRGGDCSGTASSDSSAVFFAVAFCAPSPGLSVTAAAAMVEMRQRRKPLVLASTQALLDSLPGDRPPPPPQKPVRLKAGVLRFPSGGGGAEFGELASFVGIPAPALRRLAVVTGTPVLVKNTDNNVGRIVKAVLFGNPSLDKSCSEHTDQVVSASLSGHAMGFLPCRTFPAIGFTSMDEDVGYVSPLLAFNLGLHVSCLKLLIQREGQPFKFCSRAEEIDATASSGSDLSLHLDLLPCPQVPKYALHLRVSVVRIPDCGVLASLKIYSSFGGSEYQDMVDQALNEYFKFDRFLARGDVFGIQNSWKCGSSCCLACNKQDNKLNPRNMIYFKVTGMEPSDEPILRVNCNETALVLGGAASAAIPPYSFFASSGNSVPLHSEVVEHLASVIAPALCPSDILPKIKFSTFLYGPPGCGKRTVVRHVANHLGLHVVECSCHDLMTSSESGAPAALATAFKEAQKYSPCIILLRHFDAIGNASSNEGPQSEQSGIASNIESVIKQYIGQRWVAKDSLPGKDVNGSSYLVEPECVSSLQIILVATADSSEGMQQSIRRCFRYEIDMKTMNEEQRNELISETLQGIPKVADESICDKFIKDLAAQTSGFMPRDILALVADAGVSFAHKIAAGKDSKAISKHTEVLPESSSATQNEEHHFSKEDIMSSLERAKKRNRAALGTPKVPNVKWEDVGGLEDVKKVILDTIQLPLMYKHLFSSKLRKRSGVLLYGPPGTGKTLLAKAVATECSLNFLSVKGPELINMYVGESEKNVRDIFEKILAVSWTGLFPSYLWRSMG

SEQ ID NO: 165857 - protein, 824 aa, Zea Mays
MASGGGGIRATTSGRMKSRGWGDSSDDFGTPAIALRRGGDCSGTASSDSSAVFFAVAFCAPSPGLSVTAAAAMVEMRQRRKPLVLASTQALLDSLPGDRPPPPPQKPVRLKAGVLRFPSGGGGAEFGELASFVGIPAPALRRLAVVTGTPVLVKNTDNNVGRIVKAVLFGNPSLDKSCSEHTDQVVSASLSGHAMGFLPCRTFPAIGFTSMDEDVGYVSPLLAFNLGLHVSCLKLLIQREGQPFKFCSRAEEIDATASSGSDLSLHLDLLPCPQVPKYALHLRVSVVRIPDCGVLASLKIYSSFGGSEYQDMVDQALNEYFKFDRFLARGDVFGIQNSWKCGSSCCLACNKQDNKLNPRNMIYFKVTGMEPSDEPILRVNCNETALVLGGAASAAIPPYSFFASSGNSVPLHSEVVEHLASVIAPALCPSDILPKIKFSTFLYGPPGCGKRTVVRHVANHLGLHVVECSCHDLMTSSESGAPAALATAFKEAQKYSPCIILLRHFDAIGNASSNEGPQSEQSGIASNIESVIKQYIGQRWVAKDSLPGKDVNGSSYLVEPECVSSLQIILVATADSSEGMQQSIRRCFRYEIDMKTMNEEQRNELISETLQGIPKVADESICDKFIKDLAAQTSGFMPRDILALVADAGVSFAHKIAAGKDSKAISKHTEVLPESSSATQNEEHHFSKEDIMSSLERAKKRNRAALGTPKVPNVKWEDVGGLEDVKKVILDTIQLPLMYKHLFSSKLRKRSGVLLYGPPGTGKTLLAKAVATECSLNFLSVKGPELINMYVGESEKNVRDIFEKQILAVSWTGLFPSYLWRSMG

SEQ ID NO: 165858 - protein, 959 aa, Zea Mays
MASGGGGIRATTSGRMKSRGWGDSSDDFGTPAIALRRGGDCSGTASSDSSAVFFAVAFCAPSPGLSVTAAAAMVEMRQRRKPLVLASTQALLDSLPGDRPPPPPQKPVRLKAGVLRFPSGGGGAEFGELASFVGIPAPALRRLAVVTGTPVLVKNTDNNVGRIVKAVLFGNPSLDKSCSEHTDQVVSASLSGHAMGFLPCRTFPAIGFTSMDEDVGYVSPLLAFNLGLHVSCLKLLIQREGQPFKFCSRAEEIDATASSGSDLSLHLDLLPCPQVPKYALHLRVSVVRIPDCGVLASLKIYSSFGGSEYQDMVDQALNEYFKFDRFLARGDVFGIQNSWKCGSSCCLACNKQDNKLNPRNMIYFKVTGMEPSDEPILRVNCNETALVLGGAASAAIPPYSFFASSGNSVPLHSEVVEHLASVIAPALCPSDILPKIKFSTFLYGPPGCGKRTVVRHVANHLGLHVVECSCHDLMTSSESGAPAALATAFKEAQKYSPCIILLRHFDAIGNASSNEGPQSEQSGIASNIESVIKQYIGQRWVAKDSLPGKDVNGSSYLVEPECVSSLQIILVATADSSEGMQQSIRRCFRYEIDMKTMNEEQRNELISETLQGIPKVADESICDKFIKDLAAQTSGFMPRDILALVADAGVSFAHKIAAGKDSKAISKHTEVLPESSSATQNEEHHFSKEDIMSSLERAKKRNRAALGTPKVPNVKWEDVGGLEDVKKVILDTIQLPLMYKHLFSSKLRKRSGVLLYGPPGTGKARSARPCVIFFDELDSLAPARGSSADSGGVMDRVVSQLLVEIDGLSDNSQDLFIIGATNRPDLLDSALLRPGRFDKLLYVGVNTEASYRERILKAQTRKYKLHKNVSLLSVAQRCPPNFTGADIYALCADAWFHAAKRSVETFEIDPSRSNEASAEEVIVEIDDFITVLGDIAPSLSLDELQNYEQLRQKIEGPSR

SEQ ID NO: 165859 - protein, 813 aa, Zea Mays
MASGGGGIRATTSGRMKSRGWGDSSDDFGTPAIALRRGGDCSGTASSDSSAVFFAVAFCAPSPGLSVTAAAAMVEMRQRRKPLVLASTQALLDSLPGDRPPPPPQKPVRLKAGVLRFPSGGGGAEFGELASFVGIPAPALRRLAVVTGTPVLVKNTDNNVGRIVKAVLFGNPSLDKSCSEHTDQVVSASLSGHAMGFLPCRTFPAIGFTSMDEDVGYVSPLLAFNLGLHVSCLKLLIQREGQPFKFCSRAEEIDATASSGSDLSLHLDLLPCPQVPKYALHLRVSVVRIPDCGVLASLKIYSSFGGSEYQDMVDQALNEYFKFDRFLARGDVFGIQNSWKCGSSCCLACNKQDNKLNPRNMIYFKVTGMEPSDEPILRVNCNETALVLGGAASAAIPPYSFFASSGNSVPLHSEVVEHLASVIAPALCPSDILPKIKFSTFLYGPPGCGKRTVVRHVANHLGLHVVECSCHDLMTSSESGAPAALATAFKEAQKYSPCIILLRHFDAIGNASSNEGPQSEQSGIASNIESVIKQYIGQRWVAKDSLPGKDVNGSSYLVEPECVSSLQIILVATADSSEGMQQSIRRCFRYEIDMKTMNEEQRNELISETLQGIPKVADESICDKFIKDLAAQTSGFMPRDILALVADAGVSFAHKIAAGKDSKAISKHTEVLPESSSATQNEEHHFSKEDIMSSLERAKKRNRAALGTPKVPNVKWEDVGGLEDVKKVILDTIQLPLMYKHLFSSKLRKRSGVLLYGPPGTGKTLLAKAVATECSLNFLSVKGPELINMYVGESEKNVRDIFEKVCTPMCHFL

SEQ ID NO: 165860 - protein, 544 aa, Zea Mays
MGFLPCRTFPAIGFTSMDEDVGYVSPLLAFNLGLHVSCLKLLIQREGQPFKFCSRAEEIDATASSGSDLSLHLDLLPCPQVPKYALHLRVSVVRIPDCGVLASLKIYSSFGGSEYQDMVDQALNEYFKFDRFLARGDVFGIQNSWKCGSSCCLACNKQDNKLNPRNMIYFKVTGMEPSDEPILRVNCNETALVLGGAASAAIPPYSFFASSGNSVPLHSEVVEHLASVIAPALCPSDILPKIKFSTFLYGPPGCGKRTVVRHVANHLGLHVVECSCHDLMTSSESGAPAALATAFKEAQKYSPCIILLRHFDAIGNASSNEGPQSEQSGIASNIESVIKQYIGQRWVAKDSLPGKDVNGSSYLVEPECVSSLQIILVATADSSEGMQQSIRRCFRYEIDMKTMNEEQRNELISETLQGIPKVADESICDKFIKDLAAQTSGFMPRDILALVADAGVSFAHKIAAGKDSKAISKHTEVLPESSSATQNEEHHFSKEDIMSSLERAKKRNRAALGTPKVPNVKWEDVGGLEDVKKVILDTIQVNWT

SEQ ID NO: 165861 - protein, 766 aa, Zea Mays
MASGGGGIRATTSGRMKSRGWGDSSDDFGTPAIALRRGGDCSGTASSDSSAVFFAVAFCAPSPGLSVTAAAAMVEMRQRRKPLVLASTQALLDSLPGDRPPPPPQKPVRLKAGVLRFPSGGGGAEFGELASFVGIPAPALRRLAVVTGTPVLVKNTDNNVGRIVKAVLFGNPSLDKSCSEHTDQVVSASLSGHAMGFLPCRTFPAIGFTSMDEDVGYVSPLLAFNLGLHVSCLKLLIQREGQPFKFCSRAEEIDATASSGSDLSLHLDLLPCPQVPKYALHLRVSVVRIPDCGVLASLKIYSSFGGSEYQDMVDQALNEYFKFDRFLARGDVFGIQNSWKCGSSCCLACNKQDNKLNPRNMIYFKVTGMEPSDEPILRVNCNETALVLGGAASAAIPPYSFFASSGNSVPLHSEVVEHLASVIAPALCPSDILPKIKFSTFLYGPPGCGKRTVVRHVANHLGLHVVECSCHDLMTSSESGAPAALATAFKEAQKYSPCIILLRHFDAIGNASSNEGPQSEQSGIASNIESVIKQYIGQRWVAKDSLPGKDVNGSSYLVEPECVSSLQIILVATADSSEGMQQSIRRCFRYEIDMKTMNEEQRNELISETLQGIPKVADESICDKFIKDLAAQTSGFMPRDILALVADAGVSFAHKIAAGKDSKAISKHTEVLPESSSATQNEEHHFSKEDIMSSLERAKKRNRAALGTPKVPNVKWEDVGGLEDVKKVILDTIQLPLMYKHLFSSKLRKRSGVLLYGPPGTGKVQN

SEQ ID NO: 165862 - protein, 421 aa, Zea Mays
MQQSIRRCFRYEIDMKTMNEEQRNELISETLQGIPKVADESICDKFIKDLAAQTSGFMPRDILALVADAGVSFAHKIAAGKDSKAISKHTEVLPESSSATQNEEHHFSKEDIMSSLERAKKRNRAALGTPKVPNVKWEDVGGLEDVKKVILDTIQLPLMYKHLFSSKLRKRSGVLLYGPPGTGKTLLAKAVATECSLNFLSVKGPELINMYVGESEKNVRDIFEKARSARPCVIFFDELDSLAPARGSSADSGGVMDRVVSQLLVEIDGLSDNSQDLFIIGATNRPDLLDSALLRPGRFDKLLYVGVNTEASYRERILKAQTRKYKLHKNVSLLSVAQRCPPNFTGADIYALCADAWFHAAKRSVETFEIDPSRSNEASAEEVIVEIDDFITVLGDIAPSLSLDELQNYEQLRQKIEGPSR

SEQ ID NO: 165863 - protein, 996 aa, Zea Mays
MASGGGGIRATTSGRMKSRGWGDSSDDFGTPAIALRRGGDCSGTASSDSSAVFFAVAFCAPSPGLSVTAAAAMVEMRQRRKPLVLASTQALLDSLPGDRPPPPPQKPVRLKAGVLRFPSGGGGAEFGELASFVGIPAPALRRLAVVTGTPNTDNNVGRIVKAVLFGNPSLDKSCSEHTDQVVSASLSGHAMGFLPCRTFPAIGFTSMDEDVGYVSPLLAFNLGLHVSCLKLLIQREGQPFKFCSRAEEIDATASSGSDLSLHLDLLPCPQVPKYALHLRVSVVRIPDCGVLASLKIYSSFGGSEYQDMVDQALNEYFKFDRFLARGDVFGIQNSWKCGSSCCLACNKQDNKLNPRNMIYFKVTGMEPSDEPILRVNCNETALVLGGAASAAIPPYSFFASSGNSVPLHSEVVEHLASVIAPALCPSDILPKIKFSTFLYGPPGCGKRTVVRHVANHLGLHVVECSCHDLMTSSESGAPAALATAFKEAQKYSPCIILLRHFDAIGNASSNEGPQSEQSGIASNIESVIKQYIGQRWVAKDSLPGKDVNGSSYLVEPECVSSLQIILVATADSSEGMQQSIRRCFRYEIDMKTMNEEQRNELISETLQGIPKVADESICDKFIKDLAAQTSGFMPRDILALVADAGVSFAHKIAAGKDSKAISKHTEVLPESSSATQNEEHHFSKEDIMSSLERAKKRNRAALGTPKVPNVKWEDVGGLEDVKKVILDTIQLPLMYKHLFSSKLRKRSGVLLYGPPGTGKTLLAKAVATECSLNFLSVKGPELINMYVGESEKNVRDIFEKARSARPCVIFFDELDSLAPARGSSADSGGVMDRVVSQLLVEIDGLSDNSQDLFIIGATNRPDLLDSALLRPGRFDKLLYVGVNTEASYRERILKAQTRKYKLHKNVSLLSVAQRCPPNFTGADIYALCADAWFHAAKRSVETFEIDPSRSNEASAEEVIVEIDDFITVLGDIAPSLSLDELQNYEQLRQKIEGPSR

SEQ ID NO: 165864 - protein, 817 aa, Zea Mays
MASGGGGIRATTSGRMKSRGWGDSSDDFGTPAIALRRGGDCSGTASSDSSAVFFAVAFCAPSPGLSVTAAAAMVEMRQRRKPLVLASTQALLDSLPGDRPPPPPQKPVRLKAGVLRFPSGGGGAEFGELASFVGIPAPALRRLAVVTGTPVLVKNTDNNVGRIVKAVLFGNPSLDKSCSEHTDQVVSASLSGHAMGFLPCRTFPAIGFTSMDEDVGYVSPLLAFNLGLHVSCLKLLIQREGQPFKFCSRAEEIDATASSGSDLSLHLDLLPCPQVPKYALHLRVSVVRIPDCGVLASLKIYSSFGGSEYQDMVDQALNEYFKFDRFLARGDVFGIQNSWKCGSSCCLACNKQDNKLNPRNMIYFKVTGMEPSDEPILRVNCNETALVLGGAASAAIPPYSFFASSGNSVPLHSEVVEHLASVIAPALCPSDILPKIKFSTFLYGPPGCGKRTVVRHVANHLGLHVVECSCHDLMTSSESGAPAALATAFKEAQKYSPCIILLRHFDAIGNASSNEGPQSEQSGIASNIESVIKQYIGQRWVAKDSLPGKDVNGSSYLVEPECVSSLQIILVATADSSEGMQQSIRRCFRYEIDMKTMNEEQRNELISETLQGIPKVADESICDKFIKDLAAQTSGFMPRDILALVADAGVSFAHKIAAGKDSKAISKHTEVLPESSSATQNEEHHFSKEDIMSSLERAKKRNRAALGTPKVPNVKWEDVGGLEDVKKVILDTIQLPLMYKHLFSSKLRKRSGVLLYGPPGTGKRKMFGIFLRRLGLHAHVSFSLMSLIPLLLHEDPQQILAVSWTGLFPSYLWRSMG

SEQ ID NO: 165865 - protein, 738 aa, Zea Mays
MASGGGGIRATTSGRMKSRGWGDSSDDFGTPAIALRRGGDCSGTASSDSSAVFFAVAFCAPSPGLSVTAAAAMVEMRQRRKPLVLASTQALLDSLPGDRPPPPPQKPVRLKAGVLRFPSGGGGAEFGELASFVGIPAPALRRLAVVTGTPVLVKNTDNNVGRIVKAVLFGNPSLDKSCSEHTDQVVSASLSGHAMGFLPCRTFPAIGFTSMDEDVGYVSPLLAFNLGLHVSCLKLLIQREGQPFKFCSRAEEIDATASSGSDLSLHLDLLPCPQVPKYALHLRVSVVRIPDCGVLASLKIYSSFGGSEYQDMVDQALNEYFKFDRFLARGDVFGIQNSWKCGSSCCLACNKQDNKLNPRNMIYFKVTGMEPSDEPILRVNCNETALVLGGAASAAIPPYSFFASSGNSVPLHSEVVEHLASVIAPALCPSDILPKIKFSTFLYGPPGCGKRTVVRHVANHLGLHVVECSCHDLMTSSESGAPAALATAFKEAQKYSPCIILLRHFDAIGNASSNEGPQSEQSGIASNIESVIKQYIGQRWVAKDSLPGKDVNGSSYLVEPECVSSLQIILVATADSSEGMQQSIRRCFRYEIDMKTMNEEQRNELISETLQGIPKVADESICDKFIKDLAAQTSGFMPRDILALVADAGVSFAHKIAAGKDSKAISKHTEVLPESSSATQNEEHHFSKEDIMSSLERAKKRNRAALGTPKVPNVKWEDVGGLEDVKKVILDTIQFSCL

SEQ ID NO: 165866 - protein, 769 aa, Zea Mays
MASGGGGIRATTSGRMKSRGWGDSSDDFGTPAIALRRGGDCSGTASSDSSAVFFAVAFCAPSPGLSVTAAAAMVEMRQRRKPLVLASTQALLDSLPGDRPPPPPQKPVRLKAGVLRFPSGGGGAEFGELASFVGIPAPALRRLAVVTGTPVLVKNTDNNVGRIVKAVLFGNPSLDKSCSEHTDQVVSASLSGHAMGFLPCRTFPAIGFTSMDEDVGYVSPLLAFNLGLHVSCLKLLIQREGQPFKFCSRAEEIDATASSGSDLSLHLDLLPCPQVPKYALHLRVSVVRIPDCGVLASLKIYSSFGGSEYQDMVDQALNEYFKFDRFLARGDVFGIQNSWKCGSSCCLACNKQDNKLNPRNMIYFKVTGMEPSDEPILRVNCNETALVLGGAASAAIPPYSFFASSGNSVPLHSEVVEHLASVIAPALCPSDILPKIKFSTFLYGPPGCGKRTVVRHVANHLGLHVVECSCHDLMTSSESGAPAALATAFKEAQKYSPCIILLRHFDAIGNASSNEGPQSEQSGIASNIESVIKQYIGQRWVAKDSLPGKDVNGSSYLVEPECVSSLQIILVATADSSEGMQQSIRRCFRYEIDMKTMNEEQRNELISETLQGIPKVADESICDKFIKDLAAQTSGFMPRDILALVADAGVSFAHKIAAGKDSKAISKHTEVLPESSSATQNEEHHFSKEDIMSSLERAKKRNRAALGTPKVPNVKWEDVGGLEDVKKVILDTIQLPLMYKHLFSSKLRKRSGVLLYGPPGTGKFSTVNL

SEQ ID NO: 165867 - protein, 112 aa, Zea Mays
MLVVTKLLFLSAGASATAIALVKMACCFLFGKKAKQTTEGDEDLHSVKVFSYSELRKATQDFSGANKIGEGGFGSVFRVNMRENFSSTPSVYCADGMGGEGGKKILGSHFSL

SEQ ID NO: 165868 - protein, 704 aa, Zea Mays
MPVQTNLRPRLRPARLRFKVTGDGRHQACFAKFQKPKMWIIPPIYSTNLGPLPVQEEFGSTATAQIAKHQGDLAAQHGRFRSSLASAVRSPPGSAACVPPSPPFDEREIAPHPFDEISEAASRGGSRSREINLEVGPHIFMAFDCNKERGVSSPDSCSRICTEGTLVQANPLSHYWKPKRLENFNKLENQKSSYESAPSGSDPKQDAEASDEATASLCGFRCFTDLPASLVCEVLARLDAKDLGIVSCVSTLLHALATDHQGWKKLYCERWGLPDLPTTLNGPLLPGVPLDGKFWKTFFVEREFRSKSFMGRFNLDILRGHNEDVRAVSLLVSANLIFTGGRDSVVRMWKMEEGLLIDTSRALGGTIRAIAADSRLLVSGGTNAYIQCWRAVEGNGQLFHISGSGTDQNAEFRLWGHEGPVTCLALDSLRIYSGSWDMTVRVWDRDQMECVQKFMHADWVWDLALRGNTVASTAGRDAYVWDIRAGELTSLISNAHVGSAYSIAWTHLPDVLFTGGEDGAIRLFNVSDVCDDEGDIKPVATWVPHSGPVHSLAFEYPWLVSASSDGRIALIDLRKLLSSKSSSKGLRVKRVDGSAIEPPQRMLHGVGCDLFSIAIGADRIVCAGEDGSVRVWNFSEALEIERRAQALRSLRQENRIRRRKSQAEMNTNTRRPDQCSIAMKKNQLKGDKSATWHNKRAINEKAKS

SEQ ID NO: 165869 - protein, 422 aa, Zea Mays
MQKRNGYLVPLCRFPFIACEIFTCDVDVIMKTLVEDEDLMNLLFSFLKPDHPHGTLLAGYFAKVVICLAMRKTLQLVHYVQGHPEIVSQLVDLIGITSIMEVLIRLIGADETMYSSHADSMQWLDDIQVLEMIVDKFSTSDSAEVHANAAEILCAVTRYAPPALAAKISSPSFVGRLFQHAFEDSRPKSVLVHSLSVCISLLDPKRLVSASYQAFRSQLSHGTLVTASPETVNGMLDSLGDLLKLLDVSSAENVLPTTYGSLQPPLGKHRLKIVEFISVLLSIGSEVAETRLIQLGAIQHAIDLFFEYPFNNFLHHHVENIIGSCLESKQDHLIGHVLDECKLVTRILEAEKNSALSSDLTKHTLSTEGRCPPRIGIVGHMTRIANKLLQLANTNIMVQSYLQVVLSFMLSQSLINIIPEVL

SEQ ID NO: 165870 - protein, 682 aa, Zea Mays
MKTLVEDEDLMNLLFSFLKPDHPHGTLLAGYFAKVVICLAMRKTLQLVHYVQGHPEIVSQLVDLIGITSIMEVLIRLIGADETMYSSHADSMQWLDDIQVLEMIVDKFSTSDSAEVHANAAEILCAVTRYAPPALAAKISSPSFVGRLFQHAFEDSRPKSVLVHSLSVCISLLDPKRLVSASYQAFRSQLSHGTLVTASPETVNGMLDSLGDLLKLLDVSSAENVLPTTYGSLQPPLGKHRLKIVEFISVLLSIGSEVAETRLIQLGAIQHAIDLFFEYPFNNFLHHHVENIIGSCLESKQDHLIGHVLDECKLVTRILEAEKNSALSSDLTKHTLSTEGRCPPRIGIVGHMTRIANKLLQLANTNIMVQSYLQQNSDWIEWHTSTLTKRNALENVYQWACGRPTSLQDRGRDSDDEDFRDRDYDVAALASNLSQAFKYGIYSNDDIDEAQASLERDDEDVYFDDESAEVVISSLRLGDDQESGSLFTNSNWFAFDEDKALNDGLVSPEASPSPNSEISALKEDDEVILGEVIDDTEGSEPTLPVSNKDANEESGHTVLANGTIDKQEDDIRPLTPDVKESQPEFVEWKEEEAEPGDVAEKDTAVPGIEVESEKQLNSMDDVMLCDAELGEEKKSGGMLGSSAPEAEAASPVSSDIDSIKHPEQAADSAVSEYPMGEQNPEI

SEQ ID NO: 165871 - protein, 331 aa, Zea Mays
MTRIANKLLQLANTNIMVQSYLQQNSDWIEWHTSTLTKRNALENVYQWACGRPTSLQDRGRDSDDEDFRDRDYDVAALASNLSQAFKYGIYSNDDIDEAQASLERDDEDVYFDDESAEVVISSLRLGDDQESGSLFTNSNWFAFDEDKALNDGLVSPEASPSPNSEISALKEDDEVILGEVIDDTEGSEPTLPVSNKDANEESGHTVLANGTIDKQEDDIRPLTPDVKESQPEFVEWKEEEAEPGDVAEKDTAVPGIEVESEKQLNSMDDVMLCDAELGEEKKSGGMLGSSAPEAEAASPVSSDIDSIKHPEQAADSAVSEYPMGEQNPEI

SEQ ID NO: 165872 - protein, 477 aa, Zea Mays
MLDSLGDLLKLLDVSSAENVLPTTYGSLQPPLGKHRLKIVEFISVLLSIGSEVAETRLIQLGAIQHAIDLFFEYPFNNFLHHHVENIIGSCLESKQDHLIGHVLDECKLVTRILEAEKNSALSSDLTKHTLSTEGRCPPRIGIVGHMTRIANKLLQLANTNIMVQSYLQQNSDWIEWHTSTLTKRNALENVYQWACGRPTSLQDRGRDSDDEDFRDRDYDVAALASNLSQAFKYGIYSNDDIDEAQASLERDDEDVYFDDESAEVVISSLRLGDDQESGSLFTNSNWFAFDEDKALNDGLVSPEASPSPNSEISALKEDDEVILGEVIDDTEGSEPTLPVSNKDANEESGHTVLANGTIDKQEDDIRPLTPDVKESQPEFVEWKEEEAEPGDVAEKDTAVPGIEVESEKQLNSMDDVMLCDAELGEEKKSGGMLGSSAPEAEAASPVSSDIDSIKHPEQAADSAVSEYPMGEQNPEI

SEQ ID NO: 165873 - protein, 711 aa, Zea Mays
MQKRNGYLVPLCRFPFIACEIFTCDVDVIMKTLVEDEDLMNLLFSFLKPDHPHGTLLAGYFAKVVICLAMRKTLQLVHYVQGHPEIVSQLVDLIGITSIMEVLIRLIGADETMYSSHADSMQWLDDIQVLEMIVDKFSTSDSAEVHANAAEILCAVTRYAPPALAAKISSPSFVGRLFQHAFEDSRPKSVLVHSLSVCISLLDPKRLVSASYQAFRSQLSHGTLVTASPETVNGMLDSLGDLLKLLDVSSAENVLPTTYGSLQPPLGKHRLKIVEFISVLLSIGSEVAETRLIQLGAIQHAIDLFFEYPFNNFLHHHVENIIGSCLESKQDHLIGHVLDECKLVTRILEAEKNSALSSDLTKHTLSTEGRCPPRIGIVGHMTRIANKLLQLANTNIMVQSYLQQNSDWIEWHTSTLTKRNALENVYQWACGRPTSLQDRGRDSDDEDFRDRDYDVAALASNLSQAFKYGIYSNDDIDEAQASLERDDEDVYFDDESAEVVISSLRLGDDQESGSLFTNSNWFAFDEDKALNDGLVSPEASPSPNSEISALKEDDEVILGEVIDDTEGSEPTLPVSNKDANEESGHTVLANGTIDKQEDDIRPLTPDVKESQPEFVEWKEEEAEPGDVAEKDTAVPGIEVESEKQLNSMDDVMLCDAELGEEKKSGGMLGSSAPEAEAASPVSSDIDSIKHPEQAADSAVSEYPMGEQNPEI

SEQ ID NO: 165874 - protein, 578 aa, Zea Mays
MFNHQTFIHHIPRHLQVQLLKQNTSGHHQSLKNEVSSPISVLERKSGELHKVQLHATSAMLPVATMEKATKWEPGDIKGMESHDAYLIASQLNLLDEQQDTVYVAGLQMELQQARDRISELETERRSARKKLDHLFKKLAEEKAAWRNREHEKVRAILEDMKADLDHEKKNRRRLEMINLKLVNELKEAKMSAKQLLQDYETERKARELTEEVCNELAREVGEDKAEIEALKRDSLRLREELDEERKMLQMAEVWREERVQMKLVDAKLTLDAKYTQLSRLQHVVEAFIAARSTANGDITVVEEAENIIQAIKSVRAQGAEFRYEPPAASEDIFSIFEELRPSEEPVIKEIEPCYTNSSAKCESEIQQVSPMTDIFLETKAKVYSNKSPKDESDAEDGSSWETISHEDMRGSSGSPDGSEPSVSNKISISWNSRNGFEYRENEKLEDDLADAYLASMNQPKKKESAISKLWKSSRPKNSEVCKKDAVVETVNARPSNARHSVGTYSTVESGIQETGLSPPSVEQWSSPDSMNIQFNRGFKGCIEYPRTSQKHSLKAKLMEARMESQKIQLRQVLKQKI

SEQ ID NO: 165875 - protein, 581 aa, Zea Mays
MSVNLCCSFQITHIPRHLQVQLLKQNTSGHHQSLKNEVSSPISVLERKSGELHKVQLHATSAMLPVATMEKATKWEPGDIKGMESHDAYLIASQLNLLDEQQDTVYVAGLQMELQQARDRISELETERRSARKKLDHLFKKLAEEKAAWRNREHEKVRAILEDMKADLDHEKKNRRRLEMINLKLVNELKEAKMSAKQLLQDYETERKARELTEEVCNELAREVGEDKAEIEALKRDSLRLREELDEERKMLQMAEVWREERVQMKLVDAKLTLDAKYTQLSRLQHVVEAFIAARSTANGDITVVEEAENIIQAIKSVRAQGAEFRYEPPAASEDIFSIFEELRPSEEPVIKEIEPCYTNSSAKCESEIQQVSPMTDIFLETKAKVYSNKSPKDESDAEDGSSWETISHEDMRGSSGSPDGSEPSVSNKISISWNSRNGFEYRENEKLEDDLADAYLASMNQPKKKESAISKLWKSSRPKNSEVCKKDAVVETVNARPSNARHSVGTYSTVESGIQETGLSPPSVEQWSSPDSMNIQFNRGFKGCIEYPRTSQKHSLKAKLMEARMESQKIQLRQVLKQKI

SEQ ID NO: 165876 - protein, 311 aa, Zea Mays
MSSEGNKDVPNEALSVDLSSISGAKRKRGRPRKYEHPAYELPQKVQPLQSAPPLHCSQDGSSMASHTSGGYAHGSWSAQPRNSVNASIQGNSGKDDVLGKHFVGKLTKKIPGFSLITVKVKDNQVLKGWVPDEINLRPITPKDDLAPELPMLRPSHVRKRASAIHMQTALTVPLHLEDITLAKPLQMRRPVEETIAKHSVPLAPRPYMGSGVVAPVPISVALAPNNPELTSLTRQDAELVIPQSSVAAVPITSVPPCKQLANQNEFTEKNYVDEFQKDSESRNVTKELPAGKNKHCSCGWSCQGFSRSNLV

SEQ ID NO: 165877 - protein, 305 aa, Zea Mays
MSSEGNKDVPNEALSVDLSSISGAKRKRGRPRKYEHPAYELPQKVQPLQSAPPLHCSQDGSSMASHTSGGYAHGSWSAQPRNSVNASIQGNSGKDDVLGKHFVGKLTKKIPGFSLITVKVKDNQVLKGWVPDEINLRPITPKDDLAPELPMLRPSHVRKRASAIHMQTALTVPLHLEDITLAKPLQMRRPVEETIAKHSVPLAPRPYMGSGVVAPVPISVALAPNNPELTSLTRQDAELVIPQSSVAAVPITSVPPCKQLANQNEFTEKNYVDEFQKDSESRNVTKELPGKFCWIGVLLCFRSLT

SEQ ID NO: 165878 - protein, 512 aa, Zea Mays
MGRGGGGVSDPLLGDEFESKSGSENVDGGVSVDELQDPNQRPSKKKRYHRHTQHQIQELEAFFKECPHPDDKQRKELSRELGLEPLQVKFWFQNKRTQMKNQYAAVFSSIVSRAATLEVLSTGVAGNYNGALQVMSVEFQVPSPLVPTRESYFVRYCKQNADGTWAVVDVSLDGLRPGAVLKCRRRPSGCLIQEMPNGYSKVTWVEHVEVDDRSVHSIYKLLVSSGLAFGARRWVGTLDRQCERLASVMASNIPTSDIGVITSAEGRKSMLKLAERMVMSFCGGVTASAAHQWTTLSGSGAEDVRVMTRKSVDDPGRPPGIVLNAATSFWLPVPPKRVFDFLRDESSRSEWDILSNGGVVQEMAHIANGRDHGNCVSLLRVNSTNSNQSSMLILQESCTDMSGSYVIYAPVDVVAMNVVLNGGDPDYVALLPSGFAILPDGPSSGSSSMLQGDGGVGSGGSLLTVAFQILVDSVPTAKISLGSVATVNSLIACTVERIKAAVISGQSNPQQQ

SEQ ID NO: 165879 - protein, 797 aa, Zea Mays
MPPMIVRNSAAAYGSSSALSLGQPNLLLDNQQLQLLQQQHLLDQIPATTAESGDNMGRGGGGVSDPLLGDEFESKSGSENVDGGVSVDELQDPNQRPSKKKRYHRHTQHQIQELEAFFKECPHPDDKQRKELSRELGLEPLQVKFWFQNKRTQMKNHHERQENSQLRSENEKLRAENMRYKEALSSASCPSCGGPAALGEMSFDEHHLRVENARLREEVDRISSIAAKYVGRPMVPFPVLSSPLAGAGARAPALPPLDMAPPYGAAADMFGGGGVVAAAGAAGAGDLLLRGAAVQSDADKPMIVELAVAAMEELVRMAQLDEPLWNAPAGLDGSAEEETLNEEEYARLFPGGLGPKPYGLNSEASRDSAVVIMTHANLVEILMDVNQYAAVFSSIVSRAATLEVLSTGVAGNYNGALQVMSVEFQVPSPLVPTRESYFVRYCKQNADGTWAVVDVSLDGLRPGAVLKCRRRPSGCLIQEMPNGYSKVTWVEHVEVDDRSVHSIYKLLVSSGLAFGARRWVGTLDRQCERLASVMASNIPTSDIGVITSAEGRKSMLKLAERMVMSFCGGVTASAAHQWTTLSGSGAEDVRVMTRKSVDDPGRPPGIVLNAATSFWLPVPPKRVFDFLRDESSRSEWDILSNGGVVQEMAHIANGRDHGNCVSLLRVNSTNSNQSSMLILQESCTDMSGSYVIYAPVDVVAMNVVLNGGDPDYVALLPSGFAILPDGPSSGSSSMLQGDGGVGSGGSLLTVAFQILVDSVPTAKISLGSVATVNSLIACTVERIKAAVISGQSNPQQQ

SEQ ID NO: 165880 - protein, 804 aa, Zea Mays
MMIPARHMPPMIVRNSAAAYGSSSALSLGQPNLLLDNQQLQLLQQQHLLDQIPATTAESGDNMGRGGGGVSDPLLGDEFESKSGSENVDGGVSVDELQDPNQRPSKKKRYHRHTQHQIQELEAFFKECPHPDDKQRKELSRELGLEPLQVKFWFQNKRTQMKNHHERQENSQLRSENEKLRAENMRYKEALSSASCPSCGGPAALGEMSFDEHHLRVENARLREEVDRISSIAAKYVGRPMVPFPVLSSPLAGAGARAPALPPLDMAPPYGAAADMFGGGGVVAAAGAAGAGDLLLRGAAVQSDADKPMIVELAVAAMEELVRMAQLDEPLWNAPAGLDGSAEEETLNEEEYARLFPGGLGPKPYGLNSEASRDSAVVIMTHANLVEILMDVNQYAAVFSSIVSRAATLEVLSTGVAGNYNGALQVMSVEFQVPSPLVPTRESYFVRYCKQNADGTWAVVDVSLDGLRPGAVLKCRRRPSGCLIQEMPNGYSKVTWVEHVEVDDRSVHSIYKLLVSSGLAFGARRWVGTLDRQCERLASVMASNIPTSDIGVITSAEGRKSMLKLAERMVMSFCGGVTASAAHQWTTLSGSGAEDVRVMTRKSVDDPGRPPGIVLNAATSFWLPVPPKRVFDFLRDESSRSEWDILSNGGVVQEMAHIANGRDHGNCVSLLRVNSTNSNQSSMLILQESCTDMSGSYVIYAPVDVVAMNVVLNGGDPDYVALLPSGFAILPDGPSSGSSSMLQGDGGVGSGGSLLTVAFQILVDSVPTAKISLGSVATVNSLIACTVERIKAAVISGQSNPQQQ

SEQ ID NO: 165881 - protein, 521 aa, Zea Mays
MIVSHGYPLSIVEHEEMRRFVKSLNPMIHADAVSHNDIEGHCCALFEKEKAKLKDQLTLSSRRVSLSASIWTPEGAEPTVNYLCLTAHFIDKNWKVHRMIIKFGMFRSSPTDVERMVHHKEACVPESECGAYNVIWDAIRDWNLDQKILSLTSVGEVRNALSSSKLKEILVEKKCLPIRGKLYDVACVDDVLNTIASKVQQNIIHLVGDMVTEFFVAHTSSSLNQQQLMEVISQMSLKCPQEDAKWWYKFYFRLEVFLHFNKPFPFEEAASPEHVIVAESICKILRTFYRVIEVISASSSPTANMYFNEIWKVRTVLQEEASSEHAEITAMVAEMQETFNEYWQHSYLWLCIPVILDPRFKFGFIEFRLKRAFGLKSASYLSGIRETLQELFNEYCSPVDQPNVRVPKSESFSLDDNDSFEDWDQHLNEQASSQKSTELDNYLADGLVPRKDDFDNLNWWMCHATKYPTLAAIVQDILAMPASAVPSEAAFTSSGPVIPKHHSMLSIKTIEALVCTRDWMR

SEQ ID NO: 165882 - protein, 746 aa, Zea Mays
MSCKDSNGTSHLWRHQKICPGKRDVVFRRLKDSYFPCVLVNQSEPVTPGDSVNQIISETLDDISSVIPNRFKSKVWREFSPIYVEGKLQAADCVHCRKRLSANKFGGRSHLSRHLQTCQARRGYNNQKGTLYPSSVPDLKSIGQDELSPALANGKVHIAGYSSKHLWSSSSADTSPIVRPIQVSAHQPLPSQDFPSLGKQRTSFTTTTSDIRKVDQGTAYQELARMIVSHGYPLSIVEHEEMRRFVKSLNPMIHADAVSHNDIEGHCCALFEKEKAKLKDQLTLSSRRVSLSASIWTPEGAEPTVNYLCLTAHFIDKNWKVHRMIIKFGMFRSSPTDVERMVHHKEACVPESECGAYNVIWDAIRDWNLDQKILSLTSVGEVRNALSSSKLKEILVEKKCLPIRGKLYDVACVDDVLNTIASKVQQNIIHLVGDMVTEFFVAHTSSSLNQQQLMEVISQMSLKCPQEDAKWWYKFYFRLEVFLHFNKPFPFEEAASPEHVIVAESICKILRTFYRVIEVISASSSPTANMYFNEIWKVRTVLQEEASSEHAEITAMVAEMQETFNEYWQHSYLWLCIPVILDPRFKFGFIEFRLKRAFGLKSASYLSGIRETLQELFNEYCSPVDQPNVRVPKSESFSLDDNDSFEDWDQHLNEQASSQKSTELDNYLADGLVPRKDDFDNLNWWMCHATKYPTLAAIVQDILAMPASAVPSEAAFTSSGPVIPKHHSMLSIKTIEALVCTRDWMR

SEQ ID NO: 165883 - protein, 779 aa, Zea Mays
MRGRRRRMAWEQKRHSRGCTITTLSECLYCHSRMSCKDSNGTSHLWRHQKICPGKRDVVFRRLKDSYFPCVLVNQSEPVTPGDSVNQIISETLDDISSVIPNRFKSKVWREFSPIYVEGKLQAADCVHCRKRLSANKFGGRSHLSRHLQTCQARRGYNNQKGTLYPSSVPDLKSIGQDELSPALANGKVHIAGYSSKHLWSSSSADTSPIVRPIQVSAHQPLPSQDFPSLGKQRTSFTTTTSDIRKVDQGTAYQELARMIVSHGYPLSIVEHEEMRRFVKSLNPMIHADAVSHNDIEGHCCALFEKEKAKLKDQLTLSSRRVSLSASIWTPEGAEPTVNYLCLTAHFIDKNWKVHRMIIKFGMFRSSPTDVERMVHHKEACVPESECGAYNVIWDAIRDWNLDQKILSLTSVGEVRNALSSSKLKEILVEKKCLPIRGKLYDVACVDDVLNTIASKVQQNIIHLVGDMVTEFFVAHTSSSLNQQQLMEVISQMSLKCPQEDAKWWYKFYFRLEVFLHFNKPFPFEEAASPEHVIVAESICKILRTFYRVIEVISASSSPTANMYFNEIWKVRTVLQEEASSEHAEITAMVAEMQETFNEYWQHSYLWLCIPVILDPRFKFGFIEFRLKRAFGLKSASYLSGIRETLQELFNEYCSPVDQPNVRVPKSESFSLDDNDSFEDWDQHLNEQASSQKSTELDNYLADGLVPRKDDFDNLNWWMCHATKYPTLAAIVQDILAMPASAVPSEAAFTSSGPVIPKHHSMLSIKTIEALVCTRDWMR

SEQ ID NO: 165884 - protein, 201 aa, Zea Mays
MGRDFNSSSSVGDHGVDVEATMVIGEDEIEGAKWTMDNVKFSVKEPIEAVATKEELEHLVMLCRSEADAMGRITAGILRLLKLDKSLGQGTIEQLRNLGSGGMDNIFSPRRLSRQNSFGSIGTPRTPTMQAIADVMGSKTTLEATISSLQGEISESKAKCMALISQASSTEDQNRAEDIRQLSEKLESMQSLVTRLRTLII

SEQ ID NO: 165885 - protein, 372 aa, Zea Mays
MESIIARALEYTLKYWLKSFSRDQFKLQGRTAQLSNLDINGDALHASLGLPPALAVDTARVGKLQITLPSLSNVQVEPIEVNIDKLDLVLVEKDDSENLSSPSSTASSPSATKSSGYGYADKIADGMTVQVGIVNLLLETHGGAHRQGDATWSPPLAAITFRDLVLYTTNEKWQVVNLKEARDFSNNKGFIYVFKKLEWQSLSVDLLPHPDMFADARFNSSSSQDDKRDDDGAKRMFFGGERFLEGISGEANITVQRTEQNNPLGLEVQLHITEAVCPALSEPGLRAFLRFMTGVSVCLNRGDIDPKAQQLAEAAGSSLVSIIVDHIFLCIKDTEFQLELLMQSLFFSRASISDGECSKNLSCIKVGGMFLR

SEQ ID NO: 165886 - protein, 870 aa, Zea Mays
MQSLFFSRASISDGECSKNLSCIKVGGMFLRDTFSRPPCTLIQPSMQAVSQEPPPVPDFGQNFCPPIYPFGNQLLDFAAGVPLFSLYCLQTTPSPSPPKFASKTVITCQSIMVTLQEQSCLRIASFLADGVVPNRGAILPESSINSLTFSLKEFDLSVPLDTDEIARCSGTKNTNPQSSFSGARLHVEDLYFCQSPSTKCPLLNLDRDPACFLLWEYQPVDASQMKWATWSSHLSLSLETSSTSNGQRAVSDSNLWKCIELDDIRFEVAMVTADGGPLLDVPPPEGVVRIGVAFQQFKSNTSVEQLFFVLGFYTYFGQVAERISKVSNANKSESVKSSADKSENKLPSDTAVSLTMNNLQLNFLESLSASDVHMPLVQFGGGDLFLKVSHRTLGGAFAVTTNLMWTTVSVNCLEGESAIVCEHGTAVTGEHSILVHGNGHPKMRAVFWVDHRSKHQVKEPQFLDINITHVMPYDIQDMECHSLNVSAKVSGVRLGGGISYTESLLHRFGILGPDGGPGEGLLRGLKDLSSGPLAKLFKSSHLTEKEDERSKIDDHNSKFDLGVPDDLDVSIELRNWLFALEGTEEVGYLFSPRGGDGISREEKCWHSTFRNLHISGKSSDRLKLGGRRKVSPEKAFPVERFTAGIEGLQAIKPRLRDQCTKKGPSNNHEMGRDFNSSSSVGDHGVDVEATMVIGEDEIEGAKWTMDNVKFSVKEPIEAVATKEELEHLVMLCRSEADAMGRITAGILRLLKLDKSLGQGTIEQLRNLGSGGMDNIFSPRRLSRQNSFGSIGTPRTPTMQAIADVMGSKTTLEATISSLQGEISESKAKCMALISQASSTEDQNRAEDIRQLSEKLESMQSLVTRLRTLII

SEQ ID NO: 165887 - protein, 1176 aa, Zea Mays
MESIIARALEYTLKYWLKSFSRDQFKLQGRTAQLSNLDINGDALHASLGLPPALAVDTARVGKLQITLPSLSNVQVEPIEVNIDKLDLVLVEKDDSENLSSPSSTASSPSATKSSGYGYADKIADGMTVQVGIVNLLLETHGGAHRQGDATWSPPLAAITFRDLVLYTTNEKWQVVNLKEARDFSNNKGFIYVFKKLEWQSLSVDLLPHPDMFADARFNSSSSQDDKRDDDGAKRMFFGGERFLEGISGEANITVQRTEQNNPLGLEVQLHITEAVCPALSEPGLRAFLRFMTGVSVCLNRGDIDPKAQQLAEAAGSSLVSIIVDHIFLCIKDTEFQLELLMQSLFFSRASISDGECSKNLSCIKVGGMFLRDTFSRPPCTLIQPSMQAVSQEPPPVPDFGQNFCPPIYPFGNQLLDFAAGVPLFSLYCLQTTPSPSPPKFASKTVITCQSIMVTLQEQSCLRIASFLADGVVPNRGAILPESSINSLTFSLKEFDLSVPLDTDEIARCSGTKNTNPQSSFSGARLHVEDLYFCQSPSTKCPLLNLDRDPACFLLWEYQPVDASQMKWATWSSHLSLSLETSSTSNGQRAVSDSNLWKCIELDDIRFEVAMVTADGGPLLDVPPPEGVVRIGVAFQQFKSNTSVEQLFFVLGFYTYFGQVAERISKVSNANKSESVKSSADKSENKLPSDTAVSLTMNNLQLNFLESLSASDVHMPLVQFGGGDLFLKVSHRTLGGAFAVTTNLMWTTVSVNCLEGESAIVCEHGTAVTGEHSILVHGNGHPKMRAVFWVDHRSKHQVKEPQFLDINITHVMPYDIQDMECHSLNVSAKVSGVRLGGGISYTESLLHRFGILGPDGGPGEGLLRGLKDLSSGPLAKLFKSSHLTEKEGTEEVGYLFSPRGGDGISREEKCWHSTFRNLHISGKSSDRLKLGGRRKVSPEKAFPVERFTAGIEGLQAIKPRLRDQCTKKGPSNNHEMGRDFNSSSSVGDHGVDVEATMVIGEDEIEGAKWTMDNVKFSVKEPIEAVATKEELEHLVMLCRSEADAMGRITAGILRLLKLDKSLGQGTIEQLRNLGSGGMDNIFSPRRLSRQNSFGSIGTPRTPTMQAIADVMGSKTTLEATISSLQGEISESKAKCMALISQASSTEDQNRAEDIRQLSEKLESMQSLVTRLRTLII

SEQ ID NO: 165888 - protein, 1058 aa, Zea Mays
MTVQVGIVNLLLETHGGAHRQGDATWSPPLAAITFRDLVLYTTNEKWQVVNLKEARDFSNNKGFIYVFKKLEWQSLSVDLLPHPDMFADARFNSSSSQDDKRDDDGAKRMFFGGERFLEGISGEANITVQRTEQNNPLGLEVQLHITEAVCPALSEPGLRAFLRFMTGVSVCLNRGDIDPKAQQLAEAAGSSLVSIIVDHIFLCIKDTEFQLELLMQSLFFSRASISDGECSKNLSCIKVGGMFLRDTFSRPPCTLIQPSMQAVSQEPPPVPDFGQNFCPPIYPFGNQLLDFAAGVPLFSLYCLQTTPSPSPPKFASKTVITCQSIMVTLQEQSCLRIASFLADGVVPNRGAILPESSINSLTFSLKEFDLSVPLDTDEIARCSGTKNTNPQSSFSGARLHVEDLYFCQSPSTKCPLLNLDRDPACFLLWEYQPVDASQMKWATWSSHLSLSLETSSTSNGQRAVSDSNLWKCIELDDIRFEVAMVTADGGPLLDVPPPEGVVRIGVAFQQFKSNTSVEQLFFVLGFYTYFGQVAERISKVSNANKSESVKSSADKSENKLPSDTAFGGGDLFLKVSHRTLGGAFAVTTNLMWTTVSVNCLEGESAIVCEHGTAVTGEHSILVHGNGHPKMRAVFWVDHRSKHQVKEPQFLDINITHVMPYDIQDMECHSLNVSAKVSGVRLGGGISYTESLLHRFGILGPDGGPGEGLLRGLKDLSSGPLAKLFKSSHLTEKEDERSKIDDHNSKFDLGVPDDLDVSIELRNWLFALEGTEEVGYLFSPRGGDGISREEKCWHSTFRNLHISGKSSDRLKLGGRRKVSPEKAFPVERFTAGIEGLQAIKPRLRDQCTKKGPSNNHEMGRDFNSSSSVGDHGVDVEATMVIGEDEIEGAKWTMDNVKFSVKEPIEAVATKEELEHLVMLCRSEADAMGRITAGILRLLKLDKSLGQGTIEQLRNLGSGGMDNIFSPRRLSRQNSFGSIGTPRTPTMQAIADVMGSKTTLEATISSLQGEISESKAKCMALISQASSTEDQNRAEDIRQLSEKLESMQSLVTRLRTLII

SEQ ID NO: 165889 - protein, 1105 aa, Zea Mays
MASARKVRNANKRYAKINEDWQDKDTPSVPKSKVRKKKLSDMLGSQWSKDELERFYGAYRKYGKDWRKVAGTIRDRTSDMVKALYNMNKAYLSLPEGTATAAGLIAMMTDHYNILDGSNSDRESSDSPKASRRLQKRGRAKLQSVSKTSDTHFTDLLQPQPASSSYGCLSLLKKKRSGDLFVGNRPRAVGKRTPRVPVASMYHRDDRGAPNRQAKPDANDGDDEGAHVAALALAEVHQRGGSPQISHTPRRSGDHMFLSPAKSSGRKNADSEMGSSKLHGFQLDADYPEGSLGSREAETGDYTKGTSYLIANKGSPSSKPQKKVKRPQKRRKKAVRRTDDQFEDDREACSGTEEGCSMKKAKEEPELETLGTKTAWPSSTSNKRSRQLFFDDESLALDALHTLADLSVNILQPSSVVESESSAQIKDEKRDNDSDGKPGIPAAAVSVYEQKDNSKSTSKKLKRQPEMASTDMVTRKKGKLAKDTHPDGSTTSEVKQQACTCGVKTEKKKKSSMGKILKDEKKMPKDVEKTEVSPEEEKTSSNKTMDIAETTTQVATTLHADLMAKGKSRRKLGIQKSLTQECKPAEGAGDSGSDKLSYSLSNIIDLKDKLSHCLSSRLLRRWCMFEWFYSAIDYPWFAKSEFVEYLNHVKLGHVPRLTHVEWGVIRSSLGKPRRLSKQFLHEEREKLAQYRDSVRQHYTELLSGVREGLPTDLARPLAVGQRVIACHPRTRELHDGNVLTVDHNQCRVQFDRPELGVELVKDIDCMPLHPLENFPESLRHQSAINGYYSHLSEAKYEDQMKELASGGAARSTSNLNGTDATFYTPSGHPMSTLMKQAKEALLVELRHMNEEVSGKQKDGEIIKDLEHFRKQYAMVLVQLRDSNDQVAAALLSLRQRNTYHGNSGQSKSMENGIALAGAPDPYNLFSYINPESGSQVIEVIETSKSRAKMMVDVAIQAMCKVSEGENAFSKIGEALDHLNSRGTGSGSSILGIRRIPPDSGQSNASYHDDCTAAPAANSSSRLPNGCDSEAQFPKELISSCVAMMLMIKNCTEKQYHPAEVAHILDSALSSVQPCSSQNIPIFREIEMCMGIIKNQMLALIPTPSG

SEQ ID NO: 165890 - protein, 1147 aa, Zea Mays
MASARKVRNANKRYAKINEDWQDKDTPSVPKSKVRKKKLSDMLGSQWSKDELERFYGAYRKYGKDWRKVAGTIRDRTSDMVKALYNMNKAYLSLPEGTATAAGLIAMMTDHYNILDGSNSDRESSDSPKASRRLQKRGRAKLQSVSKTSDTHFTDLLQPQPASSSYGCLSLLKKKRSGGNRPRAVGKRTPRVPVASMYHRDDRGAPNRQAKPDANDGDDEGAHVAALALAEVHQRGGSPQISHTPRRSGDHMFLSPAKSSGRKNADSEMGSSKLHGFQLDADYPEGSLGSREAETGDYTKGTSYLIANKGSPSSKPQKKVKRPQKRRKKAVRRTDDQFEDDREACSGTEEGCSMKKAKEEPELETLGTKTAWPSSTSNKRSRQLFFDDESLALDALHTLADLSVNILQPSSVVESESSAQIKDEKRDNDSDGKPGIPAAAVSVYEQKDNSKSTSKKLKRQPEMASTDMVTRKKGKLAKDTHPDGSTTSEVKQQACTCGVKTEKKKKSSMGKILKDEKKMPKDVEKTEVSPEEEKTSSNKTMDIAETTTQVATTLHADLMAKGKSRRKLGIQKSLTQECKPAEGAGDSGSDKLSYSLSNIIDLKDKLSHCLSSRLLRRWCMFEWFYSAIDYPWFAKSEFVEYLNHVKLGHVPRLTHVEWGVIRSSLGKPRRLSKQFLHEEREKLAQYRDSVRQHYTELLSGVREGLPTDLARPLAVGQRVIACHPRTRELHDGNVLTVDHNQCRVQFDRPELGVELVKDIDCMPLHPLENFPESLRHQSAINGYYSHLSEAKYEDQMKELASGGAARSTSNLNGTDATFYTPSGHPMSTLMKQAKANTAVNEVAVATQQSMYNQPCTLSQIQEREADIRALGELSRALDKKEALLVELRHMNEEVSGKQKDGEIIKDLEHFRKQYAMVLVQLRDSNDQVAAALLSLRQRNTYHGNSGQSKSMENGIALAGAPDPYNLFSYINPESGSQVIEVIETSKSRAKMMVDVAIQAMCKVSEGENAFSKIGEALDHLNSRGTGSGSSILGIRRIPPDSGQSNASYHDDCTAAPAANSSSRLPNGCDSEAQFPKELISSCVAMMLMIKNCTEKQYHPAEVAHILDSALSSVQPCSSQNIPIFREIEMCMGIIKNQMLALIPTPSG

SEQ ID NO: 165891 - protein, 241 aa, Zea Mays
MTNHPMEDYHFAELVDVKGNELGLFAIYDGHLGDTVPMYLQKNLFTNILNEEEFWTHTDRAIIKAYEKTDQAILSHTPDLGQGGSTAVTAILVNGRKLWVANVGDSRAVLLKGGEPIQMSIDHDPNVERSVIENRGGFVSNMPGDVPRVCGQLAVSRAFGDRNLKSLLRSEPDIKIEDIDHTAELLVLASDGLWKVMNNQEVVDLAKRYKDPYAAAKQLTVEAQKRDSKDDISCIVVRFKA

SEQ ID NO: 165892 - protein, 954 aa, Zea Mays
MSDKADPAHMLPSNMDIIDLSSDGEQEIIDLSSDSEDNNTLFRSYREDYVDYDDPGSPFHLPFFPHNTAPDWNIMEELDDWRVLAKKEYDDWLSSKASSSYSPVDDILTTEMNSKLPQSFTYGGFIPQSCAPGHSSLGDNRTKEEPSMTFSGFQGCTASGNGMPSSTVPIDDIFVYGGPRPHRIFPPPMPSSVNDIKVEYDVEQRLFSSDERAVYEEALKHITQETKEEDLPKGVMSVLLLKHQGLGKTISTIALIQKEMVKQSRFMTAGSYSTKFVPNSDYDNDSDVVIDMDKKEPKDEPLNELDGSARLHVASSLKLCDSKPNTATDKAEPKKKARVRYSASNLRSKTRPAAGTLVVCPASVLRQWANELSVKVMEDNKLSVLVYHGSSRTRDPNELATYDVVVTTYMTVANEVPKENSNDERKKCEMDGICPEISIGSKRKKQSKPKKKNKPSNSEGGPLARVRWFRVVLDEAQTIKNYRTQVSRACCGLRAQRRWCLSGTPIQNKIDDLYSYFCFLKYEPYSKFSNFKYMIKHQITRDSVRGYKKLQAILRIILLRRTKETLIDGEPILKLPPKTIQLNKIDFTQKERAFYLTLEEGSRQKFKAYDAAGTIRENYANILVLLLRLRQACDHPLLLNGHESDLVDSSSIERAKQLPKETVTNLIEKLERGPAICSICNDPPEDAVVTTCGHVFCYQCVHERLTSDGHVCPYALCGNKLSFRSVFTPAVLKLCTSPKPEFGEETSCSTAADKPSSICESSYISSKIRSAVEILNSIIKTPALTAGDTTESIPSMAPPVKAIVFSQWTGMLDLLELSLNRNGIQFRRLDGAMSLDLREKEVNGFKTDPEVRVMLMSLKAGNLGLNMVAACHVIMLDPWWNPYAEDQAVDRAHRIGQTRPVTVSRFTVKDTVEDRILALQEKKREMVESAFGEDGSRGTATKLTVEDLRYLFMV

SEQ ID NO: 165893 - protein, 955 aa, Zea Mays
MSDKADPAHMLPSNMDIIDLSSDGEQEIIDLSSDSEDNNTLFRSYREDYVDYDDPGSPFHLPFFPHNTAPDWNIMEELDDWRVLAKKEYDDWLSSKASSSYSPVDDILTTEMNSKQLPQSFTYGGFIPQSCAPGHSSLGDNRTKEEPSMTFSGFQGCTASGNGMPSSTVPIDDIFVYGGPRPHRIFPPPMPSSVNDIKVEYDVEQRLFSSDERAVYEEALKHITQETKEEDLPKGVMSVLLLKHQGLGKTISTIALIQKEMVKQSRFMTAGSYSTKFVPNSDYDNDSDVVIDMDKKEPKDEPLNELDGSARLHVASSLKLCDSKPNTATDKAEPKKKARVRYSASNLRSKTRPAAGTLVVCPASVLRQWANELSVKVMEDNKLSVLVYHGSSRTRDPNELATYDVVVTTYMTVANEVPKENSNDERKKCEMDGICPEISIGSKRKKQSKPKKKNKPSNSEGGPLARVRWFRVVLDEAQTIKNYRTQVSRACCGLRAQRRWCLSGTPIQNKIDDLYSYFCFLKYEPYSKFSNFKYMIKHQITRDSVRGYKKLQAILRIILLRRTKETLIDGEPILKLPPKTIQLNKIDFTQKERAFYLTLEEGSRQKFKAYDAAGTIRENYANILVLLLRLRQACDHPLLLNGHESDLVDSSSIERAKQLPKETVTNLIEKLERGPAICSICNDPPEDAVVTTCGHVFCYQCVHERLTSDGHVCPYALCGNKLSFRSVFTPAVLKLCTSPKPEFGEETSCSTAADKPSSICESSYISSKIRSAVEILNSIIKTPALTAGDTTESIPSMAPPVKAIVFSQWTGMLDLLELSLNRNGIQFRRLDGAMSLDLREKEVNGFKTDPEVRVMLMSLKAGNLGLNMVAACHVIMLDPWWNPYAEDQAVDRAHRIGQTRPVTVSRFTVKDTVEDRILALQEKKREMVESAFGEDGSRGTATKLTVEDLRYLFMV

SEQ ID NO: 165894 - protein, 299 aa, Zea Mays
MEKNSHLKDLQALGSLEVFRADLDEDGSFDDAVAGCDYAFLVAAPVNLHTKNPEEEMIEPAVRGTLNVMGSCVKARTVRRVVLTSSAAAVTTRPQLQGDGHVLDEESWSDVEYLRAHKPAGPWGYPVSKVLLEKEASRFAEEHGIGLVTVCPGLTVGAAPAPTARTSVPNCLSLLSGDEAAFAVLDAIESATGCLPLVHVDDVCRAELFAAEEGAAAGRYVCCGLNTTVAELARFLADKYPQYGVKTNLLSGERLEKPRVCLSSAKLVKEGFEFRYRTLDDIYDDMVEYGKDLGILPDL

SEQ ID NO: 165895 - protein, 137 aa, Zea Mays
MPPENEENSIRLITRSDATFEKYRTTDLLPRGKHCMTVVDMRRSERFLQEERVILLEVEEDEVVIDFKPTPSVVSTSASAPCTHPSRSSSRSRPPPRSSSSSARCVVSCRRFPQCPYASCEASRFISNHLYVHIVHM

SEQ ID NO: 165896 - protein, 108 aa, Zea Mays
MWGKHCMTVVDMRRSERFLQEERVILLEVEEDEVVIDFKPTPSVVSTSASAPCTHPSRSSSRSRPPPRSSSSSARCVVSCRRFPQCPYASCEASRFISNHLYVHIVHM

SEQ ID NO: 165897 - protein, 475 aa, Zea Mays
MSLLVTFQIVISRQQQVWLVKALIDQMSTVATTCFGFRNLVHLQLYPLLQNAKQSSMHPKVLLVASTGTTSICLLLTWNQKKRNFQKILLSAIACLLLLTIGALGWACKIRGKWHKKKIQTRMMLEYLSSTDEAGGKNIEFPFITFENIVTATDNFSDCNILGKGGFGKVYKGMLEGTKEVAIKRLSKSSGQGAEEFRNEVILIAKLQHKNLVKLLGCCVHEDEKLLVYEYLPNKSLDYFLFGTLSFKTFHLVNKINKYTCICLLICMPCFILFILDSARKSTLQWPTRFKIIHGVARGIMYLHQDSRLTIIHRDLKASNILLDKDMSPKISDFGMARIFSSDQLHANTNRVVGTYGYMSPEYAMEGAFSVKSDTYSFGVLMLEIVSGLKISSPHLHMDFPNLRAYAWNMWKEGKIEDLVDSSVMENCSLDEVSQCVHIGLLCVQDSPSFRPLMSAVVSMLENKTTTLPTPSQPG

SEQ ID NO: 165898 - protein, 708 aa, Zea Mays
MATSSTSGGAGAFAVLLNSGNFVLRSPNGTDVWQSFDHPTDTVLPTMRSMIRYRSQPATGLFAWKSPDDPSTGDISSGMDPASSNVQVFIWNGTLPYYRSSFFNDVPASGGTYQANNTSVTYQWMMVDTGDEIYYTFTVLAGSPYMHFSLHHTGKMRLLVWENSTSSWVLISEEPSVGCDLYASCGPFGYCDLTKAMPTCQCPDHFELVDSLNFSRGCQRKEELKCGTESYFMTMPNMKIPDKFLHIRNRTFDQCAAECARNCTCMAYTYATLSTASTTGDASRCLVWTQDLIDMEKASVFLENLYIRLGESPDQKKRNFQKILLSAIACLLLLTIGALGWACKIRGKWHKKKIQTRMMLEYLSSTDEAGGKNIEFPFITFENIVTATDNFSDCNILGKGGFGKVYKGMLEGTKEVAIKRLSKSSGQGAEEFRNEVILIAKLQHKNLVKLLGCCVHEDEKLLVYEYLPNKSLDYFLFDSARKSTLQWPTRFKIIHGVARGIMYLHQDSRLTIIHRDLKASNILLDKDMSPKISDFGMARIFSSDQLHANTNRVVGTYGYMSPEYAMEGAFSVKSDTYSFGVLMLEIVSGLKISSPHLHMDFPNLRAYAWNMWKEGKIEDLVDSSVMENCSLDEVSQCVHIGLLCVQDSPSFRPLMSAVVSMLENKTTTLPTPSQPVYFAVRDPYQPGKAVGNKELSIYDMSLTVPEGR

SEQ ID NO: 165899 - protein, 351 aa, Zea Mays
MMLEYLSSTDEAGGKNIEFPFITFENIVTATDNFSDCNILGKGGFGKVYKGMLEGTKEVAIKRLSKSSGQGAEEFRNEVILIAKLQHKNLVKLLGCCVHEDEKLLVYEYLPNKSLDYFLFDSARKSTLQWPTRFKIIHGVARGIMYLHQDSRLTIIHRDLKASNILLDKDMSPKISDFGMARIFSSDQLHANTNRVVGTYGYMSPEYAMEGAFSVKSDTYSFGVLMLEIVSGLKISSPHLHMDFPNLRAYAWNMWKEGKIEDLVDSSVMENCSLDEVSQCVHIGLLCVQDSPSFRPLMSAVVSMLENKTTTLPTPSQPVYFAVRDPYQPGKAVGNKELSIYDMSLTVPEGR

SEQ ID NO: 165900 - protein, 227 aa, Zea Mays
MSLLVTFQIVISRQQQVWLVKALIDQMSTVATTCFGFRNLVHLQLYPLLQNAKQSSMHPKVLLVASTGTTSICLLLTWNQKKRNFQKILLSAIACLLLLTIGALGWACKIRGKWHKKKIQTRMMLEYLSSTDEAGGKNIEFPFITFENIVTATDNFSDCNILGKGGFGKVYKGMLEGTKEVAIKRLSKSSGQGAEEFRNEVILIAKLQHKNLILQESQRFSGQQGSR

SEQ ID NO: 165901 - protein, 164 aa, Zea Mays
MPLFFQARRRQRRSGAHLLELFSTSCVCAVVVRLLHHRQLKDSCTERRTNKRLTAWMMLTTAPRRMMARQAATRSSGSSASVGCRREREHGEEYSLCQMLILASYRRSSPPSCDSFAFHGVAWLLSLRSHCRPTQWRVASCWPHPRVGGASHRPSPPSHDDFTF

SEQ ID NO: 165902 - protein, 55 aa, Zea Mays
MLSSLYQKKVMQQSTTSRPHKMTVICEIKSIVLLIRPIIRKWSKKCGLCKIIHRS

SEQ ID NO: 165903 - protein, 115 aa, Zea Mays
MGPHLTRAGRRGRGGCAGCGRGRPRWRKDKVRVEEEVKISRRGGSNEGKDILVKNNMARDDAVGEEVKAAVPLVVRGVTKEKTVKGARKELVRRDGGITGTTKDSKVSIGGRCAI

SEQ ID NO: 165904 - protein, 69 aa, Zea Mays
MISMFEVYNDKVQDLLSPLAHNDDLQYVVVKTTTEALGYLEKSLKKRSVQLSPFLHELEYLETLTLIQG

SEQ ID NO: 165905 - protein, 354 aa, Zea Mays
MGAHQLGYIDLQFRDKKFPFSLKKEDVVKVYEDLKIPSEQKVDQTQNVSGQNAEIVQENNNEAHTPKGVLNDGMGALEVPINEDQLVPAEEKKSQTLAHETHPVPDEHGSDTKMPSEDSLAVEIETVPIDANESSEVPHEQQTDRIDSTIPPTQSTPTTVSTYDHPTDPDAPKDLSGAGAVEQKSLAETYFLQDEPDVSKDATIKEKRSDEVIREKTSKDGKIVLDIIEAIHAAEKKQADVDAYMYSEERRKLKEKYEKELKDTRARELMYAEEAAILDKELKKEKLKNAAALKELQEKAEQKLQDELQRKDEETSQQIEKAQEIAKAELAAAVAKEKASQIEQIAEANLNDVM

SEQ ID NO: 165906 - protein, 545 aa, Zea Mays
MGAHQLGYIDLQFRDKKFPFSLKKEDVVKVYEDLKIPSEQKVDQTQNVSGQNAEIVQENNNEAHTPKGVLNDGMGALEVPINEDQLVPAEEKKSQTLAHETHPVPDEHGSDTKMPSEDSLAVEIETVPIDANESSEVPHEQQTDRIDSTIPPTQSTPTTVSTYDHPTDPDAPKDLSGAGAVEQKSLAETYFLQDEPDVSKDATIKEKRSDEVIREKTSKDGKIVLDIIEAIHAAEKKQADVDAYMYSEERRKLKYEKELKDTRARELMYAEEAAILDKELKKEKLKNAAALKELQEKAEQKLQDELQRKDEETSQQIEKAQEIAKAELAAAVAKEKASQIEQIAEANLNIDALCMAFYARSEETRQSHSVHKLALGTLALEHALSSGSPIRSEVELLRKSVEGIDKDSLLELALSSLPEDVLDYGSDTMMGLKQKFNSLKETIRHFSLLPAGGGGILAHTVARVASSIKIKGDNSGDGIESLINKVERLIVDGDLITAADALEQGLHGTEAEEIATEWVKQARKRAIAEQTLALLQACASSTTFS

SEQ ID NO: 165907 - protein, 547 aa, Zea Mays
MGAHQLGYIDLQFRDKKFPFSLKKEDVVKVYEDLKIPSEQKVDQTQNVSGQNAEIVQENNNEAHTPKGVLNDGMGALEVPINEDQLVPAEEKKSQTLAHETHPVPDEHGSDTKMPSEDSLAVEIETVPIDANESSEVPHEQQTDRIDSTIPPTQSTPTTVSTYDHPTDPDAPKDLSGAGAVEQKSLAETYFLQDEPDVSKDATIKEKRSDEVIREKTSKDGKIVLDIIEAIHAAEKKQADVDAYMYSEERRKLKEKYEKELKDTRARELMYAEEAAILDKELKKEKLKNAAALKELQEKAEQKLQDELQRKDEETSQQIEKAQEIAKAELAAAVAKEKASQIEQIAEANLNIDALCMAFYARSEETRQSHSVHKLALGTLALEHALSSGSPIRSEVELLRKSVEGIDKDSLLELALSSLPEDVLDYGSDTMMGLKQKFNSLKETIRHFSLLPAGGGGILAHTVARVASSIKIKGDNSGDGIESLINKVERLIVDGDLITAADALEQGLHGTEAEEIATEWVKQARKRAIAEQTLALLQACASSTTFS

SEQ ID NO: 165908 - protein, 313 aa, Zea Mays
MLRRCMRDLRSPRSLARVSRPISVESPTFLKSRSNSTKASPKSSQNAAPGPQGQPSQSGSNVSKIVLGTLVVGAAAMGAHQLGYIDLQFRDKKFPFSLKKEDVVKVYEDLKIPSEQKVDQTQNVSGQNAEIVQENNNEAHTPKGVLNDGMGALEVPINEDQLVPAEEKKSQTLAHETHPVPDEHGSDTKMPSEDSLAVEIETVPIDANESSEVPHEQQTDRIDSTIPPTQSTPTTVSTYDHPTDPDAPKELVLLSRNLLLRHIFCKMNLMFRKMQPLRKKEVMKLFVKKLLKMVRLYLISLRLFMPPKRSRQM

SEQ ID NO: 165909 - protein, 618 aa, Zea Mays
MRDLRSPRSLARVSRPISVESPTFLKSRSNSTKASPKSSQNAAPGPQGQPSQSGSNVSKIVLGTLVVGAAAMGAHQLGYIDLQFRDKKFPFSLKKEDVVKVYEDLKIPSEQKVDQTQNVSGQNAEIVQENNNEAHTPKGVLNDGMGALEVPINEDQLVPAEEKKSQTLAHETHPVPDEHGSDTKMPSEDSLAVEIETVPIDANESSEVPHEQQTDRIDSTIPPTQSTPTTVSTYDHPTDPDAPKDLSGAGAVEQKSLAETYFLQDEPDVSKDATIKEKRSDEVIREKTSKDGKIVLDIIEAIHAAEKKQADVDAYMYSEERRKLKEKYEKELKDTRARELMYAEEAAILDKELKKEKLKNAAALKELQEKAEQKLQDELQRKDEETSQQIEKAQEIAKAELAAAVAKEKASQIEQIAEANLNIDALCMAFYARSEETRQSHSVHKLALGTLALEHALSSGSPIRSEVELLRKSVEGIDKDSLLELALSSLPEDVLDYGSDTMMGLKQKFNSLKETIRHFSLLPAGGGGILAHTVARVASSIKIKGDNSGDGIESLINKVERLIVDGDLITAADALEQGLHGTEAEEIATEWVKQARKRAIAEQTLALLQACASSTTFS

SEQ ID NO: 165910 - protein, 393 aa, Zea Mays
MGYMKERSTIAVIGLSVHTAPVEMREKLAVAEELWPRAIQELTSLNHIEEAAVLSTCNRMEIYVVALSWNRGIREVVDWMSKKSGIPASELREHLFILRSSDATRHLFEVSAGLDSLVLGEGQILAQVKQVVRSGQNSGGLGKNIDRMFKDAITAGKRVRSETNISSGAVSVSSAAVELALMKLPKSEALSARMLLIGAGKMGKLVIKHLVAKGCKKVVVVNRSVERVDAIREEMKDIEIVYRPLSDMYQAAAEADVVFTSTASETSLFAKEHAEALPPVSDTMGGVRLFVDISVPRNVSACVSEVGAARVYNVDDLKEVVEANKEDRLRKAMEAQTIITEELRRFEAWRDSLETVPTIKKLRSYADRIRASELEKCLQKVAPEVRRQRQPHP

SEQ ID NO: 165911 - protein, 239 aa, Zea Mays
MARLRVSGNSGACTQVTAGGGGVDPCLAFVGTGDPMGNPYPHGYGYGGSSASHTTGKSQFTQRRRATNKAKPTHIYTWPWPERRWIDAAGCTAHLGQQVAATAIVDMSSGRRASRARRAAGSALPSSTTSRSISEDQISELLSKIQALLLPNSHTRNGAHRQAHKGTTRRRINAGLGLGLGGEGAAGHVQLHQEPAPGGGQPQRAARRAARLRRCHQRAGRRHQEPAAHVTTTKGKSFR

SEQ ID NO: 165912 - protein, 187 aa, Zea Mays
MNGLQLELGFVTGDETLRGLSIKAAQRALEMAKVKAEDVDLVLLCTSTPDDLFGGATQVLTDVGCTKAFGFDITAACSGFIVGLITATRFIKGGGFQNILVVGADALSKYVDWTDRGTCILFGDAAGAVLVQACSADEDGLLGFCVQSDGNGQKHLNAATAIDESILSNTMVFLDFRQRRQPTHAFR

SEQ ID NO: 165913 - protein, 267 aa, Zea Mays
MVAASGLALPRVAAPCPARPRGGLRPALLRFAPPVALPPHQLRCCASTVDDGLVSAAASKPRLPRVVGMGSKLVGCGSAIPTLGVSNDDLSKIVETSDEWIAARTGIRNRRVLSGDETLRGLSIKAAQRALEMAKVKAEDVDLVLLCTSTPDDLFGGATQVLTDVGCTKAFGFDITAACSGFIVGLITATRFIKDRGTCILFGDAAGAVLVQACSADEDGLLGFCVQSDGNGQKHLNAATAIDESILSNTMVFLDFRQRRQPTHAFR

SEQ ID NO: 165914 - protein, 243 aa, Zea Mays
MVAASGLALPRVAAPCPARPRGGLRPALLRFAPPVALPPHQLRCCASTVDDGLVSAAASKPRLPRVVGMGSKLVGCGSAIPTLGVSNDDLSKIVETSDEWIAARTGIRNRRVLSGDETLRGLSIKAAQRALEMAKVKAEDVDLVLLCTSTPDDLFGGATQVLTDVGCTKAFGFDITAACSGFIVGLITATRFIKGGGFQNILVVGADALSKYVDWTDRGTCILFGDAAGAVLVQTPKCRNGNR

SEQ ID NO: 165915 - protein, 277 aa, Zea Mays
MVAASGLALPRVAAPCPARPRGGLRPALLRFAPPVALPPHQLRCCASTVDDGLVSAAASKPRLPRVVGMGSKLVGCGSAIPTLGVSNDDLSKIVETSDEWIAARTGIRNRRVLSAQRALEMAKVKAEDVDLVLLCTSTPDDLFGGATQVLTDVGCTKAFGFDITAACSGFIVGLITATRFIKGGGFQNILVVGADALSKYVDWTDRGTCILFGDAAGAVLVQACSADEDGLLGFCVQSDGNGQKHLNAATAIDESILSNTMVFLDFRQRRQPTHAFR

SEQ ID NO: 165916 - protein, 265 aa, Zea Mays
MSARCSTGSKTRAGNTARMSEQESFDGSSGKQMADAGYHCFAPDWIGFGFSEMPQPGYGFDFKEDEFHKAFDDLLGTLNITEPFFLVVQGFLVGSYGLTWALNNSSKVLKLAILNSPLTVSSPVPGLFQQLKWPLFGEFTCQNAVLAERFIEAGSAYMLKLEKADVYRLPYLSSGAPGFALLEAARKINFQDVLSRISAGFSSNGWEKPILLAWGISDKYLPLSIAEEFKQANPGVVKLEAIEGAGHMPQEDWPEKVVKALTSFL

SEQ ID NO: 165917 - protein, 199 aa, Zea Mays
MSHCCPCASASSSTAPFFLPSIPDSSSCRSGSGGAFSAAVGRSKLRCGGGPRRGQATVAAGSKDGGSGGTAGGEKGEDDAPAFNPFGFVTDNPSSRSAIQLPAVPAEDGNVGQMLYRIEDKGREYGSYVRAGEFRWFVRETGSPDARRGTIVFLHGAPTQSFSYRVVMAQVASLNPYTIGINTIHAMISHLYCALCNHE

SEQ ID NO: 165918 - protein, 236 aa, Zea Mays
MVCDRALARTSVASTTVLSSTSGLFTLFIGVLLGQDSISASKVIAVFISMAGVVMTTMGQTWASDESEVGKSGATQRTLLGDMFGFMSAIAYGLFTVLLKKFCGEEGEKVDVQKLFGYLGLFTLVALWWIVWPLTALGIEPKFSMPHSAKVDEVVVANSLIGSVLSDYFWALSVVWTTPLVATLGMSLTIPLAMVADMIIHGRHYSAVYILCSVQVFSGFVIASLADRLSRSLGLL

SEQ ID NO: 165919 - protein, 228 aa, Zea Mays
MSERDAIDGEGGTLSGVAQQRRGDPVDLDHLKTMLPQHVHAVQHAVPHLARRPPRGAAAALVRPPHTPQRGRHRRHVLGIVEDVGQEHDAHPPVAVVEREQVAPAELAHAGPRGAEAVGVRVGPEARQQRGHVREHAARGAEAGHGGDAREPRAGAELHDGGATEAAPGAGVRGEVRGQDQGRLPQPGAGEDAARGRVARAVALHHRQRAPGHGYVQDLRAQRVHSRS

SEQ ID NO: 165920 - protein, 199 aa, Zea Mays
MNHYLHGEKLNAPASHQVLRTSGRSSPATCLRISLLATCPRSRPPPAAAAAAARTSRRPTSPATTLPPARSPRSSRLATEATKWRRPPKGTKKPEVAAGEDPKNQPLGDVREDAGNPEQQAAGFLDMSRRGCFLDSALILQHQRVEEGALHWQERQCKPRSCQGGGRRRGSETSRACLDERHSDLVLVTTLLEFFCLSD

SEQ ID NO: 165921 - protein, 277 aa, Zea Mays
MLASAGPPRPSTDRSRRPWRITATRSKVTARLSLSCVLVAARPTPPSSSSSMARLATSWRRMISTWEASSQARRQINTYYYYYYYRKKSILLLAGWDAGDDFTARIIDYMAELIKEPHQWDIRQDAEALRRLRVSCEHAKKALSDQEETMVQIHVTGVESSAPLAGQAGGAQPGPVRQGHATCGWGVGGCPGPTTRAARTWSMRSSSSVAARGCPSSISSSRTTSMAGSQTAAREWNQRTPSFEAPPFFPVLRRRATWRSALTFFTARTDFLWDVMS

SEQ ID NO: 165922 - protein, 241 aa, Zea Mays
MGASASVLSFPTAAAFPAAATAVAGAAGCFALGYLLAFTRLPRHAAGPGSGGTSDDDSEDDSEEDDDENSGRSRAAKRAGGQKRAGLRLLYWARNVVTKSDSAREAERSRSQAAASPLEIENLAEIIEDFKMVLVVRNDLKMGKGKIAAQCSHATLGLFKKLQQRAPKSLRRWERCGQVKVVVKIESEEDMLVLQGRAKSLNLPTHITIDAGRTQIAPNSRTVMAILADMVDDVTGGLKLL

SEQ ID NO: 165923 - protein, 98 aa, Zea Mays
MAVALATSPLAHNALAPPPISASQSSLLLLLQRRASPSPSPSLSPSGHASSRPSRPRSLSSAAVDRGPATVLEEVAVAAAATRGEEVRKGRGGRENGA

SEQ ID NO: 165924 - protein, 454 aa, Zea Mays
MASLFGARRRRSPEYDGEDDRSGGGRAKRRRLSPEEAAASPAEPGAATGTSHGWLSGFVSGAKRAISSVLLSSSPEETGSGEDGEVEEEDDDVYEEGIDLNENEDIHDIHGEIVPYSESKLAIEQMVMKETFSRDECDRMVELIKSRVRDSTPETHEYGKQEEIPSRNAGIAHDFTGTCRSLSRDRNFTESVPFSSMRMRPGHSSPGFPLQASPQLCTAAVREAKKWLEEKRQGLGVKPEDNGSCTLNTDIFSSRDDSDKGSPVDLAKSYMRSLPPWQSPFLGHQKFDTSPSKYSISSTKVTTKEDYLSSFWTKLEESRIARIGSSGDSAVASKLWNYGSNSRLFENDTSIFSLGTDEKVGDPTKTHNGSEKVAATEPLGRCSLLITPTEDRTDGITEPVDLAKNNENAPQEYQAASEIIPDKVAEGNDVSSTELLRILLAIVQMVKLSLQNRI

SEQ ID NO: 165925 - protein, 440 aa, Zea Mays
MVELIKSRVRDSTPETHEYGKQEEIPSRNAGIAHDFTGTCRSLSRDRNFTESVPFSSMRMRPGHSSPGFPLQASPQLCTAAVREAKKWLEEKRQGLGVKPEDNGSCTLNTDIFSSRDDSDKGSPVDLAKSYMRSLPPWQSPFLGHQKFDTSPSKYSISSTKVTTKEDYLSSFWTKLEESRIARIGSSGDSAVASKLWNYGSNSRLFENDTSIFSLGTDEKVGDPTKTHNGSEKVAATEPLGRCSLLITPTEDRTDGITEPVDLAKNNENAPQEYQAASEIIPDKVAEGNDVSSTGITKDTTGHSADGKALTSEPHIGETHVNSASESIPNDAAPPTQSKMNGSTKKSLVNGVLDQPNANSGLESSGNDYPSYTNSSSAMPPASTELIGSAAAVIDVDSAENGPGTKPEQPAKGASRASKSKVVPRGQKRVLRSATRGRAT

SEQ ID NO: 165926 - protein, 435 aa, Zea Mays
MASLFGARRRRSPEYDGEDDRSGGGRAKRRRLSPEEAAASPAEPGAATGTSHGWLSGFVSGAKRAISSVLLSSSPEETGSGEDGEVEEEDDDVYEEGIDLNENEDIHDIHGEIVPYSESKLAIEQMVMKETFSRDECDRMVELIKSRVRDSTPETHEYGKQEEIPSRNAGIAHDFTGTCRSLSRDRNFTESVPFSSMRMRPGHSSPGFPLQASPQLCTAAVREAKKWLEEKRQGLGVKPEDNGSCTLNTDIFSSRDDSDKGSPVDLAKSYMRSLPPWQSPFLGHQKFDTSPSKYSISSTKVTTKEDYLSSFWTKLEESRIARIGSSGDSAVASKLWNYGSNSRLFENDTSIFSLGTDEKVGDPTKTHNGSEKVAATEPLGRCSLLITPTEDRTDGITEPVDLAKNNENAPQEYQAASEIIPDKVAEGNDVSSTGW

SEQ ID NO: 165927 - protein, 383 aa, Zea Mays
MRMRPGHSSPGFPLQASPQLCTAAVREAKKWLEEKRQGLGVKPEDNGSCTLNTDIFSSRDDSDKGSPVDLAKSYMRSLPPWQSPFLGHQKFDTSPSKYSISSTKVTTKEDYLSSFWTKLEESRIARIGSSGDSAVASKLWNYGSNSRLFENDTSIFSLGTDEKVGDPTKTHNGSEKVAATEPLGRCSLLITPTEDRTDGITEPVDLAKNNENAPQEYQAASEIIPDKVAEGNDVSSTGITKDTTGHSADGKALTSEPHIGETHVNSASESIPNDAAPPTQSKMNGSTKKSLVNGVLDQPNANSGLESSGNDYPSYTNSSSAMPPASTELIGSAAAVIDVDSAENGPGTKPEQPAKGASRASKSKVVPRGQKRVLRSATRGRAT

SEQ ID NO: 165928 - protein, 136 aa, Zea Mays
MPGQWEYQVGPSVGIEAGDHIWISRYILERITEQAGVVLTLDPKPIQGDWNGAGCHTNYSTKTMREDGGFEEIKRAILNLSLRHDLHISAYGEGNERRLTGKHETASIGTFSWGVANRGCSIRVGRDTEAKGKGRQ

SEQ ID NO: 165929 - protein, 637 aa, Zea Mays
MLLYLKLPTTNYTKCMPYDNHNPVESVYGFAHSRSTECPERSTEANKIMCLIIDTLVLLVNSCKIGNLQNVQQELARNVLSLLYKIWKKTQPLRSSTDCNKWKNKLQSKEYDISKSIFRLSTGLAFPAWPEPDVVRKSVFGETVSDFETFVLAYWEKLPNLYRRKQATKMDSLVFVALHNAFNLGTTPDSIIESLLQGLVSCPAIASDELDINSFLHEVHDSLGDSVKYRQDIRVMRTRDPNDQTSRGCVTEEHFFDDGTVFTDEDAFIEKCKHAFKNGYSIALRGMEFRSEKVAAIASALADLFGQPSVGANIYFSPAGSQGLARHYDDHCVLVWQLLGSKKWTVWPNPKPLLPRLYEPFDPLDGNLDESSGRVEVLHEGDMMYIPRGYVHEARTDVSGSEVNDCSLHLTLAIEVEAPFEWEGFAHIALHCWAEKQQLRGSQSVEFEGKAGASLSAIVLHVAIRLLSDSEPVFRKACMVAAKAATSSSSCTSTTTHLEALRSSQRSTFDEILRKIDQSCSIKEALERIVSAVRERDDGAFQWMSWLRHLPQQGTAAGYIIDFCNVLGALEALVEAFDSDPGQALDGLTAFKSGFCRRVAYEDACEAFGTLLEMYRMARTQYMRGMLALHGAGAHVS

SEQ ID NO: 165930 - protein, 373 aa, Zea Mays
MCLIIDTLVLLVNSCKIGNLQNVQQELARNVLSLLYKIWKKTQPLRSSTDCNKWKNKLQSKEYDISKSIFRLSTGLAFPAWPEPDVVRKSVFGETVSDFETFVLAYWEKLPNLYRRKQATKMDSLVFVALHNAFNLGTTPDSIIESLLQGLVSCPAIASDELDINSFLHEVHDSLGDSVKYRQDIRVMRTRDPNDQTSRGCVTEEHFFDDGTVFTDEDAFIEKCKHAFKNGYSIALRGMEFRSEKVAAIASALADLFGQPSVGANIYFSPAGSQGLARHYDDHCVLVWQLLGSKKWTVWPNPKPLLPRLYEPFDPLDGNLDESSGRVEVLHEGDMMYIPRGYVHEARTDVSGSEVNDCSLHLTLAIEVEAPFE

SEQ ID NO: 165931 - protein, 144 aa, Zea Mays
MLPVLEVLCCAAADRGGVDWYSLCCCGRFRRTPDWRAPWRCSWCSRSSVAPPPAVGAWTGTACAAADASDEPQTGGRPGDAPGARGPLEGALEMLPVLEVLCCAVVPLPFPHPIGDAWIRDRRRPTPASVCDRSVVAQALEAST

SEQ ID NO: 165932 - protein, 119 aa, Zea Mays
MIDTDQLYPFQLHIAVCKGTIKKKMDGGSTLPTTPASQPSSTILSQAGQGSGVTQNKGAAFIREPSLTPESRKVSSSAKTTPHQGDNLLLGKEIIPASPNVQTPSEAHNTPGANTLRLV

SEQ ID NO: 165933 - protein, 1148 aa, Zea Mays
MAPEVIEMSGVCAASDIWSVGCTVIELLTCAPPYYDLQPMPALFRIVQDVHPPIPEGLSPEVTDFLQQCFQKDAMQRPDAKALLMHTWLQNLRRALPGSLRQPTPLRNIDGDDEGSRGDNSLGFCDTPGDIQTTITSNVDQENGSKEPIMDSTVQSKSEELHDGNLKLTEGSSSNSVALMKDNVVLNKGPTLVLHEKLPVESSSGGADLNGKVMAHELLQGGPPGKVELENKESSSSDVFSFQAGRQNIGFQKVVEPSVVEGPKQLSRFSDKPEDASLEDLFPPNDKWGDNGAEPSTSTTVQELKYNGVQNAFLKGLNARVEKQKENDNESMNGGKLIEFAMQLENIDALGFGEHIPGESLFPVQSVEYNKIVAQLRPGESEDVILLACQKLLSIFSYRPEQKHIYMAQNGFLPLMELLEIPRNRILCSVLQLINNIVKDSTCFLENACLVGLIPVVMNFAEPNRPKDVRVQASLFLQQLCQASTLTLQMFVACQGIPVLVSFMEPDYAKYRDMVHLAIDGIWQVFKLQHSTPRNNFCRIAAKNGMLPRLVNTLYSLNEATRFASVSGSGASVTQNGSTPRRRSGQLDPSVLESCKARLDHHHSSGSLQSLQTDADKHHILMDSSSPRFSDKTGSNLERNDNDLVIRPQRLSVSAGRTSTDRSPKHVELVSNGHISGQNDQVRPLLSLLEKEPPSRHISGQLDYVCHITGLERHETILPLLHTSTERKTNGELDLMMDFAEVSRHGRENGHLDSSIKVSNRVHSMKYAPSTSASNEGASTSGAASQTASGVLSGSGVLNLRPGSTTSSGPLAQMFSSMSADVAREYLEKVADLLLEFAQADTVVRSLMASQSLLTRLFQMFNKIEPPILLKILRCINHLSGDPNCLETLQRTDAIKHLIPILELCDGPLVFQIHSEVLNALFNLCKINKRRQEQAAENGIIPHLMNFVMSDSPLRQYALPLLCDMAHASRNSREQLRAHGGLDAYLNLLEDDVWACTALDSIAVCLAHDNDHRKVEQALLKKEAIQKLVKFFQDCPEQYFVHILDSFLKIIMKSSRLNTAMATNGLTALLIARLNHRDAIARLTLLKLIKVVYEHHPRPKQVIVENDLPQKLQNLIEERRGGQRGGHQVLVKQMATSLLKALHINTVL

SEQ ID NO: 165934 - protein, 1117 aa, Zea Mays
MSGVCAASDIWSVGCTVIELLTCAPPYYDLQPMPALFRIVQDVHPPIPEGLSPEVTDFLQQCFQKDAMQRPDAKALLMHTWLQNLRRALPGSLRQPTPLRNIDGDDEGSRGDNSLGFCDTPGDIQTTITSNVDQENGSKEPIMDSTVQSKSEELHDGNLKLTEGSSSNSVALMKDNVVLNKGPTLVLHEKLPVESSSGGADLNGKVMAHELLQGGPPGKVELENKESSSSDVFSFQAGRQNIGFQKVVEPSVVEGPKQLSRFSDKPEDASLEDLFPPNDKWGDNGAEPSTSTTVQELKYNGVQNAFLKGLNARVEKQKENDNESMNGGKLIEFAMQLENIDALGFGEHIPGESLFPVQSVEYNKIVAQLRPGESEDVILLACQKLLSIFSYRPEQKHIYMAQNGFLPLMELLEIPRNRILCSVLQLINNIVKDSTCFLENACLVGLIPVVMNFAEPNRPKDVRVQASLFLQQLCQASTLTLQMFVACQGIPVLVFKLQHSTPRNNFCRIAAKNGMLPRLVNTLYSLNEATRFASVSGSGASVTQNGSTPRRRSGQLDPSVLESCKARLDHHHSSGSLQSLQTDADKHHILMDSSSPRFSDKTGSNLERNDNDLVIRPQRLSVSAGRTSTDRSPKHVELVSNGHISGQNDQVRPLLSLLEKEPPSRHISGQLDYVCHITGLERHETILPLLHTSTERKTNGELDLMMDFAEVSRHGRENGHLDSSIKVSNRVHSMKYAPSTSASNEGASTSGAASQTASGVLSGSGVLNLRPGSTTSSGPLAQMFSSMSADVAREYLEKVADLLLEFAQADTVVRSLMASQSLLTRLFQMFNKIEPPILLKILRCINHLSGDPNCLETLQRTDAIKHLIPILELCDGPLVFQIHSEVLNALFNLCKINKRRQEQAAENGIIPHLMNFVMSDSPLRQYALPLLCDMAHASRNSREQLRAHGGLDAYLNLLEDDVWACTALDSIAVCLAHDNDHRKVEQALLKKEAIQKLVKFFQDCPEQYFVHILDSFLKIIMKSSRLNTAMATNGLTALLIARLNHRDAIARLTLLKLIKVVYEHHPRPKQVIVENDLPQKLQNLIEERRGGQRGGHQVLVKQMATSLLKALHINTVL

SEQ ID NO: 165935 - protein, 1100 aa, Zea Mays
MASRQHNAQFHKSKTLDNKYMLGDEIGKGAYGRVYKGLDLENGDFVAIKQVSLENIPQEDLNIIMNLNHKNIVKYLGSLKTKSHLHIILEYVENGSLANIIKPNKFGPIPESLVALYIAQVLEGLVYLHEQGVIHRDIKGANILSTKEGLVKLADFGVATKLTEADINTHSVVGTPYWMAPEVIEMSGVCAASDIWSVGCTVIELLTCAPPYYDLQPMPALFRIVQDVHPPIPEGLSPEVTDFLQQCFQKDAMQRPDAKALLMHTWLQNLRRALPGSLRQPTPLRNIDGDDEGSRGDNSLGFCDTPGDIQTTITSNVDQENGSKEPIMDSTVQSKSEELHDGNLKLTEGSSSNSVALMKDNVVLNKGPTLVLHEKLPVESSSGGADLNGKVMAHELLQGGPPGKVELENKESSSSDVFSFQAGRQNIGFQKVVEPSVVEGPKQLSRFSDKPEDASLEDLFPPNDKWGDNGAEPSTSTTVQELKYNGVQNAFLKGLNARVEKQKENDNESMNGGKLIEFAMQLENIDALGFGEHIPGESLFPVQSVEYNKIVAQLRPGESEDVILLACQKLLSIFSYRPEQKHIYMAQNGFLPLMELLEIPRNRILCSVLQLINNIVKDSTCFLENACLVGLIPVVMNFAEPNRPKDVRVQASLFLQQLCQASTLTLQMFVACQGIPVLVSFMEPDYAKYRDMVHLAIDGIWQVFKLQHSTPRNNFCRIAAKNGMLPRLVNTLYSLNEATRFASVSGSGASVTQNGSTPRRRSGQLDPSVLESCKARLDHHHSSGSLQSLQTDADKHHILMDSSSPRFSDKTGSNLERNDNDLVIRPQRLSVSAGRTSTDRSPKHVELVSNGHISGQNDQVRPLLSLLEKEPPSRHISGQLDYVCHITGLERHETILPLLHTSTERKTNGELDLMMDFAEVSRHGRENGHLDSSIKVSNRVHSMKYAPSTSASNEGASTSGAASQTASGVLSGSGVLNLRPGSTTSSGPLAQMFSSMSADVAREYLEKVADLLLEFAQADTVVRSLMASQSLLTRLFQMFNKIEPPILLKILRCINHLSGDPNCLETLQRTDAIKHLIPILELCDGPLVFQIHSEVHSVFC

SEQ ID NO: 165936 - protein, 691 aa, Zea Mays
MASRQHNAQFHKSKTLDNKYMLGDEIGKGAYGRVYKGLDLENGDFVAIKQVSLENIPQEDLNIIMQEIDLLKNLNHKNIVKYLGSLKTKSHLHIILEYVENGSLANIIKPNKFGPIPESLVALYIAQVLEGLVYLHEQGVIHRDIKGANILSTKEGLVKLADFGVATKLTEADINTHSVVGTPYWMAPEVIEMSGVCAASDIWSVGCTVIELLTCAPPYYDLQPMPALFRIVQDVHPPIPEGLSPEVTDFLQQCFQKDAMQRPDAKALLMHTWLQNLRRALPGSLRQPTPLRNIDGDDEGSRGDNSLGFCDTPGDIQTTITSNVDQENGSKEPIMDSTVQSKSEELHDGNLKLTEGSSSNSVALMKDNVVLNKGPTLVLHEKLPVESSSGGADLNGKVMAHELLQGGPPGKVELENKESSSSDVFSFQAGRQNIGFQKVVEPSVVEGPKQLSRFSDKPEDASLEDLFPPNDKWGDNGAEPSTSTTVQELKYNGVQNAFLKGLNARVEKQKENDNESMNGGKLIEFAMQLENIDALGFGEHIPGESLFPVQSVEYNKIVAQLRPGESEDVILLACQKLLSIFSYRPEQKHIYMAQNGFLPLMELLEIPRNRILCSVLQLINNIVKDSTCFLENACLVGLIPVVMNFAEPNRPKDVRVQASLFLQQLCQARSFSFSNITATAKLFMSSKLGVS

SEQ ID NO: 165937 - protein, 1331 aa, Zea Mays
MASRQHNAQFHKSKTLDNKYMLGDEIGKGAYGRVYKGLDLENGDFVAIKQVSLENIPQEDLNIIMNLNHKNIVKYLGSLKTKSHLHIILEYVENGSLANIIKPNKFGPIPESLVALYIAQFLYDQVLEGLVYLHEQGVIHRDIKGANILSTKEGLVKLADFGVATKLTEADINTHSVVGTPYWMAPEVIEMSGVCAASDIWSVGCTVIELLTCAPPYYDLQPMPALFRIVQDVHPPIPEGLSPEVTDFLQQCFQKDAMQRPDAKALLMHTWLQNLRRALPGSLRQPTPLRNIDGDDEGSRGDNSLGFCDTPGDIQTTITSNVDQENGSKEPIMDSTVQSKSEELHDGNLKLTEGSSSNSVALMKDNVVLNKGPTLVLHEKLPVESSSGGADLNGKVMAHELLQGGPPGKVELENKESSSSDVFSFQAGRQNIGFQKVVEPSVVEGPKQLSRFSDKPEDASLEDLFPPNDKWGDNGAEPSTSTTVQELKYNGVQNAFLKGLNARVEKQKENDNESMNGGKLIEFAMQLENIDALGFGEHIPGESLFPVQSVEYNKIVAQLRPGESEDVILLACQKLLSIFSYRPEQKHIYMAQNGFLPLMELLEIPRNRILCSVLQLINNIVKDSTCFLENACLVGLIPVVMNFAEPNRPKDVRVQASLFLQQLCQASTLTLQMFVACQGIPVLVSFMEPDYAKYRDMVHLAIDGIWQVFKLQHSTPRNNFCRIAAKNGMLPRLVNTLYSLNEATRFASVSGSGASVTQNGSTPRRRSGQLDPSVLESCKARLDHHHSSGSLQSLQTDADKHHILMDSSSPRFSDKTGSNLERNDNDLVIRPQRLSVSAGRTSTDRSPKHVELVSNGHISGQNDQVRPLLSLLEKEPPSRHISGQLDYVCHITGLERHETILPLLHTSTERKTNGELDLMMDFAEVSRHGRENGHLDSSIKVSNRVHSMKYAPSTSASNEGASTSGAASQTASGVLSGSGVLNLRPGSTTSSGPLAQMFSSMSADVAREYLEKVADLLLEFAQADTVVRSLMASQSLLTRLFQMFNKIEPPILLKILRCINHLSGDPNCLETLQRTDAIKHLIPILELCDGPLVFQIHSEVLNALFNLCKINKRRQEQAAENGIIPHLMNFVMSDSPLRQYALPLLCDMAHASRNSREQLRAHGGLDAYLNLLEDDVWACTALDSIAVCLAHDNDHRKVEQALLKKEAIQKLVKFFQDCPEQYFVHILDSFLKIIMKSSRLNTAMATNGLTALLIARLNHRDAIARLTLLKLIKVVYEHHPRPKQVIVENDLPQKLQNLIEERRGGQRGGHQVLVKQMATSLLKALHINTVL

SEQ ID NO: 165938 - protein, 950 aa, Zea Mays
MASRQHNAQFHKSKTLDNKYMLGDEIGKGAYGRVYKGLDLENGDFVAIKQVSLENIPQEDLNIIMQEIDLLKNLNHKNIVKYLGSLKTKSHLHIILEYVENGSLANIIKPNKFGPIPESLVALYIAQVLEGLVYLHEQGVIHRDIKGANILSTKEGLVKLADFGVATKLTEADINTHSVVGTPYWMAPEVIEMSGVCAASDIWSVGCTVIELLTCAPPYYDLQPMPALFRIVQDVHPPIPEGLSPEVTDFLQQCFQKDAMQRPDAKALLMHTWLQNLRRALPGSLRQPTPLRNIDGDDEGSRGDNSLGFCDTPGDIQTTITSNVDQENGSKEPIMDSTVQSKSEELHDGNLKLTEGSSSNSVALMKDNVVLNKGPTLVLHEKLPVESSSGGADLNGKVMAHELLQGGPPGKVELENKESSSSDVFSFQAGRQNIGFQKVVEPSVVEGPKQLSRFSDKPEDASLEDLFPPNDKWGDNGAEPSTSTTVQELKYNGVQNAFLKGLNARVEKQKENDNESMNGGKLIEFAMQLENIDALGFGEHIPGESLFPVQSVEYNKIVAQLRPGESEDVILLACQKLLSIFSYRPEQKHIYMAQNGFLPLMELLEIPRNRILCSVLQLINNIVKDSTCFLENACLVGLIPVVMNFAEPNRPKDVRVQASLFLQQLCQASTLTLQMFVACQGIPVLVSFMEPDYAKYRDMVHLAIDGIWQVFKLQHSTPRNNFCRIAAKNGMLPRLVNTLYSLNEATRFASVSGSGASVTQNGSTPRRRSGQLDPSVLESCKARLDHHHSSGSLQSLQTDADKHHILMDSSSPRFSDKTGSNLERNDNDLVIRPQRLSVSAGRTSTDRSPKHVELVSNGHISGQNDQVRPLLSLLEKEPPSRHISGQLDYVCHITGLERHETILPLLHTSTERKTNGELDLMMDFAGTLFCAHYSDRSLDMEERMAIWTRV

SEQ ID NO: 165939 - protein, 488 aa, Zea Mays
MSGVCAASDIWSVGCTVIELLTCAPPYYDLQPMPALFRIVQDVHPPIPEGLSPEDAMQRPDAKALLMHTWLQNLRRALPGSLRQPTPLRNIDGDDEGSRGDNSLGFCDTPGDIQTTITSNVDQENGSKEPIMDSTVQSKSEELHDGNLKLTEGSSSNSVALMKDNVVLNKGPTLVLHEKLPVESSSGGADLNGKVMAHELLQGGPPGKVELENKESSSSDVFSFQAGRQNIGFQKVVEPSVVEGPKQLSRFSDKPEDASLEDLFPPNDKWGDNGAEPSTSTTVQELKYNGVQNAFLKGLNARVEKQKENDNESMNGGKLIEFAMQLENIDALGFGEHIPGESLFPVQSVEYNKIVAQLRPGESEDVILLACQKLLSIFSYRPEQKHIYMAQNGFLPLMELLEIPRNRILCSVLQLINNIVKDSTCFLENACLVGLIPVVMNFAEPNRPKDVRVQASLFLQQLCQARSFSFSNITATAKLFMSSKLGVS

SEQ ID NO: 165940 - protein, 954 aa, Zea Mays
MASRQHNAQFHKSKTLDNKYMLGDEIGKGAYGRVYKGLDLENGDFVAIKQVSLENIPQEDLNIIMQEIDLLKNLNHKNIVKYLGSLKTKSHLHIILEYVENGSLANIIKPNKFGPIPESLVALYIAQVLEGLVYLHEQGVIHRDIKGANILSTKEGLVKLADFGVATKLTEADINTHSVVGTPYWMAPEVIEMSGVCAASDIWSVGCTVIELLTCAPPYYDLQPMPALFRIVQDVHPPIPEGLSPEVTDFLQQCFQKDAMQRPDAKALLMHTWLQNLRRALPGSLRQPTPLRNIDGDDEGSRGDNSLGFCDTPGDIQTTITSNVDQENGSKEPIMDSTVQSKSEELHDGNLKLTEGSSSNSVALMKDNVVLNKGPTLVLHEKLPVESSSGGADLNGKVMAHELLQGGPPGKVELENKESSSSDVFSFQAGRQNIGFQKVVEPSVVEGPKQLSRFSDKPEDASLEDLFPPNDKWGDNGAEPSTSTTVQELKYNGVQNAFLKGLNARVEKQKENDNESMNGGKLIEFAMQLENIDALGFGEHIPGESLFPVQSVEYNKIVAQLRPGESEDVILLACQKLLSIFSYRPEQKHIYMAQNGFLPLMELLEIPRNRILCSVLQLINNIVKDSTCFLENACLVGLIPVVMNFAEPNRPKDVRVQASLFLQQLCQASTLTLQMFVACQGIPVLVSFMEPDYAKYRDMVHLAIDGIWQVFKLQHSTPRNNFCRIAAKNGMLPRLVNTLYSLNEATRFASVSGSGASVTQNGSTPRRRSGQLDPSVLESCKARLDHHHSSGSLQSLQTDADKHHILMDSSSPRFSDKTGSNLERNDNDLVIRPQRLSVSAGRTSTDRSPKHVELVSNGHISGQNDQVRPLLSLLEKEPPSRHISGQLDYVCHITGLERHETILPLLHTSTERKTNGELDLMMDFAGIVLLSSPQKNLEILDATQVPFLPVAGGT

SEQ ID NO: 165941 - protein, 105 aa, Zea Mays
MASRQHNAQFHKSKTLDNKYMLGDEIGKGAYGRVYKGLDLENGDFVAIKQELTTSRREELREMWFRAELCACVHSGCSAAIIWSLSHAARPFVVYFFCCEITSHG

SEQ ID NO: 165942 - protein, 205 aa, Zea Mays
MEMDGVLQAADAKDWVYKGEGAANLILSYTGSSPSMLGKVLRLKKILKNKSQRAPSCIVFSSHEQLLWGHIPELVESVKQDCLAQAYAVHVMSQHLGANHVDGGVRVRVSRDFLELVEKNVLSSRPAGRVNASSIDNTADAALLIADHSLFSGNPKGSSCIAVEIKAKCGFLPSSEYISEDNTIKKQVTRYKMHQHLKFYQDIED

SEQ ID NO: 165943 - protein, 248 aa, Zea Mays
MHQHLKFYQGEISKTSEYNPLDLFSGSKERICMAIKSLFSTPQNNLRIFVNGSLAFGGMGGGADSVHPADTLKCLEDLSKISGLKLPDFTELLSETIFRSEVLGNLLATQKLDDHDIEGVIHLYYNIISQPCLVCKNLTDVELLRKYTFLHSLPLDKSLKIVRDFLISATAKDCSLMISFRPRENGSTDSEYDSVFLESVKRTYEYKAYFLDLDVKPLDKMEHYFKLDQRIVNFYTRNGGGLAISKGQ

SEQ ID NO: 165944 - protein, 189 aa, Zea Mays
MAIKSLFSTPQNNLRIFVNGSLAFGGMGGGADSVHPADTLKCLEDLSKISGLKLPDFTELLSETIFRSEVLGNLLATQKLDDHDIEGVIHLYYNIISQPCLVCKNLTDVELLRKYTFLHSLPLDKSLKIVRDFLISATAKDCSLMISFRPRENGSTDSEYDSVFLESVKRTYEYKVYYCEIWCRFTFIF

SEQ ID NO: 165945 - protein, 123 aa, Zea Mays
MKFRHDHARSIWKSSSPSRPTTASVDVVLASAALASPPPPPRPSSSHLRRGLALDTLLTGCPSPSTRDLRHLHLSSKIYSSCWPVAGSGDWQADLVGHGERAALGTRIGTITGTLVSNLHRYN

SEQ ID NO: 165946 - protein, 95 aa, Zea Mays
MKFRHDHARSIWKSSSPSRPTTASVDVVLASAALASPPPPPRPSSSHLRRGLALDTLLTGCPSPSTRDLRHLHLSSKIYSRSGACMQLLACSWQW

SEQ ID NO: 165947 - protein, 238 aa, Zea Mays
MKQAAAAAAAAQQALLLQQQSQPPLFPVHHPHPGLLAAPQIEPIVSGNLPPGFDSSTCRSVYVCNIHLQVTDAVLQEVFQSIGPVEGCKLIRKEKSSFGFIDYHDRRYAALAILSLNGRQLYGQPIKVNWAYTSTPREGTSGHFNIFVGDLCPEVTDATLFAFFSGYSTCSDASVMWDQKTGRSRGFGFVSFRNQQNLEKRIQMMMVLKITLSLLLFMLAIFLTSFTDRCMRGGLDGS

SEQ ID NO: 165948 - protein, 427 aa, Zea Mays
MAGCLTPAMYSQMVAVAGLSDGLRRQSPALADVASCVTVRRALRTEQELHIRQELGHGLRLRRRDYERPIGAGCLAGWDAGSRDGRGGRRRREAVVRPAHALTAERRRSEAAASLQQHHSVLDEAEVEANLAEDQVRVRGCGHRPSGNHLVGFSFSPNQGTNSCNAQGPVPPLGIGVWVLGEAGKDATLEIGDVEAAEGADGEAAEGASVRFCVIGAVAVGREELGAGDRAEITGEREMALRRQRRKGNGGDGVRETIEPIVSGNLPPGFDSSTCRSVYVCNIHLQVTDAVLQEVFQSIGPVEGCKLIRKEKSSFGFIDYHDRRYAALAILSLNGRQLYGQPIKVNWAYTSTPREGTSGHFNIFVGDLCPEVTDATLFAFFSGYSTCSDASVMWDQKTGRSRGFGFVSFRNQQSSFGFIDYHDRRYA

SEQ ID NO: 165949 - protein, 104 aa, Zea Mays
MSSFGFIDYHDRRYAALAILSLNGRQLYGQPIKVNWAYTSTPREGTSGHFNIFVGDLCPEVTDATLFAFFSGYSTCSDASVMWDQKTGRSRGFGFVSFRNQQIR

SEQ ID NO: 165950 - protein, 415 aa, Zea Mays
MAGCLTPAMYSQMVAVAGLSDGLRRQSPALADVASCVTVRRALRTEQELHIRQELGHGLRLRRRDYERPIGAGCLAGWDAGSRDGRGGRRRREAVVRPAHALTAERRRSEAAASLQQHHSVLDEAEVEANLAEDQVRVRGCGHRPSGNHLVGFSFSPNQGTNSCNAQGPVPPLGIGVWVLGEAGKDATLEIGDVEAAEGADGEAAEGASVRFCVIGAVAVGREELGAGDRAEITGEREMALRRQRRKGNGGDGVRETIEPIVSGNLPPGFDSSTCRSVYVCNIHLQVTDAVLQEVFQSIGPVEGCKLIRKEKSSFGFIDYHDRRYAALAILSLNGRQLYGQPIKVNWAYTSTPREGTSGHFNIFVGDLCPEVTDATLFAFFSGYSTCSDASVMWDQKTGRSRGFGFVSFRNQQIR

SEQ ID NO: 165951 - protein, 71 aa, Zea Mays
MLILHTYDRRRRMSVLCCSGDVNKQARIRMDIIIVFGRQGNNRCGQRQQRTPKLREELIIYSSGPNFLITY

SEQ ID NO: 165952 - protein, 236 aa, Zea Mays
MEAGTGDRCVSVPWCPLRSREVPLSNGLCKKSSTNGMVSAVASMLLSLGEDPLRKELLGTPQRYVQWLMKFRARNLLDVKLNGFTLGNASLHERPGGGTADHGHGSIRTELHLPFCAQCEHHLLPFYGVVHIGYLDKGSGEGIIDRSHFQALVRFYGCKLQVQERMTRQIAEAVHSVSRNGAMVVVEASHMCMISRGVEKIRSNTATVAVLGHFLTDPSAKARFLQNVLRTAGSAV

SEQ ID NO: 165953 - protein, 770 aa, Zea Mays
MQPPNQELIVRDLHDNMWTFRHIYRGQPKRHLLTTGWSLFVGAKRLKAGDSVLFIRDEKSQLLVGVRRATRQQPALSSSVLSTDSMHIGVLAAAAHAASSGGSFTIYYNPRTSPSPFVIPLARYNKATYLQPSVGMRFAMMFETEESSKRRCTGAIVGISDYDPMRWPNSKWRNLQVEWDEHGYGERPERVSIWDIETPENMVFSSPLNSKRQCLPSYGVPGLQIGSVNMSSIPRAQGNPIGNLQHMPGMGSELALLLLNQSGQNIGSPIACQQSSFSSIIQNAKHSYFPPKTFGASTASMKQESMPSTEAQPQLNALGIQRSDRVSCEVQTASDSNPAQEMSVKPRAPRSTDSHSSQSISDQNSKGEPRTKTRRSKKSSYQKTISDKSELCSVPSQICDDKKHGSEPRLADCEAEQATCGNNEESSGALTHGDFAGELQVQQQVEQHELLAPPKIESSKSPDGGKSVSSFPNQGCIPQFFEGLDWMIPPSYYQDSNGIQSVTASDNIFNPSEGIPSTMNADALDAFQTSCLSECFPSSIQEFIGSPDINTLAFMSPEMQQLDAGSNLPSTSNSYVQMSFSEESHSASLSGLHMEAIHINSSSCSQPLATGSFDAGAFPKLSNIRECQPLPLQEIHTSSMGTPSCSMDAAAEYGTDRSAKQMKPPVRTYTKVQKLGSVGRCIDVTRFRDYHELRSAIACMFGLQGKLEHPGSSDWKLVYVDYENDVLLVGDDPWEEFINCVRCIRILSPSEVQQMSENGVHVLNDCIQIA

SEQ ID NO: 165954 - protein, 946 aa, Zea Mays
MMASSQEKATSGVLRNAAALLDEMQLMGETQGAKKVINSELWHACAGPLVCLPQRGSLVYYFPQGHSEQVAATTKKIPNSRIPNYPSLPPQLLCQVHNITLHADKETDEIYCQMTLQPLHSETDVFPIPTLGAYTKSKHPTEYFCKNLTASDTSTHGGFSVPRRAAEKLFPQLDYSMQPPNQELIVRDLHDNMWTFRHIYRGQPKRHLLTTGWSLFVGAKRLKAGDSVLFIRDEKSQLLVGVRRATRQQPALSSSVLSTDSMHIGVLAAAAHAASSGGSFTIYYNPRTSPSPFVIPLARYNKATYLQPSVGMRFAMMFETEESSKRRCTGAIVGISDYDPMRWPNSKWRNLQVEWDEHGYGERPERVSIWDIETPENMVFSSPLNSKRQCLPSYGVPGLQIGSVNMSSIPRAQGNPIGNLQHMPGMGSELALLLLNQSGQNIGSPIACQQSSFSSIIQNAKHSYFPPKTFGASTASMKQESMPSTEAQPQLNALGIQRSDRVSCEVQTASDSNPAQEMSVKPRAPRSTDSHSSQSISDQNSKGEPRTKTRRSKKSSYQKTISDKSELCSVPSQICDDKKHGSEPRLADCEAEQATCGNNEESSGALTHGDFAGELQVQQQVEQHELLAPPKIESSKSPDGGKSVSSFPNQGCIPQFFEGLDWMIPPSYYQDSNGIQSVTASDNIFNPSEGIPSTMNADALDAFQTSCLSECFPSSIQEFIGSPDINTLAFMSPEMQQLDAGSNLPSTSNSYVQMSFSEESHSASLSGLHMEAIHINSSSCSQPLATGSFDAGAFPKLSNIRECQPLPLQEIHTSSMGTPSCSMDAAAEYGTDRSAKQMKPPVRTYTKVQKLGSVGRCIDVTRFRDYHELRSAIACMFGLQGKLEHPGSSDWKLVYVDYENDVLLVGDDPWEEFINCVRCIRILSPSEVQQMSENGVHVLNDCIQIA

SEQ ID NO: 165955 - protein, 335 aa, Zea Mays
MNAKKIKLHDYHHCYGSPMCDPQLFPRAAAATTAGLSLHPGPGLVGSLPQRHGGGGGGWVHEEHTATTPRAAQGQGGCVVGSDAAAFFAAEELMMGTARFDSPLGGTTTALQELTAFAKGPPFGRPRPTTGGERERERLYPVDPLPLRDCAAVRTYYVRPQQRDGATEAPPSLELPFQRRQQQQVHGLFGDPSTGRLLGGGEPQAHSFPAHTLKQVPASTFVPAMEAPPGMQSLMDNPLSRSCSIIGAAATHAGSGNAAAPGQGAPSKTRIRWTQDLHERFVDCVNKLGGADKATPKGILKLMNSDGLTIYHIKSHLQKYRIAKYMPVSSTSEAG

SEQ ID NO: 165956 - protein, 460 aa, Zea Mays
MQEELEGLKDTLQSERQSSKEVKNELDKLKSLCDEKESALQAALMEKSRLETRLTSSQGRERDTLTTVGSVNSDIEMLTKLKEDLKSYQKELDASKQVSKKLMSEKNLLDQKVQRLERMKNEEKSTMEKVYADECRKLKSQIAELEQKLEDATQSLNVAESNLAVRNAEVDSLQNSLKDLDELREFKADVDRKNQQTAEILKRQGAQLVELENLYKQEQVLRKRYYNTIEDMKGKIRVFCRLRPLSDKELSFEEKNIVCSPDEFTIAHPWKDEKSKQHIYDRVFDANTSQEEIFEDTKYLVQSAVDGYNVCIFAYGQTGSGKTFTIYGSDNNPGLTPRATSELFRVIKRDGNKYSFSLKTYMVELYQDNLVDLLLPRNVKPLKLEIKKDSKGVVTVENATVVSISSIEELRAIISRGSERRHTAGTNMNDESSRSHLILSVIIESTNLQTQSYARGKESN

SEQ ID NO: 165957 - protein, 1207 aa, Zea Mays
MSIPPELAGAIPLIDRFQVEGFLKAMQKQIHSAGKRGFFSKKSVGPQAREKFTLEDMLCFQKDPIPTSLLKISSDLVSRSIKLFHVILKYMGVDSPAIITLDERIELVAKLYKHTLKRSELRDELFAQISKQTRNNPDRGWSIRAWELMYLCASSMPPSKDIGAYLSEYVHFVAHGATTDSDVRVLALNTLNALKRSVKAGPRVTIPAREEIEALLTSRKLTTIVFFLDETFEEITYDMATTVADAVEELASIIKLSVYSSFSLFECRKVVNGSKSSEVGNEEYIGLDDNKYIGDLLSEFRSAKDRNKGEILHCKLVFKKRLFRESDEAVTDPMFVQLSYVQLQHDYILGNYPVGRDDASQLSALQILVEIGFIDNPESCVEWISLLERFLPRQVAITRAKRDWELDIISRFQLMEHLSKDDARQQFLRILRTLPYGNSVFFSVRKIDDPIGLLPGKIILGINKRGVHFFRPVPKEYLHSAELRDIMQFGSSNTAVFFKMRVAGVLHIFQFETKQGEEICVALQTHINDVMLRRYSKARSANSVTSQNDVNHAYKPPNIEMYEKHVQELTKTVEESQKQADQLREDLQLKTKQETEMQEELEGLKDTLQSERQSSKEVKNELDKLKSLCDEKESALQAALMEKSRLETRLTSSQGRERDTLTTVGSVNSDIEMLTKLKEDLKSYQKELDASKQVSKKLMSEKNLLDQKVQRLERMKNEEKSTMEKVYADECRKLKSQIAELEQKLEDATQSLNVAESNLAVRNAEVDSLQNSLKDLDELREFKADVDRKNQQTAEILKRQGAQLVELENLYKQEQVLRKRYYNTIEDMKGKIRVFCRLRPLSDKELSFEEKNIVCSPDEFTIAHPWKDEKSKQHIYDRVFDANTSQEEIFEDTKYLVQSAVDGYNVCIFAYGQTGSGKTFTIYGSDNNPGLTPRATSELFRVIKRDGNKYSFSLKTYMVELYQDNLVDLLLPRNVKPLKLEIKKDSKGVVTVENATVVSISSIEELRAIISRGSERRHTAGTNMNDESSRSHLILSVIIESTNLQTQSYARGKLSFVDLAGSERVKKSGSAGKQLKEAQSINKSLSALADVIGALSSDGQHIPYRNHKLTMLMSDSLGGNAKTLMFVNVSPAESNLEETYNSLMYASRVRCIVNDTSKHVAPKEIMRLKKLIAYWKEQAGKRSDEDELEEVKEERISKERADNRLTG

SEQ ID NO: 165958 - protein, 1110 aa, Zea Mays
MAAGGVGPAQHQAANGASGSVSNGGAATPLHGSAADGYDSDGYSFAPPTPSTLSMSIPPELAGAIPLIDRFQVEGFLKAMQKQIHSAGKRGFFSKKSVGPQAREKFTLEDMLCFQKDPIPTSLLKISSDLVSRSIKLFHVILKYMGVDSPAIITLDERIELVAKLYKHTLKRSELRDELFAQISKQTRNNPDRGWSIRAWELMYLCASSMPPSKDIGAYLSEYVHFVAHGATTDSDVRVLALNTLNALKRSVKAGPRVTIPAREEIEALLTSRKLTTIVFFLDETFEEITYDMATTVADAVEELASIIKLSVYSSFSLFECRKVVNGSKSSEVGNEEYIGLDDNKYIGDLLSEFRSAKDRNKGEILHCKLVFKKRLFRESDEAVTDPMFVQLSYVQLQHDYILGNYPVGRDDASQLSALQILVEIGFIDNPESCVEWISLLERFLPRQVAITRAKRDWELDIISRFQLMEHLSKDDARQQFLRILRTLPYGNSVFFSVRKIDDPIGLLPGKIILGINKRGVHFFRPVPKEYLHSAELRDIMQFGSSNTAVFFKMRVAGVLHIFQFETKQGEEICVALQTHINDVMLRRYSKARSANSVTSQNDVNHAYKPPNIEMYEKHVQELTKTVEESQKQADQLREDLQLKTKQETEMQEELEGLKDTLQSERQSSKEVKNELDKLKSLCDEKESALQAALMEKSRLETRLTSSQGRERDTLTTVGSVNSDIEMLTKLKEDLKSYQKELDASKQVSKKLMSEKNLLDQKVQRLERMKNEEKSTMEKVYADECRKLKSQIAELEQKLEDATQSLNVAESNLAVRNAEVDSLQNSLKDLDELREFKADVDRKNQQTAEILKRQGAQLVELENLYKQEQVLRKRYYNTIEDMKGKIRVFCRLRPLSDKELSFEEKNIVCSPDEFTIAHPWKDEKSKQHIYDRVFDANTSQEEIFEDTKYLVQSAVDGYNVCIFAYGQTGSGKTFTIYGSDNNPGLTPRATSELFRVIKRDGNKYSFSLKTYMVELYQDNLVDLLLPRNVKPLKLEIKKDSKGVVTVENATVVSISSIEELRAIISRGSERRHTAGTNMNDESSRSHLILSVIIESTNLQTQSYARGKESN

SEQ ID NO: 165959 - protein, 1077 aa, Zea Mays
MAAGGVGPAQHQAANGASGSVSNGGAATPLHGSAADGYDSDGYSFAPPTPSTLSMSIPPELAGAIPLIDRFQVEGFLKAMQKQIHSAGKRGFFSKKSVGPQAREKFTLEDMLCFQKDPIPTSLLKISSDLVSRSIKLFHVILKYMGVDSPAIITLDERIELVAKLYKHTLKRSELRDELFAQISKQTRNNPDRGWSIRAWELMYLCASSMPPSKDIGAYLSEYVHFVAHGATTDSDVRVLALNTLNALKRSVKAGPRVTIPAREEIEALLTSRKLTTIVFFLDETFEEITYDMATTVADAVEELASIIKLSVYSSFSLFECRKVVNGSKSSEVGNEEYIGLDDNKYIGDLLSEFRSAKDRNKGEILHCKLVFKKRLFRESDEAVTDPMFVQLSYVQVLKDCQFVCYSSNLGSKIELTSNIVLQLQHDYILGNYPVGRDDASQLSALQILVEIGFIDNPESCVEWISLLERFLPRQVAITRAKRDWELDIISRFQLMEHLSKDDARQQFLRILRTLPYGNSVFFSVRKIDDPIGLLPGKIILGINKRGVHFFRPVPKEYLHSAELRDIMQFGSSNTAVFFKMRVAGVLHIFQFETKQGEEICVALQTHINDVMLRRYSKARSANSVTSQNDVNHAYKPPNIEMYEKHVQELTKTVEESQKQADQLREDLQLKTKQETEMQEELEGLKDTLQSERQSSKEVKNELDKLKSLCDEKESALQAALMEKSRLETRLTSSQGRERDTLTTVGSVNSDIEMLTKLKEDLKSYQKELDASKQVSKKLMSEKNLLDQKVQRLERMKNEEKSTMEKVYADECRKLKSQIAELEQKLEDATQSLNVAESNLAVRNAEVDSLQNSLKDLDELREFKADVDRKNQQTAEILKRQGAQLVELENLYKQEQVLRKRYYNTIEDMKGKIRVFCRLRPLSDKELSFEEKNIVCSPDEFTIAHPWKDEKSKQHIYDRVFDANTSQEEIFEDTKYLVQSAVDGYNVCIFAYGQTGSGKTFTIYGSDNNPGLTPRATSELFRVIKRDGNKYSFSLKTYMVELYQDNLVDLLLPRNVKPLKLEIKKDSKFPLGISEVC

SEQ ID NO: 165960 - protein, 368 aa, Zea Mays
MQEELEGLKDTLQSERQSSKEVKNELDKLKSLCDEKESALQAALMEKSRLETRLTSSQGRERDTLTTVGSVNSDIEMLTKLKEDLKSYQKELDASKQVSKKLMSEKNLLDQKVQRLERMKNEEKSTMEKVYADECRKLKSQIAELEQKLEDATQSLNVAESNLAVRNAEVDSLQNSLKDLDELREFKADVDRKNQQTAEILKRQGAQLVELENLYKQEQVLRKRYYNTIEDMKGKIRVFCRLRPLSDKELSFEEKNIVCSPDEFTIAHPWKDEKSKQHIYDRVFDANTSQEEIFEDTKYLVQSAVDGYNVCIFAYGQTGSGKTFTIYGSDNNPGLTPRATSELFRVIKRDGNKYSFSLKILSMPSILS

SEQ ID NO: 165961 - protein, 164 aa, Zea Mays
MEASAEAAAAAAAARTLRWAGRAGHLGGVPRAVVFAAVGAFAKACASLLNTTTVHNADALLRLVSARAPGTPLLTVSNHMSTLDDPLMWGFKGFPTSDAKLGRWVLTAEDICFKNVVMSYMFRLGKCIPITRGGGIYQEHMNEALDVLRNGGWVWGCIHSLKEK

SEQ ID NO: 165962 - protein, 155 aa, Zea Mays
MEASAEAAAAAAAARTLRWAGRAGHLGGVPRAVVFAAVGAFAKACASLLNTTTVHNADALLRLVSARAPGTPLLTVSNHMSTLDDPLMWGFKGFPTSDAKLGRWVLTAEDICFKNVVMSYMFRLGKCIPITRGGGIYQEHMNEALDVLRNGGWEK

SEQ ID NO: 165963 - protein, 207 aa, Zea Mays
MALPSSSTPTASAPASLGERWPPLESTPAVFNQFVWSLGVPEDDVEFHDVYGLDADALDMVPQPVLAVVLCFPDPPQETQDQVYFIKQIESLGNACGTIALLHAVGNASSKVNLVENSCLDLFFKSTATMDPYERAVFLEKDDTMARAHLLAANDGATELSDLIEEHYVCFVYVNGTLYELDGMKDGPIKHGPCSFYKFAAGCCSCY

SEQ ID NO: 165964 - protein, 137 aa, Zea Mays
MTVLSKILYGSMHVKSYDWIEPTVLASSQPARLAKLHTDDVRTAPCPTSILYPQSGGNLHCFTSVSSCAVLDVLAPPYNDDAGRICTYFHDYPFSSLSAGRTKVAGNPDNYAWLEAINTPVNINMHTGMYTGPTVQT

SEQ ID NO: 165965 - protein, 161 aa, Zea Mays
MLSKIGIFCLPTSSVIPLHDHPGMTVLSKILYGSMHVKSYDWIEPTVLASSQPARLAKLHTDDVRTAPCPTSILYPQSGGNLHCFTSVSSCAVLDVLAPPYNDDAGRICTYFHDYPFSSLSAAGRTKVAGNPDNYAWLEAINTPVNINMHTGMYTGPTVQT

SEQ ID NO: 165966 - protein, 260 aa, Zea Mays
MAWGVSPRRQPSFPVQALYELCKRSFPSPSAASSSPPPADVVRSISSLMDTITPADVGLRDYNLEDDRGHGFFDSNLLKGSGRLPRWARPIKYLHIYSCDAFSIGIFCLPTSSVIPLHDHPGMTVLSKILYGSMHVKSYDWIEPTVLASSQPARLAKLHTDDVRTAPCPTSILYPQSGGNLHCFTSVSSCAVLDVLAPPYNDDAGRICTYFHDYPFSSLSAAGRTKVAGNPDNYAWLEAINTPVNINMHTGMYTGPTVQT

SEQ ID NO: 165967 - protein, 584 aa, Zea Mays
MSPNLDSAIKSQVPALLLRRLFGASRRDEAKQLQRTPAPVGRRRVFVQTETGCVLGMDLDRGDNAHTVKRRLQLALNMPTGGTSLTFGDRLLENDLSFIRPDSPLLLTRNSINRSCSTPCLCPVSKDFEHKDCSGLVEMLGCSSSCARVKRLVDDVVTAIRSGVDPVPISSGLGGSYYFRNVLGDRVAIVKPTDEEPFAPNNPKGFVGRALGQPGLKRSVRVGETGFREVAAFLLDHDNFANVPATALQFIAHDFDASDHGTSSFPVAAVHRIGILDIRIFNTDRHAGNVLVRKLNGGTGRFGCQTELFPIDHGMCLPENLEDPYFEWIHWAQASIPFSEEELEYIRNLDPRKDVQMLRRELPMIREACLHVLALCTIFLKEAAAFGLCLAEIGEMMTREFRGMEEEPSQLEVMCMEARKRVAEWEPFSATAEHGEDTDFQFSVDMLGEYSDVVRSPRFNGSGSKVSSFRSPLSKLVESVDEGSDGHEDQNESDRVLYAGWNTSSVPSKAMGHSGNASKSAMNRSADEQLPSSMCFVRLSDMSADEWDVFLEKFQELLKEALHESARAAVGQRMKQRLGTSCKF

SEQ ID NO: 165968 - protein, 448 aa, Zea Mays
MAALGRGLPLLLLLLLLAVSGAANAAAAPGGMSIITYNEEHGARGLERTEPEVRAMYDLWLAEHGRAYNALGEGEGERDRRFLVFWDNLRFVDAHNERAGARGFRLGMNQFADLTNDEFRAAYLGAMVPAARRGAVVGERYRHDGAAEELPESVDWREKGAVAPVKNQGQCGSCWAFSAVSSVESVNQIVTGEMVTLSEQELVECSTDGGNSGCNGGLMDAAFDFIIKNGGIDTEDDYPYRAVDGKCDMNRKNARVVSIDGFEDVPENDEKSLQKAVAHQPVSVAIEAGGREFQLYKSGVFSGSCTTNLDHGVVAVGYGAENGKDYWIVRNSWGPKWGEAGYIRMERNVNASTGKCGIAMMASYPTKKGANPPRPSPTPPTPPAAPDNVCDENFSCSAGSTCCCAFGFRNVCSIWDCPLLFLTHGRSDHQEQDFIDYLYVCISTITVP

SEQ ID NO: 165969 - protein, 347 aa, Zea Mays
MKRLPILVVPVLLLLLSISFFLFRPTTPPVLSSRQAFEPDRRLRVYVADLPRAFNYGLLDRYWSLRAADSRIQASSDPDHPPPHDHPPYPENPLIKQYSAEYWLLASLRAAATAPAAVRVVADWREADVVFVPFFATLSAEMELGWGTKGAFRKKDGNEDYRRQREVVDRVTSHPAWRRSSGRDHIFVLTDPVAMWHVRAEIAPAILLVVDFGGWYKVDSKSSSKNSSRVIQHTQVSLLKDVIVPYTHLLPTLLLSENKDRRTLLYFKGAKHRHRVSAFYHSIQHLDCLLSFISNPYSNKFHITLPKQFTSHEKYHNQYIWVFCCYGKYKLTPYLCLPAFKYLNLSY

SEQ ID NO: 165970 - protein, 97 aa, Zea Mays
MCSQCGGNFNVASIDIEGEDGGPRMYMPPLLPPPQCESKLIARADDTEEVTEPVEEFYRARGKLLEFNLPGGIPESWPKLLQALNIEDPDNKRSAAA

SEQ ID NO: 165971 - protein, 255 aa, Zea Mays
MAGMSRAIRNFAAASRRTLTAASGPALPKEAAAAGARVRAAAPGRMGRDQEDGRRVQWVFLGCPGVGKGTYASRLSQLLGVPHIATGDLVRDALATPGPFSNKLAEIVNHGKLVSDEIIINLLSRRLEEGEEKGELGFILDGFPRTIGQAEILEGVTDIDLVINLKLREEALLAKCLGRRMCSQCGGNFNVASIDIEGEDGGPRMYMPPLLPPPQCESKLIARADDTEEVVKERLRVYHDLVGCGCPFLYIYLFI

SEQ ID NO: 165972 - protein, 561 aa, Zea Mays
MQPSDIWKAHAGSSQSEASGLDMERNGCNHNCCPSPLQPIASAGQHSESSAAYFSWPTSTLMHGSAEGRANYFGNLQKGVLPGHLGRLPNGQQATTLLDLMIIRAFHSKILRRFSLGTAIGFRIRKGTLTDTPAILVFVARKVHRKWLSPTQCLPGALEGPGGVWCDVDVVEFSYYGAPAPTPKEQLYDELVDGLRGSDPSIGSGSQVASLETYGTLGAIVKSRTGNKQVGFLTNRHVAVDLDYPNQKMFHPLPPNLGPGVYLGAVERATSFITDDVWYGIYAGTNPETFVRADGAFIPFADDFEIASVSTSVKGVGVIGNVKAIDLQSPIGSLIGRQVVKVGRSSGMTTGTVVAYALEYNDEKGICFFTDFLVVGENQQTFDLEGDSGSLIILTGQDGEKPQPIGIIWGGTANRGRLKLKSGQGPENWTSGVDLGRLLDLLELDLITTSEGLQAALEEQRITLAAAAAAATNSTATESSPVAGPQEDDKIDKIYEPLGINIIPRDGSAISTDQPNEDVEELNLMSPMRNGEEGNGDFNNLMDLESENSPDGMATKEIICF

SEQ ID NO: 165973 - protein, 333 aa, Zea Mays
MFHPLPPNLGPGVYLGAVERATSFITDDVWYGIYAGTNPETFVRADGAFIPFADDFEIASVSTSVKGVGVIGNVKAIDLQSPIGSLIGRQVVKVGRSSGMTTGTVVAYALEYNDEKGICFFTDFLVVGENQQTFDLEGDSGSLIILTGQDGEKPQPIGIIWGGTANRGRLKLKSGQGPENWTSGVDLGRLLDLLELDLITTSEGLQAALEEQRITLAAAAAAATNSTATESSPVAGPQEDDKIDKIYEPLGINIIPRDGSAISTDQPNEDVEELNLMSPMRNGEEGNGDFNNLMDLESENSPDGISIALNLGEREPERLRSVSDSMLDIDLQK

SEQ ID NO: 165974 - protein, 481 aa, Zea Mays
MFPRVAPSNTLAAKKSSTTEDHPMHYQNQVPVEIDPVKDWNQNFEVSPTDYLPQDSREADDILGESSPGFDVLVDNDVDVAEDFARDMYPVEDYEYVTSDFDARAHHESEQFNDGMGVNGRIGQYDGYERKRRRSSSERNLDRHYHPDGRFLHRELDRGEIDGSDLRHQLRRRRINGPSTTISPERANGDRHGRDEPYRERAHGGHHTYRDRYQGPRGSNLSSRLQARIKLPRRSPDRVDTRFEDERDRRRFRDMFSPMRRMDFHGGRHQEAGHNQERGHRKLSELVSTVRHADGLSARRDAVGSTHFAARRNLGEPRKANGLVESEASLDFEGPKPLSVILQRKREAAQGNNYEKFAEVAVTQTGSLDETEKKSCDNVTRFADCKSGSGDEEYKEQDHILVDAHRQSSDHGDKFEAGYAAEVDAEGKQEADDYDQREGESDDYETFEGHDYKSEDENVYQDDEDFDDNDDFARKVGVLLP

SEQ ID NO: 165975 - protein, 103 aa, Zea Mays
MASLSRTAVAAVRSAARSAPLTGRVPGAPLPSLASSSAARSARILRRSAAASSSGLETLMPLHSAVAAARLRSCIAVDFSCWSSLSQGNRWFWLLPFDGITNI

SEQ ID NO: 165976 - protein, 63 aa, Zea Mays
MTSILIMKAKQAPVTILWHTVALSMAVRCAVLPCSLVSPLACTPCASSELPRYLYPVQATALD

SEQ ID NO: 165977 - protein, 485 aa, Zea Mays
MRFRMLFETEESSVRRYMGTITEVSDADPVRWPSSYWRSVKVGWDESTAGERPPRVSLWEIEPLTTFPMYPSLFPLRVKHPWYSGVAALHGSWGQQRLHPSLLSNDHDQYQAVVAAAAASQSDGYLKQQFLHLQQPMQSPQEQCNLNPLLQQQILQQGSQQQMVSPDAQNIQSVLNPNAIQQQLQQFQQMQHAHNDQKQKIQPDQPYQVPSSAVLSSPTSLPSHLREKFGFSDPNVNSSSFISSSSNENMLESNFLQGSSKSVDLSRFNQPVVSEQQQQQAWKQKFICSQSMSFGGSVSLNSPTTKDGPVDNKIGRDVQNQTLFSPQVDSSSLLYNMVPNLTSNVADNNISTIPSGSTYLQSPMYGCLDDSSGLLQNTGENDPTTRTFVKVYKSGSVGRSLDITRFSNYAELREELGQMFGIKGQLDDPDRSGWQLVFVDRENDVLLLGDDPWESFVNSVWYIKILSPEDVHKMGKPGNDPRYLS

SEQ ID NO: 165978 - protein, 809 aa, Zea Mays
MSSSSAASIGQQPPEEEKKCLNSELWHACAGPLVCLPTVATRVVYFPQGHSEQVAASTNKEVDGHIPNYPNLPPQLICQLHDVTMHADVETDEVYAQMTLQPLNPQEQNDPYLPAEMGIMSKQPTNYFCKTLTASDTSTHGGFSVPRRAAERVFPPLDFTQQPPAQELIARDIHDVEWKFRHIFRGQPKRHLLTTGWSVFVSAKRLVAGDSVLFIWNEKNQLLLGIRRASRPQTVMPSSVLSSDSMHIGLLAAAAHAAATNSRFTIFFNPRASPSEFVIPLSKYIKAVFHTRISVGMRFRMLFETEESSVRRYMGTITEVSDADPVRWPSSYWRSVKVGWDESTAGERPPRVSLWEIEPLTTFPMYPSLFPLRVKHPWYSGVAALHDDSNALMWLRGVAGEGGFQSLNFQSPGVGSWGQQRLHPSLLSNDHDQYQAVVAAAAASQSDGYLKQQFLHLQQPMQSPQEQCNLNPLLQQQILQQGSQQQMVSPDAQNIQSVLNPNAIQQQLQQFQQMQHAHNDQKQKIQPDQPYQVPSSAVLSSPTSLPSHLREKFGFSDPNVNSSSFISSSSNENMLESNFLQGSSKSVDLSRFNQPVVSEQQQQQAWKQKFICSQSMSFGGSVSLNSPTTKDGPVDNKIGRDVQNQTLFSPQVDSSSLLYNMVPNLTSNVADNNISTIPSGSTYLQSPMYGCLDDSSGLLQNTGENDPTTRTFVKVYKSGSVGRSLDITRFSNYAELREELGQMFGIKGQLDDPDRSGWQLVFVDRENDVLLLGDDPWESFVNSVWYIKILSPEDVHKMGKPGNDPRYLS

SEQ ID NO: 165979 - protein, 574 aa, Zea Mays
MPSSVLSSDSMHIGLLAAAAHAAATNSRFTIFFNPRASPSEFVIPLSKYIKAVFHTRISVGMRFRMLFETEESSVRRYMGTITEVSDADPVRWPSSYWRSVKVGWDESTAGERPPRVSLWEIEPLTTFPMYPSLFPLRVKHPWYSGVAALHDDSNALMWLRGVAGEGGFQSLNFQSPGVGSWGQQRLHPSLLSNDHDQYQAVVAAAAASQSDGYLKQQFLHLQQPMQSPQEQCNLNPLLQQQILQQGSQQQMVSPDAQNIQSVLNPNAIQQQLQQFQQMQHAHNDQKQKIQPDQPYQVPSSAVLSSPTSLPSHLREKFGFSDPNVNSSSFISSSSNENMLESNFLQGSSKSVDLSRFNQPVVSEQQQQQAWKQKFICSQSMSFGGSVSLNSPTTKDGPVDNKIGRDVQNQTLFSPQVDSSSLLYNMVPNLTSNVADNNISTIPSGSTYLQSPMYGCLDDSSGLLQNTGENDPTTRTFVKVYKSGSVGRSLDITRFSNYAELREELGQMFGIKGQLDDPDRSGWQLVFVDRENDVLLLGDDPWESFVNSVWYIKILSPEDVHKMGKPGNDPRYLS

SEQ ID NO: 165980 - protein, 781 aa, Zea Mays
MSSSSAASIGQQPPEEEKKCLNSELWHACAGPLVCLPTVATRVVYFPQGHSEQVAASTNKEVDGHIPNYPNLPPQLICQLHDVTMHADVETDEVYAQMTLQPLNPQEQNDPYLPAEMGIMSKQPTNYFCKTLTASDTSTHGGFSVPRRAAERVFPPLDFTQQPPAQELIARDIHDVEWKFRHIFRGQPKRHLLTTGWSVFVSAKRLVAGDSVLFIWNEKNQLLLGIRRASRPQTVMPSSVLSSDSMHIGLLAAAAHAAATNSRFTIFFNPRASPSEFVIPLSKYIKAVFHTRISVGMRFRMLFETEESSVRRYMGTITEVSDADPVRWPSSYWRSVKVGWDESTAGERPPRVSLWEIEPLTTFPMYPSLFPLRVKHPWYSGVAALHGSWGQQRLHPSLLSNDHDQYQAVVAAAAASQSDGYLKQQFLHLQQPMQSPQEQCNLNPLLQQQILQQGSQQQMVSPDAQNIQSVLNPNAIQQQLQQFQQMQHAHNDQKQKIQPDQPYQVPSSAVLSSPTSLPSHLREKFGFSDPNVNSSSFISSSSNENMLESNFLQGSSKSVDLSRFNQPVVSEQQQQQAWKQKFICSQSMSFGGSVSLNSPTTKDGPVDNKIGRDVQNQTLFSPQVDSSSLLYNMVPNLTSNVADNNISTIPSGSTYLQSPMYGCLDDSSGLLQNTGENDPTTRTFVKVYKSGSVGRSLDITRFSNYAELREELGQMFGIKGQLDDPDRSGWQLVFVDRENDVLLLGDDPWESFVNSVWYIKILSPEDVHKMGKPGNDPRYLS

SEQ ID NO: 165981 - protein, 513 aa, Zea Mays
MRFRMLFETEESSVRRYMGTITEVSDADPVRWPSSYWRSVKVGWDESTAGERPPRVSLWEIEPLTTFPMYPSLFPLRVKHPWYSGVAALHDDSNALMWLRGVAGEGGFQSLNFQSPGVGSWGQQRLHPSLLSNDHDQYQAVVAAAAASQSDGYLKQQFLHLQQPMQSPQEQCNLNPLLQQQILQQGSQQQMVSPDAQNIQSVLNPNAIQQQLQQFQQMQHAHNDQKQKIQPDQPYQVPSSAVLSSPTSLPSHLREKFGFSDPNVNSSSFISSSSNENMLESNFLQGSSKSVDLSRFNQPVVSEQQQQQAWKQKFICSQSMSFGGSVSLNSPTTKDGPVDNKIGRDVQNQTLFSPQVDSSSLLYNMVPNLTSNVADNNISTIPSGSTYLQSPMYGCLDDSSGLLQNTGENDPTTRTFVKVYKSGSVGRSLDITRFSNYAELREELGQMFGIKGQLDDPDRSGWQLVFVDRENDVLLLGDDPWESFVNSVWYIKILSPEDVHKMGKPGNDPRYLS

SEQ ID NO: 165982 - protein, 444 aa, Zea Mays
MSSSSAASIGQQPPEEEKKCLNSELWHACAGPLVCLPTVATRVVYFPQGHSEQVAASTNKEVDGHIPNYPNLPPQLICQLHDVTMHADVETDEVYAQMTLQPLNPQEQNDPYLPAEMGIMSKQPTNYFCKTLTASDTSTHGGFSVPRRAAERVFPPLLHAGLFGLLLQITGGIVCRQRIPLSSRQRQELRNPGSWNGRALARKSRTEKPCRTIETGRCWIVGTAQRRTGWPCGVPGGPGLGNEKNQLLLGIRRASRPQTVMPSSVLSSDSMHIGLLAAAAHAAATNSRFTIFFNPRASPSEFVIPLSKYIKAVFHTRISVGMRFRMLFETEESSVRRYMGTITEVSDADPVRWPSSYWRSVKVGWDESTAGERPPRVSLWEIEPLTTFPMYPSLFPLRVKHPWYSGVAALHGTLQILMLVAITLSAAPLVLWLFTCVISVTATK

SEQ ID NO: 165983 - protein, 409 aa, Zea Mays
MSLRLGFHNLEPALAAAAEALFGTRSPPRAVLRRARALHALLVVSSLPSAPRPPTFLVNQLLALYCRLSAVPDALALLRSTPCPSVISYNTVLSALSRTPRHAQDAFGLFRGLHSSGLRPTAPSLCAVLRAAGALRDGRAGAAAHAHASALGFLASDIVPTALLQMYSGCGSPRDANQVFDEMMTPDVVAWNCVMHCNVRYDYLDRALRKFCRMVSTGLAPTESTLSSVLSGCGRSGDLHHGRALHGWVVKSEELDPDLPLHNALLDMYCCCGDLDTAVLVFRRIETPDLVSWNTIISGFSGVADGWTAVQAFVKLKAVSSEWLAPDEYTFAAVVAAAASLPAMCSGKPLHACVIKAGLESSVFVANTLLNMYFTNEDPESAHILFDSVMVKDVIMWTEMVAGHSALVL

SEQ ID NO: 165984 - protein, 256 aa, Zea Mays
MAADSSMGFHQGITASLYNHHMLSFQSNSDVGIGGGDDATGGMVMAPGSVSGGSGNAGLFLSPNTGVVGNAPGVAPLMNSSGDAFRGTGTPKYKYVTGSPSDWSDREVDILNEGLVRYAREPSIMRYIKIAAMLPNRTIRDVALRCCWATGKERRKKPDGFYTGKKMRDVKPIQDKMVASVPIANFHMTPTTNVIPFSVSTQHPNQQSQVPKEVQPSVSWRKIISCLTRFLQIMKHSRQWRTQIFFSARVTTSKQF

SEQ ID NO: 165985 - protein, 164 aa, Zea Mays
MAADSSMGFHQGITASLYNHHMLSFQSNSDVGIGGGDDATGGMVMAPGSVSGGSGNAGLFLSPNTGVVGNAPGVAPLMNSSGDAFRGTGTPKYKYVTGSPSDWSDREVDILNEGLVRLIHSPILLPELLLPVLYFSLLLHIWNLVCFLFAPLMCSKVVEHQLRT

SEQ ID NO: 165986 - protein, 699 aa, Zea Mays
MAPSALASLPAPLRSLRLKTKQQELLLRVSALALIYVLAFAVRLFSVLRYESMIHEFDPYFNYRTTLFLTENGFSEFWNWFDSESWYPLGRVVGGTLFPGLMVTAALLHRLLRALSLAVHIREVCVLTAPFFAANTTLVAYAFGREIWDSGAGLVAAALIATVPGYISRSVAGSYDNEGVAIFALLLTFYFFVRAVNTGSLAWALASAFGYFYMVSAWGGYVFIINLVPLYVLVLLVTGRYSQRLYVAYNCMYVLGMLLAMQIRFVGFQHVQSGEHMAAMGVFFLLQVFFFLDWVKYLLNDARLFKSFLRITLTCVITVGTLALGIGTASGYISPWTGRFYSLLDPTYAKDHIPIIASVSEHQPTAWSSFMFDFHILLFLFPAGLYFCFKRLSDATIFIVMYGLTSMYFAGVMVRLILVAAPAVCLISAIAASATIKNLTTLIRTKSRSPQTTSGKTTGSKSAAKGVVDQSLPFQHNAAIGLLLGAFYLLSRYAIHCTWVTSEAYSSPSIVLAARGHNGGRVIFDDYREAYYWLRQNTPPDAKIMSWWDYGYQITAMGNRTVIVDNNTWNNTHIATVGRAMSSYEDEAYEIMQSLDVNYVLVVFGGVTGYSSDDINKFLWMVRIGGGVFPVIKEPDYLVNGEYRIDKGAAPKMLNCLIEDSSENTQLLAQIWGENIYIVQALLLPIWRTYHRIWKTSRV

SEQ ID NO: 165987 - protein, 146 aa, Zea Mays
MQKNCVDCGNLVSIQMQSLFHSEPMFLGFSRSFSKLNYFVPHHVPRFSFYTAEAIDWYSQSDDAGRSHAYTFATQDKFGVQPREDHYMVDLGLVFWYGRRCWLPAIFHGSEAVGTHLILEAASERTNKHTIVCHKDVEKQTCLYQN

SEQ ID NO: 165988 - protein, 155 aa, Zea Mays
MYWENLIQFPMTMAQRTMCLLRRSIGFTGPQAQRALSTTAAPAAEGAAVAEATAKEAKRRRKNLFDVVQFLPEWGIGYKVAKTTWRDVSYQITKINLYKDGRHGKAWGLRYKAGVQAADTPTRISGVNKRGWKYIKESQKKLQEAPKVDVAVAAA

SEQ ID NO: 165989 - protein, 196 aa, Zea Mays
MRTWLPQGLKDFTSNNSELYLMNLKSDSTFDLVCKVFHVHVENNNSIFYVWDGTDTPAAEFPAILDAEAAKSLSLHEGPPLSREILCTMPDFGTVLRIFSDRFVNKVSYMQKNIYWARFWNITCKQNFGIWKGTFSDSGGVRLLSNKDDSVVDRLKMYDSRIANRVRRRPMASIPSSVTGDAQIENLGPCCGSTSM

SEQ ID NO: 165990 - protein, 189 aa, Zea Mays
MPDFGTVLRIFSDRFVNKVSYMQKNIYWARFWNITCKQNFGIWKGCMTAASPTEFVVGRWQASPPVLLVTHKLRTLVRVVAAHPCEASLLSTGNCHLRLTLEDPTARIHAYVHKNDLVGFFGGGFLTAEVIVKKMNMVLGIPEPQGSVEVAPSTRNPPWIWCCLMSYYMDKNDPWVSRKYRIYSTAIRD

SEQ ID NO: 165991 - protein, 292 aa, Zea Mays
MLPSHLNGHSALGRRRPRLSAAAGESPAAAGVEAAAPLEEHDRIYFQAYSHLGIHETMIKDRVRTDAYHAAIMRHQKFIEGKVVLDVGCGTGILSVFCARAGAKRVYAVEACEIVVQAREIVKANNLTDQIVVIHGRVEDVDLEEKVDVIISEWMGYMLLYESMLPSVLFARDKWLKPGGLILPSHATLFMAPVTNRERYEDSVDFWRDVYGINMSALVPLAKKFTSEEPSIETIGGENVISWPSVFKRFDCYNFTAEEFKSITSKYKVSSMMLVWIHLRLYRRKGDDPQKI

SEQ ID NO: 165992 - protein, 80 aa, Zea Mays
MAKKFLTIPATSVSSESTFSTGGRTLDDYRSSLRPSMVEALVCSSSWIRGTHDGSMIYVEEDDEDNVENIMFPKSLVESN

SEQ ID NO: 165993 - protein, 71 aa, Zea Mays
MTTSSTIRNTTQLGDHGAHGLHPLSFTFDWWLLPKAPYLAYKLKMLALGRTEVHMNNTRTTDPRREYEEKE

SEQ ID NO: 165994 - protein, 129 aa, Zea Mays
MTIVFVLIMLEGAITMDVFLNSNWEEDFPADPSGKFEDFKHFVRSNFEICEWVGLSVVAAQVLSIILGMVLRTLGPDRETDYDSDDDVTVPARLPLLINQSQHGSYYAEPNTSGRSDSWKLRILDKVNN

SEQ ID NO: 165995 - protein, 150 aa, Zea Mays
MEDGDESAAAAAALGLSPQLFVNEVHGIIADISAEAFEYCLQAAAAPGVVGAATAAEKATDLQRGLNAIHHVVKDRLDKRMTNWEKFCYRHCFDVPEGFVAADDDSSCANESQKDGISDSDLDLELDSLRRKFGSRVVLTGKASYVQKKT

SEQ ID NO: 165996 - protein, 128 aa, Zea Mays
MYLKVLWPLMISCANESQKDGISDSDLDLELDSLRRKFGSANKESENLERELSSLERQATFKRRLDSSVSEIEKLFEEEMVQGNLKDLVKAIPVLHQKIIDANQRRTEIRSLVDQQAWNTKRSRDSKP

SEQ ID NO: 165997 - protein, 315 aa, Zea Mays
MVRSSQMLVAQALIFHHLGRSWRKPSEKPYDPDYIRVLHLFGDSEACAFSIHNLLQAGRNYGLAAGSWVGPYAMCRAWQTLIRTNREQADAVDGKENFPMALYVVSGDEDGERGGAPVFCIDVAAQLCSNFNKGQCTWSPILLLIPLVLGLDKINPRYIPLLKETFKFPQSLGILGGKPGTSTYIAGVQEDRALYLDPHDVQMAVDIAPDNLEADTSSYHCSVVRDLALEQIDPSLAIGFYCRDKDDFDDFCSRASELAEKANGAPLFTVMQSVQPSKQMYKQDDGLCCCSGSSMANEDYDLDASGEAGEEWQIL

SEQ ID NO: 165998 - protein, 208 aa, Zea Mays
MTTSPERGEAPPAPPRDSPCEDAAPAAAVVASSSSGSEREEDGGSRQPKASVLSGVFAPPLAIFEGQQQVSSTPCDASSTKPPSGSYAWSRILRRFVGSGSMWRLLGCARVLTSGDVWFLGKCYRVSPEEEESGGSDSDSGHAAFLEDFSSRIWITYRKGFDAIPGSKLTSDVNWGCMVRSSQMLVAQALIFHHLGRSWRKPSEKGCL

SEQ ID NO: 165999 - protein, 265 aa, Zea Mays
MTTSPERGEAPPAPPRDSPCEDAAPAAAVVASSSSGSEREEDGGSRQPKASVLSGVFAPPLAIFEGQQQVSSTPCDASSTKPPSGSYAWSRILRRVSPEEEESGGSDSDSGHAAFLEDFSSRIWITYRKGFDAIPGSKLTSDVNWGCMVRSSQMLVAQALIFHHLGRSWRKPSEKPYDPDYIRVLHLFGDSEACAFSIHNLLQAGRNYGLAAGSWVGPYAMCRAWQTLIRTNREQADAVDGKENFPMALYVVSGDEDGERGTSHY

SEQ ID NO: 166000 - protein, 644 aa, Zea Mays
MDLSRFASGVGPSRVAPRAGLQIGAAENGFRACSLRRARHRGGGNGNLTAAASTLRGRGGLFYLAPTRRSHPSLRLFYLLPTRGSHLSLRARWRPRCQGNDSLAYVDGPLETAKGSGEVDDNVPTSSGSDDDRGLADVDGLREMLQRSRNELEVARVNSTMFEEKAQRISESAIAFKDRADGAQRDVCAAVATVQEIISKEADAKEAVQKATMALSMAEARLQLAAEALEANRGSVGPTEVSIEGMEQEALLSAQEEIKDCRAALSRCAEELSRVQDKKMELQKEVDRLTDLAGKAQMDASNAEEDVANIMVLAEQAVALEMEASQRVNDAEMVLLKAEKAIASIDTVVELPSPAEEQRSTEEDSVSEGYEYSSDVTDDVYVRDEVSSIERLMVGDLTVQGFEQLEPSREIYDEESSNKMSVEPQKEAESDSDKSKQGKKQEMERKEHTKEPLSAPKALVKRSSRFFSASFFSSKVDGEFTPTSVFRGLMKSVQKQAPKLVVGILLLGAGAFFLNRAEKSQLFQQQGIATSIGKVTSTTKPIVLEIRRIPQRVKKLIELLPHQEVNEEEASLFDILYLLLASVIFVPLFQKIPGVLFLDILLLVSSLVHMGCPSSVMCMRQRQLRNLELCSYYLTLDLSFLWKD

SEQ ID NO: 166001 - protein, 660 aa, Zea Mays
MDLSRFASGVGPSRVAPRAGLQIGAAENGFRACSLRRARHRGGGNGNLTAAASTLRGRGGLFYLAPTRRSHPSLRLFYLLPTRGSHLSLRARWRPRCQGNDSLAYVDGPLETAKGSGEVDDNVPTSSGSDDDRGLADVDGLREMLQRSRNELEVARVNSTMFEEKAQRISESAIAFKDRADGAQRDVCAAVATVQEIISKEADAKEAVQKATMALSMAEARLQLAAEALEANRGSVGPTEVSIEGMEQEALLSAQEEIKDCRAALSRCAEELSRVQDKKMELQKEVDRLTDLAGKAQMDASNAEEDVANIMVLAEQAVALEMEASQRVNDAEMVLLKAEKAIASIDTVVELPSPAEEQRSTEEDSVSEGYEYSSDVTDDVYVRDEVSSIERLMVGDLTVQGFEQLEPSREIYDEESSNKMSVEPQKEAESDSDKSKQGKKQEMERKEHTKEPLSAPKALVKRSSRFFSASFFSSKVDGEFTPTSVFRGLMKSVQKQAPKLVVGILLLGAGAFFLNRAEKSQLFQQQGIATSIGKVTSTTKPIVLEIRRIPQRVKKLIELLPHQEVNEEEASLFDILYLLLASVIFVPLFQKIPGGSPVLGYLAAGVLIGPYGLSIIRNVHETKAIAEFGVVFLLFNIGLELSVERLSSMKKCWLLLLLLV

SEQ ID NO: 166002 - protein, 278 aa, Zea Mays
MGMAAVKAVAAITAIIAGGRLLLRPIYKQIAENQNAEIFSANTLLVIFGTSLLTARAGLSMALGAFLAGLLLAETEFSLQVESDIAPYRGLLLGLFFMTVGMSIDPKLLLSNFPAISVILSLLIIGKTLLVTFVGRVFGVSAIAAIRVGLLLAPGGEFAFVAFGEAVNQGLLSPQLTSLLFLVVGISMALTPWLAAGGQFLASKFEQHDVRSLLPVESETDDLQDHIIILGFGRVGQIIAQLLSERLIPFVALDAGRYGASYNKLNSKETTDSSSSEP

SEQ ID NO: 166003 - protein, 1039 aa, Zea Mays
MDLSRFASGVGPSRVAPRAGLQIGAAENGFRACSLRRARHRGGGNGNLTAAASTLRGRGGLFYLAPTRRSHPSLRLFYLLPTRGSHLSLRARWRPRCQGNDSLAYVDGPLETAKGSGEVDDNVPTSSGSDDDRGLADVDGLREMLQRSRNELEVARVNSTMFEEKAQRISESAIAFKDRADGAQRDVCAAVATVQEIISKEADAKEAVQKATMALSMAEARLQLAAEALEANRGSVGPTEVSIEGMEQEALLSAQEEIKDCRAALSRCAEELSRVQDKKMELQKEVDRLTDLAGKAQMDASNAEEDVANIMVLAEQAVALEMEASQRVNDAEMVLLKAEKAIASIDTVVELPSPAEEQRSTEEDSVSEGYEYSSDVTDDVYVRDEVSSIERLMVGDLTVQGFEQLEPSREIYDEESSNKMSVEPQKEAESDSDKSKQGKKQEMERKEHTKEPLSAPKALVKRSSRFFSASFFSSKVDGEFTPTSVFRGLMKSVQKQAPKLVVGILLLGAGAFFLNRAEKSQLFQQQGIATSIGKVTSTTKPIVLEIRRIPQRVKKLIELLPHQEVNEEEASLFDILYLLLASVIFVPLFQKIPGGSPVLGYLAAGVLIGPYGLSIIRNVHETKAIAEFGVVFLLFNIGLELSVERLSSMKKYVFGLGSAQVLATTAAVGVIAHCFAALPGPAAIVVGSGLALSSTAVVLQVLQERGESTSRHGRATFSVLLFQDLAVVVLLILIPLISPNSSKGGVGFQAIAEAMGMAAVKAVAAITAIIAGGRLLLRPIYKQIAENQNAEIFSANTLLVIFGTSLLTARAGLSMALGAFLAGLLLAETEFSLQVESDIAPYRGLLLGLFFMTVGMSIDPKLLLSNFPAISVILSLLIIGKTLLVTFVGRVFGVSAIAAIRVGLLLAPGGEFAFVAFGEAVNQGLLSPQLTSLLFLVVGISMALTPWLAAGGQFLASKFEQHDVRSLLPVESETDDLQDHIIILGFGRVGQIIAQLLSERLIPFVALDAGSSASPILHYPLETVREAPIFIGTKSSMSI

SEQ ID NO: 166004 - protein, 146 aa, Zea Mays
MKEASNILHNCSSRSLVIIDELGRGTSTHDGVAIAYSTLHYLLKEKKCIVIFVTHYPKILDIQREFEGSVGAYHVSYLATRKLLEVTDKQVETSPEANDLGEIIFLYKLVAGASDRSFGLNVALLAQVRYAYLVGFMICCFHLGRD

SEQ ID NO: 166005 - protein, 128 aa, Zea Mays
MSLVEAQAHMTREFEGSVGAYHVSYLATRKLLEVTDKQVETSPEANDLGEIIFLYKLVAGASDRSFGLNVALLAQLPSRCIKRASVMAAKLQEELSPREEIKLRRTTDAQTVDGPSESSAEEIAQKTI

SEQ ID NO: 166006 - protein, 133 aa, Zea Mays
MSLVEAQAHMTILDIQREFEGSVGAYHVSYLATRKLLEVTDKQVETSPEANDLGEIIFLYKLVAGASDRSFGLNVALLAQLPSRCIKRASVMAAKLQEELSPREEIKLRRTTDAQTVDGPSESSAEEIAQKTI

SEQ ID NO: 166007 - protein, 122 aa, Zea Mays
MILEKLFSCTNLLLELQIEALDLMLPCLHRCIKRASVMAAKLQEELSPREEIKLRRTTDAQTVDGPSESSAEVGLFCAHPYQRLAETCRRILLNITLAQSNNDVTNTLPSLKNAQEIAQKTI

SEQ ID NO: 166008 - protein, 681 aa, Zea Mays
MGKPKQQVLSRFFSPKPAPVLSSAAPDPPPPLPPNPKPSAAHPPVSTVASFSPAKRARALSLSPKSPAAKRPNPTPPPSRDAVRRRLLEPLHQEPPRLLDPTGGGKGYTPLEQQVVDLKARHPDVLLMVEVGYRFRFFGEDAAVAAAVLGIVAHPDRSFLTASVPNFRLGFHVRRLVAAGHKVGVVRQTETAAIKAAARGVGGAPFSRGLSAVYTRATIEAAAGELEGGGAAAPEEGSSYLVCIVDKEVEAAGREGLQVKVGLVAIEVSTGEVVHGEFLDSDSRSGLEALLLGLAPVEVILGTPLSFATEKIMMAYVGPTSNVRVERVSCEWFGKDAALAELITLFEKSVNNASRAEDDRKLIETNDDNNNFHGIEGIMAMPELVVQALALSVRYLKEFSLSANALQQLEVVFCSTFKVKVPVLIFITILSQVFRNNSDGTTEGSLFQIMNNTCTSFGSRLLRNWLTRPLCNRHLICARHDAVSEIFESMGPQHSVNNLQDGGDRSCTASVLSDLCIVLSSVLALLGRSPDIQRGISRIFHCKATAKEFVGVIQSILTSGKQLQKLVLEDIGIVSSPHKSVHSPLLRRLINTASSSTILNSAVKLLSCLNKDAADQGDMLNLFIASVDQFPEVAEGHVNVKMAEHKLDLLIVEYRKQFAMHNLEFKTVAGTTHLIELPVDR

SEQ ID NO: 166009 - protein, 576 aa, Zea Mays
MGKPKQQVLSRFFSPKPAPVLSSAAPDPPPPLPPNPKPSAAHPPVSTVASFSPAKRARALSLSPKSPAAKRPNPTPPPSRDAVRRRLLEPLHQEPPRLLDPTGGGKGYTPLEQQVVDLKARHPDVLLMVEVGYRFRFFGEDAAVAAAVLGIVAHPDRSFLTASVPNFRLGFHVRRLVAAGHKVGVVRQTETAAIKAAARGVGGAPFSRGLSAVYTRATIEAAAGELEGGGAAAPEEGSSYLVCIVDKEVEAAGREGLQVKVGLVAIEVSTGEVVHGEFLDSDSRSGLEALLLGLAPVEVILGTPLSFATEKIMMAYVGPTSNVRVERVSCEWFGKDAALAELITLFEKSVNNASRAEDDRKLIETNDDNNNFHGIEGIMAMPELVVQALALSVRYLKEFSLSANALQQLEVFRNNSDGTTEGSLFQIMNNTCTSFGSRLLRNWFVGVIQSILTSGKQLQKLVLEDIGIVSSPHKSVHSPLLRRLINTASSSTILNSAVKLLSCLNKDAADQGDMLNLFIASVDQFPEVAEGHVNVKMAEHKLDLLIVEYRKQFAMHNLEFKTVAGTTHLIELPVDR

SEQ ID NO: 166010 - protein, 476 aa, Zea Mays
MGKPKQQVLSRFFSPKPAPVLSSAAPDPPPPLPPNPKPSAAHPPVSTVASFSPAKRARALSLSPKSPAAKRPNPTPPPSRDAVRRRLLEPLHQEPPRLLDPTGGGKGYTPLEQQVVDLKARHPDVLLMVEVGYRFRFFGEDAAVAAAVLGIVAHPDRSFLTASVPNFRLGFHVRRLVAAGHKVGVVRQTETAAIKAAARGVGGAPFSRGLSAVYTRATIEAAAGELEGGGAAAPEEGSSYLVCIVDKEVEAAGREGLQVKVGLVAIEVSTGEVVHGEFLDSDSRSGLEALLLGLAPVEVILGTPLSFATEKIMMAYVGPTSNVRVERVSCEWFGKDAALAELITLFEKSVNNASRAEDDRKLIETNDDNNNFHGIEGIMAMPELVVQALALSVRYLKEFSLSANALQQLEVVFCSTFKVKVPVLIFITILSQVFRNNSDGTTEGSLFQIMNNTCTSFGSRLLRNWTSDLCSSRCGI

SEQ ID NO: 166011 - protein, 186 aa, Zea Mays
MVSSSSSVVNVYPLANYTFGTKEPKMEKDTSVADRLARMKVNYMKEGMRTSVEAILLVQEHNHPHILLLQIGNTFCKLPGGRLKPGENEIEGLKRKLCSKLAVNSPSFPPNWQVGECVAVWWRPNFETVMYPYCPPHITKPKECKKLFIVHLSEREYFAVPRNLKLLAVPLFELYDNIQEFVKFCF

SEQ ID NO: 166012 - protein, 187 aa, Zea Mays
MAVKDCGGHKGCECERERLYRRCCAAVVALILLVLFIVLVVWLATVAARNPNERVGVYYDQADAYAEYKGVAITVPTRLPVQYQGPRDASVWSPFLRAPEGGVQLPPQLAVALAQDETAGYVLVDVRVDGWVRWKVGTSWISGHYHLRVNCPALLTVNDGRGSYGANTGGGTGYFRFQQAAACAVDV

SEQ ID NO: 166013 - protein, 288 aa, Zea Mays
MFIIYMIMTHMAQVMLSIVASSCLPRHCPSASLRLACAVGSLVSPLFQPWPIVSIAGFATTFPCQGKPLHFEHVPNPNFTLPSFESYVPNLKLTGPSRAVLLVDPVTIEADLKVKGRTESEDKHLSFLAVPFLVMIPLESCLRTRDFTSKLSTLRFALAIVVLSVEATISVRVRGGSWPDGLRAQFAAHTVSIGREEVVLLDSGDDKLPVSDDGTIKLGRRVASVEVSGELNVSVKAWQGGEVFTHRERGFKPKEAGWSYGTLDVGFCQMDVSVAWSLLSSYGENEAL

SEQ ID NO: 166014 - protein, 238 aa, Zea Mays
MSLFSAFWRCHPLSLGRLLVKLASVTMLLCWIKKMPKVPNLKLTGPSRAVLLVDPVTIEADLKVKGRTESEDKHLSFLAVPFLVMIPLESCLRTRDFTSKLSTLRFALAIVVLSVEATISVRVRGGSWPDGLRAQFAAHTVSIGREEVVLLDSGDDKLPVSDDGTIKLGRRVASVEVSGELNVSVKAWQGGEVFTHRERGFKPKEAGWSYGTLDVGFCQMDVSVAWSLLSSYGENEAL

SEQ ID NO: 166015 - protein, 583 aa, Zea Mays
MDAAALALSIILLAAAAATTLARGATHPADQAALEDLRKSLTNPDALGWPDDGDACAWPHVSCDRTGRVDNLDLKNAGLAGTLPPSLPSLAALRDLSLQGNSLSGALPSFRGMASLQRAFLNDNDFDAIPPDFFDGLADLLEISLANNPRLNASQGGWTLPRGLADSSLQLQALSLDNCSLTGGIPDSLARLTGLQNLTLSYNNLSGPVPAALNGSAIQRLWLNNQQGDAKLSGTLDVVATMTGLQELWLHGNDFSGPVPDAIASCKELYTVRLNNNQLLGLLPPGLAALPALRELKLDNNNLLGPVPALKAPTFTFSGNEFCAAKPGEACAPEVMALLHFLAEVQYPNRLVGTWSGNDPCAGWLGVTCVQGKVTMLNLPGYGLNGTVSQSLANVTTLSEVNLAGNNLTGRVPDSLTRLASLQKLDLSMNDLYGPLPAFSPTVDVNVTGNLSFNTTDTQPTDAQPNGESPRPRPTPGASAGAGGNTSAGGIPGSGKKASSAVLLGTTIPVAVSVVALVSVGAVFLCKRRASVPPQAASVVVHPRNSSDPDNLAKIVEEASQHRPGCCPWDGVPAQPGAPPLHT

SEQ ID NO: 166016 - protein, 182 aa, Zea Mays
MQAFKESNVGGKPPGMWKTLIGVLSSRQSIKSPENVRGYHLLWTGLGAQLARDAPYSAICWTVLEPIRRHVTRLFGDQSNATVILGANFSAGFIAGVISAGATCPLDVAKTRRQIEKDPERVLSMNTRRILLEVWRKEGVEGLFRGAGPRMGRAGPSVGIVVSSYEVVKHLMHKNTSNAADL

SEQ ID NO: 166017 - protein, 174 aa, Zea Mays
MDVFSKVTRQEGIFRLWRGTGASLALAVPTVGIYLPSYDLLRNWIEEYSDRNCPKLRPYAPLISGSIARSLACITCCPIELARTRMQAFKESNVGGKPPGMWKTLIGVLSSRQSIKSPENVRGYHLLWTGLGAQLARDAPYSAICWTVLEPALLLGLSLRALPALLMLPRHADK

SEQ ID NO: 166018 - protein, 508 aa, Zea Mays
MEDDDTEGVGESTCPPAADRGGSSSAGGGGGDSHSYTDIEKEVFDRLMEKRIPEVVADPVAFREELRRHFERLPLSYAVDVNVDKAEDVLLHRRILNECAHPENRPIFHVGFLNCIPPSVDPQYNTQSISTSENGNCGGSQDSTLRKFEPCEGIEDLSLTGQKVVVDSVASSSRGDEEILHVHEIIFSTIDKPKLLAQLSALLSEVGLNIREAHVFSTTDGFCLDVFVVDGWDTKETDTLLQILKETAARNHASLSNPTNSAASERVLELQEKIGDSNIDRNFLQIGEKIASGSSGDLHRGTYQGMDVAVKFLRTEHVNDSSKVEFLQEIIILKSVNHDNVVRFYGACTKQRKYVIVTEYMPGGNLYDFLHTLKNTLDLPTVLRIAIGISKGMDYLHQNNIIHRDLKTANLLMGSDYVVKIADFGVSRNPSQGGDMTAETGTYRWMAPEVINHKPYDHRADIFSFAVVLWELVTSKIPYRNLTPLQAALGVRECGWRSRHGSIHNCLN

SEQ ID NO: 166019 - protein, 910 aa, Zea Mays
MKDPEASNECEWKYLGKNKPTDAEMLRTYAIGLLAMALCSGGQLVEDVLTLGVPAKLMHFLRIRVLGDASSSQRDANHPQDTKYPRGRDDNRGKSRLAQDGSRLDGTRVGYGILTNPTAEKDNEPGVVMRQAYGERSLDGTFASSDNSDVPEVDWTNDNSYGTIVCDTKSKYGEKTSVTRALKDEEISENGELLKRKLSRAPSRLRVKGKAGDNLPECEMTPLSPTSGLRIGGRASRDRNVVRVDDPKKATDVNNSSAGLELFSAISKEEYEDRLRDCIIGLKDISDIVLKAVRAAEAEARSANAPDEAVKAAGDAAAELVKSAALEVWKAENNSDAVIVAAEKAASAVVEAAVSTSVSRSTNQVGEERAAEEAVQTSEDQDLENFVISDKSQLLQLREKYSIQCLQILGEYVEALGPVLHEKGVDVCLTLLQMSMKDQEGCDHFAQLPDVLKLICALAAHRKFAALFVDRGGIQKILSIPRITQTYMGLSACLFTFGSLQSTMERVCALSSDTLDSVVELALQLLECPQDLARKNVGIFFAAAFVFKAVLDLFDARDGMQKLLDILYGCASGRSGSNSGGAGSSNVNQGNDRSPAEALTASEKQVAYHTCVALRQYFRAHLLQLVDSIRPSKSIRSIARNTSSARAGYKPFDISNEAMDAVFRQIQRDRKLGLALVRVRWPVLDKFFASNGHVTMLELCKFQAHGDRYLRDLTQYAIGVLHIITLMPQPHVRKSIVQGTLSNNRAGMAVLLDTVKSFDYIDHEVICPALNVLVNLVCPPPSISNKPLSTANQQPAAAQALASESRDRNFEKSISDRNLLANQGEYRERSGDGNPAERNNTLHQGTPNTPVVTSGVVGDRRITLGVGGGGPGLAAQLEQGYRQAREVILFERLPAVSCLAWLEMIQLHIY

SEQ ID NO: 166020 - protein, 1064 aa, Zea Mays
MAESEKGAAATTTAAAEPGSGPPHEDEDALLARAHTVISRILDRELDPNPRLLHTLATMCELHEARYLELRAADPTFNNTNTRSTFTIGKLANLLRDNDEFYELVFCKFLSDTSYSVAVQAAAARLLLSCHSAWTPPYPHVFEDSIIDNIKKWVMKDPEASNECEWKYLGKNKPTDAEMLRTYAIGLLAMALCSGGQLVEDVLTLGVPAKLMHFLRIRVLGDASSSQRDANHPQDTKYPRGRDDNRGKSRLAQDGSRLDGTRVGYGILTNPTAEKDNEPGVVMRQAYGERSLDGTFASSDNSDVPEVDWTNDNSYGTIVCDTKSKYGEKTSVTRALKDEEISENGELLKRKLSRAPSRLRVKGKAGDNLPECEMTPLSPTSGLRIGGRASRDRNVVRVDDPKKATDVNNSSAGLELFSAISKEEYEDRLRDCIIGLKDISDIVLKAVRAAEAEARSANAPDEAVKAAGDAAAELVKSAALEVWKAENNSDAVIVAAEKAASAVVEAAVSTSVSRSTNQVGEERAAEEAVQTSEDQDLENFVISDKSQLLQLREKYSIQCLQILGEYVEALGPVLHEKGVDVCLTLLQMSMKDQEGCDHFAQLPDVLKLICALAAHRKFAALFVDRGGIQKILSIPRITQTYMGLSACLFTFGSLQSTMERVCALSSDTLDSVVELALQLLECPQDLARKNVGIFFAAAFVFKAVLDLFDARDGMQKLLDILYGCASGRSGSNSGGAGSSNVNQGNDRSPAEALTASEKQVAYHTCVALRQYFRAHLLQLVDSIRPSKSIRSIARNTSSARAGYKPFDISNEAMDAVFRQIQRDRKLGLALVRVRWPVLDKFFASNGHVTMLELCKFQAHGDRYLRDLTQYAIGVLHIITLMPQPHVRKSIVQGTLSNNRAGMAVLLDTVKSFDYIDHEVICPALNVLVNLVCPPPSISNKPLSTANQQPAAAQALASESRDRNFEKSISDRNLLANQGEYRERSGDGNPAERNNTLHQGTPNTPVVTSGVVGDRRITLGVGGGGPGLAAQLEQGYRQAREVILFERLPAVSCLAWLEMIQLHIY

SEQ ID NO: 166021 - protein, 82 aa, Zea Mays
MWLLPFFNLSPRTHTQGNNRLWDFCAGAGLWAGRVLDLSSAASRPLGQGRHEAQGKLPAGRRARRRAGLGREQGLGGLVGHG

SEQ ID NO: 166022 - protein, 124 aa, Zea Mays
MPPLPHHSILGRGCGSRRLLPVFVRHQPRHRPAQWLLHVHEDVSQHARTIIGRPVRLLGLRHRRMSHSSSRPSPCSSSPTYRHRPRSQSRANRLILETRAYKLLLSLYGKIMSLYNLHTFSQSL

SEQ ID NO: 166023 - protein, 1331 aa, Zea Mays
MAAGRGHAEDMLGFKEDDAMRFIFGEDIMGMEDHGAFDRSLMELQVFKEVFCGAAHNVAATTHLPTEMDLGFVHTSAAAAHLKATETSPSPFVSHAQQQQPAAAATADPQLTMDRSQPNYGPRHDLHPQVQEHAHTRAQQNGTELDDAAFMHRFMGSWQPGDKHAIHLLGLSDDQHPFVGADLDVHAQDIGAGMCNAPGLGCSSSTSAVDDPMPSFIEALAEISEFQSATLLPDPFLHQWFQEQQQFPTNACFSYDQGQMDDTTYPLCASTKDFPDREQHLCYSEEAHSTPTIPHQSHIWFSPGQFTQLDGTTICQEGTPDANISCPDEIDVHGCGSSAVHFGSAAAVSKKALGRDIPDQLEAHAHRLFKDAGWTIKPRKRNDRAKMASYFTAPNKEAVHTSLTQAWKFCGKKLYEASPDTERGRYPKEWSDVDSFWKDLTDAMTYVDRMLANQQNALTLLQRWQILDPFVAVVFISRKITALQQYKTLRAVDSSTFVLDGSSDTSSVSKIMHKASELLTSRMIRLTPLITDSDCSTLATESYNGHQSLQSCHDVEDNNYRDTDPKLSCNESLNYNASDETKHHIDASNDGRQTYAQPKTLNSSVKMSSKKPKRIFDISADGLDETNVATMDMADPGDTNAFEEHIMYSGVSTLKDDMKAETKSEKLDKDDQSSKCDMLLSSVVKQLKDYSTFSDTHCTTRESQSDATTFCHDDKVWKKIVPSHGEFYEDSQSEPTGNTAPVELSHDVLGTYLICDSQICERGTAKMKTKDWLKYMKKRPRELRINDEDLLMTAIVKNKDLGTCHKFASGSSAAKKFKKLKSHKKGNKLLSKIGKAGTNLLGGKRVSLARKTVICWLLATGFLSVKDVIQYRDPKSNKIIKDGMVTWEGIVCNCCKKNLSVSDFMAHAGRSHPQSSLGLFLESGKSYTLCLVEAWSAESMSRRSNAWGRKVEAIDESDDTCGFCGDGGELLCCDNCPSTYHQACLSAKELPEGSWYCHNCTCQVCGGPFSEKEVSTFSAIFKCFQCGDAYHDTCIEQEKLPLEDQISQTWFCGKYCKEIFIGLRSHVGTDNILDSDLSWSILRCNNDGQKLHSVQKIACLAECNMKLAVALTLLEECFIRMVDPRTGVDMIPHVLYNKGSNFARVDYQGFYTVILEKGDEILCVASIRVHGTKAAELPFIATSVDFRRQGMCRILMSIIEKMLVLSAIPELVSTWVSGFGFKPIEDAERKQLHNVNLMLFPGTSLLTKRLDGFIMATKPGEEKDIHEVSGVPNLKRMPNGKANEHFKLHDLDLSGTEFKAEVSVNGPFRTLKHECGSAAWFQSTKLAVGEV

SEQ ID NO: 166024 - protein, 1226 aa, Zea Mays
MAAGRGHAEDMLGFKEDDAMRFIFGEDIMGMEDHGAFDRSLMELQVFKEVFCGAAHNVAATTHLPTEMDLGFVHTSAAAAHLKATETSPSPFVSHAQQQQPAAAATADPQLTMDRSQPNYGPRHDLHPQVQEHAHTRAQQNGTELDDAAFMHRFMGSWQPGDKHAIHLLGLSDDQHPFVGADLDVHAQDIGAGMCNAPGLGCSSSTSAVDDPMPSFIEALAEISEFQSATLLPDPFLHQWFQEQQQFPTNACFSYDQGQMDDTTYPLCASTKDFPDREQHLCYSEEAHSTPTIPHQSHIWFSPGQFTQLDGTTICQEGTPDANISCPDEIDVHGCGSSAVHFGSAAAVSKKALGRDIPDQLEAHAHRLFKDAGWTIKPRKRNDRAKMASYFTAPNKEAVHTSLTQAWKFCGKKLYEASPDTERGRYPKEWSDVDSFWKDLTDAMTYVDRMLANQQNALTLLQRWQILDPFVAVVFISRKITALQQYKTLRAVDSSTFVLDGSSDTSSVSKIMHKASELLTSRMIRLTPLITDSDCSTLATESYNGHQSLQSCHDVEDNNYRDTDPKLSCNESLNYNASDETKHHIDASNDGRQTYAQPKTLNSSVKMSSKKPKRIFDISADGLDETNVATMDMADPGDTNAFEEHIMYSGVSTLKDDMKAETKSEKLDKDDQSSKCDMLLSSVVKQLKDYSTFSDTHCTTRESQSDATTFCHDDKVWKKIVPSHGEFYEDSQSEPTGNTAPVELSHDVLGTYLICDSQICERGTAKMKTKDWLKYMKKRPRELRINDEDLLMTAIVKNKDLGTCHKFASGSSAAKKFKKLKSHKKGNKLLSKIGKAGTNLLGGKRVSLARKTVICWLLATGFLSVKDVIQYRDPKSNKIIKDGMVTWEGIVCNCCKKNLSVSDFMAHAGRSHPQSSLGLFLESGKSYTLCLVEAWSAESMSRRSNAWGRKVEAIDESDDTCGFCGDGGELLCCDNCPSTYHQACLSAKELPEGSWYCHNCTCQVCGGPFSEKEVSTFSAIFKCFQCGDAYHDTCIEQEKLPLEDQISQTWFCGKYCKEIFIGLRSHVGTDNILDSDLSWSILRCNNDGQKLHSVQKIACLAECNMKLAVALTLLEECFIRMVDPRTGVDMIPHVLYNKGSNFARVDYQGFYTVILEKGDEILCVASIRVHGTKAAELPFIATSVDFRRQGMCRILMSIIEKSWLAHGCQDLASNLSKMLKGNNFIM

SEQ ID NO: 166025 - protein, 1182 aa, Zea Mays
MAAGRGHAEDMLGFKEDDAMRFIFGEDIMGMEDHGAFDRSLMELQVFKEVFCGAAHNVAATTHLPTEMDLGFVHTSAAAAHLKATETSPSPFVSHAQQQQPAAAATADPQLTMDRSQPNYGPRHDLHPQVQEHAHTRAQQNGTELDDAAFMHRFMGSWQPGDKHAIHLLGLSDDQHPFVGADLDVHAQDIGAGMCNAPGLGCSSSTSAVDDPMPSFIEALAEISEFQSATLLPDPFLHQWFQEQQQFPTNACFSYDQGQMDDTTYPLCASTKDFPDREQHLCYSEEAHSTPTIPHQSHIWFSPGQFTQLDGTTICQEGTPDANISCPDEIDVHGCGSSAVHFGSAAAVSKKALGRDIPDQLEAHAHRLFKDAGWTIKPRKRNDRAKMASYFTAPNKEAVHTSLTQAWKFCGKKLYEASPDTERGRYPKEWSDVDSFWKDLTDAMTYVDRMLANQQNALTLLQRWQILDPFVAVVFISRKITALQQYKTLRAVDSSTFVLDGSSDTSSVSKIMHKASELLTSRMIRLTPLITDSDCSTLATESYNGHQSLQSCHDVEDNNYRDTDPKLSCNESLNYNASDETKHHIDASNDGRQTYAQPKTLNSSVKMSSKKPKRIFDISADGLDETNVATMDMADPGDTNAFEEHIMYSGVSTLKDDMKAETKSEKLDKDDQSSKCDMLLSSVVKQLKDYSTFSDTHCTTRESQSDATTFCHDDKVWKKIVPSHGEFYEDSQSEPTGNTAPVELSHDVLGTYLICDSQICERGTAKMKTKDWLKYMKKRPRELRINDEDLLMTAIVKNKDLGTCHKFASGSSAAKKFKKLKSHKKGNKLLSKIGKAGTNLLGGKRVSLARKTVICWLLATGFLSVKDVIQYRDPKSNKIIKDGMVTWEGIVCNCCKKNLSVSDFMAHAGRSHPQSSLGLFLESGKSYTLCLVEAWSAESMSRRSNAWGRKVEAIDESDDTCGFCGDGGELLCCDNCPSTYHQACLSAKELPEGSWYCHNCTCQVCGGPFSEKEVSTFSAIFKCFQCGDAYHDTCIEQEKLPLEDQISQTWFCGKYCKEIFIGLRSHVGTDNILDSDLSWSILRCNNDGQKLHSVQKIACLAECNMKLAVALTLLEECFIRMVDPRTGVDMIPHVLYNKGSNFARVDYQGFYTVILEKGDEILCVASIRLSTARNVPNSNEHH

SEQ ID NO: 166026 - protein, 102 aa, Zea Mays
MENLDSEREKNEVMQKQLEALSFLDKRKATKPKLVTDKFPSVSGAPPSSDQMIVAVQQQTPVALPSKVPPAKGTKRVAPLPRRARVRGALLQDTEENADDNT

SEQ ID NO: 166027 - protein, 102 aa, Zea Mays
MAVGGLLRGLVSPPAWLPCHELFASWHHWLPSLPRLRPPASDGFKLLLVLLLFSAALAEVRYIASSSMAPTLRPGDRAVAEKVNPPCLLAPFLPFPSHCFYF

SEQ ID NO: 166028 - protein, 344 aa, Zea Mays
MLPLSLFVSLLVLHLPHASADGDICIIGGGISGASTAFFLTSYTSTLGGAQLRVFERRQKVGGRLGTVTLAGDSFEAGGSIIHPRNLHARRFADLLGLAVKTGGDDWLGIWDGKSFVFQTARPPPVGSSWWRRKLHSLVNSLLLLRRYGLSLLKMDKFVQVITRINYGQSTHISGLAGAVSLAGSESGLWAVKGGNWQLAAGLLKTSNATLHLQEGIDSITDAGDHYVLRSNSGSEYECMVTVVATPLDELNITFSPPISIPPRKMQHTHATFVRGILNPGYFGLNSASDIPELIGTLELPDIPFSCISVLKRYSEGDMAAYKMFSRAKLDDGLLDQIFRYVAA

SEQ ID NO: 166029 - protein, 438 aa, Zea Mays
MYSDHKPRNREADLVELTIGFTDQSSSSPNSHCIESGSMLPLSLFVSLLVLHLPHASADGDICIIGGGISGASTAFFLTSYTSTLGGAQLRVFERRQKVGGRLGTVTLAGDSFEAGGSIIHPRNLHARRFADLLGLAVKTGGDDWLGIWDGKSFVFQTARPPPVGSSWWRRKLHSLVNSLLLLRRYGLSLLKMDKFVQVITRINYGQSTHISGLAGAVSLAGSESGLWAVKGGNWQLAAGLLKTSNATLHLQEGIDSITDAGDHYVLRSNSGSEYECMVTVVATPLDELNITFSPPISIPPRKMQHTHATFVRGILNPRYSEGDMAAYKMFSRAKLDDGLLDQIFRARIETIRINWAAYPHYQAPEEFAPIVLDGKQLYYVNTFESAASAIETGAVAAENVARLIISRLSLLPQAQQQQPHIIKSFAEQESQRRHVDL

SEQ ID NO: 166030 - protein, 496 aa, Zea Mays
MYSDHKPRNREADLVELTIGFTDQSSSSPNSHCIESGSMLPLSLFVSLLVLHLPHASADGDICIIGGGISGASTAFFLTSYTSTLGGAQLRVFERRQKVGGRLGTVTLAGDSFEAGGSIIHPRNLHARRFADLLGLAVKTGGDDWLGIWDGKSFVFQTARPPPVGSSWWRRKLHSLVNSLLLLRRYGLSLLKMDKFVQEMLRRFMLFYNGMESRPVFATVEEMLQWTGLYGLTRRTLEEELLDAGLNTRTIAELVTVITRINYGQSTHISGLAGAVSLAGSESGLWAVKGGNWQLAAGLLKTSNATLHLQEGIDSITDAGDHYVLRSNSGSEYECMVTVVATPLDELNITFSPPISIPPRKMQHTHATFVRGILNPRYSEGDMAAYKMFSRAKLDDGLLDQIFRARIETIRINWAAYPHYQAPEEFAPIVLDGKQLYYVNTFESAASAIETGAVAAENVARLIISRLSLLPQAQQQQPHIIKSFAEQESQRRHVDL

SEQ ID NO: 166031 - protein, 528 aa, Zea Mays
MYSDHKPRNREADLVELTIGFTDQSSSSPNSHCIESGSMLPLSLFVSLLVLHLPHASADGDICIIGGGISGASTAFFLTSYTSTLGGAQLRVFERRQKVGGRLGTVTLAGDSFEAGGSIIHPRNLHARRFADLLGLAVKTGGDDWLGIWDGKSFVFQTARPPPVGSSWWRRKLHSLVNSLLLLRRYGLSLLKMDKFVQEMLRRFMLFYNGMESRPVFATVEEMLQWTGLYGLTRRTLEEELLDAGLNTRTIAELVTVITRINYGQSTHISGLAGAVSLAGSESGLWAVKGGNWQLAAGLLKTSNATLHLQEGIDSITDAGDHYVLRSNSGSEYECMVTVVATPLDELNITFSPPISIPPRKMQHTHATFVRGILNPGYFGLNSASDIPELIGTLELPDIPFSCISVLKRYSEGDMAAYKMFSRAKLDDGLLDQIFRARIETIRINWAAYPHYQAPEEFAPIVLDGKQLYYVNTFESAASAIETGAVAAENVARLIISRLSLLPQAQQQQPHIIKSFAEQESQRRHVDL

SEQ ID NO: 166032 - protein, 377 aa, Zea Mays
MKIFERSMDGFTGGQGQGKRPGHRRQHPCRVSCRARSRVTPAKKQMMMMMMCHAAGQQETEHHGNPRTSQRPPSSLLYVWSRSDDDVHSQDHHSVVRQVLRDVSCRARPGELLAIVGPSGAGKSTLLEILAGRLSPSPPPHLLRIDGAAAHSADLRRVSAYVTQQDVLFPLLTVRETLLFSARLRLGARLPSKDMHARVEALLDDLTLRRVAATRIKDLSGGERRRVSIGVEAVRDPPVLILDEPTSGLDSASALHIVGALRAMAEARGRTVLLSIHQPGARIVKMFDSVLLLAAGSVLHHGTVDQLRALLGDAGLHLPPHVDDVEFAIDSVDALRRHASSSLQAPSSGDREGRCTLQRLFQLHGKQVADAPVAVTM

SEQ ID NO: 166033 - protein, 165 aa, Zea Mays
MEVENLLENDVGCPTTTTKMVWRLERQVHRFLITTIWGGGRRCVIRLQQPQGCCALAIVTPAPVVAALAVPRTALNLQAIENKQEQDKKQTLTDLVELGFCFKYPGGLADTRVYKEVAKAKLTSNKNPSSLVAASCLNREIGRRNSGGVMKFPRQFLDASGVVSH

SEQ ID NO: 166034 - protein, 56 aa, Zea Mays
MLSFLSEFGPLIRAGLARAHIKVSQTRLISGKKNLLWTELSCFVLYVHLYTIYRCS

SEQ ID NO: 166035 - protein, 101 aa, Zea Mays
MDPKGKGMVVNDKEKESIFNEPRDDKPTDSGSSHKKKDGKKKRRIKKIIYYDNDASSSSPRDDDDDDDSLSKKKTVNQNYSFDYSRIPYNSNAIYFLFLLE

SEQ ID NO: 166036 - protein, 253 aa, Zea Mays
MLSSELSACHESISSLKSLNDELNAKLEKVNKTSSCVEHVVICNRCKDFDVNACDEHLMSIAKLNNEVASLNAQLKTCKVDFEKLKFARDAYTIGRHPSIKDGLGFQKETKNLTSQKAPVLNKEKGKVPMASSPQRNHAFIYDRKIASCSNYNKSYVHNDSHAMFASSSTFVHGRSRPRKNVVSHVPKKMCNEPTTVFHACNTSFVLSCKNAKVVARKLGSKCKGDKTCIWVPKTILTNLVGPNKSWVPKTQA

SEQ ID NO: 166037 - protein, 62 aa, Zea Mays
MPCEKASKLNMTKATRNADSTTSLDEGARTIERTLKNGMMCFFSTHIFLGLLNKIKYNIYSY

SEQ ID NO: 166038 - protein, 79 aa, Zea Mays
MARLAAAARLVIWLSGRGSDTHGAGRWRPSGRPPGGLHEEEEKAGWERRQEEAQHTAYSPARVSSGCKQRTPSSLEVIP

SEQ ID NO: 166039 - protein, 65 aa, Zea Mays
MTFGWAAKRSAPRAHQRGSTPSRCTSRCATPLHTSCSRTLTQHQQQPSSQRTRIYGRSVATYVAG

SEQ ID NO: 166040 - protein, 55 aa, Zea Mays
MTAELGQVREGGPGAVPSLSFFLFFSFILFSKFKTLFKFKFLFELRLWILHTNLI

SEQ ID NO: 166041 - protein, 105 aa, Zea Mays
MNLFVVTEGSNFLGFVVTFSKINSFVHYNYKIVSQCTARTMFFLNTQKNNVHHGFCYVTMWSSLFGTRGHIFVFALCICSLFIPQFIHFYLVVVGFLLLGRFHLS

SEQ ID NO: 166042 - protein, 70 aa, Zea Mays
MHPCMHVVVRRKAVWSSTVLVPIKFSAFDLIYIYISHGGTESATIHRTNQLMLQQKKKKNRQTSYFSGSE

SEQ ID NO: 166043 - protein, 79 aa, Zea Mays
MAQSSLAPNGVQSANHHLINEQKHRYGHHMHEPRAHPHVLLASSLNCSQPARACLHALSCLASVLLSGRLLLLLPPISS

SEQ ID NO: 166044 - protein, 96 aa, Zea Mays
MINLSTMVLFLISSFSVVRNLHNLESLTPYTIDLKQTIRVRESRDTHKTKSQQHTQVERRAHETTQRSYNSKTYARISIHQSKSVVALSRCRRMFK

SEQ ID NO: 166045 - protein, 90 aa, Zea Mays
MCSPFLRPMHQVFSGAVWGQTKTRQASNQRNCFPLAQGSYYSWYYLQDAKVKILILIVSCSVGWCLFLHLTHPATVLPFQANFVLAALIF

SEQ ID NO: 166046 - protein, 55 aa, Zea Mays
MPPHIQGRWIRFVPSPVAEKRTDRLKPEKFLVLRFPNCCKSWLVFVPQFESWLIN

SEQ ID NO: 166047 - protein, 60 aa, Zea Mays
MNSSHKINYDRFRGMEAFKKQKNPIQTKLPHKPHQTLNHQTQTVQNPRLASHLSSKIITS

SEQ ID NO: 166048 - protein, 124 aa, Zea Mays
MALGLPAPPQPRARRALPLPMATPRPAPSVFPGARWSFLPISLASLGTSLVVLTPALCSSTPAARSSPPCSMARPPVFCSLAHGSEPPGGRASSPSQPSSSPSSLPSGPWLQLGRPCSPWSPAA

SEQ ID NO: 166049 - protein, 52 aa, Zea Mays
MHPALFFKSRCDTSPGSDGPFGHLCATVTWAPTRHAPSGGRTTTTAAFAMPA

SEQ ID NO: 166050 - protein, 78 aa, Zea Mays
MQMNHAMHMTCCIYQYTSLPSHTIQTSNNTSSSFRYKTNHKKYFTFLQIQYKPQIILYLPSDIIHTSNITSSSLRGVN

SEQ ID NO: 166051 - protein, 51 aa, Zea Mays
MAAARAGYPSTTANLGRLKMERGQHFDWCLNRGKLRGSRSGRLEVRSQTQL

SEQ ID NO: 166052 - protein, 106 aa, Zea Mays
MIPRECVVSQHKLVVAVFCFQVLARRDKQAKIMRTKWWKMEEGKAKVFKERAIKEGTWKEGDANNMWEKMITCIRKVASEVCGATKGCGGKAKYTWWWNKKSPKGY

SEQ ID NO: 166053 - protein, 74 aa, Zea Mays
MNLPWVLPFLLPSSSLQTPIEIAATRRRTTREGCTLAGGKRNGGARVFSGEGCKGLRRKKIGEGGRGGVQEKGE

SEQ ID NO: 166054 - protein, 86 aa, Zea Mays
MQRHGRWEKRTPCYGGRRLRTSWIVHHLPHVHTSAYAPGQHREGWPRGCTGRGREGVMAGGRTGVMGSLLRGSQIENLLDPPPFLS

SEQ ID NO: 166055 - protein, 54 aa, Zea Mays
MLDVLDTRFYMKLSICSTLVLVLHHYTLEIYNLSLETFKYKLRVSTSCPQLICR

SEQ ID NO: 166056 - protein, 69 aa, Zea Mays
MFIYWCMFSFVCTICESILEAGYVVEESNMFEDDPQDTFEQGKWILPLHFCLYPSNAYNNVYFSDICII

SEQ ID NO: 166057 - protein, 159 aa, Zea Mays
MASTSMERGVMAPITRRNARLTLHYTGEERTRGTWGRLVFCCCSMARLHGSEAHGRGVGCTASHWFLAARSARSRLAGWRVGGSCRGAAAARGPGRRVSRPAARRGRGWGARPVPWQRTWERETRGRRERRERRRLAGRGRARQAHQPGSGGCERSRGG

SEQ ID NO: 166058 - protein, 62 aa, Zea Mays
MLVSSAVTPVFLLILPRPGLFRPLILSTVISGHLLSLASPATNTTWSFWMTTPISFGLSPFG

SEQ ID NO: 166059 - protein, 119 aa, Zea Mays
MSIGDVCPKESEEPPNAQDQPSSSTQVSPPTQNEDEAKDDEEEDQRDEPPQDDDNDQGGDANDQDKEDEEPRPPHPRVHQAIQRDHPVDTILGDIHKGVTTRSRVAYFCEHYSFVSSIE

SEQ ID NO: 166060 - protein, 105 aa, Zea Mays
MTSIEALVMFLWIVCAPQSLVHLKIWFGRSKEPISRKISEVLECVYRMSKDLVKPNDPDFLTSHPKLLGDRFASHFNNCICAIDGTHIPVVVPSSKVVQHVGRHD

SEQ ID NO: 166061 - protein, 94 aa, Zea Mays
MIEKSAICIGSPHWPRCGLVGCILRCSRCCCQHHYLGKFLHSLEALPYSCWSNENQEEGVSIPQTGRHVCKRIQRKFIQLSRYAPGEVDDDEKK

SEQ ID NO: 166062 - protein, 194 aa, Zea Mays
MKDIHSNSRYSSEITPEHNTPVESSEQPHEIVLEEDDNDAPKRNKRQRVEKSFGDDFIVYLVDDTPTTIAEAFASLDIDDWKEAVHNEMDSILSNGTWEVTDRPYGCKHVGCKWVFKKKLKPDGTIEKYKARLVVKGYTQKEGEDFFDTYSLVARMTTIRVLLSFAASYGLLVHQMDVKTTFLNGELYEEIYME

SEQ ID NO: 166063 - protein, 148 aa, Zea Mays
MLTKMCNTRSSGYLLMNVAEDGVDGVISLDCLVDSWVWRPWIFILLVLIIYISPLIIVVILRWLIFLTFFFIILSLILILSWWRCLRGGGWLILCIWRLFGFLRTHIPNGHVPKRDARSLFTTYLIKINLLYLRAVSLIKHNVTRNFN

SEQ ID NO: 166064 - protein, 96 aa, Zea Mays
MRQTLRDYGYKLTKVPLLCDNESAIRMADNPVKHSRTKHIAIRYHFLRDHQQKGDIEIAYINTKDQLADIFTKPLDEHTFNKLRHELNILDSRNFF

SEQ ID NO: 166065 - protein, 145 aa, Zea Mays
MGCEPLIPHLGHWRPPHPLTLATPSHFPRCSRPPLPLSPLKPTPLPLSPFAAATPSSSPSSCTLLHMQTLAATSPIPPLQGVATPSLGSSLGLCKSPLEDWWEEEGWGEEGVQGDLVFYFVIVLEFHLASCSPRRIHVEHYHIFP

SEQ ID NO: 166066 - protein, 52 aa, Zea Mays
MFIPCCPPLIYAILQRGCCRNFIYGRQKCSSVAFWVVCGTWGVTLRLMPINR

SEQ ID NO: 166067 - protein, 122 aa, Zea Mays
MCSIACSLVPSMASFAIWQLPSSSVEAKVLIEPILASSGVIASSPNRSWNGVNPVDLDTTMLWFHTTFINSSGHFPLGWLKIDFIIPVVMILFALSTSPFDSGCLTDAKCIFVPIWLQNALN

SEQ ID NO: 166068 - protein, 74 aa, Zea Mays
MPSAPLGSHASSAPTRVSDCPPESSNLGFPPNLSRTPHCVSSPWPALHRSDHALLALFLAFLCALDAARPGQLS

SEQ ID NO: 166069 - protein, 98 aa, Zea Mays
MPFALSTNPFDSRCKMNLRTNSVTKIFEYFSIKLCTIIHSYCLWHTEATNNILPEKFLDRDRSYCSQGLCLNPLRKIFYYHYNIFQVALCWWEWTQQI

SEQ ID NO: 166070 - protein, 55 aa, Zea Mays
MARDDLGVSFKDHPSYSHYLLLPKPQQKAFVLNNVICITKVQPCCIACSDFRGRN

SEQ ID NO: 166071 - protein, 58 aa, Zea Mays
MPVHHRLAEIVAISSLSSKSPLRVPGSLVARFSISRSSRPMPQQHRSHPSSRCCYLPC

SEQ ID NO: 166072 - protein, 155 aa, Zea Mays
MNSMAGSRPASRETTWSSKNGRVDEDGIRRRRDQRGVRSHQSTRSKQRSLAHGHGRKTRKETSSYGQRAESKARAHGAGGRATKEGLRQDASEQELGGKPRHADWRTEQGAPAMDGARRATQEKQRPSQGHARAALGNSTTMGAGEQGEDGARRA

SEQ ID NO: 166073 - protein, 79 aa, Zea Mays
MAAHGRCHGWTASAFEGESKIWNSQNRGDPRTCCGEERASTRSKCQEGKVAWPGRRGLAITPVGFFLSGQPGRLEDHAY

SEQ ID NO: 166074 - protein, 56 aa, Zea Mays
MELGHRPTVSGRGERRTGPSGKIQPRCSFLFFFLFFIFCFLLNLKFEFDSCYEAQL

SEQ ID NO: 166075 - protein, 57 aa, Zea Mays
MSSTYIRHTKRSPLQVLVKRVGSVFPTLKVLVIRKSLRHSYHALDACLSPQSTLESL

SEQ ID NO: 166076 - protein, 50 aa, Zea Mays
MAAILHCFLPQDLLLRNKDREKEGHVELKRKRGSRRCSSPSPLEDFLGKP

SEQ ID NO: 166077 - protein, 63 aa, Zea Mays
MHPTLYLKSRCDNMGYPKLELGLSTMTKDQLANNLAYNSLRVCLFLFLLLLIFVRQVCGKRFV

SEQ ID NO: 166078 - protein, 50 aa, Zea Mays
MLLLESKYQLMLKCMYSFRSQKECMYTQQYAQKAENNIKKQAIILGSQHS

SEQ ID NO: 166079 - protein, 125 aa, Zea Mays
MALSSWVSPWSASNLVGRAPQRFPLLSMEWASSLPPHGATPLQLLLYLGAPPCLDAGRAPLEQAPLAAMAPFPVLQRPPCSSSSQPAPSPCSLSSRAPPCIFPAMARDSVSSLLACCCAGPHGAC

SEQ ID NO: 166080 - protein, 60 aa, Zea Mays
MPSSLCAQPCPLYVVAGSQLAPRFSPSPMCTPLFMVVVRLWRGDVVCVAAAVLATGQSAP

SEQ ID NO: 166081 - protein, 62 aa, Zea Mays
MTPAHAPSSLFRALPVPRAHPSPHFTHPRPLSRSALVARRRRRSAPAFPTIQLAGDRAKPPR

SEQ ID NO: 166082 - protein, 76 aa, Zea Mays
MIIELILTSITKQWSDITKQWPMCAHIPVYIIIILYVPVATHGHSPSDQMKTEKKKSKTKKKEKRENLHAAGPKVC

SEQ ID NO: 166083 - protein, 50 aa, Zea Mays
MWLVAKSPPQQAYIELSLIDTDGRTFLLNVWSTLHIISQNLIPERGTLLE

SEQ ID NO: 166084 - protein, 123 aa, Zea Mays
MMFGLRISPIFDKSCTGGSLSSSGTNARCDIAAKTTMMSGMAGEGARTQRSMVIERSKNVSSSVRWGAAMACRVRRCRETKTELSSTPDEALSRTWDGVHLRVHKGHGASCSREGAAMVESLR

SEQ ID NO: 166085 - protein, 61 aa, Zea Mays
MVEGRRMVKKTQCNQQQMTRKHTNSTMQIIERKCEAQKGAGIRSNLNFYVVLWTVGEKNTR

SEQ ID NO: 166086 - protein, 60 aa, Zea Mays
MNWLVSGMHGLNRRANEQTPAFQQQGKSQSPFWELTSYLLTLKSSKASPLHKGHKGNLYT

SEQ ID NO: 166087 - protein, 93 aa, Zea Mays
MAEPPKLLGPHAPVLVSKTSDSYACVPDNLTGSVRVSHGPRINHLQPEPQDSVNTNHTPTILHRKSYYHILQVTTNLHYIYRSGYKSGSKNKL

SEQ ID NO: 166088 - protein, 67 aa, Zea Mays
MEDLSVQDDLTYAEYPIKILDTLTRVTRNKVIKMCKVQWSHHGEDEATWEREEELRIDFPHLFPRSS

SEQ ID NO: 166089 - protein, 63 aa, Zea Mays
MIMCELTLAVSYPPQEKNMRFRRSHSTRSLIRSRWRFPVDFLAPRMDFSSIYIYILFCKTSAM

SEQ ID NO: 166090 - protein, 74 aa, Zea Mays
MAAPLHGFLLPLDLPPRNKDREEEEHIELKGKRGSRRCSSPSLLAEFLGETLGMDEILVPPCNYVLLEVVDHGN

SEQ ID NO: 166091 - protein, 52 aa, Zea Mays
MAAPLHGFLLPLDLPPRSKDREEEEHIELKGKRGPRRCSSPFLLAEFLGETL

SEQ ID NO: 166092 - protein, 115 aa, Zea Mays
MAAILHCLLPQDLPLRSKDREEEDHVELKRKRGSRRCSSPSLLAYFLGETLGMMGSLFLPVIMCFWRWWIMGIKGLEVVLDVRLGFDLEFSFLQHGRFDSFCSYQFSVILVASKK

SEQ ID NO: 166093 - protein, 88 aa, Zea Mays
MNAYECNAYVLCLHTSKGMKPHRTPPRATYDAKLYRYGRTIGHDPTSYASESCNVYGMLYLSIYFTSFTYNTTSNNTLFAFRYNTNLK

SEQ ID NO: 166094 - protein, 68 aa, Zea Mays
MSPDFASNGPQLFPSSTHRRSIFGQYFFGILHSIPLKKNSSSNSTTPSKTLKVPHIAPPFETWVHYCS

SEQ ID NO: 166095 - protein, 114 aa, Zea Mays
MAFPSYGDHPPCLLPRAPTEVRVASRRAARLPAAHVQPHVAVRPAPCLRPGLSVRAPLFGSSSFSSSLPHAQLFVVVIRSRDELIAPALVLCPCRLGHGFLVRVSNPWFVAPVI

SEQ ID NO: 166096 - protein, 54 aa, Zea Mays
MGSLFLSIIMCFWRLWIMWIEGLEVGLDVGLGFNLEFNFCRMADSTVSVHTGFL

SEQ ID NO: 166097 - protein, 56 aa, Zea Mays
MRSLFLPIIMCFWRLWIMWIEGLEVGLDVGSGFDLEFNFCRMADSIVFVHASFLWS

SEQ ID NO: 166098 - protein, 53 aa, Zea Mays
MMSHLCNHCVRGFLILVRTWFAFGLPSKTGCWDHASSPKVLQKETASAEAART

SEQ ID NO: 166099 - protein, 61 aa, Zea Mays
MYGFTSSRLVNTYSMIWCHSSCLRVLVVEPLALPSWPRCRHHCNEGVDYSRSTVCHHSKLL

SEQ ID NO: 166100 - protein, 50 aa, Zea Mays
MNTKITLDSPPFLPPFFPPPKRLKTRTTTTVIRAARIGTLGRRGLRGGGG

SEQ ID NO: 166101 - protein, 59 aa, Zea Mays
MYHIERALKYLRAMVGNKAKVEGCIVEVFFVKGGFILHEFVFCRGTQCLCSCDVMQCRL

SEQ ID NO: 166102 - protein, 79 aa, Zea Mays
MRSIFNLPKGRWLDKLIKVVWNHNTIVLRSTGFTPFKLLFGDEAITLEEVKTGSIRTLSSAKDEDACKVSKDSIQGVML

SEQ ID NO: 166103 - protein, 127 aa, Zea Mays
MKDDELVRDMYSRLNLIINELNSIGINKLGDADIVRKIISLLPQQRYGSIITILHNMEDLSNMTPTIVIGKIVAFEMSRKMSRGEEPTSSRPYAFACDKRKGKKKAPTPSSSSEEEEEEESDDDEDN

SEQ ID NO: 166104 - protein, 98 aa, Zea Mays
MCNDILGNYSKKEDQLMTAAFGTRPKRRLNRVMDALDFEYPDYERLDRGTEGQKRKRVASVLNKDDEEKLKKRKLRPESKTDASKKRKAAAPNRGQLI

SEQ ID NO: 166105 - protein, 63 aa, Zea Mays
MNMCELTLAVSHPPQEKNRWFKWSHTSRSSIRSRCCLPVDFLAPRMDSRSCYIYLLFCKTSAM

SEQ ID NO: 166106 - protein, 59 aa, Zea Mays
MVKSSKCSVEGYSSSGHRLTNTNLVLFRQAPMHLPPPCCFKIFITLFDALGDRSYVLNH

SEQ ID NO: 166107 - protein, 88 aa, Zea Mays
MHKHIVPYRSTFSIFIQSNHPLSSDGSPLLTDNHWYIADKLLSFFELFYDSIVALSSLYYPTSPLMLHHILENGRHLNAFENDHLFKQ

SEQ ID NO: 166108 - protein, 74 aa, Zea Mays
MVHPPRLVPVVWVRVFHWSLEGGRRKNGRRKGGTQGDFKIILFSICAAIQLFTCLPMRIGIGAVQIFLWEDEQQ

SEQ ID NO: 166109 - protein, 50 aa, Zea Mays
MKFILMFSGMLILSIPCLFVLLQLARGHESPKGHPGTWNLKSQTCCVLDH

SEQ ID NO: 166110 - protein, 76 aa, Zea Mays
MPSWNSYIDTAKDTVIELLQQTIMDGASKRTSESSTSRSRRTQHQSYINPDHEVAHDWLILDHFNDQCIYLLLYFC

SEQ ID NO: 166111 - protein, 58 aa, Zea Mays
MMFSWFHSIVNKMCTNKAQLPYVDHERALKLNHALDQRVWEVKVLMIIESPNYEAFTV

SEQ ID NO: 166112 - protein, 104 aa, Zea Mays
MYLESMLQRHMDIDEDVSHIIKAWWIKWHQSSDVLYDKRVPQKLKDTFYWTTIRPAMLYGAKCWPTKRQHVQQISVAEMLMLHWIYGPIKEIESETMIYVIEQG

SEQ ID NO: 166113 - protein, 57 aa, Zea Mays
MPIIPTEFVATTFRAYYSVVIDAVCTSSLSSRMEYKPVMTLKRTIRDNNKTMHSCSV

SEQ ID NO: 166114 - protein, 56 aa, Zea Mays
MGNLPHEDDRSIARLRTHQHLHRSLPHHLLIKILARGEITYGGGSTSGRSYARLTR

SEQ ID NO: 166115 - protein, 71 aa, Zea Mays
MSVLFFYRVLIHFQARTCTKSTQHVLYCEFSECCVGFLCLDVNSGRWRLLDKSVTPPLHSPHHCTAGNARR

SEQ ID NO: 166116 - protein, 52 aa, Zea Mays
MERRNEGEEETDARSPLIAKNETVAGVQSGALGAAWGTRASRGGDARRELGG

SEQ ID NO: 166117 - protein, 52 aa, Zea Mays
MFHLTLALLNAGACCSSREVGSSSTSTFTLIITLLRRSHDLIRSFLSKDVCF

SEQ ID NO: 166118 - protein, 61 aa, Zea Mays
MYGKLILAHICYAFGFAPKTGCDSVAATVLGMMVKKLSLQFYFKMLFVTCHRYTTYINLSF

SEQ ID NO: 166119 - protein, 58 aa, Zea Mays
MLLTLMVNARKGRLSSNSKQNESFRSSTGWNRPSGCHPNDANTTNGKHGYRIAKSDKT

SEQ ID NO: 166120 - protein, 52 aa, Zea Mays
MCCLLWRIYEMHPALSLKTGCDRSGMRGMLTVERNLDRTGQPLSTYLTLILF

SEQ ID NO: 166121 - protein, 130 aa, Zea Mays
MVYKSKATSDVPYNLDDGPETYSNSAVYSRLSEYTVMAQEVHEPDYDPRTEDIDGDVLMRVGEGKRNGRYRIADGAIDSLSILTLSQVRARSTSSSLAIRPRRDSSHHRIQQLQVSASVTRHSLSYISSL

SEQ ID NO: 166122 - protein, 64 aa, Zea Mays
MAAVQGELDQLRKKCEEAEEQQARTQRELEEYKKITEKNSKEMEETNVLIKKLLSLHGNASSST

SEQ ID NO: 166123 - protein, 78 aa, Zea Mays
MLHQKSSEASLLFSHKINPRWPPSSPSWPPPPPLSWPPHFSPLAGRPLSPIAAALQYFFLPRSPPHATRIEKRMNKMD

SEQ ID NO: 166124 - protein, 52 aa, Zea Mays
MTHLHMKFVVTYGPTVPVQLSIVRCPRRGTMRLHTLRGMKAEDICIAFICIH

SEQ ID NO: 166125 - protein, 83 aa, Zea Mays
MLRPGCRAWLINCACPPVPPDFLALSSGAFRAISFCDIFDVRGSSMMMSLLLLLSAISGRTKIFLHAISIVLTGNGCVSTCIS

SEQ ID NO: 166126 - protein, 122 aa, Zea Mays
MVTGLPSRDGGGPRAAPDCPAEQAGRSAYGPDGPGRSSDGPTVFMGADLPSRDGGGGTCPVYEFIGIPYNGWGCKFPFVADVLDIDILLLVSYDGKLGATDFSNVRVNFLIDSSNPTICCFI

SEQ ID NO: 166127 - protein, 144 aa, Zea Mays
MLVDIELSSPTITNTISFPRTTTIGSITLPCVNNTCKYHFNVCIGMQCVGTLSSYLWGYKTTSSANISSMNAYECNAYVLCLHTSKGMKPHRTPSRATYDAKLYRYGRTIGHDKTSYANESCNVYGMLHLSINFTSFRYNTNLK

SEQ ID NO: 166128 - protein, 63 aa, Zea Mays
MIMCELTLAVSHPPQEKNRWFKRSHTTRSLIRSRWRLRVDFLAPRMDFSSTCIYILFCKTSAM

SEQ ID NO: 166129 - protein, 78 aa, Zea Mays
MHTPPSSDEHALCDDDDDEEANKGLGRRAAISSMEPPREAPRPRTYEAGPAYVLSCLLGIAVALALARTARVVVDDGD

SEQ ID NO: 166130 - protein, 61 aa, Zea Mays
MGSRLGEIPGNGTSRAGNRDKRRPWNRVGRSDRRRGTGAPRELYGRARRNGRDGEVRAQPW

SEQ ID NO: 166131 - protein, 61 aa, Zea Mays
MLLFLASGQPTCGSCSTVAVLGRRHSRPWTGSPPVVAARRRQCQDGAIADRGLVLDGGSCC

SEQ ID NO: 166132 - protein, 61 aa, Zea Mays
MELASKAAWVANSTATADVRSPFASGLEVGWSQWSANPVLAAPYSPSKNPPQLSATTDGVT

SEQ ID NO: 166133 - protein, 83 aa, Zea Mays
MYLIENNKSPTTIEFKFKISNQKRKKEKKIEEKRKRKIVHELGQVTLSAQFSFAPRAHGQKLGALTQMAHLPTPAPCNYKGAF

SEQ ID NO: 166134 - protein, 116 aa, Zea Mays
MQLVHLHARLRVGGARALVCLRRWPARSPAAAAVLAPAPAQGDGDNLRAHLRLRRCSRAAAEPAPTLACASRAAAAAGSPAYAWSGGSGVACTLAACPRCLICSTRCTRVRPWQRR

SEQ ID NO: 166135 - protein, 82 aa, Zea Mays
MRHRDLETKAEPKEYDGHRGPNKVEHAPQRSYCSCRLARQNNKNGGVADRVVHDTKTTSWPVAQGVEHLASEEGKLGNDAVA

SEQ ID NO: 166136 - protein, 61 aa, Zea Mays
MARDPLRGFYKVPLASENTNTCAKEDNIYNNRVYRDKCHNNQSTYYIAEDLQKIKDKYNRI

SEQ ID NO: 166137 - protein, 55 aa, Zea Mays
MERLLQAEQLSITLGSLSSHLKRLSQIFVDHYVDKSLIYKISQHLSQLGTKNITV

SEQ ID NO: 166138 - protein, 56 aa, Zea Mays
MYACNRIENDPVEEPEELAGEAPEQQSVGGGKCPLTYLCPIHSLIHLPHYTFIPKH

SEQ ID NO: 166139 - protein, 85 aa, Zea Mays
MCGGQSAVRTASLLQDSSNTAAFESAVRTASLQDSSNAAAFDSKDCGRQHSSSLLTARTACRHLLFSFSFWRTAACCSLQFFLFD

SEQ ID NO: 166140 - protein, 111 aa, Zea Mays
MHFATRQPTPAMALAYGPHWPAPHRACVHSATLTTAWGHGPALTRSCMPPRMSLCPVGPALSGSSSLGSAGGLTEGLAQRAGTRTRVAESKLPPTNLCRTRTRLPILAPKI

SEQ ID NO: 166141 - protein, 235 aa, Zea Mays
MDRKLNEFLALTQGNRTMLQYAQAFNDLCQYAGYHADTDEKKRDRFRRGLSTKLRDRLNTVRANSYNELVNMVISQEDCITARQAEKKRKTPVAGPSAQPQRFRIMSDTQNRGPQQQQGRWLIRPQQQQQAPNRTQFPVQRNNQPQQQQYRQANDNRCFTCGNTGHYAKNCPRNQQRQGQNANQNQGKRHKAQVRQGRLNFTTMADILEGAPVMTGIFSVLNYPAIILFDSGASL

SEQ ID NO: 166142 - protein, 111 aa, Zea Mays
MLEGQLYLVDFDRAELDTCLIAKTNLGWLWHRRLAHVGMKNLHKLLKGEHILGLTNVHFEKDRICSACQAGKQVGTHHPHKNIMTSDRPLELLHIDLFGSIAYISIGGSKY

SEQ ID NO: 166143 - protein, 67 aa, Zea Mays
MPRRAPASTHAGRLGLRQGSPSGGHEIGVNLTISPNLIALLVNYGALATVAVSMAAIWSCSRRPESS

SEQ ID NO: 166144 - protein, 117 aa, Zea Mays
MLGQEQRPPQESRKVPLASVRQADLCSSLTAIGRKGPTCHQCPGEVGAGARTRPTRSQGKRGLGRIQDIRPRLFPFTIFLFPFFYFHFQVGFSHKLLNSNHGLNIQQKNMYQPKSQH

SEQ ID NO: 166145 - protein, 90 aa, Zea Mays
MASLASLLSPASWRRRSAFSFSRAATFSASLWHLLSEADFSRTASACCVRSLSTSADKAAVRAPDAVRLVKSATCRTHVRSLRKKKARRT

SEQ ID NO: 166146 - protein, 102 aa, Zea Mays
MAWLRTVVGGGRSASLEPERRRAKGAAEEKEQQDGGRLGFCGARKAEFKQRRPAPFYRQGAALRETRNPTVRRPSTVTSKTPAEPLRARAVSPPSSDVFGTR

SEQ ID NO: 166147 - protein, 70 aa, Zea Mays
MERLHPSNYYNKLCTLGTIRTCNKYNSSYVVKLELWKCKICFVKSSTLSLKCLCIECDYCNMHECGRSLG

SEQ ID NO: 166148 - protein, 64 aa, Zea Mays
MFASSSTFVHGRSRPRKMCNIPTTFSMLATLRLYFHVRMKKWLLGSWEPNARETKLAFGFQKLL

SEQ ID NO: 166149 - protein, 64 aa, Zea Mays
MNVCEHTLAKLTPGQEQVLQDEEHEGCYDEFMRGLDRRLPVNYGCGGSMSSYNYLAILYGTPII

SEQ ID NO: 166150 - protein, 101 aa, Zea Mays
MEDGCHMGRGRPAKGEKGGGGQEGGVKGKKGWPPRVFVGERNDASDDFYLCIQWPTTLYLIHAPKINFWSTFFLGYYTLPPLKRIQPRIRPLQAKHPRYPI

SEQ ID NO: 166151 - protein, 108 aa, Zea Mays
MRLEVVSQLPPRQDHRVQQLLNLWVADLGFGQYLADEVDWPLNGQCMPLFLPLNHNRGANHLSGRGDVDQEGFSGSWGHQDRRIREKRLQVPEGFLGLRGPSEALGLP

SEQ ID NO: 166152 - protein, 194 aa, Zea Mays
MTLHVWHLLREAFQVDDEGLRLGEGLGVLHALHVAFERVFVHGADGDDPVGARHLELQVGVVGDGHELRVAWPFQYRMVGSSEPDHLERQGLPSEVGGCSEADGKVELFEGLDALLGNDPMERRSACPDRGQIDTQEPESLGVDDVEAAASIHEDLGEPDVADDGVGDERVFPRARHVVGVVGSVEGDGLVGPV

SEQ ID NO: 166153 - protein, 89 aa, Zea Mays
MMAPPVDVAGPRPRLGDVEAPPRSRSSLSSVAVVESEPLGRARRRPSAEARAESEPWGRAKRSSSSFGAEPKSEPWVGRSGVRRLLGLS

SEQ ID NO: 166154 - protein, 459 aa, Zea Mays
MFINEQIHKNAQATTVLLASLCRDEYHKVSGLDNAKQIWDTLKISHEGNDVTLLTKMELVEGELGRFAMIRGEEPTQTYNRLKTLINKIRSYGSTRWTDHDVVRLMLRSFTVLDPHLVNNIRENPRYTKMSPEEVLGKFVSGRMMIKEARYVDDALNGPIHEPQPIALKATRSKEALPSKVAQIEAARLNDEEMTLIIKRFKTTLKGRKGQPSKTKTKEKRSCFKCGKLGHFIANCPDNDSDQDQGNKREKKKNYKKAKGEAHLGKEWDSDCSSSDSDNEGLAATAFNKSALFPNERHTCLMAREKKVCTQNSTYASSSEDESSDEDEIDYSCLFKGLDRTKVDKINELIDALNDKNRLLEKQEDLLYEEHDKFVEAQKSYALEVKRNEMLSYELSTCHETISTLQGVNNDLNAKLEVANKSNSCEEHVMICTRCKDFDIDACSEHLVSISRLNDEVAS

SEQ ID NO: 166155 - protein, 98 aa, Zea Mays
MYHDRRQTRNAYRSYNAYDDFDSHAMFASSSSYMHGRNMSRRNAIHHVPRKNIIHTSRKVVNEPSTIYHALNASFAICRKDKKIVARKLGAKCKGDKT

SEQ ID NO: 166156 - protein, 244 aa, Zea Mays
MGWLWHRRLAHVGMKNLHKLLKGEHVIGLTNVQFEKDRPCAACQAGKQVGGAHHSKNVMTTSRPLELLHMDLFGPVAYLSIGGSKYGLVIVDDFSRFTWVFFLQDKSETQGTLKRFLRRAQNEFELKVKKIRSDNGSEFENLQVEEFLEEEGIKHEFSAPYTPQQNGVVERKNRTLIDMARTMLGEFKTPEYFWTKAVNTACHAINRVYLHRLLKKTSYELLTGNKPNVSYFRVFGSKCYILVK

SEQ ID NO: 166157 - protein, 115 aa, Zea Mays
MVQRDHPVDQILGDISKGVTTRSRLVNFCEHYSFVSSIEPFRVEEALLDPDWVLAMQEELNNFKRNEVWTLVPRPKQNVVGTKWVFRNKQDEHGVVTRNKARLVAKGYAQVAGLD

SEQ ID NO: 166158 - protein, 114 aa, Zea Mays
MTHKFEMSMMGELNYFLGFQVKQLKDDTFISQTKYTQDLLKRFGMKDAKPAKTPMGTDGHTDLNKGGKSVDQKAYRSMIGSLLYLCASRPDIMLSVCMCARFQSDPKECHLVAV

SEQ ID NO: 166159 - protein, 638 aa, Zea Mays
MSGEHAKKEMETGDKPATSHGKASSGESRNKGKGKEKKPSSHKSHRSGDKKKKMRKVVYYETDTSSPSTSGSDAPSVTSKRHERKKFSKIPLHYPRTSRHTPLLSVPLGKPPTFDGEDYARWSDLMKFHLTSLHKSIWNVVEFGAQIPSIGDEDYDEDEVAQIEHFNCQATTILLASLSREEYNKVQGLKSAKEVWDVLKTAHEGDELTKITKRETIEGELGRFRLRQGEEPQDMYNRLKTLVNQVRNLGTKKWDDHEVVKVILRSLICLNPTQVQLIRGNPRYTLMTPEEVIGNFVSFEFMIKGSQKINELDGPSTSEAQPVAFKATEEKKEESTPSRTPIDASKLDNEEMTLVIKSFRQILKQRRGKDYKPRSKKVCYKCGKPDHFIAKCPISSDRGDDKGRRKEKKRYYKKKGGDAHVCREWDSDESSSDSSDDDDAANIAITKGLLFPNVGHKCLMAKDGKKKKVKSKSSTRYESSSDDNASDEEDNLRTLFANLNMQQKEKLNELISAIHEKDDLLDSQEDFLIKENKKHVKVKNAYALEVEKCEKLSSELSTCHETIDNLRNENSNLLAKVDSIACNVSIPNLRNDNDDLLAKIKELNMSLASLRIENEKLLAKAKELDVCNATISDLRTKK

SEQ ID NO: 166160 - protein, 168 aa, Zea Mays
MGKNISLILSSPSTQCAPLLDPCCAGGDLEGGGSRGEGLPWEERAASPRKKERGAAKCWRRGKGWRPSRGKRGKRPPLGFSLREKRSDATDDSDLASNGPQPFSHIHAPKINLWQHFFGILHSTRLKKNSSSNSSTPNKTSMVPHITPPFQNMGPLLVLINTRTSTSD

SEQ ID NO: 166161 - protein, 55 aa, Zea Mays
MSATLGVRMQRRLPRHTKPTTQLGMGGPQFVALDPSTCTTIDIHTSLLPPLGLQA

SEQ ID NO: 166162 - protein, 62 aa, Zea Mays
MRSLFLPVIIGFWRLWIMGIKGLEVGFDAGLGFDLEFSFLQNGRFDSFCSCQFSVVLVASKK

SEQ ID NO: 166163 - protein, 64 aa, Zea Mays
MIVEHWLWAFRFKNQSKLMVTIPLRPEWVHHSEKSTPAGYQKWENGLNTSRPDVERTRSPVCVD

SEQ ID NO: 166164 - protein, 61 aa, Zea Mays
MLPSRSCVEGDHFWHTDPTIETNSTLIILCKFRSFSHLNQGFDFLNPFIRLLTFADFLLQG

SEQ ID NO: 166165 - protein, 52 aa, Zea Mays
MANIVDRFAPKMPRSPMLIEHRPSHLNKGMILVFNNTIMLRHIHRGKLMIKS

SEQ ID NO: 166166 - protein, 56 aa, Zea Mays
MPSKRESSARVDYVPALCTHRPSLLPIEWSGEVFGSRRRGRFAAPDVARSPLNLII

SEQ ID NO: 166167 - protein, 58 aa, Zea Mays
MVHHLSVFRDRGVPEPTSECRRVPQPRWVKREGEREGGKARRPETGVREVGIPRPSCS

SEQ ID NO: 166168 - protein, 70 aa, Zea Mays
MCACRASEVGAEACGDRRDPVCPLRAPPADRHRHRPRRVRARLPVPRPAVLLCVDGAVRRASRDEHRYVR

SEQ ID NO: 166169 - protein, 50 aa, Zea Mays
MGTGFRLVGLQAVEIGPGRSWFLFSFCFLFFFFFTCFHSLNPRICCEFHL

SEQ ID NO: 166170 - protein, 51 aa, Zea Mays
MNAYKCNAYVLCLHTSKGMKPHRTPPRATYDAKLYRYGRTIGHDQTSDANE

SEQ ID NO: 166171 - protein, 52 aa, Zea Mays
MQAKEIFLGNVGYAGAVWSRFMQLTQTKVVQTHVLKLDRCAQDTNQKVKFFI

SEQ ID NO: 166172 - protein, 56 aa, Zea Mays
MQNDICRRSMFFHCKPPLGASSPFTSAESAFIFRCKPPLGASSPFSFSGISVYFSL

SEQ ID NO: 166173 - protein, 90 aa, Zea Mays
MLADSSPAVPATVPTLRSAAPSAAAISLAAVRSLSFQQQPSPLLQQRLSPMEPAAFPPPRLACVAGASPPRARRHRPAGRRLAAAAALAQ

SEQ ID NO: 166174 - protein, 51 aa, Zea Mays
MFLPSWILKSVVTPGFKGQSQVHLIHAPKKTTYIITECIEINVTIIRVLIT

SEQ ID NO: 166175 - protein, 93 aa, Zea Mays
MCYRKVVDNFIILLVLKFDSHRTDSLGVMLFTNSVTESVQFLYRFQRLYCLLKLMFESVLVDYKEVVDAFLILLVLKFHKHRPDSLRVMNFTT

SEQ ID NO: 166176 - protein, 72 aa, Zea Mays
MVLIDPSGYQVKYMVHLEFKATNNTAEYEALIFDLSVALPLGIRQLLVKGDSQLIIKQVRGECSCNEPRLTA

SEQ ID NO: 166177 - protein, 76 aa, Zea Mays
MALGDRPGVTTLVTSFHFSPGPTCRGSVSLYVPPLSYKREGTRRYKADSGSHKPNLDSHTRSRTLKLSSSIQHTVE

SEQ ID NO: 166178 - protein, 79 aa, Zea Mays
MQGYEQQQQLSEGQIDLAHRHSLDAERSRDPLVAQQERGARTHGDACETYIAKYSQYKCEARTMDVNRCAFEIRYLLRN

SEQ ID NO: 166179 - protein, 531 aa, Zea Mays
MPEQNGVVERKNRTLLDMARTMLDEYKTSDQFWAEAVNTACYAINRLYLHRILKKTSYELLTGKKPNVSYFRVFGSKCFILVKRGRKSKFAPKAVQGFLLGYDSNTRAYRVFNKSSGLVEVSCDIVFDETNGSQVEQVDLDELDDEEAPCVVLRNMSIGDVCPKESEEPPQAQDQPSSSMQASPPTQNEDQARDDDEDQEEPPQEEENDQGGDANDQDKEDDEDPRLPHPRIHQAILRDHPVNTILGDIQKGVTTRSRVAHFCEHYSFVSSIEPHRIEEALQDSDWVLAMQEELNNFTRNEIWHLVPRPNQNVLGTKWVFRNKQDEHGVVRRNKARLLAKGYSQVEGLDFGETYAPVARLESIRILLAYATYQGFKLYQMDVKSAFLNGPIKEEVYVEQPPGFEDSEYPNHVYKLSKALYGLKQAPRAWYECLRDFLIANGLKVGKANPTLFTKTLADDLFVCQIYVDDIIFRSTNESTCKEFSRIMTQKFEMSMMGELKYFLGFQVKQLQEGTFTSQTKYIEDILTKFGM

SEQ ID NO: 166180 - protein, 189 aa, Zea Mays
MIGSLLYLCASRPDIMLSVCMCARFQADPKEVHLRAVKRILRYLVYTPKFGLWYPRGSTFDLIGYSDADWAGCKINRKSTSGTFQFLGRSLVSWASKKQNSVALSTVEAEYIAVGHCCAQLLWMRQTLRDYGYKLTKVPLLCDNESAIRMADNPVEHNRTKHIAIRYHFLRDHQQKGISRLHTLTPKNN

SEQ ID NO: 166181 - protein, 74 aa, Zea Mays
MISGNGVDSLDLDQQPRRLAPTQLAAHRREREPPLRRLRRRRRRHVGPRELGPRQHPRRPRPRSSPQRQQRRQA

SEQ ID NO: 166182 - protein, 104 aa, Zea Mays
MSACRCPQDHNRGGGGAGAGLASGPALAEVGAPGLLADGVELQLPQLGRVFGGETGRGGGDEAGGRPGQGLRARVRDAARCRQPCMAAAAAAVGEASGVREDGA

SEQ ID NO: 166183 - protein, 67 aa, Zea Mays
MLILSIPCLFVLLRLARGHEDLKNHPGTWNFKCQASCALDHFYYPIMSFIVTIQCIGLALMGPNRSP

SEQ ID NO: 166184 - protein, 67 aa, Zea Mays
MLLRLGRSARRFSQGCFLAKARPRARRRCVRHWRGASGETEIPRGRLPLSEARLGRGMIESLVWTDP

SEQ ID NO: 166185 - protein, 98 aa, Zea Mays
MFILCCSLFYAILQRGCCRNFIYGRRKCSTVAYRVVCGTWSVTVPQAMSSFLLVSNAHMNTHNPGAWTCLVKSYYSFVNIICNSSVRFILKKYTAMFQ

SEQ ID NO: 166186 - protein, 107 aa, Zea Mays
MELNKVLYMYAATVALLLCSSANFIQSPSDVLGSVALQDPTPSAAHDFGAVVSDAPVAVMQPGSPADIARLLSALSSAGPDRRPEGGRGGAWRGALAARAGPGARRH

SEQ ID NO: 166187 - protein, 60 aa, Zea Mays
MSYIVSHQARTTIHVCLNKKASMCLQRELKAGRHKSYPDDDEWSLLSVLLCVTSGAEMAP

SEQ ID NO: 166188 - protein, 89 aa, Zea Mays
MSRYVHNTSNGYWGLYNDQYIRRAGQHTILSVHLHTLACNEGGMTTGEDTPRTTAFLRLVHGTHYENVSDGLATRARATRKDNTMVRVR

SEQ ID NO: 166189 - protein, 108 aa, Zea Mays
MLGAWRPSPSTSVPLSAARGSPDHRHCPSPVPPSTRVPAAPTPPRVTHPHGTRAATPLRRPTWSYGSLHHCESATVGHGGEPEKTVIAHRRQIRREVTGNRRPWTVPS

SEQ ID NO: 166190 - protein, 52 aa, Zea Mays
MTRCSSRHSLLAASLHAVTFFFFFFFDKTDGGTTTVPRHYSAVMLCVCASAL

SEQ ID NO: 166191 - protein, 52 aa, Zea Mays
MMLRQLPPSIRTLVSLTLPTTGSTMSGYFPGLDTWSGWSAWSKVMGLLDQFR

SEQ ID NO: 166192 - protein, 63 aa, Zea Mays
MRRQREEEHARREKQGAAASMNSLLGLCFVAEGLIKRSDPRMKLFVQDSRRCLFAELRHYKPT

SEQ ID NO: 166193 - protein, 459 aa, Zea Mays
MTVKNRFPMPLVDEILDELAGTQYFSSLDMTAGYHQIRMGEEDEHKTAFKTHHGHYQFRVMPFGLTNAPATFQCAMNSILEPFLRKFVLVFIDDILIYSPTLQDHVQHLKQVFTVLRHHQFYLKRKKCVFAQAKLQYLGHIISKEGVATDPSKTEAMVRWPVPTSVTELRGFLGLTGYYRKFVRHYGTLAKPLTILLQGKKAWVWTLEAQKAFEHLKKAMTQTPVLALPRFEIPFVVETDACDEGIGAVLMQEHKPLAFLSKALGMKNKQLSIYEKEFLALIMAVDRWRPYLQRSSFTIMTDHQSLSFLGEQQLQSELQRKAMAKLMGLQFKIVYKKGKENVVADALSRVGAAMTLALVSEVQPVWLQEILNSYATDLQAQQLLQKLVIQSPDEDGYFLQQGVIRKDQQIWVGENSALRTKIIAALHDSSLGGHSGITATYHRIKKLFCWSGLKTDVEL

SEQ ID NO: 166194 - protein, 62 aa, Zea Mays
MWPQAQSTTTTASSSNLLPRALFMRVVSRAWTMLMANASSSAASRQGTQAASQRRPDGQAHS

SEQ ID NO: 166195 - protein, 101 aa, Zea Mays
MSCPCLRKVCVLATASTTNAAEEKRVVGDDSAYRQQCARPANRSKIRVGTEITGELTHAWEGDRCEQEGQRRPWATASCRPAQQREQQRGRAGVEGRAELE

SEQ ID NO: 166196 - protein, 101 aa, Zea Mays
MKIMLPNSAVACGCGPCWDVSMSCVQVQCNNICGRTALALPAAEPLCACQFFSPSAFGSRPRQWRGVPRCCRLPLMRPRRLKPANDKKKKKTTPRLAHTQI

SEQ ID NO: 166197 - protein, 64 aa, Zea Mays
MSTAPIPTAQASVSTSKGSEKCGRANTGVVIVACLRVQKASSASGVHTNNFCCNSLVRGLAMIP

SEQ ID NO: 166198 - protein, 107 aa, Zea Mays
MLSSYHRTLMIPPLSLPLLLLSLNKVVQRRVSSSIPVSQTLRSAFQIPSHLFQAHLSDLPSSLFHPQIQLVSLLCRTLCNSCCQINLSHELELYLLHVLHLPRQHLQ

SEQ ID NO: 166199 - protein, 114 aa, Zea Mays
MGRLAGMAMLHGTGARDVRLARLGVLTWTKPVPALALAHRWADLSGGQHTTAWATRRGSDDPLAWWSWPTRGLWRGRPLGGVYGGALAVRSQRCCCLLVLHSGPTVMAGYPAVA

SEQ ID NO: 166200 - protein, 93 aa, Zea Mays
MPHVDPSTLLMPCAALRPRPRHVMPRRPRSRVTPPTPPALTPLVPCAAPSTSPTPCTAPSPASHMHIPREPHLTALKWIIRNLRVSINYDLLL

SEQ ID NO: 166201 - protein, 129 aa, Zea Mays
MADVVWDTRVDESWRLLTVDGLLEVAVKKGILHVKLVNQLGAGRGDAEYRPYGGRFDDRAEGIVVVDTLALGEASDNPASLVASEGPIGMELVPEDPLPRHDVGARGRRTSCQVLLSARAWYSSIIAVC

SEQ ID NO: 166202 - protein, 530 aa, Zea Mays
MASPPFDGLTVRVLHDGQFVQGTFVAFDHAMSPVLRDCVEIHPTTGRHVSGPLVFPRTMIASLAIEPPLSPSPPSNHASAPPLALSAHPAAFPLSPSPVDWMVDSGASYHTTPTPSSLFHSHPPHPSHPSSIVVSNGSTLPVTSVGASVLPGPFCLNDVLVAPGLTHPLLSVRRFTSDNQCSMEFDPWGLTIRHLPTHAVLARCDSSGPLYSLHLPSTPHTRVASSPALATTTTSSAIWHRCLGHPGPDVMSQLSSHSDISYTRGSSERLCHACQLGRHCRLPFSTSTSRAVQAFDLVHCDLWTSPVLSLSGYKYYLVILDDYSHFLWTFPLRLKSDTFTTLTHFFAWVSTQFERPVRALQCDNGREFDNHASRSFFLTHGVQLRLSCPYTSAQNGQAERMIRTTTNMIRCLLFQASLPATYWAEALHTATHLLNRLPSKAVSHPTPHFALYGTAPSYDHLRVFGCACYPNISATAPNKLSPRSTRCLFLGYSPDHKGYRCLDLTSHRIIISRHVVFDEDVFPLAGSTPP

SEQ ID NO: 166203 - protein, 90 aa, Zea Mays
MSSSFLRPVRSSAPAARLLPSAGSNCRSRLVPGPLLTDDVMRTKAQLGVSDDFTSSSGRLTCRLFPVQILEILMPAGICIPKEARVVLLR

SEQ ID NO: 166204 - protein, 114 aa, Zea Mays
MDSLQQPWQFGTVIRFGSLEFMAPGIGYDMVLLSPQHHIDADYRLAQPGGARPRLPPSLRRDIQSTVATLLAGGGGGTTATTPQIALPWLSSLGKLTTQAPLQGTCQPFASSQE

SEQ ID NO: 166205 - protein, 54 aa, Zea Mays
MQTCFFSTTIIGLSKTCKTLGEILGKESSTNCTSTTASLSSTTRQRKGRRHSDC

SEQ ID NO: 166206 - protein, 77 aa, Zea Mays
MRTRQGAVKRCDAMRCGRLARGPRLGAFGLLLALESSKSCCDWDASHSLRPFCFPSPKPAAPELARFMVTIRILQRV

SEQ ID NO: 166207 - protein, 126 aa, Zea Mays
MRALRAQKSESPMLAHRTSNSTCPVCTGHPGGPTSQKLQRLESNGSDDVAGAPDCPVCTGLSGAPSSRRLQPTVKFGGWGYKYPNHPTIHCIQVFHFPTTTRALAFNSRHTKRDQILSNSTKGFSD

SEQ ID NO: 166208 - protein, 267 aa, Zea Mays
MTPEEVIGHFVSFECMIEGSRKINELDDPSEAQPVAFKATKEKKEESTPSRQPIDASKLDNEEMALVIKSFRQILKQRKGKDYKSRSKKVCYKCGKPGHFIAKCPISSDSDRGDDKKGRRKEKKRYYKKKGGDAHVCREWDSDESSSDSSDDEDAANIAVTKGLLFPNVGHKCLMAKDGKKKKVKFNSSTKYESSSDDNASDEEDNLRSLFANLNIAQKEKLNELVSAIHEKDDLLDAQEDCLIKENKKHVKVKNAYALQVEKCEKL

SEQ ID NO: 166209 - protein, 80 aa, Zea Mays
MLYNGRRPGIKDGIGFQRGDNVKISAPPKRLSNFVKGKAPMPQDNEGYILYPAGYPKSKIRRIHSRKSHSGPNHAFMYKS

SEQ ID NO: 166210 - protein, 277 aa, Zea Mays
MARTMLDEYKTSDRFWAEAVNTACYAINRLYLHRILKKTSYELLTGKKPNISYFRVFGSKCFILVKRGRKSKFAPKTVEGFLLGYDSNTRAYRVFNKSTGLVEVSCDVVFDETNGSQVEHVDLDEIGEEQAPCTALRNMSVGDVCPKESEEPSRAQDQPSSSTQASPPTQNEDEAQVDEVEDQANEPPQDDGIDQGGDANDQDKEDEEQRPPHPRVHQAIQRDHPVDTILGDIHKGVTTRSRVAHFCEHYSFVSSIEPHRVEEALQDSDWVVAMQEE

SEQ ID NO: 166211 - protein, 114 aa, Zea Mays
MTQKFEMSMIGELKYFLGFQVKQLQEGTFISQTKYTQDILTKFGMKDAKPIKTPMGTNGHLDLDTGGKSVDQKVYRSMIGSLLYLCASRPDIMLSVCMCARFQADPKGAHLTAV

SEQ ID NO: 166212 - protein, 97 aa, Zea Mays
MRQTLRDYGYKLTKVPLLCDNESAIKMADNPVEHSRTKHIAIRYHFLRDHQQKGDIEISYINTKDQLADIFTKPLDEQSFNKLRHELNILDSRNFFC

SEQ ID NO: 166213 - protein, 239 aa, Zea Mays
MESLAQRAALLRESLQKSQQVTDAVVSILGSFDSRLTALDSAMRPIQVRTHAVRTAHENIDRTLRSADVILTQFDRTREAEREIQKGPHENLQGFLDAVDRLRSIERFFSSNRSYRSSDGVLNHVNALLSKALVRMEGEFQNQLSQRSKPMEPDRLFDCLPSTLRPSSESQPEGGKNPSENQQNPEAVVYSPPALIEPKFVPLLSKLAQQLVQAGCQQQCSEIYSSFFSFRIKSEELGR

SEQ ID NO: 166214 - protein, 228 aa, Zea Mays
MAIWRYNHPHPHPSLATSSLSLPPSCLPPLPYPSYARYQLPPIHAVQEAGGGLQRDRIDLFSPAACCMRCESTTRSVQSLWNFPLAPSPPPHVPHAPPSSMDSISHQGKGPDRTHLRGLNMPAAVGRPNCTCTRISVFRSTLSVLSAFSKLIHLFLRRHCRSLVKAVSSFYHFRVKDTYIFKILCLALHYIVIFSFDCELEMTALRRQIDDEITVRQFMMRFSNSLMI

SEQ ID NO: 166215 - protein, 137 aa, Zea Mays
MAIWRYNHPHPHPSLATSSLSLPPSCLPPLPYPSYARYQLPPIHAVQEAGGGLQRDRIDLFSPAACCMRCESTTRSVQSLWNFPLAPSPPPHVPHAPPSSMDSISHQGKGPDRTHLRGLNMPAAVGRPNCTCTRISH

SEQ ID NO: 166216 - protein, 125 aa, Zea Mays
MPSRKLVEDSKGIALIYSHLPPAACDASRRQDQCNPFGIFHSRLHPRRTCHTPLHLPWIPSLIRYLSLYLLLQATSMDLIFVKFAYLLSTYVLATSFLRTTHPPGHEESICSWEHDDADKYKHSI

SEQ ID NO: 166217 - protein, 164 aa, Zea Mays
MRCESTTRSVQSLWNFPLAPSPPPHVPHAPPSSMDSISHQIYQGKGPDRTHLRGLNMPAAVGRPNCTCTRISVFRSTLSVLSAFSKLIHLFLRRHCRSLVKAVSSFYHFRVKDTYIFKILCLALHYIVIFSFDCELEMTALRRQIDDEITVRQFMMRFSNSLMI

SEQ ID NO: 166218 - protein, 364 aa, Zea Mays
MDAKELISQSDLQSFYQQQQQQHRAFGGHHSPSSLAGMHSVIRPMPNMNMSPTAILNSISGGSLAGMQFQMDPPPPLLHNINATGAVTPAPAEPLKRKRGRPRKYGPDGTMRQQQQQQAASSQQQLVATQPRICSLSSGPDMLGSSGMEDPAQKKRRGRPPGTGKKHQPSTSQGPGNAFAGSAGTSFTPHIITASPSEDVAAKIVAFASQSSKAVCVLSAMGSVSRAVLRHPADGSPMARVHASPQPYKNPAVYEGGGLSVTLCSPERNVIGGVLGGPLVAAGTVQVVLGSFHQGGSRSKSKKAGKQQQAAAFSPDSLTGGQEASPSSGHNQNLTPPPSVTGGWPTSGIFDTRSSSIDINSSRG

SEQ ID NO: 166219 - protein, 161 aa, Zea Mays
MEKDTSVADRLARMKVNYMKEGMRTSVEAILLVQEHNHPHILLLQIGNTFCKLPGGRLKPGENEIEGLKRKLCSKLAVNSPSFPPNWQVGECVAVWWRPNFETVMYPYCPPHITKPKECKKLFIVHLSEREYFAVPRNLKLLAVPLFELYDNVQEFVKICF

SEQ ID NO: 166220 - protein, 836 aa, Zea Mays
MDLSRLASVAGPSRAAPRAGLQIGAAGNGFRVCSLRHRGAGNGRLTSAAALLRGSSGLFYLAPARGGPPRLRARGRPRCQGSDSLAYVDGPLEAAKGSGEVYDDDATSSGPDDDDNDKGPADVDGLREMLQRCRNELEVARLNSTMFEEKAQRISESAIALKDRAEGAQRDVSAAVATVQEVIVKEADAKEAVQKATMALSMAEARLQLASEALDAKRGSVGPMEVSIEGVEEEALVSAQEEIKDCRAALLRCEEELERIQEQKMNLQKEVDRLTELAEKAQLDASKAEEDVTNIMVLAEQAVALEMKATQRVNDAEAVLLKAEKVISSVDTVVELTSLAEEQKSAEEDSVSEGYEYSSNGTDDVPVRDEVSSIERLMVGDLTVEGIEQLEPSREIYDEASSDKMSVEPQKEAEPDSDKLKQGKKQEMERKEFTKEPLSAQKSLKKRSSRFFPASFFSSKADGEFTPTSVFRGLMKSVQKQAPKLVVGILLLGAGAEKSQLFQQQEIATSIGKVTSTTKPIVREIRQIPQRVKKLIELLPHQEVNEEEASLFDILYLLLASVIFVPLFQKIPGGSPVLGYLAAGVLIGPYGLSIIRNVHGTKAIAEFGVVFLLFNIGLELSVERLSSMKKYVFGLGSAQVLATTAAVGVIAHRFAVLPGPAAIVVGSGLALSSTAVVLQVLQERGESTSRHGRATFSVLLFQDLAVVVLLILIPLISPNSSKGGVGFQAIAEAMGMAAVKAVAAITAIIAGGRLLLRPIYKQIAENQNAEIFSANTLLVIFGTSLLTARAGLSMALGAFLAGLLLAETEFSLQVESDIAPYRGLLLGLFFMTMEPF

SEQ ID NO: 166221 - protein, 600 aa, Zea Mays
MDLSRLASVAGPSRAAPRAGLQIGAAGNGFRVCSLRHRGAGNGRLTSAAALLRGSSGLFYLAPARGGPPRLRARGRPRCQGSDSLAYVDGPLEAAKGSGEVYDDDATSSGPDDDDNDKGPADVDGLREMLQRCRNELEVARLNSTMFEEKAQRISESAIALKDRAEGAQRDVSAAVATVQEVIVKEADAKEAVQKATMALSMAEARLQLASEALDAKRGSVGPMEVSIEGVEEEALVSAQEEIKDCRAALLRCEEELERIQEQKMNLQKEVDRLTELAEKAQLDASKAEEDVTNIMVLAEQAVALEMKATQRVNDAEAVLLKAEKVISSVDTVVELTSLAEEQKSAEEDSVSEGYEYSSNGTDDVPVRDEVSSIERLMVGDLTVEGIEQLEPSREIYDEASSDKMSVEPQKEAEPDSDKLKQGKKQEMERKEFTKEPLSAQKSLKKRSSRFFPASFFSSKADGEFTPTSVFRGLMKSVQKQAPKLVVGILLLGAGAFFLNRAEKSQLFQQQEIATSIGKVTSTTKPIVREIRQIPQRVKKLIELLPHQEAVLFLDILLLVSSLVHMGSPSSVMCMGQRQLRNSESCSYCLTLDLSFLWKG

SEQ ID NO: 166222 - protein, 761 aa, Zea Mays
MNLQKEVDRLTELAEKAQLDASKAEEDVTNIMVLAEQAVALEMKATQRVNDAEAVLLKAEKVISSVDTVVELTSLAEEQKSAEEDSVSEGYEYSSNGTDDVPVRDEVSSIERLMVGDLTVEGIEQLEPSREIYDEASSDKMSVEPQKEAEPDSDKLKQGKKQEMERKEFTKEPLSAQKSLKKRSSRFFPASFFSSKADGEFTPTSVFRGLMKSVQKQAPKLVVGILLLGAGAFFLNRAEKSQLFQQQEIATSIGKVTSTTKPIVREIRQIPQRVKKLIELLPHQEVNEEEASLFDILYLLLASVIFVPLFQKIPGGSPVLGYLAAGVLIGPYGLSIIRNVHGTKAIAEFGVVFLLFNIGLELSVERLSSMKKYVFGLGSAQVLATTAAVGVIAHRFAVLPGPAAIVVGSGLALSSTAVVLQVLQERGESTSRHGRATFSVLLFQDLAVVVLLILIPLISPNSSKGGVGFQAIAEAMGMAAVKAVAAITAIIAGGRLLLRPIYKQIAENQNAEIFSANTLLVIFGTSLLTARAGLSMALGAFLAGLLLAETEFSLQVESDIAPYRGLLLGLFFMTVGMSIDPKLLLSNFPMISMILGLLIIGKTLLVTFVGRVFGVSTIAAIRVGLLLAPGGEFAFVAFGEAVNQGLLSPQLSSLLFLVVGISMALTPWLAAGGQFLASKFEQHDVRSLLPVESETDDLHDHIIILGFGRVGQIVAQLLSERLIPFVALDVRSDRVAVGRALDLPVYFGDAGSREGTAQSWS

SEQ ID NO: 166223 - protein, 1020 aa, Zea Mays
MDLSRLASVAGPSRAAPRAGLQIGAAGNGFRVCSLRHRGAGNGRLTSAAALLRGSSGLFYLAPARGGPPRLRARGRPRCQGSDSLAYVDGPLEAAKGSGEVYDDDATSSGPDDDDNDKGPADVDGLREMLQRCRNELEVARLNSTMFEEKAQRISESAIALKDRAEGAQRDVSAAVATVQEVIVKEADAKEAVQKATMALSMAEARLQLASEALDAKRGSVGPMEVSIEGVEEEALVSAQEEIKDCRAALLRCEEELERIQEQKMNLQKEVDRLTELAEKAQLDASKAEEDVTNIMVLAEQAVALEMKATQRVNDAEAVLLKAEKVISSVDTVVELTSLAEEQKSAEEDSVSEGYEYSSNGTDDVPVRDEVSSIERLMVGDLTVEGIEQLEPSREIYDEASSDKMSVEPQKEAEPDSDKLKQGKKQEMERKEFTKEPLSAQKSLKKRSSRFFPASFFSSKADGEFTPTSVFRGLMKSVQKQAPKLVVGILLLGAGAFFLNRAEKSQLFQQQEIATSIGKVTSTTKPIVREIRQIPQRVKKLIELLPHQEVNEEEASLFDILYLLLASVIFVPLFQKIPGGSPVLGYLAAGVLIGPYGLSIIRNVHGTKAIAEFGVVFLLFNIGLELSVERLSSMKKYVFGLGSAQVLATTAAVGVIAHRFAVLPGPAAIVVGSGLALSSTAVVLQVLQERGESTSRHGRATFSVLLFQDLAVVVLLILIPLISPNSSKGGVGFQAIAEAMGMAAVKAVAAITAIIAGGRLLLRPIYKQIAENQNAEIFSANTLLVIFGTSLLTARAGLSMALGAFLAGLLLAETEFSLQVGMSIDPKLLLSNFPMISMILGLLIIGKTLLVTFVGRVFGVSTIAAIRVGLLLAPGGEFAFVAFGEAVNQGLLSPQLSSLLFLVVGISMALTPWLAAGGQFLASKFEQHDVRSLLPVESEIVAQLLSERLIPFVALDVRSDRVAVGRALDLPVYFGDAGSREVLHKVGAERACAAAITLDTPGANYRAVWALNKYFPNVKT

SEQ ID NO: 166224 - protein, 1086 aa, Zea Mays
MDLSRLGSGEVYDDDATSSGPDDDDNDKGPADVDGLREMLQRCRNELEVARLNSTMFEEKAQRISESAIALKDRAEGAQRDVSAAVATVQEVIVKEADAKEAVQKATMALSMAEARLQLASEALDAKRGSVGPMEVSIEGVEEEALVSAQEEIKDCRAALLRCEEELERIQEQKMNLQKEVDRLTELAEKAQLDASKAEEDVTNIMVLAEQAVALEMKATQRVNDAEAVLLKAEKVISSVDTVVELTSLAEEQKSAEEDSVSEGYEYSSNGTDDVPVRDEVSSIERLMVGDLTVEGIEQLEPSREIYDEASSDKMSVEPQKEAEPDSDKLKQGKKQEMERKEFTKEPLSAQKSLKKRSSRFFPASFFSSKADGEFTPTSVFRGLMKSVQKQAPKLVVGILLLGAGAFFLNRAEKSQLFQQQEIATSIGKVTSTTKPIVREIRQIPQRVKKLIELLPHQEVNEEEASLFDILYLLLASVIFVPLFQKIPGGSPVLGYLAAGVLIGPYGLSIIRNVHGTKAIAEFGVVFLLFNIGLELSVERLSSMKKYVFGLGSAQVLATTAAVGVIAHRFAVLPGPAAIVVGSGLALSSTAVVLQVLQERGESTSRHGRATFSVLLFQDLAVVVLLILIPLISPNSSKGGVGFQAIAEAMGMAAVKAVAAITAIIAGGRLLLRPIYKQIAENQNAEIFSANTLLVIFGTSLLTARAGLSMALGAFLAGLLLAETEFSLQVESDIAPYRGLLLGLFFMTVGMSIDPKLLLSNFPMISMILGLLIIGKTLLVTFVGRVFGVSTIAAIRVGLLLAPGGEFAFVAFGEAVNQGLLSPQLSSLLFLVVGISMALTPWLAAGGQFLASKFEQHDVRSLLPVESETDDLHDHIIILGFGRVGQIVAQLLSERLIPFVALDVRSDRVAVGRALDLPVYFGDAGSREVLHKVGAERACAAAITLDTPGANYRAVWALNKYFPNVKTFVRAHDVDHGVNLEKAGATAVVPETLEPSLQLAAAVLAQAKLPMSEIQESINEFRNRHLSELTEVCNYVIIQWSAKLIDDICNRKPLTNEEIRNEPWQTKFPNGSNPRVAGVESVDGLN

SEQ ID NO: 166225 - protein, 978 aa, Zea Mays
MDLSRLASVAGPSRAAPRAGLQIGAAGNGFRVCSLRHRGAGNGRLTSAAALLRGSSGLFYLAPARGGPPRLRARGRPRCQGSDSLAYVDGPLEAAKGSGEVYDDDATSSGPDDDDNDKGPADVDGLREMLQRCRNELEVARLNSTMFEEKAQRISESAIALKDRAEGAQRDVSAAVATVQEVIVKEADAKEAVQKATMALSMAEARLQLASEALDAKRGSVGPMEVSIEGVEEEALVSAQEEIKDCRAALLRCEEELERIQEQKMNLQKEVDRLTELAEKAQLDASKAEEDVTNIMVLAEQAVALEMKATQRVNDAEAVLLKAEKVISSVDTVVELTSLAEEQKSAEEDSVSEGYEYSSNGTDDVPVRDEVSSIERLMVGDLTVEGIEQLEPSREIYDEASSDKMSVEPQKEAEPDSDKLKQGKKQEMERKEFTKEPLSAQKSLKKRSSRFFPASFFSSKADGEFTPTSVFRGLMKSVQKQAPKLVVGILLLGAGAFFLNRAEKSQLFQQQEIATSIGKVTSTTKPIVREIRQIPQRVKKLIELLPHQEVNEEEASLFDILYLLLASVIFVPLFQKIPGGSPVLGYLAAGVLIGPYGLSIIRNVHGTKAIAEFGVVFLLFNIGLELSVERLSSMKKYVFGLGSAQVLATTAAVGVIAHRFAVLPGPAAIVVGSGLALSSTAVVLQVLQERGESTSRHGRATFSVLLFQDLAVVVLLILIPLISPNSSKGGVGFQAIAEAMGMAAVKAVAAITAIIAGGRLLLRPIYKQIAENQNAEIFSANTLLVIFGTSLLTARAGLSMALGAFLAGLLLAETEFSLQVESDIAPYRGLLLGLFFMTVGMSIDPKLLLSNFPMISMILGLLIIGKTLLVTFVGRVFGVSTIAAIRVGLLLAPGGEFAFVAFGEAVNQGLLSPQLSSLLFLVVGISMALTPWLAAGGQFLASKFEQHDVRSLLPVESETDDLHDHIIILGFGRVGQSG

SEQ ID NO: 166226 - protein, 312 aa, Zea Mays
MVRSSQMLVAQALIFHHLGRSWRKPPEKPYNPDYIGVLHLFGDSEACAFSIHNLLQAGRNYGLAAGSWLGPYAMCRAWQTLIRTNREQADAVDGKENFPMALYVVSGDEDGERGGAPVVCIDVAAQLCSDFNKGPSTWSPILLLVPLVLGLDKINPRYIPLLKETFMFPQSLGILGGKPGTSTYIAGVQDDRALYLDPHEVQMTVDIALDNLEADTSSYHCSVVRALALEQIDPSLAIGFYCRDKDDFDDFCSRASELAEKANGAPLFTVVQSIEPSKQMYKQDDGLGCSGSSMANDDDLDGSGEAEEWQIL

SEQ ID NO: 166227 - protein, 243 aa, Zea Mays
MTSLPERGESPVPPLDSLRQDSAVTVLAAAAVASSSAGSDRKEDSGSRQPKASILSGVFSPPFAIFEGQQQGSSSPACDARSTKSSSGSYGLSRILRRFVGSGSMWRLLGCGRVLTSSDVWFLGKCYKVSPEEEESGDSESDSGHAAFLEDFSSRIWITYRKGFDAISDSKLTSDVNWGCMVRSSQMLVAQALIFHHLGRSWRKPPEKLEGIMVWLLDHGWVHMLCAGHGRPLFAQIESKLML

SEQ ID NO: 166228 - protein, 279 aa, Zea Mays
MQRKNEEFLLSYTCAFSIHNLLQAGRNYGLAAGSWLGPYAMCRAWQTLIRTNREQADAVDGKENFPMALYVVSGDEDGERGGAPVVCIDVAAQLCSDFNKGPSTWSPILLLVPLVLGLDKINPRYIPLLKETFMFPQSLGILGGKPGTSTYIAGVQDDRALYLDPHEVQMTVDIALDNLEADTSSYHCSVVRALALEQIDPSLAIGFYCRDKDDFDDFCSRASELAEKANGAPLFTVVQSIEPSKQMYKQDDGLGCSGSSMANDDDLDGSGEAEEWQIL

SEQ ID NO: 166229 - protein, 442 aa, Zea Mays
MTLCTVLLQILLPTLLLVSAITGADASGIGVNYGTRGTTLPAPADVARFLARDTIFDRVRLLDADPVLLRAFAGTGLAVDVTVPNGVVPHLLNLTFARRWVRDNVTPYAGATNISRLLVGDEVTTEANRTLLLALVPAMQNLHTALVAASLHGRVKVSTTHSLGVLTTTEQPSAARFRDGYDAAIVRPLLRFLRATGAPFMVNAYPFYALANDSSLDFALFRVNDGVMDQGTGLVYGNMLDAQLDAVHSAVRRMGFGDVDIAVSETGWPSAGEDWEVGVGADLARDYNSNAIRHLGSGVGTPLMPNRTFEVSIFSLFDENLKPGPVSERNFGLFRGDMTPVYDVGIFTDPETLEPVRAKVTSRKWCVPEPAADEMVLQENIDFACGQKGVDCTAIRPGGVCYEPDTVQAHAAYAMNLYFQANGQHAFDCDFGQTGYGGCKFM

SEQ ID NO: 166230 - protein, 200 aa, Zea Mays
MEDGDESAAAALGLSPQLFVNEVHGIIADISAEAFEYCLQAAAAPGVVGAAKAAEKAMDLQRGLNAVHHVVKDRLDKRMANWEKFCLRHCFDVPEGFVADENDSSCAKESHKNGTSDSDLDLELDSLRRKLESVITLAVMNHLIIYLDFCSNCQYFLLFTRLTRSLKILKERCRHWKGKVCTKENLILQSLRYKSCLKTS

SEQ ID NO: 166231 - protein, 160 aa, Zea Mays
MDGPDWFEAELVEAYYPYNLNTGLNAVHHVVKDRLDKRMANWEKFCLRHCFDVPEGFVADENDSSCAKESHKNGTSDSDLDLELDSLRRKLESVITLAVMNHLIIYLDFCSNCQYFLLFTRLTRSLKILKERCRHWKGKVCTKENLILQSLRYKSCLKTS

SEQ ID NO: 166232 - protein, 244 aa, Zea Mays
MEDGDESAAAALGLSPQLFVNEVHGIIADISAEAFEYCLQAAAAPGVVGAAKAAEKAMDLQRGLNAVHHVVKDRLDKRMANWEKFCLRHCFDVPEGFVADENDSSCAKESHKNGTSDSDLDLELDSLRRKLESANKESENLEREMSSLERQSMHKRKLDSSISEIQKLFEDKLMQGFEDLVKAIPALRQKIIDMNKKRTEIRCLVDQQVWNTSSVRGNKRQTLDKGFTACGVDTREVVSIFENM

SEQ ID NO: 166233 - protein, 204 aa, Zea Mays
MDGPDWFEAELVEAYYPYNLNTGLNAVHHVVKDRLDKRMANWEKFCLRHCFDVPEGFVADENDSSCAKESHKNGTSDSDLDLELDSLRRKLESANKESENLEREMSSLERQSMHKRKLDSSISEIQKLFEDKLMQGFEDLVKAIPALRQKIIDMNKKRTEIRCLVDQQVWNTSSVRGNKRQTLDKGFTACGVDTREVVSIFENM

SEQ ID NO: 166234 - protein, 240 aa, Zea Mays
MEDGDESAAAALGLSPQLFVNEVHGIIADISAEAFEAAAAPGVVGAAKAAEKAMDLQRGLNAVHHVVKDRLDKRMANWEKFCLRHCFDVPEGFVADENDSSCAKESHKNGTSDSDLDLELDSLRRKLESANKESENLEREMSSLERQSMHKRKLDSSISEIQKLFEDKLMQGFEDLVKAIPALRQKIIDMNKKRTEIRCLVDQQVWNTSSVRGNKRQTLDKGFTACGVDTREVVSIFENM

SEQ ID NO: 166235 - protein, 148 aa, Zea Mays
MEDGDESAAAALGLSPQLFVNEVHGIIADISAEAFEYCLQAAAAPGVVGAAKAAEKAMDLQRGLNAVHHVVKDRLDKRMANWEKFCLRHCFDVPEGFVADENDSSCAKESHKNGTSDSDLDLELDSLRRKLESRDVVIGKAKYAQKKT

SEQ ID NO: 166236 - protein, 439 aa, Zea Mays
MIRYFVAAMTWITVVLFNALVISVTMFFYIKAGWIGNDPLTVVIGESDPYVHISGREISHLHTITILMTAVMIIAFLSSIAIVRRILIATPVLKVAAKVIGEVQALIAFPLLPCLILSILYMFWFSATLHLFSSGQVVRNDCNTDCCSYDLKLGKVNCDNCCGYSIHYTPHISIAILFHLFGCYWATQFILACSSTVVAGSVASYYWARGEISHDIPFLTVVSSLKRLMRYSLGSVALGSLVVSVVEWVRFILECLRRKLKLVDSARESCFGKATSSSSECCLGCIDWTLKSVNRNAYIMIAITGKGFFKASVLATGLIMKNILRIGKVNVIGDVILFLGKLCVSLFCALFAFLMLDTHKYKSAHNKISSPVIPVLVTWALGYVVAKLFFAVVEMSIDTIILSFCQDAEEHQGNAQYAPPALMETLDEQGELQRLTQGP

SEQ ID NO: 166237 - protein, 692 aa, Zea Mays
MGGPLGAIIGRYPSAAGGDEQLGGGAGGGIIRHDRRCRDIAVLVLFAAFWVAMIVNSSFGFNQGNPLRLTYELDYKGNVCGDKHGNPNLQELDVRYWMNPNQVYQSGLKNSKVNLADAKAICLMECPNPAVDGLNYICDYPEGNIDLSVDDWINRDYDYYEFLTPDMKNSSLQLQGPCYPIIFPTVNVYWSCQFIARASNVSLKHWHETGGVSIDENILIDKTVHKAIDSRSAVLKRYIADIGKSWPVFIVCGGILPVFLSVIWLLMIRYFVAAMTWITVVLFNALVISVTMFFYIKAGWIGNDPLTVVIGESDPYVHISGREISHLHTITILMTAVMIIAFLSSIAIVRRILIATPVLKVAAKVIGEVQALIAFPLLPCLILSILYMFWFSATLHLFSSGQVVRNDCNTDCCSYDLKLGKVNCDNCCGYSIHYTPHISIAILFHLFGCYWATQFILACSSTVVAGSVASYYWARGEISRLMRYSLGSVALGSLVVSVVEWVRFILECLRRKLKLVDSARESCFGKATSSSSECCLGCIDWTLKSVNRNAYIMIAITGKGFFKASVLATGLIMKNILRIGKVNVIGDVILFLGKLCVSLFCALFAFLMLDTHKYKSAHNKISSPVIPVLVTWALGYVVAKLFFAVVEMSIDTIILSFCQDAEEHQGNAQYAPPALMETLDEQGELQRLTQGP

SEQ ID NO: 166238 - protein, 669 aa, Zea Mays
MGGPLGAIIGRYPSAAGGDEQLGGGAGGGIIRHDRRCRDIAVLVLFAAFWVAMIVNSSFGFNQGNPLRLTYELDYKGNVCGDKHGNPNLQELDVRYWMNPNQVYQSGLKNSKVNLADAKAICLMECPNPAVDGLNYICDYPEGNIDLSVDDWINRDYDYYEFLTPDMKNSSLQLQGPCYPIIFPTVNVHKAIDSRSAVLKRYIADIGKSWPVFIVCGGILPVFLSVIWLLMIRYFVAAMTWITVVLFNALVISVTMFFYIKAGWIGNDPLTVVIGESDPYVHISGREISHLHTITILMTAVMIIAFLSSIAIVRRILIATPVLKVAAKVIGEVQALIAFPLLPCLILSILYMFWFSATLHLFSSGQVVRNDCNTDCCSYDLKLGKVNCDNCCGYSIHYTPHISIAILFHLFGCYWATQFILACSSTVVAGSVASYYWARGEISHDIPFLTVVSSLKRLMRYSLGSVALGSLVVSVVEWVRFILECLRRKLKLVDSARESCFGKATSSSSECCLGCIDWTLKSVNRNAYIMIAITGKGFFKASVLATGLIMKNILRIGKVNVIGDVILFLGKLCVSLFCALFAFLMLDTHKYKSAHNKISSPVIPVLVTWALGYVVAKLFFAVVEMSIDTIILSFCQDAEEHQGNAQYAPPALMETLDEQGELQRLTQGP

SEQ ID NO: 166239 - protein, 305 aa, Zea Mays
MIRYFVAAMTWITVVLFNALVISVTMFFYIKAGWIGNDPLTVVIGESDPYVHISGREISHLHTITILMTAVMIIAFLSSIAIVRRILIATPVLKVAAKVIGEVQALIAFPLLPCLILSILYMFWFSATLHLFSSGQVVRNDCNTDCCSYDLKLGKVNCDNCCGYSIHYTPHISIAILFHLFGCYWATQFILACSSTVVAGSVASYYWARGEISHDIPFLTVVSSLKRLMRYSLGSVALGSLVVSVVEWVRFILECLRRKLKLVDSARESCFGKATSSSSECCLGCIDWTLKSVNRNAYIMVSMKI

SEQ ID NO: 166240 - protein, 615 aa, Zea Mays
MGGPLGAIIGRYPSAAGGDEQLGGGAGGGIIRHDRRCRDIAVLVLFAAFWVAMIVNSSFGFNQGNPLRLTYELDYKGNVCGDKHGNPNLQELDVRYWMNPNQVYQSGLKNSKVNLADAKAICLMECPNPAVDGLNYICDYPEGNIDLSVDDWINRDYDYYEFLTPDMKNSSLQLQGPCYPIIFPTVNVYWSCQFIARASNVSLKHWHETGGVSIDENILIDKTVHKAIDSRSAVLKRYIADIGKSWPVFIVCGGILPVFLSVIWLLMIRYFVAAMTWITVVLFNALVISVTMFFYIKAGWIGNDPLTVVIGESDPYVHISGREISHLHTITILMTAVMIIAFLSSIAIVRRILIATPVLKVAAKVIGEVQALIAFPLLPCLILSILYMFWFSATLHLFSSGQVVRNDCNTDCCSYDLKLGKVNCDNCCGYSIHYTPHISIAILFHLFGCYWATQFILACSSTVVAGSVASYYWARGEISHDIPFLTVVSSLKRLMRYSLGSVALGSLVVSVVEWVRFILECLRRKLKLVDSARESCFGKATSSSSECCLGCIDWTLKSVNRNAYIMIAITGKGFFKASVLATGLIMKNILRIGKVNVIGDVILFLGKLCISISIC

SEQ ID NO: 166241 - protein, 347 aa, Zea Mays
MARRQLCRTKRTNRPRRPSGTPHPRIFSAFCQRHASPAVLSSPTPTPTPLSPTLSLHGGAPLVRHSTASTRSYTTSNQTQPRRKLAVATYPVRSPLLPHAQPAASSFLRPPASFAEHKGLAPVSHGGIGIGMAGRMVRSCVQTALKAANSVVGLAGMAVILYALWMLRAWYREIAGLGQRPPAPWFIYTFLGLGIFLCILTCSGHIAAETANGHCLYCYMTIVFMLIILEGAITLDVFLNSNWEEGFPPDPSGKFGDFKHFVRSNSEICEWVGLSVVAAQVLSIVLGMVLRTLGPDRETDYDSEDDTAVPARLPLLRNQSQHGSWDYAEATTSRQGLPLLHSKCVQR

SEQ ID NO: 166242 - protein, 214 aa, Zea Mays
MARRQLCRTKRTNRPRRPSGTPHPRIFSAFCQRHASPAVLSSPTPTPTPLSPTLSLHGGAPLVRHSTASTRSYTTSNQTQPRRKLAVATYPVRSPLLPHAQPAASSFLRPPASFAEHKGLAPVSHGGIGIGMAGRMVRSCVQTALKAANSVVGLAGMAVILYALWMLRAWYREIAGLGQRPPAPWFITMGDGAQPSMADVMQMLQTLSTNMSKM

SEQ ID NO: 166243 - protein, 248 aa, Zea Mays
MLSEPTVATSADMNWCCVPRANKREENPYSNSIGGIYSEKNIRLFSYAELRSATDNFNRTNKVGRGGFGTVYKGTIRSGREVAVKVLSAESRQGIREFLTEIDVISNVKHPNLVELIGCCVEGSNRILVYEYLKNSSLDRALLVSLPTSPGASGLLYASESLGALRTCTRRSRRRSCTETSRPATYFSTGTTSPRSGISVWPSCFLTMSPTSAPASREQQATLRLSTPGMASSPRKRTSTALVSLSWR

SEQ ID NO: 166244 - protein, 583 aa, Zea Mays
MDALHKTFMTRKKRHINIVPFKFDTPSPDDMVTTGLKSSRNFRKVDTEVLVKDSVGVTGKEMMNNDILLTEKNTSMDPSALVQLDDGGTSSNVPSSSQNITLALDHELQHLSLESKLKNSKTNVKKTASVSHYKPEPWMLQSENQEIRNQLSLAIVGHVDSGKSTLCGRLRHALGLISKKQMHKYEKEAKEKGKGSFAYAWAMDESSDERERGITMTVAVAYFNSEKYRVVLLDSPGHKDFVPNMISGATQADAAILVVDASIGSFEAGMGVNGIGQTKEHSQLVRSFGVENLIVAVNKMDGVEYSKERFQSVKSQLGVFLRSCGYKDSSVTWVPLSAMANENLVTACSDTRLLSWYNGGCLLQAIDSLPPPRRDVSSPLRLPICDVIASHTLGQVAVCGKVESGGIRTGCKVLVMPSGDIATVKTMERDSSTCSLARAGDNVAVGLHGVDPGHIAAGGVLCHPDFPVRVACHLELKILVLEITVPILVGLEFELHIRHAKSSARLVRILSSLDQKTGRALKKAPRLLTARQAALVEVRLDREACVEEFSTLKALARVFLRSQGSTVAVGVVTRVLDRALDMG

SEQ ID NO: 166245 - protein, 605 aa, Zea Mays
MFVPVLDNMSDFEEPFKISGMWQCSICTHENTTYSSSCELCGVLHDLSLYFNDISEDEDGAKCRHKYSGVSILARSLFTPPSAKSKAIVFSHDFKDRRNTTGNKQATMDALHKTFMTRKKRHINIVPFKFDTPSPDDMVTTGLKSSRNFRKVDTEVLVKDSVGVTGKEMMNNDILLTEKNTSMDPSALVQLDDGGTSSNVPSSSQNITLALDHELQHLSLESKLKNSKTNVKKTASVSHYKPEPWMLQSENQEIRNQLSLAIVGHVDSGKSTLCGRLRHALGLISKKQMHKYEKEAKEKGKGSFAYAWAMDESSDERERGITMTVAVAYFNSEKYRVVLLDSPGHKDFVPNMISGATQADAAILVVDASIGSFEAGMGVNGIGQTKEHSQLVRSFGVENLIVAVNKMDGVEYSKERFQSVKSQLGVFLRSCGYKDSSVTWVPLSAMANENLVTACSDTRLLSWYNGGCLLQAIDSLPPPRRDVSSPLRLPICDVIASHTLGQVAVCGKVESGGIRTGCKVLVMPSGDIATVKTMERDSSTCSLARAGDNVAVGLHGVDPGHIAAGGVLCHPDFPVRVACHLELKILVLEITVPILVGLEKPLFPV

SEQ ID NO: 166246 - protein, 656 aa, Zea Mays
MSDFEEPFKISGMWQCSICTHENTTYSSSCELCGVLHDLSLYFNDISEDEDGAKCRHKYSGVSILARSLFTPPSAKSKAIVFSHDFKDRRNTTGNKQATMDALHKTFMTRKKRHINIVDTEVLVKDSVGVTGKEMMNNDILLTEKNTSMDPSALVQLDDGGTSSNVPSSSQNITLALDHELQHLSLESKLKNSKTNVKKTASVSHYKPEPWMLQSENQEIRNQLSLAIVGHVDSGKSTLCGRLRHALGLISKKQMHKYEKEAKEKGKGSFAYAWAMDESSDERERGITMTVAVAYFNSEKYRVVLLDSPGHKDFVPNMISGATQADAAILVVDASIGSFEAGMGVNGIGQTKEHSQLVRSFGVENLIVAVNKMDGVEYSKERFQSVKSQLGVFLRSCGYKDSSVTWVPLSAMANENLVTACSDTRLLSWYNGGCLLQAIDSLPPPRRDVSSPLRLPICDVIASHTLGQVAVCGKVESGGIRTGCKVLVMPSGDIATVKTMERDSSTCSLARAGDNVAVGLHGVDPGHIAAGGVLCHPDFPVRVACHLELKILVLEITVPILVGLEFELHIRHAKSSARLVRILSSLDQKTGRALKKAPRLLTARQAALVEVRLDREACVEEFSTLKALARVFLRSQGSTVAVGVVTRVLDRALDMG

SEQ ID NO: 166247 - protein, 514 aa, Zea Mays
MSDFEEPFKISGMWQCSICTHENTTYSSSCELCGVLHDLSLYFNDISEDEDGAKCRHKYSGVSILARSLFTPPSAKSKAIVFSHDFKDRRNTTGNKQATMDALHKTFMTRKKRHINIVPFKFDTPSPDDMVTTGLKSSRNFRKVDTEVLVKDSVGVTGKEMMNNDILLTEKNTSMDPSALVQLDDGGTSSNVPSSSQNITLALDHELQHLSLESKLKNSKTNVKKTASVSHYKPEPWMLQSENQEIRNQLSLAIVGHVDSGKSTLCGRLRHALGLISKKQMHKYEKEAKEKGKGSFAYAWAMDESSDERERGITMTVAVAYFNSEKYRVVLLDSPGHKDFVPNMISGATQADAAILVVDASIGSFEAGMGVNGIGQTKEHSQLVRSFGVENLIVAVNKMDGVEYSKERFQSVKSQLGVFLRSCGYKDSSVTWVPLSAMANENLVTACSDTRLLSWYNGGCLLQAIDSLPPPRRDVSSPLRLPICDVIASHTLGQVAVCGKVESGGIRTGCKVPF

SEQ ID NO: 166248 - protein, 664 aa, Zea Mays
MFVPVLDNMSDFEEPFKISGMWQCSICTHENTTYSSSCELCGVLHDLSLYFNDISEDEDGAKCRHKYSGVSILARSLFTPPSAKSKAIVFSHDFKDRRNTTGNKQATMDALHKTFMTRKKRHINIVDTEVLVKDSVGVTGKEMMNNDILLTEKNTSMDPSALVQLDDGGTSSNVPSSSQNITLALDHELQHLSLESKLKNSKTNVKKTASVSHYKPEPWMLQSENQEIRNQLSLAIVGHVDSGKSTLCGRLRHALGLISKKQMHKYEKEAKEKGKGSFAYAWAMDESSDERERGITMTVAVAYFNSEKYRVVLLDSPGHKDFVPNMISGATQADAAILVVDASIGSFEAGMGVNGIGQTKEHSQLVRSFGVENLIVAVNKMDGVEYSKERFQSVKSQLGVFLRSCGYKDSSVTWVPLSAMANENLVTACSDTRLLSWYNGGCLLQAIDSLPPPRRDVSSPLRLPICDVIASHTLGQVAVCGKVESGGIRTGCKVLVMPSGDIATVKTMERDSSTCSLARAGDNVAVGLHGVDPGHIAAGGVLCHPDFPVRVACHLELKILVLEITVPILVGLEFELHIRHAKSSARLVRILSSLDQKTGRALKKAPRLLTARQAALVEVRLDREACVEEFSTLKALARVFLRSQGSTVAVGVVTRVLDRALDMG

SEQ ID NO: 166249 - protein, 597 aa, Zea Mays
MSDFEEPFKISGMWQCSICTHENTTYSSSCELCGVLHDLSLYFNDISEDEDGAKCRHKYSGVSILARSLFTPPSAKSKAIVFSHDFKDRRNTTGNKQATMDALHKTFMTRKKRHINIVPFKFDTPSPDDMVTTGLKSSRNFRKVDTEVLVKDSVGVTGKEMMNNDILLTEKNTSMDPSALVQLDDGGTSSNVPSSSQNITLALDHELQHLSLESKLKNSKTNVKKTASVSHYKPEPWMLQSENQEIRNQLSLAIVGHVDSGKSTLCGRLRHALGLISKKQMHKYEKEAKEKGKGSFAYAWAMDESSDERERGITMTVAVAYFNSEKYRVVLLDSPGHKDFVPNMISGATQADAAILVVDASIGSFEAGMGVNGIGQTKEHSQLVRSFGVENLIVAVNKMDGVEYSKERFQSVKSQLGVFLRSCGYKDSSVTWVPLSAMANENLVTACSDTRLLSWYNGGCLLQAIDSLPPPRRDVSSPLRLPICDVIASHTLGQVAVCGKVESGGIRTGCKVLVMPSGDIATVKTMERDSSTCSLARAGDNVAVGLHGVDPGHIAAGGVLCHPDFPVRVACHLELKILVLEITVPILVGLEKPLFPV

SEQ ID NO: 166250 - protein, 715 aa, Zea Mays
MEKSKLKKVREYRLGKCYHNKTGEEFVAHSSNVNCLKIGRKTSRVLVTGGEDHKVNLWAIGKPNSILSLSGHTSAVESVGFDSTEVFVAAGAASGTIKLWDLEEAKIVRTLTGHRSNCMSVDFHPFGEFFASGSLDTNLKIWDIRRKNCIHTYKGHTRGVNTIRFTPDGRWVVSGGEDNIVKLWDLTAGKLLHEFKCHEGQIQCIDFHPHEFLLATGSADKTVKFWDLETFELIGSTGPETTGVRSMTFNPDGRSLLCGLHESLKVFSWEPIRCHDTVDVGWSRLADLNVHEGKLLGCSFNQSCVGIWVVDLTRLEPYTMGTSTKVNGHSELKTVSSGTLPLQNDSGSRANIGRSSVLQNTENNLKTTSGRLSASQNSDSAPKETNSAPSSGLIPSTPHRAGVGSHNRSVGNSAFQSGGTTLKRSSLRNNSASNVHNFSKADVVPVIVPRTSSGGELATDSRSDAADVAPVLPKVTRRVEPATDSRKESNDVELVVPRASSRMEIADLAPISSSKSGRRLESAPDSKEESADTAPVVVSNPRANVRMEIVSDSAPALSKSNRKLDSGTNSKKESADAVIVPRTNSRMEMISDSRREPSAGRISPFRIQSRYAEPRKLAHARTDSNKVDSRSKITETEDFNCQIFLPRRNSVFQTISSEEPREDVKCGPVDRMFLECANQETTAISKFQEQVCFFGTVYRFMGGATVLISVICSWI

SEQ ID NO: 166251 - protein, 714 aa, Zea Mays
MEKSKLKKVREYRLGKCYHNKTGEEFVAHSSNVNCLKIGRKTSRVLVTGGEDHKVNLWAIGKPNSILSLSGHTSAVESVGFDSTEVFVAAGAASGTIKLWDLEEAKIVRTLTGHRSNCMSVDFHPFGEFFASGSLDTNLKIWDIRRKNCIHTYKGHTRGVNTIRFTPDGRWVVSGGEDNIVKLWDLTAGKLLHEFKCHEGQIQCIDFHPHEFLLATGSADKTVKFWDLETFELIGSTGPETTGVRSMTFNPDGRSLLCGLHESLKVFSWEPIRCHDTVDVGWSRLADLNVHEGKLLGCSFNQSCVGIWVVDLTRLEPYTMGTSTKVNGHSELKTVSSGTLPLQNDSGSRANIGRSSVLQNTENNLKTTSGRLSASQNSDSAPKETNSAPSSGLIPSTPHRAGVGSHNRSVGNSAFQSGGTTLKRSSLRNNSASNVHNFSKADVVPVIVPRTSSGGELATDSRSDAADVAPVLPKVTRRVEPATDSRKESNDVELVVPRASSRMEIADLAPISSSKSGRRLESAPDSKEESADTAPVVVSNPRANVRMEIVSDSAPALSKSNRKLDSGTNSKKESADAVIVPRTNSRMEMISDSRREPSAGRISPFRIQSRYAEPRKLAHARTDSNKVDSRSKITETEDFNCQIFLPRRNSVFQTISSEEPREDVKCGPVDRVGFSNSSEPNASVRNENYVPRMRKPGDNCYIEVSRAERKQSSF

SEQ ID NO: 166252 - protein, 865 aa, Zea Mays
MTTNTKRAYKLQEFVAHSSNVNCLKIGRKTSRVLVTGGEDHKVNLWAIGKPNSILSLSGHTSAVESVGFDSTEVFVAAGAASGTIKLWDLEEAKIVRTLTGHRSNCMSVDFHPFGEFFASGSLDTNLKIWDIRRKNCIHTYKGHTRGVNTIRFTPDGRWVVSGGEDNIVKLWDLTAGKLLHEFKCHEGQIQCIDFHPHEFLLATGSADKTVKFWDLETFELIGSTGPETTGVRSMTFNPDGRSLLCGLHESLKVFSWEPIRCHDTVDVGWSRLADLNVHEGKLLGCSFNQSCVGIWVVDLTRLEPYTMGTSTKVNGHSELKTVSSGTLPLQNDSGSRANIGRSSVLQNTENNLKTTSGRLSASQNSDSAPKETNSAPSSGLIPSTPHRAGVGSHNRSVGNSAFQSGGTTLKRSSLRNNSASNVHNFSKADVVPVIVPRTSSGGELATDSRSDAADVAPVLPKVTRRVEPATDSRKESNDVELVVPRASSRMEIADLAPISSSKSGRRLESAPDSKEESADTAPVVVSNPRANVRMEIVSDSAPALSKSNRKLDSGTNSKKESADAVIVPRTNSRMEMISDSRREPSAGRISPFRIQSRYAEPRKLAHARTDSNKVDSRSKITETEDFNCQIFLPRRNSVFQTISSEEPREDVKCGPVDRMFLECANQETTAISKFQEQRGSNQASEAPIIASDEDVLSLIMERHDLFLSSTKSRLMKLQIIHQMWERNDIRGVLSAMDRMGDHAVCADMASVLMEKSETITLDLCTSILPVVTDLLESKIDRHLVVALELLVKLVRTFGPMIHSTVSSGPCVGVDLEAEQRRERCNLCFIELEKAKNKLPSLTRRKGAVANAAQELALVFQEIMS

SEQ ID NO: 166253 - protein, 686 aa, Zea Mays
MTFNPDGRSLLCGLHESLKVFSWEPIRCHDTVDVGWSRLADLNVHEGKLLGCSFNQSCVGIWVVDLTRLEPYTMGTSTKVNGHSELKTVSSGTLPLQNDSGSRANIGRSSVLQNTENNLKTTSGRLSASQNSDSAPKETNSAPSSGLIPSTPHRAGVGSHNRSVGNSAFQSGGTTLKRSSLRNNSASNVHNFSKADVVPVIVPRTSSGGELATDSRSDAADVAPVLPKVTRRVEPATDSRKESNDVELVVPRASSRMEIADLAPISSSKSGRRLESAPDSKEESADTAPVVVSNPRANVRMEIVSDSAPALSKSNRKLDSGTNSKKESADAVIVPRTNSRMEMISDSRREPSAGRISPFRIQSRYAEPRKLAHARTDSNKVDSRSKITETEDFNCQIFLPRRNSVFQTISSEEPREDVKCGPVDRVGFSNSSEPNASVRNENYVPRMRKPGDNCYIEVSRAGRARSSVSNWEGRDQPPSHEEPTTSSSTLAPTGHPYSSRGSNQASEAPIIASDEDVLSLIMERHDLFLSSTKSRLMKLQIIHQMWERNDIRGVLSAMDRMGDHAVCADMASVLMEKSETITLDLCTSILPVVTDLLESKIDRHLVVALELLVKLVRTFGPMIHSTVSSGPCVGVDLEAEQRRERCNLCFIELEKAKNKLPSLTRRKGAVANAAQELALVFQEIMS

SEQ ID NO: 166254 - protein, 631 aa, Zea Mays
MTFNPDGRSLLCGLHESLKVFSWEPIRCHDTVDVGWSRLADLNVHEGKLLGCSFNQSCVGIWVVDLTRLEPYTMGTSTKVNGHSELKTVSSGTLPLQNDSGSRANIGRSSVLQNTENNLKTTSGRLSASQNSDSAPKETNSAPSSGLIPSTPHRAGVGSHNRSVGNSAFQSGGTTLKRSSLRNNSASNVHNFSKADVVPVIVPRTSSGGELATDSRSDAADVAPVLPKVTRRVEPATDSRKESNDVELVVPRASSRMEIADLAPISSSKSGRRLESAPDSKEESADTAPVVVSNPRANVRMEIVSDSAPALSKSNRKLDSGTNSKKESADAVIVPRTNSRMEMISDSRREPSAGRISPFRIQSRYAEPRKLAHARTDSNKVDSRSKITETEDFNCQIFLPRRNSVFQTISSEEPREDVKCGPVDRMFLECANQETTAISKFQEQRGSNQASEAPIIASDEDVLSLIMERHDLFLSSTKSRLMKLQIIHQMWERNDIRGVLSAMDRMGDHAVCADMASVLMEKSETITLDLCTSILPVVTDLLESKIDRHLVVALELLVKLVRTFGPMIHSTVSSGPCVGVDLEAEQRRERCNLCFIELEKAKNKLPSLTRRKGAVANAAQELALVFQEIMS

SEQ ID NO: 166255 - protein, 340 aa, Zea Mays
MKPSHLNFCCEHMITTCYVIYHVTYESSMLSTLLPTRIYCLPRLQLHKNFLLYSWLAKCNSVNLTLHFHLVENQEGVVNFDEILRETDAFMVARGDLGMEIPVEKIFLAQKMMIYKCNIAGKPVVTATQMLESMIKSPRPTRAEATDVANAVLDGTDCVMLSGESAAGAYPEVAVKIMARICIEAESSLDHEAVFKAMIRSAPLPMSPLESLASSAVRTANKAKAALIVVLTRGGTTAKLVAKYRPRVPILSVVVPVLTTDSFDWTISSEGPARHSLIYRGLIPLLAEGSAKATDSESTEVILEAALKSAVQKQLCKPGDAIVALHRIGVASVIKICIVK

SEQ ID NO: 166256 - protein, 346 aa, Zea Mays
MCENTAMLGERKNCNLPGIVVDLPTLTEKDKEDILGWGVPNDIDMIALSFVRKGSDLVTVRQVLGQHAKRIKLMSKVENQEGVVNFDEILRETDAFMVARGDLGMEIPVEKIFLAQKMMIYKCNIAGKPVVTATQMLESMIKSPRPTRAEATDVANAVLDGTDCVMLSGESAAGAYPEVAVKIMARICIEAESSLDHEAVFKAMIRSAPLPMSPLESLASSAVRTANKAKAALIVVLTRGGTTAKLVAKYRPRVPILSVVVPVLTTDSFDWTISSEGPARHSLIYRGLIPLLAEGSAKATDSESTEVILEAALKSAVQKQLCKPGDAIVALHRIGVASVIKICIVK

SEQ ID NO: 166257 - protein, 250 aa, Zea Mays
MVARGDLGMEIPVEKIFLAQKMMIYKCNIAGKPVVTATQMLESMIKSPRPTRAEATDVANAVLDGTDCVMLSGESAAGAYPEVAVKIMARICIEAESSLDHEAVFKAMIRSAPLPMSPLESLASSAVRTANKAKAALIVVLTRGGTTAKLVAKYRPRVPILSVVVPVLTTDSFDWTISSEGPARHSLIYRGLIPLLAEGSAKATDSESTEVILEAALKSAVQKQLCKPGDAIVALHRIGVASVIKICIVK

SEQ ID NO: 166258 - protein, 564 aa, Zea Mays
MDHNSMQFEALPESWNDISEMVQLQALDRSFLFPGEQVPILACLSASKQDVQVISPFRIAAVMSKNGTSMQNFTNKSSPVSANGHDNGAAGESGYQDVEPNGEASPSGHDILETQSLLQMEDHKQQIEHVLRRFRESNFFVRIAESVEPLWSKKSVTSTTMADERSDNQGNSKSSRSNVYNTISDKGVFDGNTSGGVARDVVKCYSLQNGDIVVVLQVNVSVNKLEDPVLEVLQFEKTSSVQTPNNIRPPPISESQEFMPEKPAKTPDIINDGQLSFRGVPLEPERYSNIAPTHAKDIVVFIDAITIVFEEASKGGAPLSLPIASIEVGHGHSLPNLALRRGEEHSFILKPATMSSRERKTNSHAPLALSLPTMTGATLNTHTPKAGEPYADLSDQYAVLILTLEATNMTSENLTLTVLAPEASGSSSVVSLNSSPTTPNGSFDGVNESSKRSGLGKDGIGFRRLNSVLATPKEGDNGGNRMSNASGCTHLWLQSAVPLGCVPARSSTTVKLELLPLSDGIITLDTLQITAREKGLAYIPEHSLEIHATSVLEAESQIMARIER

SEQ ID NO: 166259 - protein, 544 aa, Zea Mays
MVQLQALDRSFLFPGEQVPILACLSASKQDVQVISPFRIAAVMSKNGTSMQNFTNKSSPVSANGHDNGAAGESGYQDVEPNGEASPSGHDILETQSLLQMEDHKQQIEHVLRRFRESNFFVRIAESVEPLWSKKSVTSTTMADERSDNQGNSKSSRSNVYNTISDKGVFDGNTSGGVARDVVKCYSLQNGDIVVVLQVNVSVNKLEDPVLEVLQFEKTSSVQTPNNIRPPPISESQEFMPEKPAKTPDIINDGQLSFRGVPLEPERYSNIAPTHAKDIVVFIDAITIVFEEASKGGAPLSLPIASIEVGHGHSLPNLALRRGEEHSFILKPATMSSRERKTNSHAPLALSLPTMTGATLNTHTPKAGEPYADLSDQYAVLILTLEATNMTSENLTLTVLAPEASGSSSVVSLNSSPTTPNGSFDGVNESSKRSGLGKDGIGFRRLNSVLATPKEGDNGGNRMSNASGCTHLWLQSAVPLGCVPARSSTTVKLELLPLSDGIITLDTLQITAREKGLAYIPEHSLEIHATSVLEAESQIMARIER

SEQ ID NO: 166260 - protein, 286 aa, Zea Mays
MANANGSSTGAGHSDLVRAISHEQHQAFMASVPRAAPGGVNVHHQQHFHQYPAGLIPAPVALPVHAPVSSQTSPYSAQIAVPPPPPPLIASPDHRLHSLPPTGCYQLDYSPYGNAAAPSQQHTSAIRGFADWGTHSNALMSLAHATSFGNNGSSNINNNGLLHQNLSPYTTHTWTTTYVQRPYNTAVYAPATMNMLQTPPFHSNSHEKESGAVFSNSFNMAPSVTPTSPFQLMSPSSTNYTSTQIFEETNNLEDTSRVFGGGDNESNNSEEPDPKPAVEMEDLNQG

SEQ ID NO: 166261 - protein, 357 aa, Zea Mays
MANANGSSTGAGHSDLVRAISHEQHQAFMASVPRAAPGGVNVHHQQHFHQYPAGLIPAPVALPVHAPVSSQTSPYSAQIAVPPPPPPLIASPDHRLHSLPPTGCYQLDYSPYGNAAAPSQQHTSAIRGFADWGTHSNALMSLAHATSFGNNGSSNINNNGLLHQNLSPYTTHTWTTTYVQRPYNTAVYAPATMNMLQTPPFHSNSHEKESGAVFSNSFNMAPSVTPTSPFQLMSPSSTNYTSTQIFEETNNLEDTSRVFGGGDNESNNSEEPDPKPAVEMEDLNQGNDHTSNKTANCQDYRMVLRKDLTNSDVGNIGRIVLPKKDAEPNLPILEDKDGLILEMDDFELPVVWNFKYR

SEQ ID NO: 166262 - protein, 438 aa, Zea Mays
MVMPTVASAAAAALHPAISTRRAGVVGNGIASAAAAGGRLAGGGRGAVVRARVAEAAPVAAEGGRLEAPPAAPMVEIPVTCYQMLGVTEKAEKDEIVKAAMELKNAGIEDGYTAEVSTFRQALLVDVRDKLLFEQDYAGNIKEKVPPRSSLHIPWSWLPAALCILQEVGEEKLVLEIGQAALRRPDSKPYVHDVLLAMALAECSIAKASFEKSKVSLGFEALARAQYLLRRKPSLEKMPILEQIEESLEELAPACTLELLSLPQTLENSERRRGAIAALCELLRQGLDVESSCRVHDWPCFLGQAMDKLLANEIVDLLTWDTLATTRKNKRSLESQSQRVVVDFNCFYMAMLAHLAFGFTTRQTELIKKAKTICECLVASESTDLKFEESFCSYLLGEYLKSFSSFKVLEVQIQRTMDWIKRKTAVARLLSTNHWNCG

SEQ ID NO: 166263 - protein, 375 aa, Zea Mays
MVMPTVASAAAAALHPAISTRRAGVVGNGIASAAAAGGRLAGGGRGAVVRARVAEAAPVAAEGGRLEAPPAAPMVEIPVTCYQMLGVTEKAEKDEIVKAAMELKNAGIEDGYTAEVSTFRQALLVDVRDKLLFEQDYAGNIKEKVPPRSSLHIPWSWLPAALCILQEVGEEKLVLEIGQAALRRPDSKPYVHDVLLAMALAECSIAKASFEKSKVSLGFEALARAQYLLRRKPSLEKMPILEQIEESLEELAPACTLELLSLPQTLENSERRRGAIAALCELLRQGLDVESSCRVHDWPCFLGQAMDKLLANEIVDLLTWDTLATTRKNKRSLESQSQRVVVDFNCFYMAMLAHLAFGFTTRQTESRKLKPSVNV

SEQ ID NO: 166264 - protein, 448 aa, Zea Mays
MVMPTVASAAAAALHPAISTRRAGVVGNGIASAAAAGGRLAGGGRGAVVRARVAEAAPVAAEGGRLEAPPAAPMVEIPVTCYQMLGVTEKAEKDEIVKAAMELKNAGIEDGYTAEVSTFRQALLVDVRDKLLFEQDYAGNIKEKVPPRSSLHIPWSWLPAALCILQEVGEEKLVLEIGQAALRRPDSKPYVHDVLLAMALAECSIAKASFEKSKVSLGFEALARAQYLLRRKPSLEKMPILEQIEESLEELAPACTLELLSLPQTLENSERRRGAIAALCELLRQGLDVESSCRVHDWPCFLGQAMDKLLANEIVDLLTWDTLATTRKNKRSLESQSQRVVVDFNCFYMAMLAHLAFGFTTRQTELIKKAKTICECLVASESTDLKFEESFCSYLLGEETGTTVFEKLQQLQSTGSSNSKNYGLDKKKDSSGKVTVNQSLIQKIVRHL

SEQ ID NO: 166265 - protein, 713 aa, Zea Mays
MAPPALDSLPAPLRSLRLKTKQQELLLRVSALALIYVLAFAVRLFSVLRYESMIHEFDPYFNYRTTLFLTENGFSEFWNWFDFESWYPLGRVVGGTLYPGLMVTAALLHRLLRALYLTVHIREVCVLTAPFFAANTTLVAYAFGREIWDSGAGLVAAALIAIVPGYISRSVAGSYDNEGVAIFALLLTFYLFVRAVNTGSLAWALASAFGYFYMVSAWGGYVFIINLVPLYVLVLLVTGRYSQRLYVAYNCMYVLGMLLAMQIRFVGFQHVQSGEHMAAMGVFFLLQVFFFLDWVKYLLNDARLFKSFLRITLTCVITIGTLALGLGTASGYISPWTGRFYSLLDPTYAKDHIPIIASVSEHQPTAWSSFMFDFHILLFLFPAGLYFCFKRLSDATIFIVMYGLTTMYFAGVMVRLILVAAPAVCLISAIAASATIKNLTTLIRTKSKSPQTTGKTTGSKAGAKGAVDQSLPFQHNAAIALLLGAFYLLSRYAIHCTWVTSEAYSSPSIVLAARGHNGGRVIFDDYREAYYWLRQNTPPDAKIMSWWDYGYQITAMGNRTVIVDNNTWNNTHIATVGRAMSSYEDEAYEIMQSLDVNYVLVVFGGVTGYSSDDINKFLWMVRIGGGVFPVIKEPDYLVNGEYRIDKGAAPKMLNCLMYKLCYYRFGELTTEYGKPPGYDRVRGVEIGNKDIKLEYLEEAFTTSNWIVRIYKAQ

SEQ ID NO: 166266 - protein, 413 aa, Zea Mays
MCAFSGRLRTLVKQEKKKKKGGGRKEAVSINLAGGFPGGADGFELVARFCYNDGRVLLCTSNLPLLHCAAVSLEMTEEVCACNLLAQAEAFVNGLYYWTWGDVLAAVRSCEPFAAAADASGLLDRLISALFSKITGATPGPGPGTPNRSSSSCSSSPDTAGLRRSSSSANKTPDSMRPCAGREWWFDDMTSLSPPTVEKVMRVLGCYGVENKNLILTRFLLHYLRAATRRPPALEREGAALAGLAETAVHGVALVGGTAFSCRGLFWVLRIVSAVGLSRECRHKLERLMGLMLDQATLDDLLVSGDDGGGVYDVNLVMRLVRVFVASEEEADAPSERMRKVGRLVDKYLGEISPDQGLKVSKFLAVAESLPDSARDCYDGVYRALDIYLEFPSHTQAFPCASIWSESDTPKAF

SEQ ID NO: 166267 - protein, 678 aa, Zea Mays
MSTAPARRARPPLPLQNGAEGDDEREEEVDEEEVGDDEAEEEEDDDDEEEPRLKYQRLGGSVPAILSTDAAAAIAVADRMVALGTHNGTLHILDFQGNQVKEIAAHTATINDISFDADGEYIGSCSDDGTVAINSLFTDEKLKFEYHRPMKAIALDPNYARNYRRFATGGLAGQVLVLTKKSWGGYHKKVLRDGEGPIHSMKWRADLLAWANDAGVKVHDMRTDKGIAFIERPKGIHRPEFLLPHLVWQDDTVLVVGWGTSVKIAAIRTDLSQGLNGLQRTITTASSEKYVDIVGSFQTGYHISGVAPFGDLLVVLAYIPDEDEKEKTFSTSVTSRQGTAQRPEIHLVSWKNDELTTDALPIHGYEHYKAKDYALAHAPFSGSSNAGGQWAAGDEPLYYIVSPKDIVVAKPRDAEDHIAWLLQHGCHEKALAAVEAGQGRTELLDEVGSRYLDHLIIERKYAEAAQRCPKLLRGSPSAWERWVFHFAHLRQLPVLVPYIPTENPQLSDTAYEVALVALTTNPSFHELLLTTIKNWPPTLYSASPVISAIEPQLNSSSMADSLKESLAELYVINGQYEKALSLYAELLKPEVFEFIEKYNLHDAIHDKIVNLMIVDNKRTVHLLIQHRDIIPPYEVVEQLLHTSKKCDKRYLLHLYLHALFEIDIHAGKDFHDMQSKLF

SEQ ID NO: 166268 - protein, 790 aa, Zea Mays
MSTAPARRARPPLPLQNGAEGDDEREEEVDEEEVGDDEAEEEEDDDDEEEPRLKYQRLGGSVPAILSTDAAAAIAVADRMVALGTHNGTLHILDFQGNQVKEIAAHTATINDISFDADGEYIGSCSDDGTVAINSLFTDEKLKFEYHRPMKAIALDPNYARNYRRFATGGLAGQVLVLTKKSWGGYHKKVLRDGEGPIHSMKWRADLLAWANDAGVKVHDMRTDKGIAFIERPKGIHRPEFLLPHLVWQDDTVLVVGWGTSVKIAAIRTDLSQGLNGLQRTITTASSEKYVDIVGSFQTGYHISGVAPFGDLLVVLAYIPDEDEKEKTFSTSVTSRQGTAQRPEIHLVSWKNDELTTDALPIHGYEHYKAKDYALAHAPFSGSSNAGGQWAAGDEPLYYIVSPKDIVVAKPRDAEDHIAWLLQHGCHEKALAAVEAGQGRTELLDEVGSRYLDHLIIERKYAEAAQRCPKLLRGSPSAWERWVFHFAHLRQLPVLVPYIPTENPQLSDTAYEVALVALTTNPSFHELLLTTIKNWPPTLYSASPVISAIEPQLNSSSMADSLKESLAELYVINGQYEKALSLYAELLKPEVFEFIEKYNLHDAIHDKIVNLMIVDNKRTVHLLIQHRDIIPPYEVVEQLLHTSKKCDKRYLLHLYLHALFEIDIHAGKDFHDMQVELYADYETRMLLPFLRTSQHYRLDKAYEIFAQKELVREQVFVLGRMGNAKEALSTIINKLEDMQEAVEFVTEQHDDELWEELIRQCLQKPEMGIYWNIQLAILILCTLSVWFLMA

SEQ ID NO: 166269 - protein, 397 aa, Zea Mays
MADSLKESLAELYVINGQYEKALSLYAELLKPEVFEFIEKYNLHDAIHDKIVNLMIVDNKRTVHLLIQHRDIIPPYEVVEQLLHTSKKCDKRYLLHLYLHALFEIDIHAGKDFHDMQVELYADYETRMLLPFLRTSQHYRLDKAYEIFAQKELVREQVFVLGRMGNAKEALSTIINKLEDMQEAVEFVTEQHDDELWEELIRQCLQKPEMVGNLLEHTVGNLDPLYIVSLVPDGLEIPRLRDRLVKIVTDYRTETSLRNGCNDILKADCVNLLVKYYHEARRGVYMVSMDEEVHGNRADDGSSRGHERSSSVRALDIKSRTRCGARCCLCFDPLPIQDISVIVFYCCHAYHLSCLEGGLDSMRSNSGQDSDGGMDDEDGSPSGQSRMRCVLCTTAAS

SEQ ID NO: 166270 - protein, 507 aa, Zea Mays
MLKIILLGFFNMVAMKKHWLQLRQGKDALSFLMRWVFHFAHLRQLPVLVPYIPTENPQLSDTAYEVALVALTTNPSFHELLLTTIKNWPPTLYSASPVISAIEPQLNSSSMADSLKESLAELYVINGQYEKALSLYAELLKPEVFEFIEKYNLHDAIHDKIVNLMIVDNKRTVHLLIQHRDIIPPYEVVEQLLHTSKKCDKRYLLHLYLHALFEIDIHAGKDFHDMQVELYADYETRMLLPFLRTSQHYRLDKAYEIFAQKELVREQVFVLGRMGNAKEALSTIINKLEDMQEAVEFVTEQHDDELWEELIRQCLQKPEMVGNLLEHTVGNLDPLYIVSLVPDGLEIPRLRDRLVKIVTDYRTETSLRNGCNDILKADCVNLLVKYYHEARRGVYMVSMDEEVHGNRADDGSSRGHERSSSVRALDIKSRTRCGARCCLCFDPLPIQDISVIVFYCCHAYHLSCLEGGLDSMRSNSGQDSDGGMDDEDGSPSGQSRMRCVLCTTAAS

SEQ ID NO: 166271 - protein, 941 aa, Zea Mays
MSTAPARRARPPLPLQNGAEGDDEREEEVDEEEVGDDEAEEEEDDDDEEEPRLKYQRLGGSVPAILSTDAAAAIAVADRMVALGTHNGTLHILDFQGNQVKEIAAHTATINDISFDADGEYIGSCSDDGTVAINSLFTDEKLKFEYHRPMKAIALDPNYARNYRRFATGGLAGQVLVLTKKSWGGYHKKVLRDGEGPIHSMKWRADLLAWANDAGVKVHDMRTDKGIAFIERPKGIHRPEFLLPHLVWQDDTVLVVGWGTSVKIAAIRTDLSQGLNGLQRTITTASSEKYVDIVGSFQTGYHISGVAPFGDLLVVLAYIPDEDEKEKTFSTSVTSRQGTAQRPEIHLVSWKNDELTTDALPIHGYEHYKAKDYALAHAPFSGSSNAGGQWAAGDEPLYYIVSPKDIVVAKPRDAEDHIAWLLQHGCHEKALAAVEAGQGRTELLDEVGSRYLDHLIIERKYAEAAQRCPKLLRGSPSAWERWVFHFAHLRQLPVLVPYIPTENPQLSDTAYEVALVALTTNPSFHELLLTTIKNWPPTLYSASPVISAIEPQLNSSSMADSLKESLAELYVINGQYEKALSLYAELLKPEVFEFIEKYNLHDAIHDKIVNLMIVDNKRTVHLLIQHRDIIPPYEVVEQLLHTSKKCDKRYLLHLYLHALFEIDIHAGKDFHDMQVELYADYETRMLLPFLRTSQHYRLDKAYEIFAQKELVREQVFVLGRMGNAKEALSTIINKLEDMQEAVEFVTEQHDDELWEELIRQCLQKPEMVGNLLEHTVGNLDPLYIVSLVPDGLEIPRLRDRLVKIVTDYRTETSLRNGCNDILKARRGVYMVSMDEEVHGNRADDGSSRGHERSSSVRALDIKSRTRCGARCCLCFDPLPIQDISVIVFYCCHAYHLSCLEGGLDSMRSNSGQDSDGGMDDEDGSPSGQSRMRCVLCTTAAS

SEQ ID NO: 166272 - protein, 702 aa, Zea Mays
MSTAPARRARPPLPLQNGAEGDDEREEEVDEEEVGDDEAEEEEDDDDEEEPRLKYQRLGGSVPAILSTDAAAAIAVADRMVALGTHNGTLHILDFQGNQVKEIAAHTATINDISFDADGEYIGSCSDDGTVAINSLFTDEKLKFEYHRPMKAIALDPNYARNYRRFATGGLAGQVLVLTKKSWGGYHKKVLRDGEGPIHSMKWRADLLAWANDAGVKVHDMRTDKGIAFIERPKGIHRPEFLLPHLVWQDDTVLVVGWGTSVKIAAIRTDLSQGLNGLQRTITTASSEKYVDIVGSFQTGYHISGVAPFGDLLVVLAYIPDEDEKEKTFSTSVTSRQGTAQRPEIHLVSWKNDELTTDALPIHGYEHYKAKDYALAHAPFSGSSNAGGQWAAGDEPLYYIVSPKDIVVAKPRDAEDHIAWLLQHGCHEKALAAVEAGQGRTELLDEVGSRYLDHLIIERKYAEAAQRCPKLLRGSPSAWERWVFHFAHLRQLPVLVPYIPTENPQLSDTAYEVALVALTTNPSFHELLLTTIKNWPPTLYSASPVISAIEPQLNSSSMADSLKESLAELYVINGQYEKALSLYAELLKPEVFEFIEKYNLHDAIHDKIVNLMIVDNKRTVHLLIQHRDIIPPYEVVEQLLHTSKKCDKRYLLHLYLHALFEIDIHAGKDFHDMQVELYADYETRMLLPFLRTSQHYRLDKNL

SEQ ID NO: 166273 - protein, 810 aa, Zea Mays
MSTAPARRARPPLPLQNGAEGDDEREEEVDEEEVGDDEAEEEEDDDDEEEPRLKYQRLGGSVPAILSTDAAAAIAVADRMVALGTHNGTLHILDFQGNQVKEIAAHTATINDISFDADGEYIGSCSDDGTVAINSLFTDEKLKFEYHRPMKAIALDPNYARNYRRFATGGLAGQVLVLTKKSWGGYHKKVLRDGEGPIHSMKWRADLLAWANDAGVKVHDMRTDKGIAFIERPKGIHRPEFLLPHLVWQDDTVLVVGWGTSVKIAAIRTDLSQGLNGLQRTITTASSEKYVDIVGSFQTGYHISGVAPFGDLLVVLAYIPDEDEKEKTFSTSVTSRQGTAQRPEIHLVSWKNDELTTDALPIHGYEHYKAKDYALAHAPFSGSSNAGGQWAAGDEPLYYIVSPKDIVVAKPRDAEDHIAWLLQHGCHEKALAAVEAGQGRTELLDEVGSRYLDHLIIERKYAEAAQRCPKLLRGSPSAWERWVFHFAHLRQLPVLVPYIPTENPQLSDTAYEVALVALTTNPSFHELLLTTIKNWPPTLYSASPVISAIEPQLNSSSMADSLKESLAELYVINGQYEKALSLYAELLKPEVFEFIEKYNLHDAIHDKIVNLMIVDNKRTVHLLIQHRDIIPPYEVVEQLLHTSKKCDKRYLLHLYLHALFEIDIHAGKDFHDMQVELYADYETRMLLPFLRTSQHYRLDKAYEIFAQKELVREQVFVLGRMGNAKEALSTIINKLEDMQEAVEFVTEQHDDELWEELIRQCLQKPEMVGNLLEHTVGNLDPLYIVSLVPDGLEIPRLLGSMLVVVCIWCT

SEQ ID NO: 166274 - protein, 239 aa, Zea Mays
MAMAMPMAVARVTSLACAPRQAQHRRRHSLAPPCASGAVEVRVCTNRTCARQGGREVLAALAGLAPPAVDVASCGCLGRCGAGPNVAASVPGSAAVFGHVGTAARGAQLLEHLLGPAEFDAALGLTALATREKAEAALEKGNADEAEALLTEVIGFNACGGLHLVYMSRSKARLEIGDIPGALGDAEEAIRIAPRFPQVKVIMLTHFASHWSGIDCCHSLEDPTVHMNVGHCCFSHLNG

SEQ ID NO: 166275 - protein, 278 aa, Zea Mays
MAMAMPMAVARVTSLACAPRQAQHRRRHSLAPPCASGAVEVRVCTNRTCARQGGREVLAALAGLAPPAVDVASCGCLGRCGAGPNVAASVPGSAAVFGHVGTAARGAQLLEHLLGPAEFDAALGLTALATREKAEAALEKGNADEAEALLTEVIGFNACGGLHLVYMSRSKARLEIGDIPGALGDAEEAIRIAPRFPQAHLLRGDALFAMGEYSVAEDAYADALDLDPSIRRSKSFRVKVIMLTHFASHWSGIDCCHSLEDPTVHMNVGHCCFSHLNG

SEQ ID NO: 166276 - protein, 245 aa, Zea Mays
MAMAMPMAVARVTSLACAPRQAQHRRRHSLAPPCASGAVEVRVCTNRTCARQGGREVLAALAGLAPPAVDVASCGCLGRCGAGPNVAASVPGSAAVFGHVGTAARGAQLLEHLLGPAEFDAALGLTALATREKAEAALEKGNADEAEALLTEVIGFNACGGLHLVYMSRSKARLEIGDIPGALGDAEEAIRIAPRFPQVKVIMLTHFASHWSGIDCCHSLEDPTVHMNGFWNFLMITSGLMRTNY

SEQ ID NO: 166277 - protein, 284 aa, Zea Mays
MAMAMPMAVARVTSLACAPRQAQHRRRHSLAPPCASGAVEVRVCTNRTCARQGGREVLAALAGLAPPAVDVASCGCLGRCGAGPNVAASVPGSAAVFGHVGTAARGAQLLEHLLGPAEFDAALGLTALATREKAEAALEKGNADEAEALLTEVIGFNACGGLHLVYMSRSKARLEIGDIPGALGDAEEAIRIAPRFPQAHLLRGDALFAMGEYSVAEDAYADALDLDPSIRRSKSFRVKVIMLTHFASHWSGIDCCHSLEDPTVHMNGFWNFLMITSGLMRTNY

SEQ ID NO: 166278 - protein, 250 aa, Zea Mays
MPPSPPTPAAPKTIADFFARPAKRLRAAPAASLSSNSSPSSLSPEQRRRADTNLALARARRNLRLAESKAQASGGAPKLEELLVEETWAEALRGELRKSYALELCRFVAHERLHGPLPVYPPPHLVFHALNATPFDRVKAVIIGQGVLMLNTVLTVREHQANSHAKKGWEQFTDEVIKTISQKKSGLVFLLWGNSAQSKTRLIDETKHHILKSAHPSGLSANRGFFGCRHFSKTNEILEKLGLSAIDWQL

SEQ ID NO: 166279 - protein, 255 aa, Zea Mays
MAADSSMGFHQGITASLYNHHMLSFQSNSDVGISGDATGAMVMAPGSVGGGSSNAGLFLSANTGVMGNAPGVAPSRTSSGDALLGTGTPKYKYVTGPPSDWSDREVAILKEGLVRYAREPSIMRYIKIAAMLPNRTIRDVALRCWWSTQGKERRKKPDGFYTGKKMRDMKPIQDKMVASVPIANFHMTPTTNVTPFSISMQHPNQQSQVPKEVQPSVSWRKIISCLTRFLQILKHSRQWRTQIFFSARVTTSKQF

SEQ ID NO: 166280 - protein, 291 aa, Zea Mays
MLSFQSNSDVGISGDATGAMVMAPGSVGGGSSNAGLFLSANTGVMGNAPGVAPSRTSSGDALLGTGTPKYKYVTGPPSDWSDREVAILKEGLVRYAREPSIMRYIKIAAMLPNRTIRDVALRCWWSTQGKERRKKPDGFYTGKKMRDMKPIQDKMVASVPIANFHMTPTTNVTPFSISMQHPNQQSQVPKEAPIVDSATQRLLEENNQLLNQISANIKTFKTVENTDLFLRTSNNIKTILSRMSETHGIMGQMPPLPLSINEDHINSLIQLNRLVASYGTTSISHHTKQEP

SEQ ID NO: 166281 - protein, 189 aa, Zea Mays
MRYIKIAAMLPNRTIRDVALRCWWSTGKERRKKPDGFYTGKKMRDMKPIQDKMVASVPIANFHMTPTTNVTPFSISMQHPNQQSQVPKEAPIVDSATQRLLEENNQLLNQISANIKTFKTVENTDLFLRTSNNIKTILSRMSETHGIMGQMPPLPLSINEDHINSLIQLNRLVASYGTTSISHHTKQEP

SEQ ID NO: 166282 - protein, 244 aa, Zea Mays
MASCLSCSCRRFTTPDCTLLPSASAFATSPTSPSVWSCPRLPSPQSVDKAEASGRRQVEGAPIASASRAGSPHRTPTPDTIPFRRRIDFSSSEPAAGADGDPFQPDLDRPTPTPALFGKINKTALQLSARKKWEGFHGSYPYLPRGTRCEKKGVDRGPPAGSRAMDRTANAVLDIEGLPQPPDKCCSGSPKMIRALSRKGSNRMEMKGGDELEQQEDLTRKLIIKAGAAAGHGSLHSLRACPPH

SEQ ID NO: 166283 - protein, 80 aa, Zea Mays
MDRTANAVLDIEGLPQPPDKCCSGSPKMIRALSRKGSNRMEMKGGDELEQQEDLTRKLIIKAGAAAGHGSLHSLRACPPH

SEQ ID NO: 166284 - protein, 512 aa, Zea Mays
MPSSVLSSDSMHIGLLAAAAHAAATNSRFTIFYNPRASPTEFVIPLSKYIKAVFHTRISVGMRFRMLFETEESSVRRYMGTITEVSDADPVRWPSSYWRSVKVGWDESTAGERPPRVSLWEIEPLTTFPMYPSLFPLRVKHPWYSGLAALHDDSNALMWLRGVTGEGGFHSLNFQSPGIGSWGQQRLHPSLLSNDHDQYQAVVAAAAASQSGGYLKQQFLHLQQPMQSPQEQCNLNPLLQQQILQQASQQQMVSSDAQNIQSVLNPGAIQQQLHQLQQMQHTHNDQKQKIQPDQQYQVASSAVLPSPTSLPSHLREKFGFSDPNVNSSSFISSSSNENMLESNFLQNQSLFSPQVDSSSLLYNMVPNLTSNVADNNISAFPSGSTYLQSPMYGCLDDSSGLLQNTGENDPTTRTFVKVYKSGSVGRSLDITRFSNYAELREELGQMFGIKGQLDDPDRSGWQLVFVDRENDVLLLGDDPWESFVNSVWYIKILSPEDVHKMGKPGNDPRYLS

SEQ ID NO: 166285 - protein, 682 aa, Zea Mays
MSSSSAASIGQPPPPAPPPEEEKKCLNSELWHACAGPLVCLPTVGTRVVYFPQGHSEQVAASTNKEVDGHIPNYPNLPPQLICQLHDVTMHADVETDEVYAQMTLQPLNPQEQNDAYLPAEMGIMSKQPTNYFCKTLTASDTSTHGGFSVPRRAAERVFPPLDFTQQPPAQELIARDIHDVEWKFRHIFRGQPKRHLLTTGWSVFVSAKRLVAGDSVLFIWNEKNQLLLGIRHATRPQTVMPSSVLSSDSMHIGLLAAAAHAAATNSRFTIFYNPRASPTEFVIPLSKYIKAVFHTRISVGMRFRMLFETEESSVRRYMGTITEVSDADPVRWPSSYWRSVKVGWDESTAGERPPRVSLWEIEPLTTFPMYPSLFPLRVKHPWYSGLAALHDDSNALMWLRGVTGEGGFHSLNFQSPGIGSWGQQRLHPSLLSNDHDQYQAVVAAAAASQSGGYLKQQFLHLQQPMQSPQEQCNLNPLLQQQILQQASQQQMVSSDAQNIQSVLNPGAIQQQLHQLQQMQHTHNDQKQKIQPDQQYQVASSAVLPSPTSLPSHLREKFGFSDPNVNSSSFISSSSNENMLESNFLQNQSLFSPQVDSSSLLYNMERMIRQLELLLRFTSQDQWGDPWTSPGSLIMLNFERNWVRCSALRVSWTTLIDQAGSLYLSTGRTMCFSLETTRGSHL

SEQ ID NO: 166286 - protein, 728 aa, Zea Mays
MHADVETDEVYAQMTLQPLNPQEQNDAYLPAEMGIMSKQPTNYFCKTLTASDTSTHGGFSVPRRAAERVFPPLDFTQQPPAQELIARDIHDVEWKFRHIFRGQPKRHLLTTGWSVFVSAKRLVAGDSVLFIWNEKNQLLLGIRHATRPQTVMPSSVLSSDSMHIGLLAAAAHAAATNSRFTIFYNPRASPTEFVIPLSKYIKAVFHTRISVGMRFRMLFETEESSVRRYMGTITEVSDADPVRWPSSYWRSVKVGWDESTAGERPPRVSLWEIEPLTTFPMYPSLFPLRVKHPWYSGLAALHDDSNALMWLRGVTGEGGFHSLNFQSPGIGSWGQQRLHPSLLSNDHDQYQAVVAAAAASQSGGYLKQQFLHLQQPMQSPQEQCNLNPLLQQQILQQASQQQMVSSDAQNIQSVLNPGAIQQQLHQLQQMQHTHNDQKQKIQPDQQYQVASSAVLPSPTSLPSHLREKFGFSDPNVNSSSFISSSSNENMLESNFLQVSSKSVDLSRFNQPVVSEQQQPQQQQAWKQKFMGSQSMSFGGSVSLNSPTSKDGSVDNKVGRDVQNQSLFSPQVDSSSLLYNMVPNLTSNVADNNISAFPSGSTYLQSPMYGCLDDSSGLLQNTGENDPTTRTFVKVYKSGSVGRSLDITRFSNYAELREELGQMFGIKGQLDDPDRSGWQLVFVDRENDVLLLGDDPWESFVNSVWYIKILSPEDVHKMGKPGNDPRYLS

SEQ ID NO: 166287 - protein, 437 aa, Zea Mays
MRFRMLFETEESSVRRYMGTITEVSDADPVRWPSSYWRSVKVGWDESTAGERPPRVSLWEIEPLTTFPMYPSLFPLRVKHPWYSGLAALHDDSNALMWLRGVTGEGGFHSLNFQSPGIGSWGQQRLHPSLLSNDHDQYQAVVAAAAASQSGGYLKQQFLHLQQPMQSPQEQCNLNPLLQQQILQQASQQQMVSSDAQNIQSVLNPGAIQQQLHQLQQMQHTHNDQKQKIQPDQQYQVASSAVLPSPTSLPSHLREKFGFSDPNVNSSSFISSSSNENMLESNFLQVSSKSVDLSRFNQPVVSEQQQPQQQQAWKQKFMGSQSMSFGGSVSLNSPTSKDGSVDNKVGRDVQNQSLFSPQVDSSSLLYNMVPNLTSNVADNNISAFPSGSTYLQSPMYGCLDDSSGLLQNTGENDPTTRTFVKVSIIESTKNKFKPFLM

SEQ ID NO: 166288 - protein, 498 aa, Zea Mays
MPSSVLSSDSMHIGLLAAAAHAAATNSRFTIFYNPRASPTEFVIPLSKYIKAVFHTRISVGMRFRMLFETEESSVRRYMGTITEVSDADPVRWPSSYWRSVKVGWDESTAGERPPRVSLWEIEPLTTFPMYPSLFPLRVKHPWYSGLAALHDDSNALMWLRGVTGEGGFHSLNFQSPGIGSWGQQRLHPSLLSNDHDQYQAVVAAAAASQSGGYLKQQFLHLQQPMQSPQEQCNLNPLLQQQILQQASQQQMVSSDAQNIQSVLNPGAIQQQLHQLQQMQHTHNDQKQKIQPDQQYQVASSAVLPSPTSLPSHLREKFGFSDPNVNSSSFISSSSNENMLESNFLQVSSKSVDLSRFNQPVVSEQQQPQQQQAWKQKFMGSQSMSFGGSVSLNSPTSKDGSVDNKVGRDVQNQSLFSPQVDSSSLLYNMVPNLTSNVADNNISAFPSGSTYLQSPMYGCLDDSSGLLQNTGENDPTTRTFVKVSIIESTKNKFKPFLM

SEQ ID NO: 166289 - protein, 519 aa, Zea Mays
MPSSVLSSDSMHIGLLAAAAHAAATNSRFTIFYNPRASPTEFVIPLSKYIKAVFHTRISVGMRFRMLFETEESSVRRYMGTITEVSDADPVRWPSSYWRSVKVGWDESTAGERPPRVSLWEIEPLTTFPMYPSLFPLRVKHPWYSGLAALHDDSNALMWLRGVTGEGGFHSLNFQSPGIGSWGQQRLHPSLLSNDHDQYQAVVAAAAASQSGGYLKQQFLHLQQPMQSPQEQCNLNPLLQQQILQQASQQQMVSSDAQNIQSVLNPGAIQQQLHQLQQMQHTHNDQKQKIQPDQQYQVASSAVLPSPTSLPSHLREKFGFSDPNVNSSSFISSSSNENMLESNFLQVSSKSVDLSRFNQPVVSEQQQPQQQQAWKQKFMGSQSMSFGGSVSLNSPTSKDGSVDNKVGRDVQNQSLFSPQVDSSSLLYNMVYKSGSVGRSLDITRFSNYAELREELGQMFGIKGQLDDPDRSGWQLVFVDRENDVLLLGDDPWDVWYIKILSPEDVHKMGKPGNDPRYLS

SEQ ID NO: 166290 - protein, 291 aa, Zea Mays
MDEKVLDLVRMFSGAKKPIASVCHGQLILAAARVVENRTCTAFPAVKPVLVAAGAKWEEPDTMAKCTVDGNLITAATYNSHPEFISLFVKALGGSVAGSDKRILFLCGDYMEDYEVMVPFQALQALGCHVDAVCPDKGAGETCPTAIHDFEGDQTYSEKPGHDFTLTASFGSVDASSYDALVVPGGRAPEYLALNDKVISLVKAFAESGKPIASICHGQQILSAAGVLKGKKCTAYPAVKLNVLLGGGTWLEPDPIHRCFTDGNLVTGAAWPGHPEFVSQLMALLGVKVSF

SEQ ID NO: 166291 - protein, 283 aa, Zea Mays
MAGISRAIRACAATSQRTLAAASAVTLPKEAGVKPATVGRRGRGPEDGRRVQWAFLGCPGVGKGTYASRLSQLLGVPHIATGDLVRDALASPGPFSKKLAEIVNQGKLVSDEIIINLLSRRLEEGEEKGELGFILDGFPRTMRQAEILEGVTNIDLVINLKLREEALVARCLGRRMCSQCGENFNVASIDIEGENGGAPMYLPPLLPPPQCESKLITRADDTEEVVKNRLRVYHDLTEPVEGFYKARQKLLEFNIPGGISESWRKLLEALNIEDSDNMRSAAA

SEQ ID NO: 166292 - protein, 112 aa, Zea Mays
MASRPVATSISAPRPPHPTRCTAAAASPPPPHHRPEYHRTRRRGRISPRQGPAEHCRRLHLRVWATARVQGSSRVRDQIRPVEQHPQHHAHHPPLPRHRRLHPRIPDQQESR

SEQ ID NO: 166293 - protein, 113 aa, Zea Mays
MASRPVATSISAPRPPHPTRCTAAAASPPPPHHRPEYHRTRRRGRISPRQGPAEHCRRLHLRVWATARVQGSSRVRDQIRPVEQHPQHHAHHPPLPRHRRLHPRVHTTPFLTI

SEQ ID NO: 166294 - protein, 107 aa, Zea Mays
MASRPVATSISAPRPPHPTRCTAAAASPPPPHHRPEYHRTRRRGRISPRQGPAEHCRRLHLRVWATARVQGSSRVRDQIRPVEQHPQHHAHHPPLPRHRRLHPRESR

SEQ ID NO: 166295 - protein, 154 aa, Zea Mays
MASRPVATSISAPRPPHPTRCTAAAASPPPPHHRPEYHRTRRRGRISPRQGPAEHCRRLHLRVWATARVQGSSRVRDQIRPVEQHPQHHAHHPPLPRHRRLHPRVRNTVVVWTSVIGQMKGGGHYQILVHLWATADKRTSVVHLSNSPLQCGQC

SEQ ID NO: 166296 - protein, 160 aa, Zea Mays
MRQAEILEGVTNIDLVINLKLREEVVVARCLGRRMCSQCGGNFNVASIDIEGENGGAPMHLPPLLPPPQCESKLITRADDTEEVVKNRLRVYHDLMFGVVPSYILPSGLSSLQTEPVEGFYRARQKLLEFNIPGGIPESWRKLLEALNIEDSDNMRSAAA

SEQ ID NO: 166297 - protein, 340 aa, Zea Mays
MGTASSVCRAMGDQLEGDEEEHMKYRDMVVDYIVKHREEFEPFIEDEVPFEEYCNSMLKDGTWAGHMELQAASLLTRRNICIHMLNSPRWYINNFSGREATNMVHLSYHHGEHYNSVRLREDPCQGPAMPVVIKTDSNISNTNNNAQTKAKEVKKSSHRSTYDDTSVKLVMAGTGCSDIAIAEHVLGEMDGDVDAAIEYLIAERLAVSTDDAEVDLYINHAFNGDEPTKRQEDNNMIEHKDEANCSNEDETVEKPKHSNAVHSKKEKSKTNGCCSCGSARKHKASCSLATASSSREPPRAKGGQGKGQRGKKQKKKEQAEAAAAKAKESAIVPDLGALCI

SEQ ID NO: 166298 - protein, 294 aa, Zea Mays
MVQKKKKAAAAPKLRKLPKRDADKKLGKKGDMAEFRAQLDSLGLKIVQVTADGNCFFRAMGDQLEGDEEEHMKYRDMVVDYIVKHREEFEPFIEDEVPFEEYCNSMLKDGTWAGHMELQAASLLTRRNICIHMLNSPRWYINNFSGREATNMVHLSYHHGEHYNSVRLREDPCQGPAMPVVIKTDSNISNTNNNAQTKAKEVKKSSHRSTYDDTSVKLVMAGTGCSDIAIAEHVLGEMDGDVDAAIEYLIAERLAVSTDDAEVDLYINHAFNVAFLLKYGCWSKKIPWLYRVWR

SEQ ID NO: 166299 - protein, 245 aa, Zea Mays
MGTASSVCRAMGDQLEGDEEEHMKYRDMVVDYIVKHREEFEPFIEDEVPFEEYCNSMLKDGTWAGHMELQAASLLTRRNICIHMLNSPRWYINNFSGREATNMVHLSYHHGEHYNSVRLREDPCQGPAMPVVIKTDSNISNTNNNAQTKAKEVKKSSHRSTYDDTSVKLVMAGTGCSDIAIAEHVLGEMDGDVDAAIEYLIAERLAVSTDDAEVDLYINHAFNVAFLLKYGCWSKKIPWLYRVWR

SEQ ID NO: 166300 - protein, 342 aa, Zea Mays
MGTASSVCRAMGDQLEGDEEEHMKYRDMVVDYIVKHREEFEPFIEDEVPFEEYCNSMLKDGTWAGHMELQAASLLTRRNICIHMLNSPRWYINNFSGREATNMVHLSYHHGEHYNSVRLREDPCQGPAMPVVIKLQTDSNISNTNNNAQTKAKEVKKSSHRSTYDDTSVKLVMAGTGCSDIAIAEHVLGEMDGDVDAAIEYLIAERLAVSTDDAEVDLYINHAFNGDEPTKRQEDNNMIEHKDEANCSNEDETVEKPKHSNAVHSKKEKSKTNGCCSCGSARKHKASCSLATASSSREPPRAKGGQGKGQRGKKQKKKEQAEAAAAKAKESAIVPDLGALCI

SEQ ID NO: 166301 - protein, 174 aa, Zea Mays
MGTASSVCRAMGDQLEGDEEEHMKYRDMVVDYIVKHREEFEPFIEDEVPFEEYCNSMLKDGTWAGHMELQAASLLTRRNICIHMLNSPRWYINNFSGREATNMVHLSYHHGEHYNSVRLREDPCQGPAMPVVIKTDSNISNTNNNAQTKAKEVKKSSHRFSEKWMVMLMLLLST

SEQ ID NO: 166302 - protein, 223 aa, Zea Mays
MKYRDMVVDYIVKHREEFEPFIEDEVPFEEYCNSMLKDGTWAGHMELQAASLLTRRNICIHMLNSPRWYINNFSGREATNMVHLSYHHGEHYNSVRLREDPCQGPAMPVVIKTDSNISNTNNNAQTKAKEVKKSSHRSTYDDTSVKLVMAGTGCSDIAIAEHVLGEMDGDVDAAIEYLIAERLAVSTDDAEVDLYINHAFNVAFLLKYGCWSKKIPWLYRVWR

SEQ ID NO: 166303 - protein, 244 aa, Zea Mays
MGTASSVCRAMGDQLEGDEEEHMKYRDMVVDYIVKHREEFEPFIEDEVPFEEYCNSMLKDGTWAGHMELQAASLLTRRNICIHMLNSPRWYINNFSGREATNMVHLSYHHGEHYNSVRLREDPCQGPAMPVVIKTDSNISNTNNNAQTKAKEVKKSSHRSTYDDTSVKLVMAGTGCSDIAIAEHVLGEMDGDVDAAIEYLIAERLAVSTDDAEVDLYINHAFNAFLLKYGCWSKKIPWLYRVWR

SEQ ID NO: 166304 - protein, 225 aa, Zea Mays
MKYRDMVVDYIVKHREEFEPFIEDEVPFEEYCNSMLKDGTWAGHMELQAASLLTRRNICIHMLNSPRWYINNFSGREATNMVHLSYHHGEHYNSVRLREDPCQGPAMPVVIKLQTDSNISNTNNNAQTKAKEVKKSSHRSTYDDTSVKLVMAGTGCSDIAIAEHVLGEMDGDVDAAIEYLIAERLAVSTDDAEVDLYINHAFNVAFLLKYGCWSKKIPWLYRVWR

SEQ ID NO: 166305 - protein, 280 aa, Zea Mays
MVTLSEQELVECSTDGGNSGCNGGLMDAAFDFIIKNGGIDTEGDYPYKAVDGKCDINRENAKVVSIDGFEDVPENDEKSLQKAVAHQPVSVAIEAGGREFQLYKAGVFTGTCTTNLDHGVVAVGYGTENGKDYWIVRNSWGAKWGEDGYIRMERNVNATTGKCGIAMMASYPTKKGANPPKPSPTPPTPPPPPVAPDNVCDENFSCAAGSTCCCAFGFRNVCLVWGCCPMEGATCCKDHASCCPPGYPVCNVRAGTCSVSKNSPLSVKALKRTLAKLNSA

SEQ ID NO: 166306 - protein, 260 aa, Zea Mays
MAATAESPSTGGFVLWLHGSGGSGDESRAQVAPYFSDPGVASSVRLSFPTAPTSFIPCYGCDLLCCFALWLLCKARDVVITAWFGISEVPITAKTVRDEKEVLKAVEYVHELIDKEVAAGTSPSNIFVCGMSQGGALAIASALLYPKTLGGCAVFSGSVPPNKSFADKVSPEARKTPVLWFHGMADGVVLFEAGHAGCAFLEELGMSCEFKAYPTLGHSLVDEELQYFQQWILIRLGMAASGAAETARPSSSSNHNDHLQ

SEQ ID NO: 166307 - protein, 130 aa, Zea Mays
MSQGGALAIASALLYPKTLGGCAVFSGSVPPNKSFADKVSPEARKTPVLWFHGMADGVVLFEAGHAGCAFLEELGMSCEFKAYPTLGHSLVDEELQYFQQWILIRLGMAASGAAETARPSSSSNHNDHLQ

SEQ ID NO: 166308 - protein, 70 aa, Zea Mays
MTPFLWSHGMADKVVLFEAGQAGPPFLQSAGVNCEFKAYPDLGHSLSQEELLYLESWIKSRLNASQEKDG

SEQ ID NO: 166309 - protein, 176 aa, Zea Mays
MCDAAAVAAPRYRGVRKRPWGRFAAEIRDPAKRARVWLGTFDSAEAAARAYDVAARALRGPLARTNFPALTSRPPANLPAPTPTCSSSSTVESSSGPRAGVPRAGRRAAGKPRAPRQAAAPADADCRSDCASSASVVDDGDDASTVRSRPALDLNLPAPLDVDDGHDLELCTDLRL

SEQ ID NO: 166310 - protein, 324 aa, Zea Mays
MTTMVVGYALGWRGGAWYARRAFRREQQKLMMGHMKSSQNRWHWRPFNRLRNSRRRLRVEAIRTQRTEVPVEESAPARDAAAAAPLDGNGAGADGSVVPSSDDSWVVKLEQSFNIFATDSVIMVLKGVYGDRYYARFFALETIARVPYFAFISVLHLYATFGWWRRADYIKVHFAQSWNEFHHLLIMEELGGDSLWFDCFLARFMAFFYYFMTVAMYMLSPRMAYHFSECVERHAYSTYDEFLKLHEDEFQASRTPGSRRPKIDNLYDVFVNIREDEAEHCKTMKTCQTHGNLRSPHSTPNCLEDDTECVIPENDCEGVVVYKV

SEQ ID NO: 166311 - protein, 425 aa, Zea Mays
MAIELDDDSCNAMQTADPFRGYSLRHVQQLKIERRLESIESSLKDNHKVEHEEIKKIVTSSNISAPGCVATAMTTMVVGYALGWRGGAWYARRAFRREQQKLMMGHMKSSQNRWHWRPFNRLRNSRRRLRVEAIRTQRTEVPVEESAPARDAAAAAPLDGNGAGADGSVVPSSDDSWVVKLEQSFNIFATDSVIMVLKGVYGDRYYARFFALETIARVPYFAFISVLHLYATFGWWRRADYIKVHFAQSWNEFHHLLIMEELGGDSLWFDCFLARFMAFFYYFMTVAMYMLSPRMAYHFSECVERHAYSTYDEFLKLHEEELKRLPAPEAALNYYMNEDLYLFDEFQASRTPGSRRPKIDNLYDVFVNIREDEAEHCKTMKTCQTHGNLRSPHSTPNCLEDDTECVIPENDCEGIVDCVKKSLTK

SEQ ID NO: 166312 - protein, 149 aa, Zea Mays
MAFFYYFMTVAMYMLSPRMAYHFSECVERHAYSTYDKFLKLHEEELKTLPAPEAALNYYLNEDLYLFDEFQTTRIPCSRRPKIDNLYDVFVNIRDDEAEHCKTMKACQTHGTLRSPHSMPNCLEAATECVIPENDCEGIVDCVKKSLTK

SEQ ID NO: 166313 - protein, 493 aa, Zea Mays
MAKQKEGVDKRTARKMIRSTEGCAKSITLERNNKSDDVQLHDLPNDILGSILSRLTFRESSQMGLVSHTWRRLWRSCCRKLVFTSATMFQPGNRSIKHTRTNFAMRVNSFLRQLRTHPTLNKFVIKFGLRRKHTRHVNRWIRFCSVSRARHITINFTPGVKDFFMGPANSKYIFPLNVFSGPEGSSTHVRTLHLGYVCLDTTSSDFMIFANLKKLTLHKISFLGDLQCLMLPECNSLECLSISFCSLPGLSTCQPLQRLRCVRLHYCYLKKIELEAPNLTSFDLTNQPIPFVLGGSLNVMEANIKLLAKDSPYGDNLDYIYTELPAALSHVHKLSITSGLFVYDQLQGFSKTSARFINLRHLTMYLPLYGEPKSISGILRLAYLLELAPALEELELHVNGGGVDVGWALRRNMLPYSHNRLKRVLISGASVWEGLMELAYYIFRSANRLESMVLDPKIRIGAPQLDGWMIDIGRETIKKLFEGEEFQSIITIL

SEQ ID NO: 166314 - protein, 1272 aa, Zea Mays
MAAGGAGPAQHQAPNGASVSISNGGGAAAATPPQGSAASTANGAAADGYDSDGYSFAPPTPSTLSMSIPPELAGAIPLIDRFQVEGFLKAMQKQIHSAGKRGFFSKKSVGPQTREKFTLEDMLCFQKDSIPTSLLKISNDLVSRSIKLFHVILKYMGIDSPAIISLEERIEFVEKLYKHTLKRSELRDELFAQISKQTRNNPDRGWSIRAWELMYLCASSMPPSKDIGAYLSEYIHFVAHGATTDADVRVLALNTLNALKRSVKAGPRITIPAWEEIEALLTSRKLTTIVFFLDETFEEITYDMATTVADAVEELAGIIKLSVYSSFSLFECRKVVNGSKSSEIGNEEYIGLDDNKYIGDLLSEFKSAKDRNKGEILHCKLVFKKRLFRESDEAVTDPMFVQLSYVQLQHDYILGNYPVGRDDASQLSALQILVEIGFIDNPESCVEWISLLERFLPRQVAITRAKRDWELDIISRFQLMEHLSKDDARQQFLRILRTLPYGNSVFFSVRKIDDPIGLLPGKIILGINKRGVHFFRPVPKEYLHSAELRDIMQFGSSNTAVFFKMRVAGVLHIFQFETKQGEEICVALQTHINDVMLRRYSKARSGNSVTSQNDVNQAYKPPNIEMFEKRVQELTKTAEDSQKKADQLREDLQLKTKQETEMQEELEGLRDTLQSERQSSKDIKNELDKLKSLCDEKESALQAALMEKSRLETRLTSGQGRERDTLTTVGSINNDIEDACKLEEELKSYQKELDASKEVSKKLMLEKNILDQKVQRLERMKNEEKSAMEKVYADECCKLKSQIAELEQKLEVATRSLNVAESNLAVRNAEVDSLQNSLKELDELREFKADVDRKNQQTVEILKRQGAQLVELENLYKQEQVLRKRYYNTIEDMKGKIRVFCRLRPLSDKELSFEEKNIVCSPDEFTISHPWKDEKSKQHIYDRVFDANTSQEEVFEDTKYLVQSAVDGYNVCIFAYGQTGSGKTFTIYGSENNPGLTPRATSELFRVIKRDGNKYSFSLKAYMVELYQDNLVDLLLPRNAKQLKLEIKKDSKGVVTVENVTVVSISSIEELRAIISRGSERRHTAGTNMNDESSRSHLILSIIIESTNLQTQSYARGKLSFVDLAGSERVKKSGSAGKQLKEAQSINKSLSALADVIGALSSDGQHIPYRNHKLTMLMSDSLGGNAKTLMFVNVSPAESNLEETYNSLMYASRVRCIVNDTSKHVAPKEIMRLKKLIAYWKEQAGKRSDEDELEEIQEERISKERSDNRMTS

SEQ ID NO: 166315 - protein, 874 aa, Zea Mays
MFVQLSYVQLQHDYILGNYPVGRDDASQLSALQILVEIGFIDNPESCVEWISLLERFLPRQVAITRAKRDWELDIISRFQLMEHLSKDDARQQFLRILRTLPYGNSVFFSVRKIDDPIGLLPGKIILGINKRGVHFFRPVPKEYLHSAELRDIMQFGSSNTAVFFKMRVAGVLHIFQFETKQGEEICVALQTHINDVMLRRYSKARSGNSVTSQNDVNQAYKPPNIEMFEKRVQELTKTAEDSQKKADQLREDLQLKTKQETEMQEELEGLRDTLQSERQSSKDIKNELDKLKSLCDEKESALQAALMEKSRLETRLTSGQGRERDTLTTVGSINNDIEDACKLEEELKSYQKELDASKEVSKKLMLEKNILDQKVQRLERMKNEEKSAMEKVYADECCKLKSQIAELEQKLEVATRSLNVAESNLAVRNAEVDSLQNSLKELDELREFKADVDRKNQQTVEILKRQGAQLVELENLYKQEQVLRKRYYNTIEDMKGKIRVFCRLRPLSDKELSFEEKNIVCSPDEFTISHPWKDEKSKQHIYDRVFDANTSQEEVFEDTKYLVQSAVDGYNVCIFAYGQTGSGKTFTIYGSENNPGLTPRATSELFRVIKRDGNKYSFSLKAYMVELYQDNLVDLLLPRNAKQLKLEIKKDSKGVVTVENVTVVSISSIEELRAIISRGSERRHTAGTNMNDESSRSHLILSIIIESTNLQTQSYARGKLSFVDLAGSERVKKSGSAGKQLKEAQSINKSLSALADVIGALSSDGQHIPYRNHKLTMLMSDSLGGNAKTLMFVNVSPAESNLEETYNSLMYASRVRCIVNDTSKHVAPKEIMRLKKLIAYWKEQAGKRSDEDELEEIQEERISKERSDNRMTS

SEQ ID NO: 166316 - protein, 73 aa, Zea Mays
MAMECLCSGEQLKASDETMRSSDSTITKDFSASGYSSWNGEIEQYLDNGNIEEAELSLREGICLNYEVSCFLL

SEQ ID NO: 166317 - protein, 77 aa, Zea Mays
MKISIARKTGRGKTHSQWDSPPMPLHAVSLLMEAIYLKARALHDLGKDKGKQHLAIMLHTLTDLHCGLVINSKKTMD

SEQ ID NO: 166318 - protein, 61 aa, Zea Mays
MKISIARKTGRGKTHSQWDSPPMPLHAVSLLMEAIYLKARALHDLGKDKGPNKARKRQRAQ

SEQ ID NO: 166319 - protein, 167 aa, Zea Mays
MDGRKRKGKFRNSLRRMAMECLCSGEQLKASDETMRSSDSTITKDFSASGYSSWNGEIEQYLDNGNIEEAELSLREGICLNYETSALVPKMKISIARKTGRGKTHSQWDSPPMPLHAVSLLMEAIYLKARALHDLGKDKGKQHLAIMLHTLTDLHCGLVINSKKTMD

SEQ ID NO: 166320 - protein, 151 aa, Zea Mays
MDGRKRKGKFRNSLRRMAMECLCSGEQLKASDETMRSSDSTITKDFSASGYSSWNGEIEQYLDNGNIEEAELSLREGICLNYETSALVPKMKISIARKTGRGKTHSQWDSPPMPLHAVSLLMEAIYLKARALHDLGKDKGPNKARKRQRAQ

SEQ ID NO: 166321 - protein, 147 aa, Zea Mays
MAMECLCSGEQLKASDETMRSSDSTITKDFSASGYSSWNGEIEQYLDNGNIEEAELSLREGICLNYETSALVPKMKISIARKTGRGKTHSQWDSPPMPLHAVSLLMEAIYLKARALHDLGKDKGLMKGKTIVDVVGKFTWYFIFCSS

SEQ ID NO: 166322 - protein, 66 aa, Zea Mays
MLGDFFLLVELVNCPITSIKIQEAKGALTSIYASNYHFFLKNFPLLNNIHLDEPRTITLSELYYEF

SEQ ID NO: 166323 - protein, 923 aa, Zea Mays
MKSFGLDDEEIARFQDPYHWLTHFPPLAKEVLKKFGLGCDWRRSFITTDMNPYYDAFVKWQMRKLKKLGKVVKDMRYTIYSPLDGQPCADHDRATGEGVQPQEYVLIKMEVISPFPPKLKSLEGRKVYLAAATLRPETMYGQTNCWVLPDGMYGAFEINDTDVFILTARSAFNLAYQHLSRVPEKPTCLCELSGSDLIGLPLKSPLAFNETIYALPMLTVLTDKGTGIVTSVPSDSPDDFMALQDLVTKPALRAKYGVKDEWVLPYEIIPIIHIPEFGDKSAEKVCHDLKIKSQNDKEKLAEAKRMTYLKGFTDGTMIVGEFSGRKVQEAKPLIKSKLLEEGTAVLYSEPEKKVMSRSGDECVVALTDQWYITYGEAEWKQKAVKCLDHMNTFSTETRNGFEHTLGWLNQWACSRSFGLGTRIPWDEQFLVESLSDSTLYMAYYTVAHLLQNGNMYGKEISSVRPEEMTDEVWDFVFCDGPAPKSEIPAALLNKMKHEFKYWYPFDIRVSGKDLIQNHLTFCIYNHTALLPEHHWPIGFRCNGHLMLNSEKMSKSTGNFLTLEDAIKKYSSDATRFALADAGDGMDDANFVTETANSAVMRLTKEISWMEEVTAAESKLRTGPPTTYADRVFSNEMNIAIKETEKSYNAFMFRDALKSGFYDLQLARDEYRLSCGAAGMNRDLLWRFMDVQTRLITPICPHYAEHVWQKIMKKEGFAIKAGWPAADTPDPTLRIANKYLQDSIVLMRKLLQKQESGSKKPKKGAAPAPPSEEKKMSIGLIYVNEHYSGWKEQCLKVLQSKFDSQSRSFSPDQEIAEALKECPIGQEMNLKQVQKLCMPFIKLKKDEAREVGPQALDLKLPFGEMDVLRENLELIKRQLGLEQVEVLSASDEAARAKAGEHASLLEKNPPSPGDPIAIFLSKQS

SEQ ID NO: 166324 - protein, 298 aa, Zea Mays
MEACTLYAITSPDTWSGDRWMMDAKKIKLHDYHLYGSQQLFPAAGGLSFHPAAGLMSSLPQPPHAAWLHEDHHTTTPRSVLATHGSLQGSRCVGSDAAAFFAAEELMMGMPRFDDCPLGGTEMTAFAKRPTTEDEQLHYRRPGPVDPLPLRDSAAVRTYYVRPQQRDGATEAPPSLELPFQQGRRQQQQLFGNASTGRLLGGEPKAHSFTAHVATSTLLPAMEAPAGMQQSPTENPLSRSCSTIGAPATHVGSGNVAAAAAPGHGAPSKTRIRWTQDLHERFVDSVNQLGGADSERRP

SEQ ID NO: 166325 - protein, 465 aa, Zea Mays
MLLIKLVYLLLRLISWFAVPVCFPARLFSPDTWSGDRWMMDAKKIKLHDYHLYGSQQLFPAAGGLSFHPAAGLMSSLPQPPHAAWLHEDHHTTTPRSVLATHGSLQGSRCVGSDAAAFFAAEELMMGMPRFDDCPLGGTEMTAFAKRPTTEDEQLHYRRPGPVDPLPLRDSAAVRTYYVRPQQRDGATEAPPSLELPFQQGRRQQQQLFGNASTGRLLGGEPKAHSFTAHLLQVATSTLLPAMEAPAGMQQSPTENPLSRSCSTIGAPATHVGSGNVAAAAAPGHGAPSKTRIRWTQDLHERFVDSVNQLGGADKATPKGILKLMNSDGLTIYHIKSHLQKYRIAKYMPASSTSEGKQEKRAVGNDVQNLDPSTGMKITEALRVQLDVQRRLHEQLEIQRNLQLRIEVQGKKLQKMFEEQMKASRTVMEPRQEEEDDDDDAFNDVHVQLLAAAARSDAGFQLNIS

SEQ ID NO: 166326 - protein, 344 aa, Zea Mays
MLSSGIFGISTGLWMGIEFYAINTDSQALINSQAQYPLQIGEQLTRGLGAGGNPNLGEQAAEESRETIATALRDSDLVFITAGMGGGTGSGAAPVVAQISKEAGYLTVGVVTYPFSFEGRKRSVQALEALEKLEKSVDTLIVIPNDKLLDVADENMPLQDAFLLADDVLRQGVQGISDIITIPGLVNVDFADVKAVMKNSGTAMLGVGVSSSKNRAQEAAEQATLAPLIGSSIEAATGVVYNITGGKDITLQEVNKVSQIVTSLADPSANIIFGAVVDDRYTGEIHVTIIATGFPQSFQKSLLADPKGARIVESKEKAATLAHKAAAAAVQPVPASAWSRRLFS

SEQ ID NO: 166327 - protein, 545 aa, Zea Mays
MYYNGMYHLFYQYNPHGALWGVGNLSWGHSVSGDLVNWAALDTALDPTSPFDANGCWSGSATILPGGTPAILYTGIDANGEQVQNVAFPRDPADPLLRRWDKPGYNPVIPLPADVPGDKFRDPSTAWLGRDGLWRVAVSAEVRGVASTLVYRSADFLRWERAPAAAPLHASRAAGMVECPDLFPVKEEGDDGDGQGLDASASGAGLRHVLKLSVMDTLQDYYMVGRYDDAADAFVPAEPERGDDVRGWRRLDYGHVYASKTFFDARGSRRVLWAWANESDSQADDVAKYRCPNGPARPARTFPRKLWLDEDGKQLRQWPVEEIETLRRKRVVLRRGTALATGGMNEIVGVAGSQADVEVAFKVSSLAGAEALDPNWLLDPQKLCGEKGASVPGGVGPFGLIVMASSDLREHTAVFFRAFRYHGRYKLLMCTDLTRSSTRAGVYKPPYGGFVDVDVEEHETINLRTLIDHSVVESFGADGRMCITARVYPEHAETSNNHMFVFNNGTGTVEVYKLEAWELAAATVNSVGGNDSLVISKSNDQSESY

SEQ ID NO: 166328 - protein, 481 aa, Zea Mays
MGASSSTGNPSPEAHEQREQETLASAALSLPLLRAAFSRSAANALPDALAPPPASFRLPGSPAPPPPHFHGILGGLGPAIASQFFGHGAAAVTDGGAGWVQFLRGFNRCCARVTASRSLALLLRVYAAACAGAGAPCGVQLQPDEGGGDEDGKVVGELAPEEIAVFLWVCWVMAWSASASRVVSDGGDKSEPVTVLLPDVTHLVLSALVSAGVVTDDAGVWGWDVSSGGKGVKVQEFMSWVLSTPFGLGNCLSRYVRDKFRSLAADSVEESSVSTVSTTFDTSDVYLLTRGRAWAIALSLRNKLSEKLLSASVIGMDTEDLLYRSSVHGKGLSRFWSCVEGYKGPMLILLSAFSKGGGENVDSDRRWVIGVLTEEGFENKDTFYGSSGFLCAAHPIFRMLPPSGKEKNFMYCHLHPQIRAYEANPKPVGLAFGGTIGNERIFLDEDFSGVLVRHHAVDKTYQHGSLIPNQVKFRFTGVQGI

SEQ ID NO: 166329 - protein, 272 aa, Zea Mays
MGASSSTGNPSPEAHEQREQETLASAALSLPLLRAAFSRSAANALPDALAPPPASFRLPGSPAPPPPHFHGILGGLGPAIASQFFGHGAAAVTDGGAGWVQFLRGFNRCCARVTASRSLALLLRVYAAACAGAGAPCGVQLQPDEGGGDEDGKVVGELAPEEIAVFLWVCWVMAWSASASRVVSDGGDKSEPVTVLLPDVTHLVLSALVSAGVVTDDAGVWGWDVSSGGKGVKVQEFMSWVLSTPFGLGNCLSRRALFQLLAQPLTLLMFIC

SEQ ID NO: 166330 - protein, 414 aa, Zea Mays
MHSTRQIIVEQAGALLSQLSTQLGDLENVTDSAIRRDIQSSAVRTGSLFQNLGSLLLELGRTTMLLRINPSSSEAVVNSGPALYISPSGPNPLMVQPVPFPGRSVQMGTLFSSLGSQGSVLHPRDVDIHVRTSGSVPGASTNPSDSAGAQAHQNVNRPGDASHANIGEAFSGVAGGTPFSVESGVRLLPLRTVVAMPAGISRAPSGSSSGGLGIIYPFLTRVRQRANTNGNDERNGQSPNESARSSTHLNQQSIPQSSQTHEAGNLRSPVDVNVGDGSETSPGQQNGLVTLSQIMDFFGSMLPGENVRGNTSSQQPPMASTEQGEGRNLATPEVSGASEEALRFAGMVRQIMPFISQVETQNQSAPPDSSSTPAQAASGSADRARDVPNDSTSSRQHNRDQIDEPNSKRQRTSD

SEQ ID NO: 166331 - protein, 546 aa, Zea Mays
MESASDVQMQHRAEDSETTIEIKIKTLDSQTYNLRVNKCVPVPLLKEKIATVTGILSEQQRLICRGRVLKDDELLSAYHVEDGHTLHLVVRHPGQSATFGNAATEANTSNSGRRHGPTVARSVVLEAVNVDPGSSELPAFVAQILQSVLGTINAQSTGTPTSSDTGSLDPSQSSIPNTIRVELDQQQAPLLFQSEPAHESSQPNVIPDALTTMSQYINFMRDSFRREGFSLNGQTEGNVENRTAEPESASVLGLHNASLLAENMHSTRQIIVEQAGALLSQLSTQLGDLENVTDSAIRRDIQSSAVRTGSLFQNLGSLLLELGRTTMLLRINPSSSEAVVNSGPALYISPSGPNPLMVQPVPFPGRSVQMGTLFSSLGSQGSVLHPRDVDIHVRTSNLRSPVDVNVGDGSETSPGQQNGLVTLSQIMDFFGSMLPGENVRGNTSSQQPPMASTEQGEGRNLATPEVSGASEEALRFAGMVRQIMPFISQVETQNQSAPPDSSSTPAQAASGSADRARDVPNDSTSSRQHNRDQIDEPNSKRQRTSD

SEQ ID NO: 166332 - protein, 295 aa, Zea Mays
MPIGSLNVIMSNRCGSVPGASTNPSDSAGAQAHQNVNRPGDASHANIGEAFSGVAGGTPFSVESGVRLLPLRTVVAMPAGISRAPSGSSSGGLGIIYPFLTRVRQRANTNGNDERNGQSPNESARSSTHLNQQSIPQSSQTHEAGNLRSPVDVNVGDGSETSPGQQNGLVTLSQIMDFFGSMLPGENVRGNTSSQQPPMASTEQGEGRNLATPEVSGASEEALRFAGMVRQIMPFISQVETQNQSAPPDSSSTPAQAASGSADRARDVPNDSTSSRQHNRDQIDEPNSKRQRTSD

SEQ ID NO: 166333 - protein, 779 aa, Zea Mays
MEGHDNEEDWATKAKAWVAAKSVMGNHQIQQHAISTSRTEGHHNGYHDQYQQPAGLPTEVTEALHPPVPQSSIDHVPFPMTGQQRETNHLLDRGPMVSPAKNFGSFSSTYEQEVSYNYSSAPGTGNNMLQYPNSQAQPFPTTAAVQGGFSQGCLSMPVPLTEQPLFGHERQPIDPSDQPLEFNSRKAPDLAVHINVNSNIPAPQTLAPNHDVAATSTHSWTPSATVGYLPRAPVPPQTAQMDPSVHAAPLFGAASSSSYVSPAAFGVGNVTEVFPTDPNTPFSVADKSKKPPVPNWLREELLKKKSEPLSASAQNSENLNPMEANEAVQTIGRPDQSDSRSNDSAKSTEDDDDDEDEIEAARMAAINKEIKRVLTEVLLKVTDELFDEIATKVLNEDDSAESNEATGVFGSKETGLGRSRAKASAKVVLPAKSTNSSDHKDSTGLSSPKGALLGLASYDSDDDDDADTDSKDKMPISNLSSKDNAGAVNTEGDKSTLGKRNGNHNEQNSSLGSSPSGEDLKSNNQNFQRNANAEPEQMHIRDTENGEFRFKAKTRTEPKGAFDRMDEKAHTYAEVDIQNRKTSFGNNAEKHNDLESSHRHSEKSSKEDFVNELKADHTKELEYSRAEKYNNDDKYSMYGNIDKRGSCKEGKGSDSAAKHESDTREPHYRGNSKLDGAKGDWKDLPKDRERNRDDRRGKGKDEKDDRLRQMTSHNSRSSRSRSPRGRSRTRKENSHVRGSVSSDEPSDSVKKRKHYSHKTSMSPSPPKSRNRYTVHVVSL

SEQ ID NO: 166334 - protein, 908 aa, Zea Mays
MDAYQHQRRFAGAGDAPPPPPHPSHPSAQWYPAPPLPYHPPHPGHPYPPQHHHQWAPPPDMQHQHHPPLPQPYVYQPPPPPMAMQQQPPPPPGNPWPPHHGAGQHPPPTYPPPPPGQAWTNHSWAQNHGYQGHDNEEDWATKAKAWVAAKSVMGNHQIQQHAISTSRTEGHHNGYHDQYQQPAGLPTEVTEALHPPVPQSSIDHVPFPMTGQQRETNHLLDRGPMVSPAKNFGSFSSTYEQEVSYNYSSAPGTGNNMLQYPNSQAQPFPTTAAVQGGFSQGCLSMPVPLTEQPLFGHERQPIDPSDQPLEFNSRKAPDLAVHINVNSNIPAPQTLAPNHDVAATSTHSWTPSATVGYLPRAPVPPQTAQMDPSVHAAPLFGAASSSSYVSPAAFGVGNVTEVFPTDPNTPFSVADKSKKPPVPNWLREELLKKKSEPLSASAQNSENLNPMEANEAVQTIGRPDQSDSRSNDSAKSTEDDDDDEDEIEAARMAAINKEIKRVLTEVLLKVTDELFDEIATKVLNEDDSAESNEATGVFGSKETGLGRSRAKASAKVVLPAKSTNSSDHKDSTGLSSPKGALLGLASYDSDDDDDADTDSKDKMPISNLSSKDNAGAVNTEGDKSTLGKRNGNHNEQNSSLGSSPSGEDLKSNNQNFQRNANAEPEQMHIRDTENGEFRFKAKTRTEPKGAFDRMDEKAHTYAEVDIQNRKTSFGNNAEKHNDLESSHRHSEKSSKEDFVNELKADHTKELEYSRAEKYNNDDKYSMYGNIDKRGSCKEGKGSDSAAKHESDTREPHYRGNSKLDGAKGDWKDLPKDRERNRDDRRGKGKDEKDDRLRQMTSHNSRSSRSRSPRGRSRTRKENSHVRGSVSSDEPSDSVKKRKHYSHKTSMSPSPPKSRNRYTVHVVSL

SEQ ID NO: 166335 - protein, 652 aa, Zea Mays
MLQYPNSQAQPFPTTAAVQGGFSQGCLSMPVPLTEQPLFGHERQPIDPSDQPLEFNSRKAPDLAVHINVNSNIPAPQTLAPNHDVAATSTHSWTPSATVGYLPRAPVPPQTAQMDPSVHAAPLFGAASSSSYVSPAAFGVGNVTEVFPTDPNTPFSVADKSKKPPVPNWLREELLKKKSEPLSASAQNSENLNPMEANEAVQTIGRPDQSDSRSNDSAKSTEDDDDDEDEIEAARMAAINKEIKRVLTEVLLKVTDELFDEIATKVLNEDDSAESNEATGVFGSKETGLGRSRAKASAKVVLPAKSTNSSDHKDSTGLSSPKGALLGLASYDSDDDDDADTDSKDKMPISNLSSKDNAGAVNTEGDKSTLGKRNGNHNEQNSSLGSSPSGEDLKSNNQNFQRNANAEPEQMHIRDTENGEFRFKAKTRTEPKGAFDRMDEKAHTYAEVDIQNRKTSFGNNAEKHNDLESSHRHSEKSSKEDFVNELKADHTKELEYSRAEKYNNDDKYSMYGNIDKRGSCKEGKGSDSAAKHESDTREPHYRGNSKLDGAKGDWKDLPKDRERNRDDRRGKGKDEKDDRLRQMTSHNSRSSRSRSPRGRSRTRKENSHVRGSVSSDEPSDSVKKRKHYSHKTSMSPSPPKSRNRYTVHVVSL

SEQ ID NO: 166336 - protein, 797 aa, Zea Mays
MQHQHHPPLPQPYVYQPPPPPMAMQQQPPPPPGNPWPPHHGAGQHPPPTYPPPPPGQAWTNHSWAQNHGYQGQQRETNHLLDRGPMVSPAKNFGSFSSTYEQEVSYNYSSAPGTGNNMLQYPNSQAQPFPTTAAVQGGFSQGCLSMPVPLTEQPLFGHERQPIDPSDQPLEFNSRKAPDLAVHINVNSNIPAPQTLAPNHDVAATSTHSWTPSATVGYLPRAPVPPQTAQMDPSVHAAPLFGAASSSSYVSPAAFGVGNVTEVFPTDPNTPFSVADKSKKPPVPNWLREELLKKKSEPLSASAQNSENLNPMEANEAVQTIGRPDQSDSRSNDSAKSTEDDDDDEDEIEAARMAAINKEIKRVLTEVLLKVTDELFDEIATKVLNEDDSAESNEATGVFGSKETGLGRSRAKASAKVVLPAKSTNSSDHKDSTGLSSPKGALLGLASYDSDDDDDADTDSKDKMPISNLSSKDNAGAVNTEGDKSTLGKRNGNHNEQNSSLGSSPSGEDLKSNNQNFQRNANAEPEQMHIRDTENGEFRFKAKTRTEPKGAFDRMDEKAHTYAEVDIQNRKTSFGNNAEKHNDLESSHRHSEKSSKEDFVNELKADHTKELEYSRAEKYNNDDKYSMYGNIDKRGSCKEGKGSDSAAKHESDTREPHYRGNSKLDGAKGDWKDLPKDRERNRDDRRGKGKDEKDDRLRQMTSHNSRSSRSRSPRGRSRTRKENSHVRGSVSSDEPSDSVKKRKHYSHKTSMSPSPPKSRNRRISRSPHSKHSHRRHSPYSSAGRKRRSRSRTPVKRR

SEQ ID NO: 166337 - protein, 863 aa, Zea Mays
MQHQHHPPLPQPYVYQPPPPPMAMQQQPPPPPGNPWPPHHGAGQHPPPTYPPPPPGQAWTNHSWAQNHGYQGHDNEEDWATKAKAWVAAKSVMGNHQIQQHAISTSRTEGHHNGYHDQYQQPAGLPTEVTEALHPPVPQSSIDHVPFPMTGQQRETNHLLDRGPMVSPAKNFGSFSSTYEQEVSYNYSSAPGTGNNMLQYPNSQAQPFPTTAAVQGGFSQGCLSMPVPLTEQPLFGHERQPIDPSDQPLEFNSRKAPDLAVHINVNSNIPAPQTLAPNHDVAATSTHSWTPSATVGYLPRAPVPPQTAQMDPSVHAAPLFGAASSSSYVSPAAFGVGNVTEVFPTDPNTPFSVADKSKKPPVPNWLREELLKKKSEPLSASAQNSENLNPMEANEAVQTIGRPDQSDSRSNDSAKSTEDDDDDEDEIEAARMAAINKEIKRVLTEVLLKVTDELFDEIATKVLNEDDSAESNEATGVFGSKETGLGRSRAKASAKVVLPAKSTNSSDHKDSTGLSSPKGALLGLASYDSDDDDDADTDSKDKMPISNLSSKDNAGAVNTEGDKSTLGKRNGNHNEQNSSLGSSPSGEDLKSNNQNFQRNANAEPEQMHIRDTENGEFRFKAKTRTEPKGAFDRMDEKAHTYAEVDIQNRKTSFGNNAEKHNDLESSHRHSEKSSKEDFVNELKADHTKELEYSRAEKYNNDDKYSMYGNIDKRGSCKEGKGSDSAAKHESDTREPHYRGNSKLDGAKGDWKDLPKDRERNRDDRRGKGKDEKDDRLRQMTSHNSRSSRSRSPRGRSRTRKENSHVRGSVSSDEPSDSVKKRKHYSHKTSMSPSPPKSRNRRISRSPHSKHSHRRHSPYSSAGR

SEQ ID NO: 166338 - protein, 853 aa, Zea Mays
MQHQHHPPLPQPYVYQPPPPPMAMQQQPPPPPGNPWPPHHGAGQHPPPTYPPPPPGQAWTNHSWAQNHGYQGHDNEEDWATKAKAWVAAKSVMGNHQIQQHAISTSRTEGHHNGYHDQYQQPAGLPTEVTEALHPPVPQSSIDHVPFPMTGQQRETNHLLDRGPMVSPAKNFGSFSSTYEQEVSYNYSSAPGTGNNMLQYPNSQAQPFPTTAAVQGGFSQGCLSMPVPLTEQPLFGHERQPIDPSDQPLEFNSRKAPDLAVHINVNSNIPAPQTLAPNHDVAATSTHSWTPSATVGYLPRAPVPPQTAQMDPSVHAAPLFGAASSSSYVSPAAFGVGNVTEVFPTDPNTPFSVADKSKKPPVPNWLREELLKKKSEPLSASAQNSENLNPMEANEAVQTIGRPDQSDSRSNDSAKSTEDDDDDEDEIEAARMAAINKEIKRVLTEVLLKVTDELFDEIATKVLNEDDSAESNEATGVFGSKETGLGRSRAKASAKVVLPAKSTNSSDHKDSTGLSSPKGALLGLASYDSDDDDDADTDSKDKMPISNLSSKDNAGAVNTEGDKSTLGKRNGNHNEQNSSLGSSPSGEDLKSNNQNFQRNANAEPEQMHIRDTENGEFRFKAKTRTEPKGAFDRMDEKAHTYAEVDIQNRKTSFGNNAEKHNDLESSHRHSEKSSKEDFVNELKADHTKELEYSRAEKYNNDDKYSMYGNIDKRGSCKEGKGSDSAAKHESDTREPHYRGNSKLDGAKGDWKDLPKDRERNRDDRRGKGKDEKDDRLRQMTSHNSRSSRSRSPRGRSRTRKENSHVRGSVSSDEPSDSVKKRKHYSHKTSMSPSPPKSRNRYFGCDMSMQVSSA

SEQ ID NO: 166339 - protein, 657 aa, Zea Mays
MLQYPNSQAQPFPTTAAVQGGFSQGCLSMPVPLTEQPLFGHERQPIDPSDQPLEFNSRKAPDLAVHINVNSNIPAPQTLAPNHDVAATSTHSWTPSATVGYLPRAPVPPQTAQMDPSVHAAPLFGAASSSSYVSPAAFGVGNVTEVFPTDPNTPFSVADKSKKPPVPNWLREELLKKKSEPLSASAQNSENLNPMEANEAVQTIGRPDQSDSRSNDSAKSTEDDDDDEDEIEAARMAAINKEIKRVLTEVLLKVTDELFDEIATKVLNEDDSAESNEATGVFGSKETGLGRSRAKASAKVVLPAKSTNSSDHKDSTGLSSPKGALLGLASYDSDDDDDADTDSKDKMPISNLSSKDNAGAVNTEGDKSTLGKRNGNHNEQNSSLGSSPSGEDLKSNNQNFQRNANAEPEQMHIRDTENGEFRFKAKTRTEPKGAFDRMDEKAHTYAEVDIQNRKTSFGNNAEKHNDLESSHRHSEKSSKEDFVNELKADHTKELEYSRAEKYNNDDKYSMYGNIDKRGSCKEGKGSDSAAKHESDTREPHYRGNSKLDGAKGDWKDLPKDRERNRDDRRGKGKDEKDDRLRQMTSHNSRSSRSRSPRGRSRTRKENSHVRGSVSSDEPSDSVKKRKHYSHKTSMSPSPPKSRNRYFGCDMSMQVSSA

SEQ ID NO: 166340 - protein, 807 aa, Zea Mays
MEGHDNEEDWATKAKAWVAAKSVMGNHQIQQHAISTSRTEGHHNGYHDQYQQPAGLPTEVTEALHPPVPQSSIDHVPFPMTGQQRETNHLLDRGPMVSPAKNFGSFSSTYEQEVSYNYSSAPGTGNNMLQYPNSQAQPFPTTAAVQGGFSQGCLSMPVPLTEQPLFGHERQPIDPSDQPLEFNSRKAPDLAVHINVNSNIPAPQTLAPNHDVAATSTHSWTPSATVGYLPRAPVPPQTAQMDPSVHAAPLFGAASSSSYVSPAAFGVGNVTEVFPTDPNTPFSVADKSKKPPVPNWLREELLKKKSEPLSASAQNSENLNPMEANEAVQTIGRPDQSDSRSNDSAKSTEDDDDDEDEIEAARMAAINKEIKRVLTEVLLKVTDELFDEIATKVLNEDDSAESNEATGVFGSKETGLGRSRAKASAKVVLPAKSTNSSDHKDSTGLSSPKGALLGLASYDSDDDDDADTDSKDKMPISNLSSKDNAGAVNTEGDKSTLGKRNGNHNEQNSSLGSSPSGEDLKSNNQNFQRNANAEPEQMHIRDTENGEFRFKAKTRTEPKGAFDRMDEKAHTYAEVDIQNRKTSFGNNAEKHNDLESSHRHSEKSSKEDFVNELKADHTKELEYSRAEKYNNDDKYSMYGNIDKRGSCKEGKGSDSAAKHESDTREPHYRGNSKLDGAKGDWKDLPKDRERNRDDRRGKGKDEKDDRLRQMTSHNSRSSRSRSPRGRSRTRKENSHVRGSVSSDEPSDSVKKRKHYSHKTSMSPSPPKSRNRRISRSPHSKHSHRRHSPYSSAGRKRRSRSRTPVKRR

SEQ ID NO: 166341 - protein, 378 aa, Zea Mays
MYPPSFARFGGMDNIWQQYGDTNQAYGNVTYTPGIDLTLSPGNDLTRFQDSAVVHGPGPIIQENQSFSSTSQVPQPVNDRRKKGVAKREKNYSNLEDETLCSAYLNVSKDPVVGVNQPMKSYWARITDYFNEMRTTDVERSSSSLQHRWGDISRDTALFCSYYAEIERKHQSGKSEDDKIKDALKMYEGLRSSKFKFLHCWLILRKEQKWSEFLATTTSSTSQARSKADPVQQGDPTATSTPEVNVSEKIARPIGRDRAKKQRSNNSSSSSACFEMLQKIQLDRSRFEEDMKAASKYESEEMAVRYDRKLAIQEQHLKLVAESTMIQKEMLRFQQKEREDRVMTMDLDKVAPWVREYYINEQKAIAAKSRHEVSSSDV

SEQ ID NO: 166342 - protein, 70 aa, Zea Mays
MTSFFPDFCYARGVIPLHLSGFIGEAWLLSHLQRHGSADQARATIASKKMKHTQLNKELPYSMGSKNEDD

SEQ ID NO: 166343 - protein, 62 aa, Zea Mays
MLHMICYKFVVGQSVVPHVYFLKLLYLEEFFSVLFCLVLPTLVSVPCFSSVPVFNPTRLCPT

SEQ ID NO: 166344 - protein, 104 aa, Zea Mays
MFATYSLLSIIQSMVFRPNLRITVYITEKDIGKKRVKKKETNSFSYLLFDLLPHLGLVVLFFHSTPPGACLTGTFTNLGLGYIKARGVIPLHLSGFIGEAWLLR

SEQ ID NO: 166345 - protein, 67 aa, Zea Mays
MCSSIFRCAMQCRGKFSVLTCLTSIYTNEDRYLYTVNVSTTNDKNMFSKLNTYKFFGTKVLSHFGLP

SEQ ID NO: 166346 - protein, 216 aa, Zea Mays
MAIKSFFSTPQNNFRIFVNGSLAFGGMGGGADSVHPADTDKCIKDLSKVSGLELPDFTELLSETIFKSGVLGKLLTTQKLDDHDIEGAIHLYYNIISQPCLVCKNLTDVELLRKYTLLHSLPLDKSLKIVRNFLISATAKDCSLMISFRPRENGSTDSEYDSVFLESAKRTYEYKTYFVDLDVKPLDKMVHYFKLDQRIVNSYTRYGEVLPPPKGK

SEQ ID NO: 166347 - protein, 492 aa, Zea Mays
MKDRHLALNQTQRVRLEAALQELQSVAPAAAVTVADTIPVNQEDNILNCRFSMEMNGVLQAADAKYWVYKGEGAANLILSYTGSSPTMLGKVLRVKKLLNDKSQLPPSCMVFSSHEQLLWGHIPELVESVKQDCLAQAYAVHVMSQHLGANHVDGGVHVRVSRDFLELVEKNVLSSRPPWRVNASSIDITADAALLIADHSLFSGTPKGSSCIAVEIKAKCGFVPSSEYISKDNSIKKQVTRYKMHQHLKFHQGEISKTSEYNPLDLFSESKERISMAIKSFFSTPQNNFRIFVNGSLAFGGMGGGADSVHPADTDKCIKDLSKVSGLELPDFTELLSETIFKSGVLGKLLTTQKLDDHDIEGAIHLYYNIISQPCLVCKNLTDVELLRKYTLLHSLPLDKSLKIVRNFLISATAKDCSLMISFRPRENGSTDSEYDSVFLESAKRTYEYKTYFVDLDVKPLDKMVHYFKLDQRIVNSYTRYGEVLPPPKGK

SEQ ID NO: 166348 - protein, 218 aa, Zea Mays
MEMNGVLQAADAKYWVYKGEGAANLILSYTGSSPTMLGKVLRVKKLLNDKSQLPPSCMVFSSHEQLLWGHIPELVESVKQDCLAQAYAVHVMSQHLGANHVDGGVHVRVSRDFLELVEKNVLSSRPPWRVNASSIDITADAALLIADHSLFSGTPKGSSCIAVEIKAKCGFVPSSEYISKDNSIKKQVTRYKMHQHLKFHQGEVDFQYILEHISDIED

SEQ ID NO: 166349 - protein, 698 aa, Zea Mays
MASRQHNAQFHKSKTLDNKYMLGDEIGKGAYGRVYKGLDLENGDFVAIKQVSLENIPQEDLNIIMQEIDLLKNLNHKNIVKYLGSLKTKSHLHIILEYVENGSLANIIKPNKFGPFPESLVAVYIAQVLEGLVYLHEQGVIHRDIKGANILTTKEGLVKLADFGVATKLTEADINTHSVVGTPYWMAPEVIEMSGVCAASDIWSVGCTVIELLTCVPPYYDLQPMPALFRIVQDVHPPIPEGLSPEITDFLRQCFQKDAMQRPDAKTLLMHPWLQNSRRALPASLRQPTPLRNIDGDDESSRGDNNSGFCDTPGDTRATIASNVDQVNGRNGPNMDSAAQSKSEELHDGNLELTEGISSNNVALVKDNVVLNKDPTLVLHEKLPVESSFGDADLNGKVMAHELLQGGLPSKIELENKESSTVEDGDVFSFQAGRQNIDFQMVVEPSVVEGPKQLSRFSDKPEDASLEDLFPPIDKRGDNGAEPSTSTTVQELQYNGVHNGFVKGLNARVEKQKENDSESMNGGKLIEFAMQLENIDASGFGEHIPGESLFPLQSVEYSKIVAQLKPGESEDVILLACQKLLSIFSHRPEQKQIYMAQNGFLPLMELLEIPKNRILCSVLQLINNIVKDSTGFLENACLVGLIPVVMNFAEPNRPKDVRVQASLFLQQLCQASFHLQHLDIANVHCMSRDPCFGKLYGA

SEQ ID NO: 166350 - protein, 1339 aa, Zea Mays
MRSSTNPRRLTTNTAPARARVQMLGDEIGKGAYGRVYKGLDLENGDFVAIKQVSLENIPQEDLNIIMQEIDLLKNLNHKNIVKYLGSLKTKSHLHIILEYVENGSLANIIKPNKFGPFPESLVAVYIAQVLEGLVYLHEQGVIHRDIKGANILTTKEGLVKLADFGVATKLTEADINTHSVVGTPYWMAPEVIEMSGVCAASDIWSVGCTVIELLTCVPPYYDLQPMPALFRIVQDVHPPIPEGLSPEITDFLRQCFQKDAMQRPDAKTLLMHPWLQNSRRALPASLRQPTPLRNIDGDDESSRGDNNSGFCDTPGDTRATIASNVDQVNGRNGPNMDSAAQSKSEELHDGNLELTEGISSNNVALVKDNVVLNKDPTLVLHEKLPVESSFGDADLNGKVMAHELLQGGLPSKIELENKESSTVEDGDVFSFQAGRQNIDFQMVVEPSVVEGPKQLSRFSDKPEDASLEDLFPPIDKRGDNGAEPSTSTTVQELQYNGVHNGFVKGLNARVEKQKENDSESMNGGKLIEFAMQLENIDASGFGEHIPGESLFPLQSVEYSKIVAQLKPGESEDVILLACQKLLSIFSHRPEQKQIYMAQNGFLPLMELLEIPKNRILCSVLQLINNIVKDSTGFLENACLVGLIPVVMNFAEPNRPKDVRVQASLFLQQLCQASTLTLQMFIACQGIPVLVSFMEPDYAKYRDMVHLAIDGIWQVFKLQHSTPRNDFCRIAAKNGMLPRLVNTLYSLNEATRFASVSGSGASVTQNGSTPRRRSGQLDPSVLESCKARLDHHHSSGSLQSLQADADKHHILMDSSSSPRFSDKTSSNLERNENDLVIRPQRLSVSAGRTSTDRSPKHIELVSNGHNNSQNDQVRPLLSLLEKEPPSRHVSGQLDYVRHISGLERHETILPLLHTSTERKTNGELDLMMDFAEVSRHGRENGHLDSSIKASNRVHSMKYAPSASASNEGASTSGAASQTASGVLSGSGVLNLRPGSTTSSGPLAQMFSSMSADVAREYLEKVADLLLEFAQADTVVKSLMASQSLLTRVFQMFNKIEPPILLKILRCINHLSGDPNCLETLQRTDAIKHLIPILELRDGPLVYQIHSEVLNALFNLCKINKRRQEQAAENGIIPHLMKFVMSDSPLRQYALPLLCDMAHASRNSREQLRVHGGLDVYLNLLEDDAWACTALDSIAVCLAHDNDHRKVEQALLKKEAIQKLVKFFQDCPEQYFGHILDAFLKIITKSSRLNTAMATNGLTTLLIARLDHREAIARLTLLKLIKVVYEHHPRPKQLIVENDLPQKLQNLIEERRDGQRGGQQVLVKQMATSLLKALHINTVL

SEQ ID NO: 166351 - protein, 681 aa, Zea Mays
MASRQHNAQFHKSKTLDNKYMLGDEIGKGAYGRVYKGLDLENGDFVAIKQVSLENIPQEDLNIIMQEIDLLKNLNHKNIVKYLGSLKTKSHLHIILEYVENGSLANIIKPNKFGPFPESLVAVYIAQVLEGLVYLHEQGVIHRDIKGANILTTKEVIEMSGVCAASDIWSVGCTVIELLTCVPPYYDLQPMPALFRIVQDVHPPIPEGLSPEITDFLRQCFQKDAMQRPDAKTLLMHPWLQNSRRALPASLRQPTPLRNIDGDDESSRGDNNSGFCDTPGDTRATIASNVDQVNGRNGPNMDSAAQSKSEELHDGNLELTEGISSNNVALVKDNVVLNKDPTLVLHEKLPVESSFGDADLNGKVMAHELLQGGLPSKIELENKESSTVEDGDVFSFQAGRQNIDFQMVVEPSVVEGPKQLSRFSDKPEDASLEDLFPPIDKRGDNGAEPSTSTTVQELQYNGVHNGFVKGLNARVEKQKENDSESMNGGKLIEFAMQLENIDASGFGEHIPGESLFPLQSVEYSKIVAQLKPGESEDVILLACQKLLSIFSHRPEQKQIYMAQNGFLPLMELLEIPKNRILCSVLQLINNIVKDSTGFLENACLVGLIPVVMNFAEPNRPKDVRVQASLFLQQLCQASTLTLQMFIACQGIPVLVSFMEPDYAKYRSLSSSTQLQEMTSAV

SEQ ID NO: 166352 - protein, 806 aa, Zea Mays
MVMRVPAIAVGWLSLPSSRPSGSVEYSKIVAQLKPGESEDVILLACQKLLSIFSHRPEQKQIYMAQNGFLPLMELLEIPKNRILCSVLQLINNIVKDSTGFLENACLVGLIPVVMNFAEPNRPKDVRVQASLFLQQLCQASTLTLQMFIACQGIPVLVSFMEPDYAKYRDMVHLAIDGIWQVFKLQHSTPRNDFCRIAAKNGMLPRLVNTLYSLNEATRFASVSGSGASVTQNGSTPRRRSGQLDPSVLESCKARLDHHHSSGSLQSLQADADKHHILMDSSSSPRFSDKTSSNLERNENDLVIRPQRLSVSAGRTSTDRSPKHIELVSNGHNNSQNDQVRPLLSLLEKEPPSRHVSGQLDYVRHISGLERHETILPLLHTSTERKTNGELDLMMDFAEVSRHGRENGHLDSSIKASNRVHSMKYAPSASASNEGASTSGAASQTASGVLSGSGVLNLRPGSTTSSGPLAQMFSSMSADVAREYLEKVADLLLEFAQADTVVKSLMASQSLLTRVFQMFNKIEPPILLKILRCINHLSGDPNCLETLQRTDAIKHLIPILELRDGPLVYQIHSEVLNALFNLCKINKRRQEQAAENGIIPHLMKFVMSDSPLRQYALPLLCDMAHASRNSREQLRVHGGLDVYLNLLEDDAWACTALDSIAVCLAHDNDHRKVEQALLKKEAIQKLVKFFQDCPEQYFGHILDAFLKIITKSSRLNTAMATNGLTTLLIARLDHREAIARLTLLKLIKVVYEHHPRPKQLIVENDLPQKLQNLIEERRDGQRGGQQVLVKQMATSLLKALHINTVL

SEQ ID NO: 166353 - protein, 263 aa, Zea Mays
MMSQVDLAREAAHLSRFIYNFRRWKDVSFPRPLYPLVHPAVLVETYEHGESVSHYVDDLEGHDRIKSALAHIGTHALLKMLLVDNFVHADMHPGNILVRVAQPKNSNNTLKKSRPHVVFLDVGMTAELSSNDRVNLLEFFKAVARRDGRTAAESTLKLSKQQNCPNPKAFIEEVERSFSFWGTAEGDAIHPAECMHQLLEQVRCHKVNIDGNVCTVMVTTLVLEGWQRKLDPDYNVMKTLQTLLFKEDWAKSLQYTIQGLMAP

SEQ ID NO: 166354 - protein, 435 aa, Zea Mays
MMSRFAHLGKSRKLAETLLVASKPNTAGGQNIASSFAFGLGYSSRAFLHGKVHNGPNTSYMLGRANDSLHWSTGVRKFSILSSCSQNAFQSQLAWKRLVALGSRAPKASPIFSKVACAIGLAVSRSNIAPYLVAFIAGEVMLAQKTSADGEYYPIRERAQDGRIYVTSLIYSAVELVIIIFRSIYLALLFTPSILMAPFAETLGSKYRKTWLRLVHRTLELAGPAFIKWGQWAATRPDLFPSDLCTELSKLHTKAPAHSFTYTKKTVEKAFGRKLSDIFENFEEDPVASGSVAQVHRAVLRFRYPNRQTKRVTVAVKVRHPGVGDSIRRDFNIINAVAKISRYIPTLNWLRLDESVQQFAVFMMSQVDLAREAAHLSRFIYNFRRWKDVSFPRPLYPLVHPAVLVETYEHGESVSHYVDDLEGHDRIKSALAHIG

SEQ ID NO: 166355 - protein, 486 aa, Zea Mays
MAAADASAETAAIARRLASCNTGTRERALRYLLSDFLPASAPRLSATDLLKLWKGIFFCFWHADKPLYQSSVATRLASAVSAPPSPTDGTAFLAAYLTTLRREWAHIDVHRLDKFYLLNRRFLHHAFLLLRANSFAPDVTSQVVSVLSDKALLPEADNVAAATSRGLGYHVAEAFLDELLPVLPVSLETMDTLLAPFFTVLEKSTDRVMVSKVKAGVFERLLDSGSRLLEMVKKGEEVEKGDAEEKLGKVGLLFGFSKRFLDIGAMAETVQSNRKVVFGLRDAFVKIEKGLQLSGLEIPAPKFEATEVPVPPNVGKGKAQKKKKAKKAALAEGEMEEDNDLKREKKIKKEKKEKKRRKVEVVDEGDVTEKSTNAPGADQQMGDGTDGITFDAALKSNLQKQFEMVAAEAGMAEGGSSSSDSPVTPVTGKVATKRKRSKSADKLSEASAGDGGSEVFEAATFSYSKRKRTKKGCPARSHNTDPIEEG

SEQ ID NO: 166356 - protein, 127 aa, Zea Mays
MSCLMINDLDAGVGRFGNTQMTVNNQIAVGTLMNLADNPTRVSIGQKWRESDVTHRVPIIVTGNDFSTLYAPLIRDGRMEKFYWQPNREDIISIVHGMYIKDGLSVEEVSRIVDAFPNQVGRRNRWA

SEQ ID NO: 166357 - protein, 190 aa, Zea Mays
MLVLEDLMTVNNQIAVGTLMNLADNPTRVSIGQKWRESDVTHRVPIIVTGNDFSTLYAPLIRDGRMEKFYWQPNREDIISIVHGMYIKDGLSVEEVSRIVDAFPNQALDFYGALRSRTYDQAILEWVEEIGGHEQLNEKLLKRKKGEELPTFIPPKPTLEALIESGYSLVKEQELIMSSKLSKEYMKNLE

SEQ ID NO: 166358 - protein, 114 aa, Zea Mays
MLHTGYSTALLLRLSFPSPGCKYSQFHLSKEEKRDRETTVPALYFARCRRSQSITSRDTVPFLKVLGEGSHVQAAGQPTSSFIHKPATQSAKHKQNFRDQYMFTRLVYIHLSDR

SEQ ID NO: 166359 - protein, 683 aa, Zea Mays
MSEASCCCRTSPPTASSGSSSPSSLSAPPWPACVKEETPSALLKYREDELGALRGDGETTERPFQPWDRVYDYALYNDLGNPDLRQDLARPVLGGSQEYPYPRRTKTGRPAAKTDPRSESRAPLDEEIYVPCDERVGFASIPAPTLPPLGGHFRSLADVYRLFGLDDLGRLPEAKAVINSGAPFPVVPQVISVNPTHWRKDEEFARQMIAGANPVCIKRVTKFPLASELDRGVFGDQDSKITKDHVEKNMGGMTVQQAVEEGRLYVVDHHDWVMPYLKRINELPASEEKAEVSQRKVYAARTLLFLDGEDSSMLRPLAIELSSPHPEKEQLGAVSTVYTPPDSGDDGITAGRFSTWELAKVYASANDAAENNFVTHWLNTHASMEPIVIAANRQLSVLHPIHRLLKPHFRKTLHINAVARQIIVGSGDQRKDGSVFRGIDEVTYFPSKYNMEMSSKAYKAWNFTDLALPNDLIKRGLAKGDPKKPETVELAIKDYPYAVDGLDMWAAIKKWVADYCAIYYADDGAVARDSELQGWWSEVRNVGHGDLADAPWWPAMDCVADLVETCATVVWLSSAYHASISFGQYDYLGFVPNGPSITTRPVPGPDAGAEVTESDFLASVTPVTEALAEFRARLEEVAGNIDRRNADPALKNRTGQVEVPYTLLKPTAQPGLVLRGIPNSITV

SEQ ID NO: 166360 - protein, 223 aa, Zea Mays
MARAGGGGPVRGAALVVVLLGIVVGAARAQLRQNYYGSSCPSAESTVRSVISQRLQQSFAVGPGTLRLFFHDCFVRGCDASVMLMAPNGDDESHSGADATLSPDAVDAINKAKAAVEALPGCAGKVSCADILAMAARDVVSLLGGPSYGVELGRLDGKTFNRAIVKHVLPGPGFNLDQLNALFAQNGLTQTDMIALSGQPHCLYSTLLCAPLGHSTVSSSSSR

SEQ ID NO: 166361 - protein, 201 aa, Zea Mays
MERPTIWVGAPLGGPSYGVELGRLDGKTFNRAIVKHVLPGPGFNLDQLNALFAQNGLTQTDMIALSGAHTIGVTHCDKFVRRIYTFKQRLAWNPPMNLDFLRSLRRVCPLSYSPTAFAMLDVTTPRVFDNAYFNNLRYNKGLLASDQVLFTDRRSRPTVNLFAANATAFYEAFVAAMAKLGRIGLKTGADGEIRRVCTAVN

SEQ ID NO: 166362 - protein, 56 aa, Zea Mays
MVRTPSPDSRSSLFRVASSESGFWGHQCHWWLPLAMAAAGVGLRCGLCHQEGRDDV

SEQ ID NO: 166363 - protein, 53 aa, Zea Mays
MTFISIHFVIIYVVFFGACMRCTWLCLLEIACDNFHQGVILTKVNLAKRNWIG

SEQ ID NO: 166364 - protein, 303 aa, Zea Mays
MASLVVLVICGTCTCLIITRKPSSAEFIECYCMLGITPLAERLGYATEQLAIYTGPTVGGLLNATFGNATEMIIAVYALKNGMIRVVQQSLLGSILSNMLLVMGCAFFAGGVVHRNKDQIFSKATAVVNSGLLLMAVMGLMFPAVLHFTHSEVRQGASEVALSRFSSCIMLVAYASYLYFQLSGRSNIYSPIGSEEAPIEDIAEEDEEAEIGMWEAVTWLAVLTLWVSFLSEYLVNAIEGASDSLNLPVAFISVILLPIVGNAAEHASAIMFAMKDKLDITLGVAIGSSTQISIFHFVLLLVG

SEQ ID NO: 166365 - protein, 585 aa, Zea Mays
MAALEAAREWAGSVIPPELAAAAGGDPLAALAATAAALVAGLLIIAVWFRSGGGTPSKPVATPVRPPPVKVDADADVDDGRKRVTIFFGTQTGTAEGFAKSMAEEARARYEKAVFKVVDLDDYAQEDEEYEEKLKKETVVLFFLATYGDGEPTDNAARFYKWFTEGKEKEVWLKDLKYGIFGLGNRQYEHFNKVAKVVDELVEEQGGKRLVPVGLGDDDQCIEDDFTAWKELVWPELDQLLRDEDDTTGASTPYTAAIPEYRVVFIDKSDLSFQDRSWTLANGTGVIDIQHPCRSNVAVRKELHKPASDRSCIHLEFDISGTGLVYETGDHVGVYAENSVQTVEEVERLLDLSPDTFFSIHADAEDGSPRKGGGSLAPPFPSPCTLRTALLRYADLLNPPKKAALLALASHASDPAEAERLRFLASPSGKDEYSQWITASQRSLLEVMAAFPSAKPPLGVFFAAIAPRLQPRYYSISSSPKMAPSRIHVTCALVYGPSPTGRIHQGVCSTWMKNTIPLEYSEECSWAPIFVRQSNFKLPADPSTPIIMIGPGTGLAPFRGFLQVSIETIWGRIGHFNPFLWMQEP

SEQ ID NO: 166366 - protein, 521 aa, Zea Mays
MAALEAAREWAGSVIPPELAAAAGGDPLAALAATAAALVAGLLIIAVWFRSGGGTPSKPVATPVRPPPVKVDADADVDDGRKRVTIFFGTQTGTAEGFAKSMAEEARARYEKAVFKVVDLDDYAQEDEEYEEKLKKETVVLFFLATYGDGEPTDNAARFYKWFTEGKEKEVWLKDLKYGIFGLGNRQYEHFNKVAKVVDELVEEQGGKRLVPVGLGDDDQCIEDDFTAWKELVWPELDQLLRDEDDTTGASTPYTAAIPEYRVVFIDKSDLSFQDRSWTLANGTGVIDIQHPCRSNVAVRKELHKPASDRSCIHLEFDISGTGLVYETGDHVGVYAENSVQTVEEVERLLDLSPDTFFSIHADAEDGSPRKGGGSLAPPFPSPCTLRTALLRYADLLNPPKKAALLALASHASDPAEAERLRFLASPSGKDEYSQWITASQRSLLEVMAAFPSAKPPLGVFFAAIAPRLQPRYYSISSSPKMAPSRIHVTCALVYGPSPTGRIHQGVCSTWMKNAAGLPSL

SEQ ID NO: 166367 - protein, 430 aa, Zea Mays
MAALEAAREWAGSVIPPELAAAAGGDPLAALAATAAALVAGLLIIAVWFRSGGGTPSKPVATPVRPPPVKVDADADVDDGRKRVTIFFGTQTGTAEGFAKSMAEEARARYEKAVFKVVDLDDYAQEDEEYEEKLKKETVVLFFLATYGDGEPTDNAARFYKWFTEGKEKEVWLKDLKYGIFGLGNRQYEHFNKVAKVVDELVEEQGGKRLVPVGLGDDDQCIEDDFTAWKELVWPELDQLLRDEDDTTGASTPYTAAIPEYRVVFIDKSDLSFQDRSWTLANGTGVIDIQHPCRSNVAVRKELHKPASDRSCIHLEFDISGTGLVYETGDHVGVYAENSVQTVEEVERLLDLSPDTFFSIHADAEDGSPRKGGGSLAPPFPSPCTLRTALLRYADLLNPPKKLLTHLIQLKLSDLDSWLLLLERMSILNG

SEQ ID NO: 166368 - protein, 208 aa, Zea Mays
MYETGDHVGVYAENSVQTVEEVERLLDLSPDTFFSIHADAEDGSPRKGGGSLAPPFPSPCTLRTALLRYADLLNPPKKAALLALASHASDPAEAERLRFLASPSGKDEYSQWITASQRSLLEVMAAFPSAKPPLGVFFAAIAPRLQPRYYSISSSPKMAPSRIHVTCALVYGPSPTGRIHQGVCSTWMKRRMQLGSHLCEAVKFQVTC

SEQ ID NO: 166369 - protein, 247 aa, Zea Mays
MAAFPSAKPPLGVFFAAIAPRLQPRYYSISSSPKMAPSRIHVTCALVYGPSPTGRIHQGVCSTWMKNTIPLEYSEECSWAPIFVRQSNFKLPADPSTPIIMIGPGTGLAPFRGFLQERLALKQSGAELGTSILFFGCRNRNMDYIYEDELQTFLEEGALSELIVAFSREGPTKEYVQHKMVEKATDIWNIISNGGYLYVCGDAKGMARDVHKMLHTIVQEQGSLDNSKTESYVKSLQMEGRYLRDVW

SEQ ID NO: 166370 - protein, 95 aa, Zea Mays
MIIQPGRRRYSLVTYTWRQCKVAASGKKKKLARPTQGDVRKLTAQSMSMHGPCVCVCSCSRNSPETTMHEAGTAAMHAQAHRRHGAAAAYPAPHH

SEQ ID NO: 166371 - protein, 289 aa, Zea Mays
MKNMTRQEFVASLRRKSSGFSRGASIYRGVTRHHQHGRWQARIGRVAGNKDLYLGTFSTEEEAAEAYDIAAIKFRGLNAVTNFEISRYNVETIMSSNLPVASMSSSAAAAAGGRSSKALESPPSGSLDGGGGMPVVEASTAPPLFIPVKYDQQQQEYLSMLALQQHHQQQQAGNLLQGPLVGFGGLYSSGVNLDFANSHGTAAPSSMAHHCYANGTASASHEHQHQMQQGGENETQPQPQQSSSSCSSLPFATPVAFNGSYESSITAAGPFGYSYPNVAAFQTPIYGME

SEQ ID NO: 166372 - protein, 70 aa, Zea Mays
MIMPSQRKKEQEESPLAKVTRDSSKITAEQVHGLMSQVIKDILFNSVHPSSKASTSAPPDSSGPEPMVEA

SEQ ID NO: 166373 - protein, 309 aa, Zea Mays
MEPTSSASIARQTWELENNIPAAASDPDAMDAIYRYDDASQARAQQEKPWANDPHHFRRTKISALALLKMVVHARAGGTIEVMGLMQGKCEGDAIIVMDAFALPVEGTETRVNAQADAYEYMVDYSTINKQAGRLENVVGWYHSHPGYGCWLSGIDVSTQMLNQQFTEPFLAVVIDPTRTVSAGKVEIGAFRTYPKDYKPPDEPVSEYQTIPLNKIEDFGVHCKSYYALDITYFKSSLDSHLLDLLWNKYWVNTLSSSSLLGNRDYVAGQIFDLADKLEQAEGQLAHSRFGGMIMPSQRKKEKSLHWLR

SEQ ID NO: 166374 - protein, 85 aa, Zea Mays
MEASYTQDSKLSGMELNGTLDYQLLSLQALKTMDLSNNHLHDSIPYQLPSNLTYLNLAKNNFSAISATTRYFRKLVNFLSELYIV

SEQ ID NO: 166375 - protein, 70 aa, Zea Mays
MILNQLCASSYLILAVFQLSTVFGFKFELVCLGVISSSRVCCLHIYLHILFDQLYHVTTSDVHEKQLNHL

SEQ ID NO: 166376 - protein, 96 aa, Zea Mays
MKMTTGFLFASSSSRMQGRLEAPFLHGSCMERNYWQKTNLDQILECAKGISFACCNSCAAWRHKRSRGVICLLCRERGHSLKNCPDKSEGNLKKFC

SEQ ID NO: 166377 - protein, 79 aa, Zea Mays
MEASYTQDSKLSGMELNGTLDYQLLSLQALKTMDLSNNHLHDSIPYQLPSNLTYLNLAKNNFSGNLPYSISNLVSLEYL

SEQ ID NO: 166378 - protein, 105 aa, Zea Mays
MNRSKVLPHSDMNEPPPEFQLLTLIGMGLDTNEEFLMAMQQQLVHEIREVWTTSVEHLLYIKEDLIIPHGCVHSLVIYEVLLKLVEPFSDSMFSLLFDNNTSFMN

SEQ ID NO: 166379 - protein, 284 aa, Zea Mays
MAGWISSKLKAAETLLHQIDQQAAESLGKSPSASDLATLHSTTSRSADDLLDVPLPRRPPPSGPPPSLGLRLAAKRRSPPSQGPRRSASAAAMLAVQDQAGGEPTVGVVAEVKPETDGGDREDGKSVASESGSDEDSDGSGSEDSEDSEEERRREEERTRRRAERLAAMAARAIAEREDAVARLEGEKAGLEKLLAEREKEQAQEASELQTSMIETLEAVEIEKQRHHSTRMEALARLARLEVTNGELAKSLAREQWNLEVQVDQVAQLREEVELKKLAQDKES

SEQ ID NO: 166380 - protein, 350 aa, Zea Mays
MAGWISSKLKAAETLLHQIDQQAAESLGKSPSASDLATLHSTTSRSADDLLDVPLPRRPPPSGPPPSLGLRLAAKRRSPPSQGPRRSASAAAMLAVQDQAGGEPTVGVVAEVKPETDGGDREDGKSVASESGSDEDSDGSGSEDSEDSEEERRREEERTRRRAERLAAMAARAIAEREDAVARLEGEKAGLEKLLAEREKEQAQEASELQTSMIETLEAVEIEKQRHHSTRMEALARLARLEVTNGELAKSLAREQWNLEVQVDQVAQLREEVELKKLAQDSKLTMTFFLGLSGLEFTVFLSTFSSFLGQRYIMLTYFVFFLNLFKYDMPFFLVSTNSTFFWYVTFVTIP

SEQ ID NO: 166381 - protein, 443 aa, Zea Mays
MAGAAIIVALQQLKALLGIVHFTTEMGIVPVMASVFHHTSEWSWQTILMGVCFLVFLLSARHVSIRWPKLFWVSACAPLASVTISTLLVFLFKAQNHGISIIGQLKCGLNRPSWDKLLFDTAYLGLTMKTGLVTGIISLTEGIAVGRTFASLKDYQIDGNKEMMAIGLMNVVGSCTSCYVTTGAFSRSAVNHNAGCKTAMSNVIMALTVMVTLLFLMPLFVYTPNVVLGAIIIAAVIGLIDFPAVYHIWKMDKMDFLVCVCAFAGVIFISVQEGLAIAVGISIFRVLMQITRPKMMVQGNIKGTDIYRDLHHYKEAQRVSGFLILAIEAPINFANSNYLNERIKRWIEEESFEQDKHTELHFIILDLSAVPAIDTSGIAFLIDIKKSIEKRGLELVLVNPTGEVMEKIQRANEAENYFRPDCLYLTTGEAIASLSALAKMTKP

SEQ ID NO: 166382 - protein, 547 aa, Zea Mays
MQGISYAKLASLPPIIGLYSSFVPPMVYAVLGSSRDLAVGPVSISSLIMGSMLRQAVSPTAEPTLFLQLAFTSTLFAGLVQASLGILRLGFVIDFLSKATLVGFMAGAAIIVALQQLKALLGIVHFTTEMGIVPVMASVFHHTSEWSWQTILMGVCFLVFLLSARHVSIRWPKLFWVSACAPLASVTISTLLVFLFKAQNHGISIIGQLKCGLNRPSWDKLLFDTAYLGLTMKTGLVTGIISLTEGIAVGRTFASLKDYQIDGNKEMMAIGLMNVVGSCTSCYVTTGAFSRSAVNHNAGCKTAMSNVIMALTVMVTLLFLMPLFVYTPNVVLGAIIIAAVIGLIDFPAVYHIWKMDKMDFLVCVCAFAGVIFISVQEGLAIAVGISIFRVLMQITRPKMMVQGNIKGTDIYRDLHHYKEAQRVSGFLILAIEAPINFANSNYLNERIKRWIEEESFEQDKHTELHFIILDLSAVPAIDTSGIAFLIDIKKSIEKRGLELVLVNPTGEVMEKIQRANEAENYFRPDCLYLTTGEAIASLSALAKMTKP

SEQ ID NO: 166383 - protein, 365 aa, Zea Mays
MVGMRGAYGGACNDDSKSRLHGGKAAEPEIASMAVHKVAPPPARSTASKMKVRVKETFFPDDPFRAFKGQPPGTQWLMAVRYLFPILDWVPSYSLSLFKSDLVAGLTIASLAIPQGISYAKLASLPPIIGLYSSFVPPMVYAVLGSSRDLAVGPVSISSLIMGSMLRQAVSPTAEPTLFLQLAFTSTLFAGLVQASLGILRLGFVIDFLSKATLVGFMAGAAIIVALQQLKALLGIVHFTTEMGIVPVMASVFHHTSEWSWQTILMGVCFLVFLLSARHVSIRWPKLFWVSACAPLASVTISTLLVFLFKAQNHGISIIGQLKCGLNRPSWDKLLFDTAYLGLTMKTGLVTGIISLTLLYYCRKE

SEQ ID NO: 166384 - protein, 583 aa, Zea Mays
MVGMRGAYGGACNDDSKSRLHGGKAAEPEIASMAVHKVAPPPARSTASKMKVRVKETFFPDDPFRAFKGQPPGTQWLMAVRYLFPILDWVPSYSLSLFKSDLVAGLTIASLAIPQGISYAKLASLPPIIGLYSSFVPPMVYAVLGSSRDLAVGPVSISSLIMGSMLRQAVSPTAEPTLFLQLAFTSTLFAGLVQASLGILRLGFVIDFLSKATLVGFMAGAAIIVALQQLKALLGIVHFTTEMGIVPVMASVFHHTSEWSWQTILMGVCFLVFLLSARHVEGIAVGRTFASLKDYQIDGNKEMMAIGLMNVVGSCTSCYVTTGAFSRSAVNHNAGCKTAMSNVIMALTVMVTLLFLMPLFVYTPNVVLGAIIIAAVIGLIDFPAVYHIWKMDKMDFLVCVCAFAGVIFISVQEGLAIAVGISIFRVLMQITRPKMMVQGNIKGTDIYRDLHHYKEAQRVSGFLILAIEAPINFANSNYLNERIKRWIEEESFEQDKHTELHFIILDLSAVPAIDTSGIAFLIDIKKSIEKRGLELVLVNPTGEVMEKIQRANEAENYFRPDCLYLTTGEAIASLSALAKMTKP

SEQ ID NO: 166385 - protein, 390 aa, Zea Mays
MFIEEQIREYGRTSHIYNCDTFDENTPPLSDPNYISSLGAATFRGMQSGDNDAIWLMQGWLFTYDPFWEPPQMKALLHSVPVGKMIVLDLYAEVKPVWINSDQLYGVPYIWCMLHNFAADFEMYGVLDALASGPIDARLSDNSTMVGVGMSMEGIEQNPIVYDLMSEMAFHHRQVDLQVWVKTYPTRRYGKPVKGLQDAWWILYRTLYNCTDGKNDKNRDVIVAFPDVEPFVIATPGLHVNTRQMYSTVPSKNYIRKDVSSDAYEHPHLWYDTNAVIHALELFLQHGDEVSDSNTFRYDLVDLTRQVLAKYANDVFLKIIESYKSNNMNQVTILCQHFLSLVNDLDTLLSSHEGFLLGPWLESAKGLARNSEQEIQVIFFFCHFLKLNYV

SEQ ID NO: 166386 - protein, 763 aa, Zea Mays
MLGGFCIELYITAQMDKNRDVIVAFPDVEPFVIATPGLHVNTRQMYSTVPSKNYIRKDVSSDAYEHPHLWYDTNAVIHALELFLQHGDEVSDSNTFRYDLVDLTRQVLAKYANDVFLKIIESYKSNNMNQVTILCQHFLSLVNDLDTLLSSHEGFLLGPWLESAKGLARNSEQEIQYEWNARTQITMWFDNTETKASLLRDYANKYWSGLLQDYYGPRAAIYFKHLLLSMENNAPFALKEWRREWISLTNNWQSDRKVFSTTATGDPLNISQSLYTKYLSNADLLGLVEVGWGSFQLGYSGNADLEPGRCRRTDGKKWRCSRDAVADQKYCERHMNRGRHRSRKHVEGQPGHAAKAMSAVAVAAAVAALAGAEATAAAGLAVNQHRQPGKSYATVIGKSGANVRRVEQQTGARIKVQEIDKDASGERLIIVSSNEIPTEPISPTIEALILLHDKVAGPPAIARGALTEIASRLRTRTLRDTSTSGLWNGGNTKNCIYDVSSRGRALARSTEDLARATGSVAASPSGSTSSTSSSPESRATSPFPALDSDPCRTFLHCYLQKGKECRAGSNVVGIYLRFLQLEYNCYKIGKTKVFLRAGQMAELAARRAEILANAARLIQRRIKTHLMRKEFIKLRKASVQSQKFWRARLAKKIFEYMRRDVASIRIQKHVRAHSARKAYLQVYESATAIQTGLRAMAARNEHRFRRETRASIIIQLSRFALLCLSLFANGFSRKNIMNSSLNHRLGGANTELMLLTNSNRKLL

SEQ ID NO: 166387 - protein, 246 aa, Zea Mays
MAKRLAGADKEVLVEVVRFTQKSGLRGCDGGWKDFLARNDRKFGASVSDPRKRSRDVLLAFLQTFPKDFQKYFGKLVKRHNERSAVQQYVADFPDEVSPQQKLVQLTAEHPEYRKHYCFPSYQEASKVLQIDVSSLTSSSAMLSIDCEMVLCSDGTEAVVRVCVVDDKLKAKLDILVNPSKTVADYRTHITGVSKKDLEGVTSSLVDVQKSLKRMLSKGNILIGHSLHRDLCGYFGVFSSRRRRTT

SEQ ID NO: 166388 - protein, 389 aa, Zea Mays
MGMASCVHWYLTHCHPYPHHGRNGSQRAKMDARFVCAADSELQLARARCVALQDHLAASPDLPRHPALRSLLRLVNAELRFLSSLRLAPATPLSSNLPHLVALHLVLTHPAIRSPSRLSPLPGVDFSCAFRGRPAWVLVSASNPARLAWAPPGGLRARFAAALEAARGAPPATRPEKLLVVFSRGVGVDIARGLTEGFEAVEADLLEEFIGDSEEENEHGWVVISLDSSEELRNFRAFEIDVVEGASEVLLPSDVAVDEVSADEEELLGFWGSFAAFMEKMWKVSRELVNLDTTALVAIVSGISNGGVGKLMAAPEAETRARFKCNYKFVMDQAQYELQFPILIELRKAVEGKQCIICETVNLEFKEIVSMCGGPEENTRARHLLKQLT

SEQ ID NO: 166389 - protein, 451 aa, Zea Mays
MGMASCVHWYLTHCHPYPHHGRNGSQRAKMDARFVCAADSELQLARARCVALQDHLAASPDLPRHPALRSLLRLVNAELRFLSSLRLAPATPLSSNLPHLVALHLVLTHPAIRSPSRLSPLPGVDFSCAFRGRPAWVLVSASNPARLAWAPPGGLRARFAAALEAARGAPPATRPEKLLVVFSRGVGVDIARGLTEGFEAVEADLLEEFIGDSEEENEHGWVVISLDSSEELRNFRAFEIDVVEGASEVLLPSDVAVDEVSADEEELLGFWGSFAAFMEKMWKVSRELVNLDTTALVAIVSGISNGGVGKLMAAPEAETRARFKCNYKFVMDQFPILIELRKAVEGKQCIICETVNLEFKEIVSMCGGPEENTRARHLLKQLTIVPDNPSARMMDLPTTRKLAMKNKIVFGTGDHWRAPTLTANMGFVRAVSQSGMSLLTIEHRPRALIGL

SEQ ID NO: 166390 - protein, 277 aa, Zea Mays
MEAAPTPEPGPHVLVIPFPAQGHALPLIDFVALLAARGLRLTVVTTPANLQLLSSLLAAHPTAVRAATFPFPSHPSLPPGLENTKGCSPVQFPAFVHALAELRGPILAWVKAQPDPVVAVVADFFCGWAQPLAREIGAAGIVFSPSGVLGTAVPHSTFRRLELHGRRSGRAGRRVGEAELHVEPARQLGVRVQLVQSAGGEVPGAASRGPGLQARLGSGPRGSGGGRRGCPRRAGNRRARRSQRVAGRVPGRFGCIRVLREPGRAEPRRGGGAGRGA

SEQ ID NO: 166391 - protein, 265 aa, Zea Mays
MGRKGRKKGLLYPLTSLSPRPSAPSSLYLALASLPVERRYQVFRDNLRYIDAHNAAADAGVHSFRLGLNRFADLTNDEYRATYLGARTRPQRERKLGARYHAADNEDLPESVDWRAKGAVAEVKDQGSCGSCWAFSTIAAVEGINQIVTGDLISLSEQELVDCDTSYNQGCNGGLMDYAFEFIINNGGIDTEKDYPYKGTDGRCDVNRKNAKVVTIDSYEDVPANDEKSLQKAVANQPVSVAIEAAGTAFQLYSSTILPLPVKHF

SEQ ID NO: 166392 - protein, 445 aa, Zea Mays
MAAPASTTAAAAAALLLLLLLSLAAAADMSIVSYGERSDEEARRMYAEWMAAHGRTYNAVGEEERRYQVFRDNLRYIDAHNAAADAGVHSFRLGLNRFADLTNDEYRATYLGARTRPQRERKLGARYHAADNEDLPESVDWRAKGAVAEVKDQGSCGSCWAFSTIAAVEGINQIVTGDLISLSEQELVDCDTSYNQGCNGGLMDYAFEFIINNGGIDTEKDYPYKGTDGRCDVNRKNAKVVTIDSYEDVPANDEKSLQKAVANQPVSVAIEAAGTAFQLYSSGIFTGSCGTALDHGVTAVGYGTENGKDYWIVKNSWGSSWGESGYVRMERNIKASSGKCGIAVEPSYPLKEGANPPNPGPSPPSPTPAPAVCDNYYSCPDSTTCCCDHYSCCPHDYPICNVRQGTCLMGKDSPLSLSVKATKRTLAKPHWAFSGNTADGMKSSA

SEQ ID NO: 166393 - protein, 266 aa, Zea Mays
MDYAFEFIINNGGIDTEKDYPYKGTDGRCDVNRKNAKVVTIDSYEDVPANDEKSLQKAVANQPVSVAIEAAGTAFQLYSSGIFTGSCGTALDHGVTAVGYGTENGKDYWIVKNSWGSSWGESGYVRMERNIKASSGKCGIAVEPSYPLKEGANPPNPGPSPPSPTPAPAVCDNYYSCPDSTTCCCIYEYGKYCFAWGCCPLEGATCCDDHYSCCPHDYPICNVRQGTCLMGKDSPLSLSVKATKRTLAKPHWAFSGNTADGMKSSA

SEQ ID NO: 166394 - protein, 112 aa, Zea Mays
MYRPLEARLAISFQHDDDRCRFHDLLAPYIHSFPVLPIAPDFVEDANQTRERRRFGSRENRRQSPLASWVWSRQQLRADCSTKLLSEHLQETHHFLSILLPIYFFIKIIFYM

SEQ ID NO: 166395 - protein, 158 aa, Zea Mays
MIVVVAAAQAGVGAFYSSPTKRANRNRRIRHWSPLIIVHCPLSPTSTCTTFVQGTGRWRPDSRFLSNTTTTGADFTTCWPHIFIAFPYYQLHLILSRMRTKHEKEDGLVLGKIDGSRHSPAGFGPDSSYVRIAQRSCYQSIFKRLIIFSLFYFLFTFS

SEQ ID NO: 166396 - protein, 138 aa, Zea Mays
MRGDSWASSNSSSPPPPPLLPPPRRSAWRGRVRMPMSSPMPCSPSTTSTDDLQGDLLRTVMLACRYISWPLLWLILACVIKDHSFVPPNISCFLRTFLVAWPLFGPLSRSFSAYILYSFSSLYIHLNLCNFFWVCCGT

SEQ ID NO: 166397 - protein, 415 aa, Zea Mays
MFVLRIQSVDFPDAAVAAVAADEVGTSSGGVTTSRPLSSHPPPSTTTSSILTLELPGANPVAPSRSPRILHTRGVIHLYHSSSSTSTSSSYASAVAATSSSSSGPATPQPASDSHLPLCRGTRLLVLAVPTRVSPEDFVRFCGPHLECAADIRFIRDDGVEDRYSVLVEFEDQSSAEWFYADLNGWRFSTSESEVCHVLFIAAVQYTPSSEVATTPPAGSTELPMCPVCIERLDQDISGILATTCDHSFRCSCVSVWTNSSCPVCQFCQKQSENSTCSVCQTTGNLWICVICGFVGCGRYQEGHAKQHWKDTQHCYSLDLETQRVWDYVGDSFVHRLNQSKSDAKHAKFKSKSKYSGDECVNCSCNDDSDMGGAMFSSKAETIVDEYNRLLASQLETQREVQTCSSFLLSFLCHY

SEQ ID NO: 166398 - protein, 270 aa, Zea Mays
MFVLRIQSVDFPDAAVAAVAADEVGTSSGGVTTSRPLSSHPPPSTTTSSILTLELPGANPVAPSRSPRILHTRGVIHLYHSSSSTSTSSSYASAVAATSSSSSGPATPQPASDSHLPLCRGTRLLVLAVPTRVSPEDFVRFCGPHLECAADIRFIRDDGVEDRYSVLVEFEDQSSAEWFYADLNGWRFSTSESEVCHVLFIAAVQYTPSSEKDWIRTSVGFWQLLVITLSVAHVFQCGPIHPVRYASFVRSSLKILHVLFAKPLETSGYV

SEQ ID NO: 166399 - protein, 225 aa, Zea Mays
MFVLRIQSVDFPDAAVAAVAADEVGTSSGGVTTSRPLSSHPPPSTTTSSILTLELPGANPVAPSRSPRILHTRGVIHLYHSSSSTSTSSSYASAVAATSSSSSGPATPQPASDSHLPLCRGTRLLVLAVPTRVSPEDFVRFCGPHLECAADIRFIRDDGVEDRYSVLVEFEDQSSAEWFYADLNGWRLPQLHRLDPLNFQCVLFALVNLLFCIFFCILGPLQYNL

SEQ ID NO: 166400 - protein, 453 aa, Zea Mays
MAGKGKEVYVAAIDQGTTSTRFIVYDRHAKPVASHQLEFKQHYPEAGWVEHDPMEIIETVKVCMKEAVGKAKDGKHNVVAGLKAIGITNQRETTVMWSKSTGRPLYNAIVWMDARTSPVCRRLENELSGGRTHFVETCGLPISTYFSALKLLWLMENVDAVKDAVRTGDALFGTIDTWLIWNLTGGVAGGQHVTDCSNASRTMLMNLKTLDWDKPTLAVLGVPVEILPKIISNSEKIGVVAKEFPFAGVPISGCLGDQHAAMLGQLCQKGEAKSTYGTGAFILLNTGEEPTQSSHGLLSTIAYKLGPAAPTNYALEGSIAIAGAAVQWLRDSLGIIQSAAEIEKLAETVPDSGGVYFVPAFNGLFAPWWRDDARGICIGITRFTNKGHIARAVLESMCFQVNDVLSSMHKDAGEAGEVKSAEGEFLLRVDGGATVNNLLMQIQAMLSVSAFGS

SEQ ID NO: 166401 - protein, 499 aa, Zea Mays
MKLDIYYTLVTLFHAICSSHCSWWVEHDPMEIIETVKVCMKEAVGKAKDGKHNVVAGLKAIGITNQRETTVMWSKSTGRPLYNAIVWMDARTSPVCRRLENELSGGRTHFVETCGLPISTYFSALKLLWLMENVDAVKDAVRTGDALFGTIDTWLIWNLTGGVAGGQHVTDCSNASRTMLMNLKTLDWDKPTLAVLGVPVEILPKIISNSEKIGVVAKEFPFAGVPISGCLGDQHAAMLGQLCQKGEAKSTYGTGAFILLNTGEEPTQSSHGLLSTIAYKLGPAAPTNYALEGSIAIAGAAVQWLRDSLGIIQSAAEIEKLAETVPDSGGVYFVPAFNGLFAPWWRDDARGICIGITRFTNKGHIARAVLESMCFQVNDVLSSMHKDAGEAGEVKSAEGEFLLRVDGGATVNNLLMQIQADLLGSPVVRPADIETTALGAAYAAGLAAGVWTKEKVFAGLHKENTTVFRPKLDEAHRKKRADSWYKAVSRSFDLADLSL

SEQ ID NO: 166402 - protein, 275 aa, Zea Mays
MGSSLKYRSGLCLIVAVVLIWVISAEVTQYLSNAALARTSVASTTVLSSTSGLFTLFIGVLLGQDSINAAKIIAVFISMAGVVMTTVGQTWASDESEAGKSGFTQRTLLGDMFGLMSAIAYGLFTVLLKKFCGEEGEKVDVQKLFGYLGLFTLVALWWIVWPLTALGVEPKFSMPHSAKVDEVVVANSLIGSVLSDYFWALSVVWTTPLVATLGMSLTIPIAMVADMIIHGRHYSAVYILGSVQVRVSSSPVFFYLKLHQISTILQQLPLPVWML

SEQ ID NO: 166403 - protein, 52 aa, Zea Mays
MIHFRKCANSSFSFQQNLFERKLSTHFSRKLLSIWASVSAPFSSLGDPSNMF

SEQ ID NO: 166404 - protein, 68 aa, Zea Mays
MYRLQRSIRSIFIAEAKCSDDFVFSIVFSVIGSACAYIDMIYGMASVIFVIFMTSFLIDVCDMNDGSF

SEQ ID NO: 166405 - protein, 52 aa, Zea Mays
MLVNYYLVFSFGNISVYLCLEFLGTYGRCKFYSREVYSEVCKLSINIRQLLS

SEQ ID NO: 166406 - protein, 759 aa, Zea Mays
MAGERGIQLSGGQKQRIAIARAMLKNPKILLLDEATSALDADSESIVQEALDRLMVGRTTVVVAHRLSTIRNVNMIAVIQQGQVVETGTHDELIAKGTSGAYASLVRFQETARNRDLGGASSRRSRSIHLTSSLSTKSLSLRSGSLKNLSYQYSTGADGRIEMISNADNDRKYPAPRGYFFKLLKLNAPEWPYAVLGAIGSVLSGFIGPTFAIVMGEMLDVFYYRDPNEIEKKTKLYVFIYIGTGIYAVVAYLVQHYFFSIMGENLTTRVRRMMLSAILRNEVGWFDEEENNSSLVAARLGVDAADVKSAIAERISVILQNMTSLMTSFVVGFIIEWRVAILILATFPLLVLANFAQQLSMKGFAGDTAKAHARSSMVAGEAVSNIRTVAAFNAQSKILSLFSHELRVPEQQILRRSQTSGLLFGLSQLCLYSSEALILWYGSHLVRSHGSTFSKVIKVFVVLVVTANSVAETVSLAPEIIRGGESIRSIFGILNRATRIEPDDPESERVTTIRGDIELRHVDFSYPARPDIQIFKDFNLKIQAGRSQALVGASGSGKSTVIALIERFYDPCGGKVAIDGKDIRTLNLKSLRLKIGLVQQEPVLFASSILENIAYGKEGASEEEVVEAAKTANVHGFVSQLPDGYRTAVGEQGMQLSGGQKQRIAIARAVLKDPAILLLDEATSALDAESECVLQEALERLMKGRTTVLVAHRLSTIRGVDRIAVVQDGRVVEHGSHSDLLARPEGAYLRLLQLQHHRV

SEQ ID NO: 166407 - protein, 1146 aa, Zea Mays
MYTGERQVIALRKAYLDAVLRQDVGFFDTDARTGDIVFGVSTDTLLVQDGIGEKVGNFMHYIATFLAGLVVGFVSAWRLALLSVAVIPAIAFAGGLYAYTLTGLTSKSRESYANAGVVAEQAIGQVRTVYSFVGESKALNSYSEAIQNTLKLGYKAGMAKGLGIGCTYGIACMSWALVFWYAGVFIRNGQTDGGKAFTAIFSAIVGGMSLGQAFSNLGAFSKGKIAGYKLLEVIRQKPSIVNDHKDGKWLAEVHGNIEFKEVTFSYPSRPDVIIFRDFSLFFPAGKTVAVVGGSGSGKSTVVALIERFYDPNEGQVLLDNVDIKTLQLRWLREQIGLVNQEPALFATTILENILYGKPDATIAEVEAAATASNAHSFISLLPNGYNTMAGERGIQLSGGQKQRIAIARAMLKNPKILLLDEATSALDADSESIVQEALDRLMVGRTTVVVAHRLSTIRNVNMIAVIQQGQVVETGTHDELIAKGTSGAYASLVRFQETARNRDLGGASSRRSRSIHLTSSLSTKSLSLRSGSLKNLSYQYSTGADGRIEMISNADNDRKYPAPRGYFFKLLKLNAPEWPYAVLGAIGSVLSGFIGPTFAIVMGEMLDVFYYRDPNEIEKKTKLYVFIYIGTGIYAVVAYLVQHYFFSIMGENLTTRVRRMMLSAILRNEVGWFDEEENNSSLVAARLGVDAADVKSAIAERISVILQNMTSLMTSFVVGFIIEWRVAILILATFPLLVLANFAQQLSMKGFAGDTAKAHARSSMVAGEAVSNIRTVAAFNAQSKILSLFSHELRVPEQQILRRSQTSGLLFGLSQLCLYSSEALILWYGSHLVRSHGSTFSKVIKVFVVLVVTANSVAETVSLAPEIIRGGESIRSIFGILNRATRIEPDDPESERVTTIRGDIELRHVDFSYPARPDIQIFKDFNLKIQAGRSQALVGASGSGKSTVIALIERFYDPCGGKVAIDGKDIRTLNLKSLRLKIGLVQQEPVLFASSILENIAYGKEGASEEEVVEAAKTANVHGFVSQLPDGYRTAVGEQGMQLSGGQKQRIAIARAVLKDPAILLLDEATSALDAESECVLQEALERLMKGRTTVLVAHRLSTIRGVDRIAVVQDGRVVEHGSHSDLLARPEGAYLRLLQLQHHRV

SEQ ID NO: 166408 - protein, 61 aa, Zea Mays
MGGHKGNQPFKHKTLSFMPIAAQGKQVLLINSTNKTTGTQLNQKESVILLQETTVKTLSEG

SEQ ID NO: 166409 - protein, 175 aa, Zea Mays
MAPAKTDDPLSQLLAKIEEGNKETHRRMEAIQGAVGNMEAAVKVVMTEHGDLQKWKPEVEAKVTEISDALKAIQIQMGKMEKKPLGFGSRQEEEGEDGFLKPPPSDSSNLEFRREEGRTQFSHGGGVRGGGGRGDDDGQLPVQEAGHHGDRGGGGGVRGGGRQRRGVRMGLQRAQ

SEQ ID NO: 166410 - protein, 996 aa, Zea Mays
MAPAKTDDPLSQLLAKIEEGNKETHRRMEAIQGAVGNMEAAVKVVMTEHGDLQKWKPEVEAKVTEISDALKAIQIQMGKMEKKPLGFGSRQEEEGEDGFLKPPPSDSSNLEFRREEGRTQFSHGGMNSPWNSNSFRFEAAGNHSFGDWSHGSGSGIPSMSFPVFDGSNPKLWRTRCETYFDFYSVARPMWIRLAIMHFEGAALFWLQSVEHRLRYMKWDEFCSGLYNRFGRDQHGTLIRHFYHIYQQNSVVEYVEQFDMLLHQLLAHESQLTPMMITSRFVDGLKDDIQAVVAIQRPADLDTACSLALLQEDMLTQPNRKEGRRVELGGYTRPSNPSMKTATMAGHQVSVTTSRIHPLSEDRRRPSGSGGRTEDQKLAALKSYRRAKGLCFKCGEKWNYNHHCSNSVPLHVVEEMWAVTDQGKEEGDTDPKDEHYETENEEAVLALSTAAVNGSENNRTIRLWASIHCQQVLVLVDSGSSASFMGTHLMEVVKGVQNLVRPVKVKVADGYYLWCEKWVPSCQWLCEGITFYTDFKFLPLDGYDLILGMDWLEDLSPMSIDWAAKWMEFVYKGKKVQLQGVTPKLKACTPMSSVQLKGLLRKEAVEQVIELRITMETETNTVPDQIVELVNKYQELFAAPKGLPPKRLFDHDIPLLPGVNPFRLRPYRYTPQQKNEIEKQIKEMLEGGIIQQSSSPFASPVLLVKKKDGEWRLCVDYRKLNAYTVKNRFPMPVFDEIADELSGATVFTKLDHRAGYHQIRIKEGEEYKTTFHTHNGHYEYKVMPFGLTGAPATFQDFMNHILAPLLRKCVVVFLDDILVYSTTLEDHVGHLEQVFGILTQNQLKLKQSKCKFAQDKLEFLGHVISAAGISTEPAKVEVIKNWPIPKSVKEVRSFLGMAGYYRRFVAGFGIISKPLTNLLKKDQMFVWTDTTQKSFEALELYYSKMDILSPILVKLWVPGMLLCQHMRRSAWRYFLQLIIGDLICNMPSFSLKPTSKV

SEQ ID NO: 166411 - protein, 454 aa, Zea Mays
MGIKPIPGKSHLMQEMDYREEARNGLKFRELFGKFRDVSVPEMYLEQTRRRVLIMEWIEGEKLSEVRDQYLVEVGVYCSLSQLLEYGFYHADPHPGNLLRTVDGKLAYLDFGMMGEFRQELRDGFIEACLHLVNRDFDALAKDFVTLGLLPPTAQKGEVTKALTGVFENAVNRGVQNISFGDLSGNLGRTMYKFKFQIPSYFSLVIRSLAVLEGIAISFNPKYKVLGSSYPWIARKVLTDSSPKLRSTLQTLLYKDGTFQIDRLESLLTESLRARTEQSLVRNEQDVDSTRYAIKQVLSFTLADQGAFVKDLLLQEIAKGIDALGVATLSSATSAAASRLPFGGGPSPLTSLDDEDATNLRNLYRLLLLLSKVSQKENPSPIPEYNSAIEKEGGSTDELALALYGMTSLPEFLPVLSVIPELPPESQQQLLLLPADLTNRILSRALARTIRRLM

SEQ ID NO: 166412 - protein, 219 aa, Zea Mays
MMGEFRQELRDGFIEACLHLVNRDFDALAKDFVTLGLLPPTAQKGEVTKALTGVFENAVNRGVQNISFGDLSGNLGRTMYKFKFQIPSYFSLVIRSLAVLEGIAISFNPKYKVLGSSYPWIARKVLTDSSPKLRSTLQTLLYKDGTFQIDRLESLLTESLRARTEQSLVRNEQDVDSTRYAIKQVLSFTLADQGAFVKDLLLQEIAKPPDCHSVVDHPH

SEQ ID NO: 166413 - protein, 412 aa, Zea Mays
MYLEQTRRRVLIMEWIEGEKLSEVRDQYLVEVGVYCSLSQLLEYGFYHADPHPGNLLRTVDGKLAYLDFGMMGEFRQELRDGFIEACLHLVNRDFDALAKDFVTLGLLPPTAQKGEVTKALTGVFENAVNRGVQNISFGDLSGNLGRTMYKFKFQIPSYFSLVIRSLAVLEGIAISFNPKYKVLGSSYPWIARKVLTDSSPKLRSTLQTLLYKDGTFQIDRLESLLTESLRARTEQSLVRNEQDVDSTRYAIKQVLSFTLADQGAFVKDLLLQEIAKGIDALGVATLSSATSAAASRLPFGGGPSPLTSLDDEDATNLRNLYRLLLLLSKVSQKENPSPIPEYNSAIEKEGGSTDELALALYGMTSLPEFLPVLSVIPELPPESQQQLLLLPADLTNRILSRALARTIRRLM

SEQ ID NO: 166414 - protein, 580 aa, Zea Mays
MLLLQPSAVPAPALRGRPRPRRRLVPPPLASAPASIVVSSDEDAFTRCSGYLFEEGAATESELPTAYDLPGIAAVYRRRPLLVLRRSLQIGTSFGRWFALRYLDRVNERADDMFELRAAQLRRILLELGPAFVKIAQAVSSRPDVVPPAYLDELSLLQDRIAPFSNDVAFNIIEKELGLPLDMVFSEITPEPVAAASLGQVYQARLRSSGKIVAVKVQRPGVQAAISLDIYILRFLASLARKAAKLNTDLPAVLDEWASSLFREMDYREEARNGLKFRELFGKFRDVSVPEMYLEQTRRRVLIMEWIEGEKLSEVRDQYLVEVGVYCSLSQLLEYGFYHADPHPGNLLRTVDGKLAYLDFGMMGEFRQELRDGFIEACLHLVNRDFDALAKDFVTLGLLPPTAQKGEVTKALTGVFENAVNRGVQNISFGDLSGNLGRTMYKFKFQIPSYFSLVIRSLAVLEGIAISFNPKYKVLGSSYPWIARKVLTDSSPKLRSTLQTLLYKDGTFQIDRLESLLTESLRARTEQSLVRNEQDVDSTRYAIKQVLSFTLADQGAFVKDLLLQEIAKPPDCHSVVDHPH

SEQ ID NO: 166415 - protein, 269 aa, Zea Mays
MLLLQPSAVPAPALRGRPRPRRRLVPPPLASAPASIVVSSDEDAFTRCSGYLFEEGAATESELPTAYDLPGIAAVYRRRPLLVLRRSLQIGTSFGRWFALRYLDRVNERADDMFELRAAQLRRILLELGPAFVKIAQAVSSRPDVVPPAYLDELSLLQDRIAPFSNDVAFNIIEKELGLPLDMVFSEITPEPVAAASLGQVYQARLRSSGKIVAVKVQRPGVQAAISLDIYILRFLASLARKAAKLNTDLPAVLDEWASSLFRVTLLHI

SEQ ID NO: 166416 - protein, 317 aa, Zea Mays
MLLLQPSAVPAPALRGRPRPRRRLVPPPLASAPASIVVSSDEDAFTRCSGYLFEEGAATESELPTAYDLPGIAAVYRRRPLLVLRRSLQIGTSFGRWFALRYLDRVNERADDMFELRAAQLRRILLELGPAFVKIAQAVSSRPDVVPPAYLDELSLLQDRIAPFSNDVAFNIIEKELGLPLDMVFSEITPEPVAAASLGQVYQARLRSSGKIVAVKVQRPGVQAAISLDIYILRFLASLARKAAKLNTDLPAVLDEWASSLFREMDYREEARNGLKFRELFGKFRDVSVPEMYLEQTRRRVLIMEWIEVQSVILLNC

SEQ ID NO: 166417 - protein, 396 aa, Zea Mays
MVFSEITPEPVAAASLGQVYQARLRSSGKIVAVKVQRPGVQAAISLDIYILRFLASLARKAAKLNTDLPAVLDEWASSLFRIFTLNTGKSHLMQEMDYREEARNGLKFRELFGKFRDVSVPEMYLEQTRRRVLIMEWIEGEKLSEVRDQYLVEVGVYCSLSQLLEYGFYHADPHPGNLLRTVDGKLAYLDFGMMGEFRQELRDGFIEACLHLVNRDFDALAKDFVTLGLLPPTAQKGEVTKALTGVFENAVNRGVQNISFGDLSGNLGRTMYKFKFQIPSYFSLVIRSLAVLEGIAISFNPKYKVLGSSYPWIARKVLTDSSPKLRSTLQTLLYKDGTFQIDRLESLLTESLRARTEQSLVRNEQDVDSTRYAIKQVLSFTLADQVGPKPNWANNF

SEQ ID NO: 166418 - protein, 324 aa, Zea Mays
MGIKPIPGKSHLMQEMDYREEARNGLKFRELFGKFRDVSVPEMYLEQTRRRVLIMEWIEGEKLSEVRDQYLVEVGVYCSLSQLLEYGFYHADPHPGNLLRTVDGKLAYLDFGMMGEFRQELRDGFIEACLHLVNRDFDALAKDFVTLGLLPPTAQKGEVTKALTGVFENAVNRGVQNISFGDLSGNLGRTMYKFKFQIPSYFSLVIRSLAVLEGIAISFNPKYKVLGSSYPWIARKVLTDSSPKLRSTLQTLLYKDGTFQIDRLESLLTESLRARTEQSLVRNEQDVDSTRYAIKQVLSFTLADQGAFVKDLLLQEIAKLRFHF

SEQ ID NO: 166419 - protein, 126 aa, Zea Mays
MYKFKFQIPSYFSLVIRSLAVLEGIAISFNPKYKVLGSSYPWIARKVLTDSSPKLRSTLQTLLYKDGTFQIDRLESLLTESLRARTEQSLVRNEQDVDSTRYAIKQVLSFTLADQVGPKPNWANNF

SEQ ID NO: 166420 - protein, 406 aa, Zea Mays
MSRGSAASVFLGVDVGTGSARAGLFDENGKLLGSASSPIQIWKEKDCIEQSSTDIWHAVCAAVKSACSLANVAPEDVAGLGFAATCSLVAVDADGSPVSVSLSGDTRRNIIVWMDHRAVNQAERINATNSPVLQYCGGGVSPEMQAPKLLWMKENLLDSWSMVCRWMDLSDWLAYRATGDDTRSLCTTVCKWTYLGHAHMKQWKESDSRDMEACGWDNVFWEEIGLGDLLEGNCAKIGRSVAFPGHALGSGLTPTAAKELGLLPGTPVGTSLIDAHAGGVGVMESIPDAGSKAGLSDEHAICHRMVLVCGTSTCHMAVSKDRLFIPGVWGPFWSAMIPEFWLTEGGQSATGALLDYIIENHVASPLLSNHAASQSISIFELLNKMLLSMSQEQNSPFLSALTQDTQ

SEQ ID NO: 166421 - protein, 154 aa, Zea Mays
MSRGSAASVFLGVDVGTGSARAGLFDENGKLLGSASSPIQIWKEKDCIEQSSTDIWHAVCAAVKSACSLANVAPEDVAGLGFAATCSLVAVDADGSPVSVSLSGDTRRNIIVWMDHRAVNQAERINATNSPVLQYCGGGVSPEMQAPKVWVSYG

SEQ ID NO: 166422 - protein, 292 aa, Zea Mays
MDHRAVNQAERINATNSPVLQYCGGGVSPEMQAPKLLWMKENLLDSWSMVCRWMDLSDWLAYRATGDDTRSLCTTVCKWTYLGHAHMKQWKESDSRDMEACGWDNVFWEEIGLGDLLEGNCAKIGRSVAFPGHALGSGLTPTAAKELGLLPGTPVGTSLIDAHAGGVGVMESIPDAGSKAVSDEHAICHRMVLVCGTSTCHMAVSKDRLFIPGVWGPFWSAMIPEFWLTEGGQSATGALLDYIIENHVASPLLSNHAASQSISIFELLNKMLLSMSQEQNSPFLSALTQDTQ

SEQ ID NO: 166423 - protein, 176 aa, Zea Mays
MSRGSAASVFLGVDVGTGSARAGLFDENGKLLGSASSPIQIWKEKDCIEQSSTDIWHAVCAAVKSACSLANVAPEDVAGLGFAATCSLVAVDADGSPVSVSLSGDTRRNIIVWMDHRAVNQAERINATNSPVLQYCGGGVSPEMQAPKLLWMKENLLDSWSMVCRWMDLSDWLAYR

SEQ ID NO: 166424 - protein, 345 aa, Zea Mays
MLLLRTLLALALPPLAPLFDKNRMLLAVAVDADGSPVSVSLSGDTRRNIIVWMDHRAVNQAERINATNSPVLQYCGGGVSPEMQAPKLLWMKENLLDSWSMVCRWMDLSDWLAYRATGDDTRSLCTTVCKWTYLGHAHMKQWKESDSRDMEACGWDNVFWEEIGLGDLLEGNCAKIGRSVAFPGHALGSGLTPTAAKELGLLPGTPVGTSLIDAHAGGVGVMESIPDAGSKAGLSDEHAICHRMVLVCGTSTCHMAVSKDRLFIPGVWGPFWSAMIPEFWLTEGGQSATGALLDYIIENHVASPLLSNHAASQSISIFELLNKMLLSMSQEQNSPFLSALTQDTQ

SEQ ID NO: 166425 - protein, 145 aa, Zea Mays
MKENLLDSWSMVCRWMDLSDWLAYRATGDDTRSLCTTVCKWTYLGHAHMKQWKESDSRDMEACGWDNVFWEEIGLGDLLEGNCAKIGRSVAFPGHALGSGLTPTAAKELGLLPGTPVGTSLIDAHAGGVGVMESIPDAGSKAGCQ

SEQ ID NO: 166426 - protein, 261 aa, Zea Mays
MKLAQLELELQRARRQQGAYANGSMGDPALGYTGSIDPGVAAFEIEYRHWVDEQKRHTAELMSALQGQQTSELELRLLVETGLSNYEHLFRIKALAANADVFHVMSGVWKTPAERFFLWIGGFRPSEVLKILSPQLEPLAEAQRMLVGGLQHTSTQAEDALSQGMEKLQQNLAEILTAEADPFGAPDAYMLQMATAVEKLKELVNFVTQADHLRLMTLQQMHKILTTRQAARGLLALGDYFQRLRTLSSLWAARPREAAIS

SEQ ID NO: 166427 - protein, 385 aa, Zea Mays
MMELYSGYLEDHFNLHKLSSASPPQYMTPAASPAQFAPAPLRMGYGRPAPVMGMWSSEPFKVDSGGHATCSASTVMEADTKLETSRLQDVPQVALEPERSTDQETSRPPERVMRRLAQNREAARKSRLRKKAYIQQLETSRMKLAQLELELQRARRQQGAYANGSMGDPALGYTGSIDPGVAAFEIEYRHWVDEQKRHTAELMSALQGQQTSELELRLLVETGLSNYEHLFRIKALAANADVFHVMSGVWKTPAERFFLWIGGFRPSEVLKILSPQLEPLAEDALSQGMEKLQQNLAEILTAEADPFGAPDAYMLQMATAVEKLKELVNFVTQADHLRLMTLQQMHKILTTRQAARGLLALGDYFQRLRTLSSLWAARPREAAIS

SEQ ID NO: 166428 - protein, 500 aa, Zea Mays
MSGPNTEIVQENNNETHTSKDFRNGGVGAPELPINGDQLVPAEEKKSETLAHETNPVPDEPGSDTEMPSEDSPAVDIRTVAIDATESSEVPHEQQTDKIDGTVTPVQSTPTTVSTYDHPTDPDSPKDLTIAGAVEQKSLAETYLLQDEPGLSKDATIKEKRSDEVVREKNSEDGKIVLDIIEAIHAAEKKQADVDAYMYSEERRKLKEKYEKELKDTRARELMYAEEAAILDKELKKEKLKNAAAIKELQEKAEQTLQDELQRKGEETIQQIEKAQEIAKAELAAAVAKEKASQIEQIAEANLNIDALCMAFYARSEEARQSHSVHKLALGTLALEHALSSGSPIRSEVGLLRKSVEGIDKDSLLELAFSSLPEDVLDYGSDTRMGLKQQFNSLKETIRHLSLLPAGGGGILAHAVARVASSIKIKGDNSGDGIESLINKVESMIVNGDLSTAADALEQGLHGTEAEEIATEWVKQARKRALAEQTLALLRACASSTTFS

SEQ ID NO: 166429 - protein, 441 aa, Zea Mays
MATMLRRCMRDLRPLRSLARVPRPIFGESPTFLKCRSNSTKASPKSSTQNAAPGPQGQPSQSGSNVSKLALGTLVVGAAAIGAHQLGYIDLQFKDKTLPFSLKKEDVGKVVYEDLKIPSEQKVDQTQNMSGPNTEIVQENNNETHTSKDFRNGGVGAPELPINGDQLVPAEEKKSETLAHETNPVPDEPGSDTEMPSEDSPAVDIRTVAIDATESSEVPHEQQTDKIDGTVTPVQSTPTTVSTYDHPTDPDSPKDLTIAGAVEQKSLAETYLLQDEPGLSKDATIKEKRSDEVVREKNSEDGKIVLDIIEAIHAAEKKQADVDAYMYSEERRKLKEKYEKELKDTRARELMYAEEAAILDKELKKEKLKNAAAIKELQEKAEQTLQDELQRKGEETIQQIEKAQEIAKAELAAAVAKEKASQIEQIAEANLNDLPTRREIF

SEQ ID NO: 166430 - protein, 396 aa, Zea Mays
MLCSSCHCRCMRDLRPLRSLARVPRPIFGESPTFLKCRSNSTKASPKSSTQNAAPGPQGQPSQSGSNVSKLALGTLVVGAAAIGAHQLGYIDLQFKDKTLPFSLKKEDVGKVVYEDLKIPSEQKVDQTQNMSGPNTEIVQENNNETHTSKDFRNGGVGAPELPINGDQLVPAEEKKSETLAHETNPVPDEPGSDTEMPSEDSPAVDIRTVAIDATESSEVPHEQQTDKIDGTVTPVQSTPTTVSTYDHPTDPDSPKDLTIAGAVEQKSLAETYLLQDEPGLSKDATIKEKRSDEVVREKNSEDGKIVLDIIEAIHAAEKKQADVDAYMYSEERRKLKEKYEKELKDTRARELMYAEEAAILDKELKKEKLKNAAAIKELQEKAEQTLQDELQRKYY

SEQ ID NO: 166431 - protein, 347 aa, Zea Mays
MTATASCFSSPVAWARPRAGPAGASAALRVGRCPAAAVAAHDVAFHPDVSRAADSLQAEFRAVDRAIALNSSRVAAAFRRARVAPHHFGGSTGYGHDDGGGREALDSVFADIVGAEAAIVRPQFFSGTHAIACALFALLRPGHELLAVAGPPYDTLEEVIGIRGSANVGSLKDFGVTYREVPLVADGGLDWDALACSIRPETGCAFIQRSCGYSWRKSLSVADIHKAIGLIKMQNPNCMVMVDNCYGEFVEISEPAMVGADLIAGSLIKNPGGTIAPCGGYVAGKEHLVEAAAARLSAPGLGVEFGSTPGHVMRALFQGLFLGPQMVGEAVKVGLLTANGWRYNACT

SEQ ID NO: 166432 - protein, 261 aa, Zea Mays
MTATASCFSSPVAWARPRAGPAGASAALRVGRCPAAAVAAHDVAFHPDVSRAADSLQAEFRAVDRAIALNSSRVAAAFRRARVAPHHFGGSTGYGHDDGGGREALDSVFADIVGAEAAIVRPQFFSGTHAIACALFALLRPGHELLAVAGPPYDTLEEVIGIRGSANVGSLKDFGVTYREVPLVADGGLDWDALACSIRPETGCAFIQRSCGYSWRKSLSVADIHKAIGLIKMQNPNCMVMVDNCYGEFVEISEPAMVVCP

SEQ ID NO: 166433 - protein, 226 aa, Zea Mays
MQNPNCMVMVDNCYGEFVEISEPAMVGADLIAGSLIKNPGGTIAPCGGYVAGKEHLVEAAAARLSAPGLGVEFGSTPGHVMRALFQGLFLGPQMVGEAVKGGLLIAEVMSAKGYKVEPLPRVPRHDIVQAVELGSRERLIAFCEVVQQTCPVGSFIKPTAGETPGYASEVIFADGTFIDGSTSELSCDGPLRDPYAVFCQGGTHWTQWALVLGMVDTHSVSVYKAL

SEQ ID NO: 166434 - protein, 259 aa, Zea Mays
MTATASCFSSPVAWARPRAGPAGASAALRVGRCPAAAVAAHDVAFHPDVSRAADSLQAEFRAVDRAIALNSSRVAAAFRRARVAPHHFGGSTGYGHDDGGGREALDSVFADIVGAEAAIVRPQFFSGTHAIACALFALLRPGHELLAVAGPPYDTLEEVIGIRGSANVGSLKDFGVTYREVPLVADGGLDWDALACSIRPETGCAFIQRSCGYSWRKSLSVADIHKAIGLIKMQNPNCMVMVDNCYGEFVEISEPAMVT

SEQ ID NO: 166435 - protein, 380 aa, Zea Mays
MTATASCFSSPVAWARPRAGPAGASAALRVGRCPAAAVAAHDVAFHPDVSRAADSLQAEFRAVDRAIALNSSRVAAAFRRARVAPHHFGGSTGYGHDDGGGREALDSVFADIVGAEAAIVRPQLLAVAGPPYDTLEEVIGIRGSANVGSLKDFGVTYREVPMQNPNCMVMVDNCYGEFVEISEPAMVGADLIAGSLIKNPGGTIAPCGGYVAGKEHLVEAAAARLSAPGLGVEFGSTPGHVMRALFQGLFLGPQMVGEAVKGGLLIAEVMSAKGYKVEPLPRVPRHDIVQAVELGSRERLIAFCEVVQQTCPVGSFIKPTAGETPGYASEVIFADGTFIDGSTSELSCDGPLRDPYAVFCQGGTHWTQWALVLGNVLKVI

SEQ ID NO: 166436 - protein, 326 aa, Zea Mays
MTATASCFSSPVAWARPRAGPAGASAALRVGRCPAAAVAAHDVAFHPDVSRAADSLQAEFRAVDRAIALNSSRVAAAFRRARVAPHHFGGSTGYGHDDGGGREALDSVFADIVGAEAAIVRPQLLAVAGPPYDTLEEVIGIRGSANVGSLKDFGVTYREVPLVADGGLDWDALACSIRPETGCAFIQRSCGYSWRKSLSVADIHKAIGLIKMQNPNCMVMVDNCYGEFVEISEPAMVGADLIAGSLIKNPGGTIAPCGGYVAGKEHLVEAAAARLSAPGLGVEFGSTPGHVMRALFQGLFLGPQMVGEAVKVGLLTANGWRYNACT

SEQ ID NO: 166437 - protein, 465 aa, Zea Mays
MTATASCFSSPVAWARPRAGPAGASAALRVGRCPAAAVAAHDVAFHPDVSRAADSLQAEFRAVDRAIALNSSRVAAAFRRARVAPHHFGGSTGYGHDDGGGREALDSVFADIVGAEAAIVRPQFFSGTHAIACALFALLRPGHELLAVAGPPYDTLEEVIGIRGSANVGSLKDFGVTYREVPLVADGGLDWDALACSIRPETGCAFIQRSCGYSWRKSLSVADIHKAIGLIKMQNPNCMVMVDNCYGEFVEISEPAMVGADLIAGSLIKNPGGTIAPCGGYVAGKEHLVEAAAARLSAPGLGVEFGSTPGHVMRALFQGLFLGPQMVGEAVKGGLLIAEVMSAKGYKVEPLPRVPRHDIVQAVELGSRERLIAFCEVVQQTCPVGSFIKPTAGETPGYASEVIFADGTFIDGSTSELSCDGPLRDPYAVFCQGGTHWTQWALVLGNVLKEWWILTPSQFIRLYKA

SEQ ID NO: 166438 - protein, 437 aa, Zea Mays
MTATASCFSSPVAWARPRAGPAGASAALRVGRCPAAAVAAHDVAFHPDVSRAADSLQAEFRAVDRAIALNSSRVAAAFRRARVAPHHFGGSTGYGHDDGGGREALDSVFADIVGAEAAIVRPQLLAVAGPPYDTLEEVIGIRGSANVGSLKDFGVTYREVPLVADGGLDWDALACSIRPETGCAFIQRSCGYSWRKSLSVADIHKAIGLIKMQNPNCMVMVDNCYGEFVEISEPAMVGADLIAGSLIKNPGGTIAPCGGYVAGKEHLVEAAAARLSAPGLGVEFGSTPGHVMRALFQGLFLGPQMVGEAVKGGLLIAEVMSAKGYKVEPLPRVPRHDIVQAVELGSRERLIAFCEVVQQTCPVGSFIKPTAGETPGYASEVIFADGTFIDGSTSELSCDGPLRDPYAVFCQGGTHWTQWALVLGMVDTHSVSVYKAL

SEQ ID NO: 166439 - protein, 458 aa, Zea Mays
MTATASCFSSPVAWARPRAGPAGASAALRVGRCPAAAVAAHDVAFHPDVSRAADSLQAEFRAVDRAIALNSSRVAAAFRRARVAPHHFGGSTGYGHDDGGGREALDSVFADIVGAEAAIVRPQFFSGTHAIACALFALLRPGHELLAVAGPPYDTLEEVIGIRGSANVGSLKDFGVTYREVPLVADGGLDWDALACSIRPETGCAFIQRSCGYSWRKSLSVADIHKAIGLIKMQNPNCMVMVDNCYGEFVEISEPAMVGADLIAGSLIKNPGGTIAPCGGYVAGKEHLVEAAAARLSAPGLGVEFGSTPGHVMRALFQGLFLGPQMVGEAVKGGLLIAEVMSAKGYKVEPLPRVPRHDIVQAVELGSRERLIAFCEVVQQTCPVGSFIKPTAGETPGYASEVIFADGTFIDGSTSELSCDGPLRDPYAVFCQGGTHWTQWALVLGMVDTHSVSVYKAL

SEQ ID NO: 166440 - protein, 400 aa, Zea Mays
MELHRNSTNGSCLSACGPLTDYYIPDYILKPAYEPVTVDNVPCCPVVVFINSRSGGQLGSSLIKTYRELLNEAQVFDLSEESPDKVLHRLYSNFERLKSSGDHVATQIQKSLRLIVAGGDGTASWLLGVVSDLKLSHPPPVATVPLGTGNNLPFSFGWGKKNPATDQAAVKSFLDQVKGAREMNIDSWHIIMRMRIPQEGPCDPIAPLDLPHSLHAFHRVSACDSLNLEGYHTFRGGFWNYFSLGMDAQVSYEFHSERKRNPEKFRHQLRNQGTYAKLGFKHSLNHLSSRNISQLAKVKIMKRPGSQWEELKIPRSIQSVICLNLPSFSGGLNPWGTPGTRKAQDRDLTAPYVDDGLIEVVGFRDAWHGLILLAPNGHGTRLAPTESVSSSTREQPSTRS

SEQ ID NO: 166441 - protein, 304 aa, Zea Mays
MRMRIPQEGPCDPIAPLDLPHSLHAFHRVSACDSLNLEGYHTFRGGFWNYFSLGMDAQVSYEFHSERKRNPEKFRHQLRNQGTYAKLGFKHSLNHLSSRNISQLAKVKIMKRPGSQWEELKIPRSIQSVICLNLPSFSGGLNPWGTPGTRKAQDRDLTAPYVDDGLIEVVGFRDAWHGLILLAPNGHGTRLAQAHRIRFEFHKGAAEHTFMRIDGEPWKQPLPKEDDTVVVEISNLRQVAMLANDPCRSKSVNEPSSPSCHGHEDDDSNSLEDEDEDEWEDGRKKFGAAATFKIPDEVDIAHLS

SEQ ID NO: 166442 - protein, 407 aa, Zea Mays
MKRSNFERLKSSGDHVATQIQKSLRLIVAGGDGTASWLLGVVSDLKLSHPPPVATVPLGTGNNLPFSFGWGKKNPATDQAAVKSFLDQVKGAREMNIDSWHIIMRMRIPQEGPCDPIAPLDLPHSLHAFHRVSACDSLNLEGYHTFRGGFWNYFSLGMDAQVSYEFHSERKRNPEKFRHQLRNQGTYAKLGFKHSLNHLSSRNISQLAKVKIMKRPGSQWEELKIPRSIQSVICLNLPSFSGGLNPWGTPGTRKAQDRDLTAPYVDDGLIEVVGFRDAWHGLILLAPNGHGTRLAQAHRIRFEFHKGAAEHTFMRIDGEPWKQPLPKEDDTVVVEISNLRQVAMLANDPCRSKSVNEPSSPSCHGHEDDDSNSLEDEDEDEWEDGRKKFGAAATFKIPDEVDIAHLS

SEQ ID NO: 166443 - protein, 623 aa, Zea Mays
MRYVDFILLGGDLFHENKPSRSTLVKTIEILRRYCLNDQPVKFQVVSDQTVNFPNRFGKVNYEDPNFNVGLPVFTIHGNHDDPAGVDNLSAIDILSACNLVNYFGKMDLGGSGVGQIAVYPVLVKKGMTSVALYGLGNIRDERLNRMFQTPHSVQWMRPGTQDGESASDWFNILVLHQNRIKTNPKSAINEHFLPGSSVATSLIDGEAKPKHVLLLEIKGNQYRPTKIPLRSVRPFEYAEVVLKDEADVNSNDQDSVLEHLDKIVRNLIEKSSQPTASRSEPKLPLVRIKVDYSGFSTINPQRFGQKYVGKVANPQDILIFSKSAKKRQTTGDHIDDSEKLRPEELNQQTIEALVAESNLKMEILPVDDLDIALHDFVNKDDKMAFYSCLQRNLEETRNKLSSEADKSKFEEEDIIVKVGECMQERVKERSLHSKDGTRLTTGSHNLDTGGKSFTAQSNQNSFSDDEDTREMLLGARSTDVGRKSSGFTRPSKDTADVAKRGTSKRGRGRGTSSMKQTTLSFSQSRSATVIRSEDVASSEEEADANEVVENSEEESAQQVGRKRAAPRGRGRGRGGGSTAKRGRKTDIASMQNMMSKDDDDSEDEPPKKTPRVTRNYGAVRRR

SEQ ID NO: 166444 - protein, 380 aa, Zea Mays
MSEPAQPSGGEGDVNTLRILVATDCHLGYMEKDEIRRFDSFQAFEEICALADKNKVDFILLGGDLFHENKPSRSTLVKTIEILRRYCLNDQPVKFQVVSDQTVNFPNRFGKVNYEDPNFNVGLPVFTIHGNHDDPAGVDNLSAIDILSACNLVNYFGKMDLGGSGVGQIAVYPVLVKKGMTSVALYGLGNIRDERLNRMFQTPHSVQWMRPGTQDGESASDWFNILVLHQNRIKTNPKSAINEHFLPRFLDFIVWGHEHECLIDPQEVPGMGFHITQPGSSVATSLIDGEAKPKHVLLLEIKGNQYRPTKIPLRSVRPFEYAEVVLKDEADVNSNDQDSVLEHLDKIVRNLIEKSSQPTASRSEPKLPLVRIKITLGFQQ

SEQ ID NO: 166445 - protein, 675 aa, Zea Mays
MSEPAQPSGGEGDVNTLRILVATDCHLGYMEKDEIRRFDSFQAFEEICALADKNKVDFILLGGDLFHENKPSRSTLVKTIEILRRYCLNDQPVKFQVVSDQTVNFPNRFGKVNYEDPNFNVGLPVFTIHGNHDDPAGVDNLSAIDILSACNLVNYFGKMDLGGSGVGQIAVYPVLVKKGMTSVALYGLGNIRDERLNRMFQTPHSVQWMRPGTQDGESASDWFNILVLHQNRIKTNPKSAINEHFLPGSSVATSLIDGEAKPKHVLLLEIKGNQYRPTKIPLRSVRPFEYAEVVLKDEADVNSNDQDSVLEHLDKIVRNLIEKSSQPTASRSEPKLPLVRIKVDYSGFSTINPQRFGQKYVGKVANPQDILIFSKSAKKRQTTGDHIDDSEKLRPEELNQQTIEALVAESNLKMEILPVDDLDIALHDFVNKDDKMAFYSCLQRNLEETRNKLSSEADKSKFEEEDIIVKVGECMQERVKERSLHSKDGTRLTTGSHNLDTGGKSFTAQSNQNSFSDDEDTREMLLGARSTDVGRKSSGFTRPSKDTADVAKRGTSKRGRGRGTSSMKQTTLSFSQSRSATVIRSEDVASSEEEADANEVVENSEEESAQQVGRKRAAPRGRGRGRGGGSTAKRGRKTDIASMQNMMSKDDDDSEDEPPKKTPRVTRNYGAVRRR

SEQ ID NO: 166446 - protein, 496 aa, Zea Mays
MKFFLFSNHSSRVQRTYLEGITDALNMTDEMLSAGSFSRQLMDQIYLAKMYVVVAKEANNLQFVVELSAQVRRAQSILAHAAAHGGTVMEQEAEKAIRDMSVLLFQAQQLRYDISITIMKLKGQIQSLEDKSKAEAEKSTKYGQIAAEELPKGLYCLGVRLTMEWFKNPDLQRKFSDRSPAAQSNLRDNGLYHFCVFSDNILAVSVVVNSTAINSRHPDKVVFHLVTDDLNYAPMKAWFAMNNYRGVTVEIQKVEDFTWLNASYVPVLKQLQNAATQKFYFSGSGNRGTPIKFRNPKYLSMLNHLRFYIPEIYPELQKVVFLDDDIVVQKDLSELFTINLNGNVMGAVETCMETFHRFHKYLNHSHPLIRAHFDPDACGWAFGMNVLDLVEWRNKNVTGIYHYWQERNADHTLWKLGSLPPGLLAFYGLVEALDPKWHVLGLGYTTVDLATIKEGAVLHYNGNMKPWLKIGMEKYKSFWDNYVDYSHPLIQQCFMR

SEQ ID NO: 166447 - protein, 93 aa, Zea Mays
MHTRYLEEDLEGDELLVAFLEEDSKDAALPHLVQDADAHRGGSDGQQHQQKADFVMLFTAEWGKCCGSGLKELGFPFRLLRFWKEKQACLGMV

SEQ ID NO: 166448 - protein, 535 aa, Zea Mays
MCGAFGLCNVNTASTLFCSCVVGFSPVNPTQWSMRESGGGCRRNVPLECGNGTTTDGFKVVQGVKLPDTDNTTVDMGATLEQCRERCLANCSCVAYAAADIRGGGDGSGCVMWTNNIVDVRYVDKGQNLYLRLAKSELASRKRMVATKIVLPVIASLLALVAAAVYLVWKFRLRAQRRKKDIQKKAMVGYLTTSHELGDENLELPFVSFEDIVTATDNFSEDNMLGQGGFGKVYKGMLGEKKEVAIKRLGQGSGQGAEEFRNEVVLIAKLQHRNLVRLLGCCICGDEKLLIYEYLPNKSLDSFIFDAARKKLLDWPTRFKIIKGISRGLLYLHEDSRLTIVHRDLKPSNILLDADMNPKISDFGMARIFGGNQHEANTNRVVGTYGYMSPEYAMDGAFSVKSDTYSFGVILLEIISGFKISLNHITDFPNLLAYAWSLWNEGKAMNLVDSSLVKSCLPNEALRCIHIGLLCVQDNPNSRPLMSSVVFMLENETTTLSVPKQPVFFSQRYSEAQETGENTSSSMNNMSMTMLSEGR

SEQ ID NO: 166449 - protein, 500 aa, Zea Mays
MDMTSLTISILLLLLMIRVCKSDDQLASARPLSPGDLLISKGGVFALGFFSPSGSNTSTSLYVAIWFHGIPERSRTVVWVANRDSPATTSSSPTLAISNSFDLVLSDSQGRTLWRTQNAAAAAVHDSGTPLAVLLDTGNLQLQLPNGTVIWQSFDHPTDTILPGMRFLMIHGARPAARLVSWRGPADPSTGAFSFGLDPVSNLQLMVWHGAEPYCRISVWNGVSVSGGMYTGSPSSIVYQTIVNTGDEFYLTYTVSDGSPYFRIMLDHTGTMKLLSWDTNSSSWTLISERPTGGYGLYGSCGPNAYCDFTGAAPACQCLEGFEPVAADLNSSEGCRRTEPLQCSKASHFVALPGMRVPDKFVLLRNRSFEQCAAECSKNCSCTAYAYANLSSSGAMEDQSRCLVWTGELVDTWKSINYGEKLYLRLASPVKTKSNIVKIVVPVVACLLLPTCIALVFLCKFKGTTLSGLFSTCNVIVYMKRKVSMSHQQGNGKRREFRRK

SEQ ID NO: 166450 - protein, 823 aa, Zea Mays
MDMTSLTISILLLLLMIRVCKSDDQLASARPLSPGDLLISKGGVFALGFFSPSGSNTSTSLYVAIWFHGIPERSRTVVWVANRDSPATTSSSPTLAISNSFDLVLSDSQGRTLWRTQNAAAAAVHDSGTPLAVLLDTGNLQLQLPNGTVIWQSFDHPTDTILPGMRFLMIHGARPAARLVSWRGPADPSTGAFSFGLDPVSNLQLMVWHGAEPYCRISVWNGVSVSGGMYTGSPSSIVYQTIVNTGDEFYLTYTVSDGSPYFRIMLDHTGTMKLLSWDTNSSSWTLISERPTGGYGLYGSCGPNAYCDFTGAAPACQCLEGFEPVAADLNSSEGCRRTEPLQCSKASHFVALPGMRVPDKFVLLRNRSFEQCAAECSKNCSCTAYAYANLSSSGAMEDQSRCLVWTGELVDTWKSINYGEKLYLRLASPVKTKSNIVKIVVPVVACLLLPTCIALVFLCKFKGKWQKKGIQKKVMLGYLSTSNRLGDKNDEFPFVSFNDIVAATDNFSDCNMLGRGGFGKVYKGILEDGKEVAVKRLSQGSGQGIDEVRNEVVLLVKLQHRNLVRLLGCCIHEEEKLLIYEYLPNKSLDAFLFDTSRTRVLDWPTRFNIIKGIARGILYLHQDSRLTIIHRDLKASNILLDTEMSPKISDFGMARIFGGNQQLANTTRVVGTYGYMSPEYVTSGAFSVKSDTYSFGVLLLEIVSGLKIISTQFIMDFPNLIAYTWKLWEEGNATKLVDSLVAESCPLHEAFRCIHVGLLCVQDNPNARPLMSTVVFMLENETTLLPAPKEPVYFSPRNNETEETRRNIEGFLNMSCITTLEGR

SEQ ID NO: 166451 - protein, 472 aa, Zea Mays
MDMTSLTISILLLLLMIRVCKSDDQLASARPLSPGDLLISKGGVFALGFFSPSGSNTSTSLYVAIWFHGIPERSRTVVWVANRDSPATTSSSPTLAISNSFDLVLSDSQGRTLWRTQNAAAAAVHDSGTPLAVLLDTGNLQLQLPNGTVIWQSFDHPTDTILPGMRFLMIHGARPAARLVSWRGPADPSTGAFSFGLDPVSNLQLMVWHGAEPYCRISVWNGVSVSGGMYTGSPSSIVYQTIVNTGDEFYLTYTVSDGSPYFRIMLDHTGTMKLLSWDTNSSSWTLISERPTGGYGLYGSCGPNAYCDFTGAAPACQCLEGFEPVAADLNSSEGCRRTEPLQCSKASHFVALPGMRVPDKFVLLRNRSFEQCAAECSKNCSCTAYAYANLSSSGAMEDQSRCLVWTGELVDTWKSINYGEKLYLRLASPVKTKSNIVKIVVPVVACLLLPTCIALVFLCKFKAGKWILEHLQ

SEQ ID NO: 166452 - protein, 608 aa, Zea Mays
MATSKKGLMAMVYIRSAFILIFLSSPCQSNDQLTQTKPLLLEDTLISEGGDFALGFFSPTNSSKKLYIGIWYHRVTERTVVWVANRDNPITTPSAMLAITDNLELVLSDSQGHTLWMATGNTSGDAGGAASAVLLNSGNFVLRLPNGTEVWHSFDHPTDTILPTMRILLSFKTQPATRLIAWKGPDNPSTGDISSGMDSTNLQMFIWKGALPYYRFPVVNDMAVAGAMYQQSNGNAAIMYETRVNAGDALYYTYTVSSGSPYTRFSLDYTGKGRLLSWNSTTSSWTVIIEHPHSCDLYASCGPFSYCDQMGPLPTTCQCPDGFELLNSLNFSRGCRRKEELKCGVGNYFMAMSSMKLPDKFLHIKNRTFDQCADECTRNCSCMAYAYANLSSIGAVGDTSRCLVWSGDLIDMEKNSFSEVLYIRLGGSVRRKSSLLKILLPIILCVLLLMLGALVWTCKSRGKRQKKRVQKRRMLEYLSSTDDAGDKNINFPFISFENIVTATDNFSESNLLGKGGFGKVYKGMLEGTKEVAVKRLSTGSGQGKEEFKNEVVLIAKLQHKNLVKLLGCCIHEDEKLLVYEYLPNKSLDYFLFGILKFQFLILLMMSNK

SEQ ID NO: 166453 - protein, 247 aa, Zea Mays
MYKKVRRKSSLLKILLPIILCVLLLMLGALVWTCKSRGKRQKKRVQKRRMLEYLSSTDDAGDKNINFPFISFENIVTATDNFSESNLLGKGGFGKVYKGMLEGTKEVAVKRLSTGSGQGKEEFKNEVVLIAKLQHKNLVKLLGCCIHEDEKLLVYEYLPNKSLDYFLFASARKSMLQWPTRFKIIQGVARGIMYLHHDSRLTVIHRDLKASNILLDKEMNPKISDFGMARIFSGDQLQANTNRVVGT

SEQ ID NO: 166454 - protein, 235 aa, Zea Mays
MLGALVWTCKSRGTKEKEPSFKKKQCKRQKKRVQKRRMLEYLSSTDDAGDKNINFPFISFENIVTATDNFSESNLLGKGGFGKVYKGMLEGTKEVAVKRLSTGSGQGKEEFKNEVVLIAKLQHKNLVKLLGCCIHEDEKLLVYEYLPNKSLDYFLFASARKSMLQWPTRFKIIQGVARGIMYLHHDSRLTVIHRDLKASNILLDKEMNPKISDFGMARIFSGDQLQANTNRVVGT

SEQ ID NO: 166455 - protein, 280 aa, Zea Mays
MALTYGRASIIRLTPWSLINFSMGGDSSSDLQIVTWNGTRPYWRRAAWGGEVTFGTFEGNTSFMVYETIVDTGDGYYMKLTVSEGSPSIRLTLDYTGMLTFRRWNVNTSSWAVFGQFPRCRRKEELKCGGGDKFLTLPSMKTPDKFLYIKNRSFDQCTAECSNNCSCTAYAYANLQNVDTTHDTTRCLVWMGELIDAEKLSNTFGENLYFRVPTSPVSKKKSTVLKIVPVATGTFLLLITCIWLVCKSRGKHQRRNSQNNLLCLNPSSELGTEKSRSSIS

SEQ ID NO: 166456 - protein, 518 aa, Zea Mays
MGLSVLFPCCLLHSIIPTYQQGLIAMAYLYLPVLIFQFMVCFCQSVDRLTPAKPLLHGDVLISNGGVFALGFFSLKNSTSSSYVGIWYNNIPERTYVWIANRDNPITTNAPGKLVFTNSSDLVLLDSTGHTIWMTKNNITAGEGGTAAILLDSGNFVVQSQNGTDIWESFHYPTDTMVPDVSFSLSSSDVAKRLVAWKGPDDPSSSNFSMGGDSSSDLQIVTWNGTRPYWRRAAWGGEVTFGTFEGNTSFMVYETIVDTGDGYYMKLTVSEGSPSIRLTLDYTGMLTFRRWNVNTSSWAVFGQFPRCRRKEELKCGGGDKFLTLPSMKTPDKFLYIKNRSFDQCTAECSNNCSCTAYAYANLQNVDTTHDTTRCLVWMGELIDAEKLSNTFGENLYFRVPTSPELKDFTSSPCKALNAHVTKMSCSQKNHLSNVRCGQNEMFFKCFLFVDHIYAVSKKKSTVLKIVPVATGTFLLLITCIWLVCKSRGKHQRRNSQNNLLCLNPSSELGTEKSRSSIS

SEQ ID NO: 166457 - protein, 432 aa, Zea Mays
MKTPDKFLYIKNRSFDQCTAECSNNCSCTAYAYANLQNVDTTHDTTRCLVWMGELIDAEKLSNTFGENLYFRVPTSPVSKKKSTVLKIVPVATANLGLKNLDLPSVSFEDIITATNNFSEHKLLGEGGFGKVYKGVLEGGKEVAIKRLSKGSVQGIQEFINEVILIAKLQHRNLVRLLGFCIHEDEKLLIYEYLPNRSLDAFLFDGTRKSLLDWPVRFKIIKGVARGILYLHQDSRLTIIHRDLKASNILLDTDMCPKISDFGTARIFSGSEQQVNTTRVAGTYGYMSPEYAMEGSFSVKSDTYAFGVLLLEIVSGLKISSSLMNFPSLIAYAWSLWKDGNALELVDSSISVSYSLQELVRCVQLGLLCVQDPPNARPLMSSIVFMLENETAPLPTPEEPLYFTVRNYGTDRSNEYMQRSLNNMSITTLEAR

SEQ ID NO: 166458 - protein, 334 aa, Zea Mays
MTKNNITAGEGGTAAILLDSGNFVVQSQNGTDIWESFHYPTDTMVPDVSFSLSSSDVAKRLVAWKGPDDPSSSNFSMGGDSSSDLQIVTWNGTRPYWRRAAWGGEVTFGTFEGNTSFMVYETIVDTGDGYYMKLTVSEGSPSIRLTLDYTGMLTFRRWNVNTSSWAVFGQFPRCRRKEELKCGGGDKFLTLPSMKTPDKFLYIKNRSFDQCTAECSNNCSCTAYAYANLQNVDTTHDTTRCLVWMGELIDAEKLSNTFGENLYFRVPTSPVSKKKSTVLKIVPVATGTFLLLITCIWLVCKSRGKHQRRNSQNNLLCLNPSSELGTEKSRSSIS

SEQ ID NO: 166459 - protein, 758 aa, Zea Mays
MGLSVLFPCCLLHSIIPTYQQGLIAMAYLYLPVLIFQFMVCFCQSVDRLTPAKPLLHGDVLISNGGVFALGFFSLKNSTSSSYVGIWYNNIPERTYVWIANRDNPITTNAPGKLVFTNSSDLVLLDSTGHTIWMTKNNITAGEGGTAAILLDSGNFVVQSQNGTDIWESFHYPTDTMVPDVSFSLSSSDVAKRLVAWKGPDDPSSSNFSMGGDSSSDLQIVTWNGTRPYWRRAAWGGEVTFGTFEGNTSFMVYETIVDTGDGYYMKLTVSEGSPSIRLTLDYTGMLTFRRWNVNTSSWAVFGQFPRCRRKEELKCGGGDKFLTLPSMKTPDKFLYIKNRSFDQCTAECSNNCSCTAYAYANLQNVDTTHDTTRCLVWMGELIDAEKLSNTFGENLYFRVPTSPVSKKKSTVLKIVPVATANLGLKNLDLPSVSFEDIITATNNFSEHKLLGEGGFGKVYKGVLEGGKEVAIKRLSKGSVQGIQEFINEVILIAKLQHRNLVRLLGFCIHEDEKLLIYEYLPNRSLDAFLFDGTRKSLLDWPVRFKIIKGVARGILYLHQDSRLTIIHRDLKASNILLDTDMCPKISDFGTARIFSGSEQQVNTTRVAGTYGYMSPEYAMEGSFSVKSDTYAFGVLLLEIVSGLKISSSLMNFPSLIAYAWSLWKDGNALELVDSSISVSYSLQELVRCVQLGLLCVQDPPNARPLMSSIVFMLENETAPLPTPEEPLYFTVRNYGTDRSNEYMQRSLNNMSITTLEAR

SEQ ID NO: 166460 - protein, 459 aa, Zea Mays
MGLSVLFPCCLLHSIIPTYQQGLIAMAYLYLPVLIFQFMVCFCQSVDRLTPAKPLLHGDVLISNGGVFALGFFSLKNSTSSSYVGIWYNNIPERTYVWIANRDNPITTNAPGKLVFTNSSDLVLLDSTGHTIWMTKNNITAGEGGTAAILLDSGNFVVQSQNGTDIWESFHYPTDTMVPDVSFSLSSSDVAKRLVAWKGPDDPSSSNFSMGGDSSSDLQIVTWNGTRPYWRRAAWGGEVTFGTFEGNTSFMVYETIVDTGDGYYMKLTVSEGSPSIRLTLDYTGMLTFRRWNVNTSSWAVFGQFPRCRRKEELKCGGGDKFLTLPSMKTPDKFLYIKNRSFDQCTAECSNNCSCTAYAYANLQNVDTTHDTTRCLVWMGELIDAEKLSNTFGENLYFRVPTSPGKQEEEHCTKDCTRGYGYFSSFNHMHMACMQVKRETPKKEFSEQFTMPESFQRTWD

SEQ ID NO: 166461 - protein, 455 aa, Zea Mays
MGLSVLFPCCLLHSIIPTYQQGLIAMAYLYLPVLIFQFMVCFCQSVDRLTPAKPLLHGDVLISNGGVFALGFFSLKNSTSSSYVGIWYNNIPERTYVWIANRDNPITTNAPGKLVFTNSSDLVLLDSTGHTIWMTKNNITAGEGGTAAILLDSGNFVVQSQNGTDIWESFHYPTDTMVPDVSFSLSSSDVAKRLVAWKGPDDPSSSNFSMGGDSSSDLQIVTWNGTRPYWRRAAWGGEVTFGTFEGNTSFMVYETIVDTGDGYYMKLTVSEGSPSIRLTLDYTGMLTFRRWNVNTSSWAVFGQFPRCRRKEELKCGGGDKFLTLPSMKTPDKFLYIKNRSFDQCTAECSNNCSCTAYAYANLQNVDTTHDTTRCLVWMGELIDAEKLSNTFVSKKKSTVLKIVPVATGTFLLLITCIWLVCKSRGKHQRRNSQNNLLCLNPSSELGTEKSRSSIS

SEQ ID NO: 166462 - protein, 199 aa, Zea Mays
MWTYTRMEQANNATSSQPMSNTTSTQLFPPQPPIWPTGFMQQPPMDYNMMANLNFPNPGQGPTTMWAPMQTGNSTSQSTMIPASQSAVYWNHYLNFVRNPLGSVEPPPFGDSYPPSNTSTSLQGSNTIPSIPVNLDSDAEHSVQDINSPEKIAAPVLKNKKSKEQNFTAPEDLLLCTTWLQISSDPIVHTGQRREGLWA

SEQ ID NO: 166463 - protein, 694 aa, Zea Mays
MAYLYLPVFIFLLSMACSCQSDDRLTPAKPLLPGDMLISHGGVFALGFFSLTNSSSSSYVGIWYNNIPERTYVWIANRDNPITTDVPGTKLAFTNSSDLVLLDSTGHTIWMTRSSISAGGGGTAAVVLLDSGNLVIQSIDGTAIWESFDHLTDTVIPGVSLSLSSSDAAASARRLVAWKGPDDPSSGNFSMGGDSSSDLQIVTWNGTRPFWRRAAWGGEVTFGTFEDNTSFTMYETITGGTGDDYYIKLTVSDGAPIIRVSLDYTGLFTYRRWNLKTSSWTVFVQFPSSACDRYAFCGPFAYCDSTETVPSCKCLDGFEPIGLDFSQGCRRKEELKCGDGDTFLTLPTMKTPDKFLYIKNRSFDQCTAECSNNCSCTAYAYDNLQNVDSTIDTTRCLVWMGELIDAEKFGNTFGENLYLRVSSSPVNKMKNTVLKIVLPAMITFLLLTTCIWLLCKLRGKHQTGNVQNNLLCLNPPNEFGNENLDFPSFSFEDIIIATNNFSDYKLLGEGGFGKVYKGVLEGGKEVAVKRLSKGSVQGIQEFRNEVVLIAKLQHRNLVRLLGFCIHEDEKLLIYEYLPNKSLDAFLFDATRKSLLDWPARFKIIKGVARGILYLHQDSRLTIIHRDLKASNILLDTDMCPKISDFGMARIFGGSERQVNTTRVAAATCLLSMLCKAHSLLSLTPMLLVFYYWRL

SEQ ID NO: 166464 - protein, 185 aa, Zea Mays
MASDSQQRLQEHELDAKQLALVAGLFGSTPKPPPRATVLPPQMPTDVGNLKRIVKSKYPYVSNLWMLIKNGPHCSLARAADVPCRGGGPWEAGAPAAAAPWQQSRRRQAWETLAMVTALAKETPTDKDKEKASSSISSKELLHRSYNPACARRPSTTSRFTCTKSLEVTNCCKETRDGMELSGTK

SEQ ID NO: 166465 - protein, 457 aa, Zea Mays
MKTPDKFLYIKNRSLDQCAAECRDNCSCTAYAYANLQNVDTTIDTTRCLVSIMHSVIDAAVTLAFSKNKKSTTLKIVLPIMAGLILLITCTWLVFKPKDKHKSKKSQYTLQHSDASNRFENENLEFPSIALEDIIVATNDFSDFNMLGKGGFGKVYKAMLEGGKEVAVKRLSKGSTQGVEEFRNEVVLIAKLQHRNLVRLLDCCIHKDEKLLIYEYLPNKSLDAFLFDATRKSLLDWPSRFKIIKGVARGLLYLHQDSRLTIIHRDLKASNILLDTEMSPKISDFGMARIFGGNEQHANTTRVVGTYGYMSPEYAMEGSFSVKSDTYSFGVLLLEIVSGLKIGSPHLIMDYPNLIAYAWSLWEGGNARELVDSSVLVSCPLQEAVRCIHLGLLCVQDSPNARPLMSSIVFMLENETAPVPTPKRPVYFTTRNYETNQSDQYMRRSLNNMSITTLEGR

SEQ ID NO: 166466 - protein, 803 aa, Zea Mays
MAMAYLPVFVFLFMVVLCQSDDRLTPAKPLLPNEVLISGGGVFALGFFSLKNSSRSYVGIWYNNIPERTYVWIANRDNPITTNVPGKLVFTNSSDLVLLDSTGRTIWTTTNNYTAGGGGETASILLDSGNLVIRLPNGTDIWESFSYPTDTIVPNVNFSLNVASSATLLVAWKGPDDPSSSDFSMGGDPSSGLQIIVWNGTQPYWRRAAWGGELVHGIFQNNTSFMMYQTVVDTGDGYYMQLTVPDGSPSIRLTLDYTGMSTFRRWNNNTSSWKIFSQFPYPSCDRYASCGPFGYCDDTVPVPACKCLDGFEPNGLDSSKGCRRKDELKCGDGDSFFTLPSMKTPDKFLYIKNRSLDQCAAECRDNCSCTAYAYANLQNVDTTIDTTRCLVSIMHSAASIGLNSRQRPSNVCKNKKSTTLKIVLPIMAGLILLITCTWLVFKPKDKHKSKKSQYTLQHSDASNRFENENLEFPSIALEDIIVATNDFSDFNMLGKGGFGKVYKAMLEGGKEVAVKRLSKGSTQGVEEFRNEVVLIAKLQHRNLVRLLDCCIHKDEKLLIYEYLPNKSLDAFLFDATRKSLLDWPSRFKIIKGVARGLLYLHQDSRLTIIHRDLKASNILLDTEMSPKISDFGMARIFGGNEQHANTTRVVGTYGYMSPEYAMEGSFSVKSDTYSFGVLLLEIVSGLKIGSPHLIMDYPNLIAYAWSLWEGGNARELVDSSVLVSCPLQEAVRCIHLGLLCVQDSPNARPLMSSIVFMLENETAPVPTPKRPVYFTTRNYETNQSDQYMRRSLNNMSITTLEGR

SEQ ID NO: 166467 - protein, 291 aa, Zea Mays
MAMAYLPVFVFLFMVVLCQSDDRLTPAKPLLPNEVLISGGGVFALGFFSLKNSSRSYVGIWYNNIPERTYVWIANRDNPITTNVPGKLVFTNSSDLVLLDSTGRTIWTTTNNYTAGGGGETASILLDSGNLVIRLPNGTDIWESFSYPTDTIVPNVNFSLNVASSATLLVAWKGPDDPSSSDFSMGGDPSSGLQIIVWNGTQPYWRRAAWGGELVHGIFQNNTSFMMYQTVVDTGDGYYMQLTVPDGSPSIRLTLDYTGMSTFRRWNNNTSSWKIFSQFPYPSCDRMSEKG

SEQ ID NO: 166468 - protein, 815 aa, Zea Mays
MPRKHAPAFTPEAASASSSGGAGQPHNLPVLQAKMKRDPEGYEEELRQLHRHFESSVFLFQQQAALATTSSSGGGGEVAKELGDLALFLAHVAPFYPDDLADLPDQIGGLLDTNARGLPPGLRSHLVQALVLLVNRKIVDLEDTMELFMELQVIGDRAVKKLAFSHIVHSIRRMNQKHKNESTNRKLQNVLFKFLQAEEESRAKRAFTILCDLHRRRVWFDERTTNAICDACFHPSSRIMIAAISFLLGYENAPQEDDSDASSSEDEADQNPQILLSKQDVYKANHKGTSASKKKKKAKLQRVIRSMKRQQRKSVEETGSSFYSPLTYLKDAQGFAEKLFSRLQKCNERFEVRMMMLKVIARTIGLHHLVLLNFYPYLQRYVQPHQRDVTTLLAAAVQACHDMVPPDAVEPLFKQIVNQFVHDRSRPEMMNEDLLQDLVLYKKSHEKAVSIAARSLITLFREICPSLLVKKDRGRPVDPKARPKAFGEVTVASNVPGAELLDENISSEGESSDDESDGFHSDDEMDLTPAPPGTEENMEGSSVANKHDADGDTKEEDDASDDEDGTDQDDSNSDSDELDDDSDVDVGTDISDEDEGDDGELKESINGSEDEALDQNEDSEEEDKSKGSGSKAQKRKLNDYIGQLNSADASLRALKRLATAKKAEEPSDETGKILSDEDFKRIKELKAKKEAKLALAQHGLIKGVDTRSVTFKMPSSDQLSRKRVDPLELEAHVRRKMSKEERLALVKAGREDRGPYMARAAVKQKKTGGLSNKQKQHKKRMPLAATRAKAARSRQEKKQQRKRSGNQFRGRKAWK

SEQ ID NO: 166469 - protein, 512 aa, Zea Mays
MPRKHAPAFTPEAASASSSGGAGQPHNLPVLQAKMKRDPEGYEEELRQLHRHFESSVFLFQQQAALATTSSSGGGGEVAKELGDLALFLAHVAPFYPDDLADLPDQIGGLLDTNARGLPPGLRSHLVQALVLLVNRKIVDLEDTMELFMELQVIGDRAVKKLAFSHIVHSIRRMNQKHKNESTNRKLQNVLFKFLQAEEESRAKRAFTILCDLHRRRVWFDERTTNAICDACFHPSSRIMIAAISFLLGYENAPQEDDSDASSSEDEADQNPQILLSKQDVYKANHKGTSASKKKKKAKLQRVIRSMKRQQRKSVEETGSSFYSPLTYLKDAQGFAEKLFSRLQKCNERFEVRMMMLKVIARTIGLHHLVLLNFYPYLQRYVQPHQRDVTTLLAAAVQACHDMVPPDAVEPLFKQIVNQFVHDRSRPEAIAVGLNVVREICMRIPLMMNEDLLQDLVLYKKSHEKAVSIAARSLITLFRESRKIVAVLWIQRLGPKHLEKSLLLATFLVPSC

SEQ ID NO: 166470 - protein, 392 aa, Zea Mays
MQLQCNPGAGVFGHLSDSFLGRKGALQVVCVLNAAFGLLTALSPNYWAYAALRLLTGFSAGSVGVLAFVLATEPVGPARRGAAGMSTFYFFSGGIAALAAVAALFQGSWRALYAVTSLPSLVFAVAVVPFFVSESPRWYLVRRRPDDALRVIRAIAATNGRAVPEDLRLKLDDEEPGNKDVGGSTAHAASSGSIVDVFRSPTTRVRLVLSVLINLLSSVVYYGLSLNVVNLKTNLYVTVVVNSLAEMPAYLLTALLLDHFGRKPLAIGTMLLSGVFCTAGSLVPGAGIMRVACGVVGIFGMAATYNLLFIYTAELFPTVVRNAALGCTAQAAQMGAIVAPLVVMLGERLPFAVFGASGIVGGLLVLYLPETMNKPLYDTMAGLEEGEKNVVK

SEQ ID NO: 166471 - protein, 390 aa, Zea Mays
MRCRQGAGVFGHLSDSFLGRKGALQVVCVLNAAFGLLTALSPNYWAYAALRLLTGFSAGSVGVLAFVLATEPVGPARRGAAGMSTFYFFSGGIAALAAVAALFQGSWRALYAVTSLPSLVFAVAVVPFFVSESPRWYLVRRRPDDALRVIRAIAATNGRAVPEDLRLKLDDEEPGNKDVGGSTAHAASSGSIVDVFRSPTTRVRLVLSVLINLLSSVVYYGLSLNVVNLKTNLYVTVVVNSLAEMPAYLLTALLLDHFGRKPLAIGTMLLSGVFCTAGSLVPGAGIMRVACGVVGIFGMAATYNLLFIYTAELFPTVVRNAALGCTAQAAQMGAIVAPLVVMLGERLPFAVFGASGIVGGLLVLYLPETMNKPLYDTMAGLEEGEKNVVK

SEQ ID NO: 166472 - protein, 104 aa, Zea Mays
MASGGEAWLSARGHFTGGTHGQGRFLAGRHGHGSVGRARSKGAPVSQAIGLARTGGLSRAQASLPRFGQRGPGRTGLGRAQKVGLGAGRLTGGRKSAAPREQFQ

SEQ ID NO: 166473 - protein, 845 aa, Zea Mays
MTKTNTMRSHHHGYSHRHCHLLVQSSILLFLGTFAAAQAASDILSKGSNLTNGETLVSANGSFTLGFFTRGVPARRYLGIWFTVANSSSDAVCWVANRDLPLGDTSGVLVISDTGSLVLLDGSGRTAWSSNTTAGAASPTVKLLESGNLVLLDGNGGRDDYDVVKLWQSFDHPTNTLLPGAKIGMNLWSGGGWSLTSWRDADDPSTGEFRYAMVRRGGLLPEIVMLDSSDAIKYRTGVWNGRWFSGIPEMNSYSNMFVFHVTVSQSEVSFSYAAMPARRHPFPASSSTTRLRPCASCGCRTSEGGQTSSRDPEKTATTTTGAGTLACVQGFVPVSSSDWDGRDPSGGCRRNVSLDCGDNGTTDGFVRLPGVKLPDTLNSSLDTSITLDECRAKCLANCSCVAYAAADVQGGGDDVSTGCIMWPENLTDLRYVAGGQTLYLRQATPPSGTGRSKKETVVLIAAGSILGFIVLVMLAIFAVQAVRIRRRNLIIQMTEAVETAQDPSVSSIALATVKSATRNFSTRNVIGEGTFGIVYEGKLPRGHPLLHVLAGRTIAVKRLKSIGDLPDIIVRYFTREMQLMSGLKQHRNVLRLLAYCDEASERILVYEYMHRRSLDSYIFGTPRERALLNWRRRLQIIQGIADGVKHLHEGEGSSGNVIHRDLKPANVLLDGGWQAKVADFGTAKLLVAGATGTRTRIGTAGYMAPEYVQSDGSETTLKCDVYSFGVTLMETLSGRKNCDTPGLVSEAWRLWVGRCVTALLDPAVAPAPAKPELAQLRRCIQVGLLCVQEKPDERPAMSAVVEMLGSPCSELAEPMVPTVVGNAALATLLEADLSRPTVYETIDFR

SEQ ID NO: 166474 - protein, 370 aa, Zea Mays
MGDHAEMLHAAPAMYNGAGAAPHGGWWNTAVPATTCSTTELAGFTTWSSALAASYDLAAEGTKAKSAAASSESPGNNSSVTFQEPACVTDPPGVGTAVVQVQQPLATGYADWTHPYMSSGATTLHGFLQDGHQQDMSSATEQSSMTASSLMNPSSNNLALALQGHHHHHQEHEHQQQMLSSFGSELLLSPTTSPYGFQSSLLRSLMEPAAATKQALPGYQQQQYDQYQQQMGMGQARFAPPAAGAASREALQFSNDALFSWNPSAAGFGFGLGVPPAPDQASSVRSVVKPSPAAARATATLALKTALEGVGESASSIITKKKANGEPALKKPRLETPSPLPTFKVRKEKLGDRITALQQLVAPFGKVRDS

SEQ ID NO: 166475 - protein, 454 aa, Zea Mays
MATFSKASRLCGAVTMQPKQVWSLLSRILSKLLGLPGILLKKFRKEGVSELDAVALPELSQDVLMDIFSTLEVPDLIRAGSVCSSWHATYKCLLDLRQYKQPQTPCLFYTCESAGSNIGFLYNLKENRSYKLTLPEPPIRSRLLIGSSNGWLITADERSELHLVNPITGEQVALPSVITIEHVKPIFDASGTIHMYELSYETPPDLFDLGDLRDELYFKAFVFPDPSTTGSYIVVLIHEPRSRLSFARPGDDKWTSVGQGIGYKDCTYVDGLLYTVDWTGEIDAFDFTASPVKMTVIMDSLKYPPCENLYIIQAPWGDLLHVWRTIDVPPNAPSWDPEKCLAETVKIQVHKVDLEAKKWVKINRLQCDGVLFLGHNDSLYRSAQVHPGLKSNHAYFTDDCKELTVAFKNSTRDMGVMDLENNAKKEIVSQIWSNWPCPTWITPNLMKLNQAFNR

SEQ ID NO: 166476 - protein, 455 aa, Zea Mays
MATFSKASRLCGAVTMQPKQLWSLLLSRILPKLLGLPGILLKKFRKEGVMELDAAALPELPQDVLMDIFGTLEVPDLIRAGSVCSSWHATYKCLLDLRQYKQPQTPCLFYTCESAGSNVGFLYSLKENRSYKLTLPEPPIRSRLLIGSSNGWLITADERSELHLVNPITGEQVALPSVITIEHVKPIFDASGTIRMYELSYQTPPDLFDLGDLRDELYFKAFVFPDPSTTGSYIVVLIHEPYSRLSFARPGDDKWTWVGQGSQYKDCTYVDGLLYTVNYSGEIDAFDFTASPVKMTVIMKELKYPVCENMYIIQAPWGDLLHVWRTIDVPPNAPPWVPGKCMVETLKIQVHKVDLEAKQRVEINRLQCDSVLFLGHNDSLCLSTQVHPELKSNHAYFTDDFKELTVLLKNCMRDMGVMDLENSVKKEIVSQIWSNWPCPTWITPNLMKLNQAFNR

SEQ ID NO: 166477 - protein, 406 aa, Zea Mays
MELDAAALPELPQDVLMDIFGTLEVPDLIRAGSVCSSWHATYKCLLDLRQYKQPQTPCLFYTCESAGSNVGFLYSLKENRSYKLTLPEPPIRSRLLIGSSNGWLITADERSELHLVNPITGEQVALPSVITIEHVKPIFDASGTIRMYELSYQTPPDLFDLGDLRDELYFKAFVFPDPSTTGSYIVVLIHEPYSRLSFARPGDDKWTWVGQGSQYKDCTYVDGLLYTVNYSGEIDAFDFTASPVKMTVIMKELKYPVCENMYIIQAPWGDLLHVWRTIDVPPNAPPWVPGKCMVETLKIQVHKVDLEAKQRVEINRLQCDSVLFLGHNDSLCLSTQVHPELKSNHAYFTDDFKELTVLLKNCMRDMGVMDLENSVKKEIVSQIWSNWPCPTWITPNLMKLNQAFNR

SEQ ID NO: 166478 - protein, 166 aa, Zea Mays
MPLGVQAILRSTFRCAEVLSRWRARVCTGDLERAGGAKQLIDELDLRTNLEAKKASLGSRLVGGRQLSVLQMLVCALLTRGVCWLLRAWRVTESGLLCFWFWRAGGCEVTARRRCRVREKEAFSVSGHCSVAVHDLHDMHGIFFALICYLYSRGSQIYKLSFSLKL

SEQ ID NO: 166479 - protein, 761 aa, Zea Mays
MDNQQLQFQQALQQQHLLLDQIPATTAESCDNTGRGGGGRGSDPLADEFESKSGSENVDGVSVDDQDDPNQRPSKKKRYHRHTLHQIQEMEAFFKECPHPDDKQRKELSRELGLVPLQVKFWFQNKRTQMKNQHERQENSQLRAENEKLRAENMRYKEALSSASCPNCGGPAALGEMSFDEHHLRVENARLREEIDRISAIAAKYVGKPMVSFPVLSSPLAGARPSPLDIDSGGVLGGAATYGGAADIFGGGGGVAACGAARDCDKPMIVELAVTAMEELVRMAQLDEPLWNAPAGGHDGSAETLNEEEYARMFVPAGGLGLKKQYGFKSEASRDSSVVIMTHASLVEILMDVNQYATVFSSIVSRAATLEVLSTGVAGNYNGALQVMSVEFQVPSPLVPTRDSYFVRYCKQNADGTWAVVDVSLDTSSVLKCRRRPSGCLIQEMPNGYSKVTWVEHVEVDDRSVNGIYKLLVDSGLAFGARRWVGTLDRQCERLASVMASNIPTSDIGVITSTEGRKSMLKLAERMVTSFCGGVTASAAHQWTTLSGSGADDVRVMTRKSVDDPGRPPGIVLNAATSFWLPITPKRVFDFLRDESSRSEWDILSNGGVVQEMAHIANGRDHGNCVSLLRVNQSTNSTQSNMLILQESCTDASGSYVIYAPVDVVAMNVVLNGGDPDYVALLPSGFAILPDGPSGSSNMQGGGGGGVGSGGSLLTVAFQILVDSVPTAKLSLGSVATVNSLIARTVERIKAAVSGESVTQQ

SEQ ID NO: 166480 - protein, 768 aa, Zea Mays
MPQQPNLMDNQQLQFQQALQQQHLLLDQIPATTAESCDNTGRGGGGRGSDPLADEFESKSGSENVDGVSVDDQDDPNQRPSKKKRYHRHTLHQIQEMEAFFKECPHPDDKQRKELSRELGLVPLQVKFWFQNKRTQMKNQHERQENSQLRAENEKLRAENMRYKEALSSASCPNCGGPAALGEMSFDEHHLRVENARLREEIDRISAIAAKYVGKPMVSFPVLSSPLAGARPSPLDIDSGGVLGGAATYGGAADIFGGGGGVAACGAARDCDKPMIVELAVTAMEELVRMAQLDEPLWNAPAGGHDGSAETLNEEEYARMFVPAGGLGLKKQYGFKSEASRDSSVVIMTHASLVEILMDVNQYATVFSSIVSRAATLEVLSTGVAGNYNGALQVMSVEFQVPSPLVPTRDSYFVRYCKQNADGTWAVVDVSLDTSSVLKCRRRPSGCLIQEMPNGYSKVTWVEHVEVDDRSVNGIYKLLVDSGLAFGARRWVGTLDRQCERLASVMASNIPTSDIGVITSTEGRKSMLKLAERMVTSFCGGVTASAAHQWTTLSGSGADDVRVMTRKSVDDPGRPPGIVLNAATSFWLPITPKRVFDFLRDESSRSEWDILSNGGVVQEMAHIANGRDHGNCVSLLRVNQSTNSTQSNMLILQESCTDASGSYVIYAPVDVVAMNVVLNGGDPDYVALLPSGFAILPDGPSGSSNMQGGGGGGVGSGGSLLTVAFQILVDSVPTAKLSLGSVATVNSLIARTVERIKAAVSGESVTQQ

SEQ ID NO: 166481 - protein, 373 aa, Zea Mays
MSVEFQVPSPLVPTRDSYFVRYCKQNADGTWAVVDVSLDTSSVLKCRRRPSGCLIQEMPNGYSKVTWVEHVEVDDRSVNGIYKLLVDSGLAFGARRWVGTLDRQCERLASVMASNIPTSDIGVITSTEGRKSMLKLAERMVTSFCGGVTASAAHQWTTLSGSGADDVRVMTRKSVDDPGRPPGIVLNAATSFWLPITPKRVFDFLRDESSRSEWDILSNGGVVQEMAHIANGRDHGNCVSLLRVNSTNSTQSNMLILQESCTDASGSYVIYAPVDVVAMNVVLNGGDPDYVALLPSGFAILPDGPSGSSNMQGGGGGGVGSGGSLLTVAFQILVDSVPTAKLSLGSVATVNSLIARTVERIKAAVSGESVTQQ

SEQ ID NO: 166482 - protein, 352 aa, Zea Mays
MPNGYSKVTWVEHVEVDDRSVNGIYKLLVDSGLAFGARRWVGTLDRQCERLASVMASNIPTSDIGVITSTEGRKSMLKLAERMVTSFCGGVTASAAHQWTTLSGSGADDVRVMTRKSVDDPGRPPGIVLNAATSFWLPITPKRVFDFLRDESSRSEARTRAPTHTQFFFNREHVLPSYEPPFLFFFFLFLQWDILSNGGVVQEMAHIANGRDHGNCVSLLRVNQSTNSTQSNMLILQESCTDASGSYVIYAPVDVVAMNVVLNGGDPDYVALLPSGFAILPDGPSGSSNMQGGGGGGVGSGGSLLTVAFQILVDSVPTAKLSLGSVATVNSLIARTVERIKAAVSGESVTQQ

SEQ ID NO: 166483 - protein, 134 aa, Zea Mays
MMMRGMTAKNFDPVRYSGRWFEVASLKRGFAGQGQEDCHCTQIYSRTPNPGPEFIDKYKSYVANFGYDPSKIKDTPQDCEYMSSDQIALMMSMPGMNEALTNQFPDLKLKAPVALNPFTSVFDTLKKLLELYFK

SEQ ID NO: 166484 - protein, 218 aa, Zea Mays
MMMRGMTAKNFDPVRYSGRWFEVASLKRGFAGQGQEDCHCTQVDTFCVHGGPDGYITGIRGRVQCLSEEDIASAETDLERQEMVRGKCFLRFPTLPFIPKEPYDVLATDYDNYAIVSGAKDTSFIQIYSRTPNPGPEFIDKYKSYVANFGYDPSKIKDTPQDCEYMSSDQIALMMSMPGMNEALTNQFPDLKLKAPVALNPFTSVFDTLKKLLELYFK

SEQ ID NO: 166485 - protein, 329 aa, Zea Mays
MNYHRRYSPSRAPHLFFTAHKMAQVWPAMHLVAVLMVIGPLNLGIQLMLLFKDNQVLKGWVPDEINLRPITPKDDLAPELPMLRPSQVRKRASAIHMQPALPVPMHLENVTLAKPLQMRRPVEKTIAKHAVPLASRPYISSGVVAAIPISVAPINPEMRTSARQDAELVIPQSSVSAVPIKFVCPASVPCKQLANQNEFTGNKSVDEVQKDSESPNVTKESPVKAEKPNIALVDVVAKDSLGEGQQLNDQVTDVVRDFSGQTQNVDVTMSDEIKIASGARDKPNSANCEQQSSKEPSDITEQSEQLKTETDVQKGVDASDDIHPAHDEQ

SEQ ID NO: 166486 - protein, 369 aa, Zea Mays
MASEGNKDVPHEALTVDHSSISGSKRKRGRPRKYEYPVNELPQKVQPIQSAPPLLHCTQDGSSLASHASGGGAHGNWSAQPRNSANASLQVKDNQVLKGWVPDEINLRPITPKDDLAPELPMLRPSQVRKRASAIHMQPALPVPMHLENVTLAKPLQMRRPVEKTIAKHAVPLASRPYISSGVVAAIPISVAPINPEMRTSARQDAELVIPQSSVSAVPIKFVCPASVPCKQLANQNEFTGNKSVDEVQKDSESPNVTKESPVKAEKPNIALVDVVAKDSLGEGQQLNDQVTDVVRDFSGQTQNVDVTMSDEIKIASGARDKPNSANCEQQSSKEPSDITEQSEQLKTETDVQKGVDASDDIHPAHDEQ

SEQ ID NO: 166487 - protein, 291 aa, Zea Mays
MASEGNKDVPHEALTVDHSSISGSKRKRGRPRKYEYPVNELPQKVQPIQSAPPLLHCTQDGSSLASHASGGGAHAIPISVAPINPEMRTSARQDAELVIPQSSVSAVPIKFVCPASVPCKQLANQNEFTGNKSVDEVQKDSESPNVTKESPVKAEKPNIALVDVVAKDSLGEGQQLNDQVTDVVRDFSGQTQNVDVTMSDEIKIASGARDKPNSANCEQQSSKEPSDITEQSEQLKTETDVQKGVDASVPEKKTHLFRYHGQGKPSNSNRRGSSPFKKLQSYKSLGSIFSS

SEQ ID NO: 166488 - protein, 396 aa, Zea Mays
MASEGNKDVPHEALTVDHSSISGSKRKRGRPRKYEYPVNELPQKVQPIQSAPPLLHCTQDGSSLASHASGGGAHGNWSAQPRNSANASLQGNSGKDDFLGKHFVGKLTKKVPGFSLITVKVKDNQVLKGWVPDEINLRPITPKDDLAPELPMLRPSQVRKRASAIHMQPALPVPMHLENVTLAKPLQMRRPVEKTIAKHAVPLASRPYISSGVVAAIPISVAPINPEMRTSARQDAELVIPQSSVSAVPIKFVCPASVPCKQLANQNEFTGNKSVDEVQKDSESPNVTKESPVKAEKPNIALVDVVAKDSLGEGQQLNDQVTDVVRDFSGQTQNVDVTMSDEIKIASGARDKPNSANCEQQSSKEPSEQSEQLKTETDVQKGVDASDDIHPAHDEQ

SEQ ID NO: 166489 - protein, 432 aa, Zea Mays
MASEGNKDVPHEALTVDHSSISGSKRKRGRPRKYEYPVNELPQKVQPIQSAPPLLHCTQDGSSLASHASGGGAHGNWSAQPRNSANASLQGNSGKDDFLGKHFVGKLTKKVPGFSLITVKVKDNQVLKGWVPDEINLRPITPKDDLAPELPMLRPSQVRKRASAIHMQPALPVPMHLENVTLAKPLQMRRPVEKTIAKHAVPLASRPYISSGVVAAIPISVAPINPEMRTSARQDAELVIPQSSVSAVPIKFVCPASVPCKQLANQNEFTGNKSVDEVQKDSESPNVTKESPVKAEKPNIALVDVVAKDSLGEGQQLNDQVTDVVRDFSGQTQNVDVTMSDEIKIASGARDKPNSANCEQQSSKEPSDITEQSEQLKTETDVQKGVDASVPEKKTHLFRYHGQGKPSNSNRRGSSPFKKLQSYKSLGSIFSS

SEQ ID NO: 166490 - protein, 165 aa, Zea Mays
MEALVVRQLGDPTLPPGGEASPFAAVSGDHPVPEISSPTAVRVRVAATSLNFATFLQVQGKYQERPPLPFVPGSDYSGVVDAVGPGVRGLRPGDRVCSFTGLGSFADFIVAEEKQLFLVPDGCDLVTAGALPVAFGATCSWCCWWCRGICCANRKSLWCCCYCSC

SEQ ID NO: 166491 - protein, 354 aa, Zea Mays
MAAAAEHGNCDAWAARDPSGVLSPYKFNRRAVQSSDVSLKIIYCGVCYGDVMWIQNKHNDSVYPLVPGHEIAGVVTEVGADVKAFKVGDHAGVGTYVNSCRHCENCNSSLENYCPETVFTYNTTDADGTITKGGYSTHIVVHERYCFKIPDGYPLAQAAPLLCAGITVYTPMARHNMKQPGKSLGVIGLGGLGHMAVKFGKAFGLKVTVFSTSESKREEAINLLGADNFVISSDTQQMEALKNSLHFIVDTASGDHPFDPYLSLLKVGGVMTIVCFPSEIKMHPASLNRGGRTLSGSIVGGTKDIQEMVNFCAENKIYPEIEIIKMDYINEALARLVNRDVKYRFVIDIKNSFE

SEQ ID NO: 166492 - protein, 325 aa, Zea Mays
MAVQSSDVSLKIIYCGVCYGDVMWIQNKHNDSVYPLVPGHEIAGVVTEVGADVKAFKVGDHAGVGTYVNSCRHCENCNSSLENYCPETVFTYNTTDADGTITKGGYSTHIVVHERYCFKIPDGYPLAQAAPLLCAGITVYTPMARHNMKQPGKSLGVIGLGGLGHMAVKFGKAFGLKVTVFSTSESKREEAINLLGADNFVISSDTQQMEALKNSLHFIVDTASGDHPFDPYLSLLKVGGVMTIVCFPSEIKMHPASLNRGGRTLSGSIVGGTKDIQEMVNFCAENKIYPEIEIIKMDYINEALARLVNRDVKYRFVIDIKNSFE

SEQ ID NO: 166493 - protein, 889 aa, Zea Mays
MSDDGMASAAVEPPKREQNFLVKVGMEAWTQSFAVAHKVRLVHILKNLHTSEVKIYSDASKEFIGVLDGESGGEVLQEYVQQSPQLGELLEAWRLHRENPGMAHILLLFAAVLGHPDGKLRRHGSVKKSLDGVARMILEDKEKMGDVYLELNSGEFRRQNAALDLLAAIVRRGGGLASEVAERFDFKIPILPQLAGTMKKKGSRDGRNRRKGADFGSTRRSFIGFAMSFLEVGNPRLLRWVLQQKEVYSGVLRGIGNDDAETVIYVLSTLRDNVLVDESLVPPGLRSVLFGSVTLEQLSLISGNLESGEAADIAHEVLVMVCTDPKNGLMPGSNLRGNEKRLLDLMKKLKATEVVHHKKLLLAIVSNRLSLCSAYMNEFPYNIEPRSSPSWFSAISLAADVIASAKCNSIVQTLSSSSHGLVSVDDEEVQVVLKCMVPNVCSRAMINRGLLHSDDLVKHGSLRLVFESVNLLCYITESINCMVSKGRLKSEFIGSEKVTMKIDGFPVLSCSDATDASLVDEVHQGDEMQVKRWTSLREYIQDEVHGAMPDPQVFLKLLSSTSQKHQSYSQSIQKNNAQLSEPPQKKRRCSPSCEVDDIIIGGIDVEQDKDASEEQGLELKNDRTTTLCEIWSLDKQDPKTKDANVVENVFHSKLLDVLRLYLGVMPSSFDGSYDFFKIIPPNPLDLSMDEQQSLLSFLLEYSGQSRGCLDPERVPESMYKYLQPLVYIMLHSQIKNIRDQAYILVKAAMASSGAFDHNFTEIDAWLVFLPGYEAKWCVRENLRIGAPNKLSHIVIPFLCDAISVVGNNLYKYQEHTHKLISKSGQLEGRSPDFSPLIICVLQKCLRLLDTASRSTKLHEKSTISLYVCNTIHLILQSQVDMHLLPDLIG

SEQ ID NO: 166494 - protein, 867 aa, Zea Mays
MSDDGMASAAVEPPKREQNFLVKVGMEAWTQSFAVAHKVRLVHILKNLHTSEVKIYSDASKEFIGVLDGESGGEVLQEYVQQSPQLGELLEAWRLHRENPGMAHILLLFAAVLGHPDGKLRRHGSVKKSLDGVARMILEDKEKMGDVYLELNSGEFRRQNAALDLLAAIVRRGGGLASEVAERFDFKIPILPQLAGTMKKKGSRDGRNRRKGADFGSTRRSFIGFAMSFLEVGNPRLLRWVLQQKEVYSGVLRGIGNDDAETVIYVLSTLRDNVLVDESLVPPGLRSVLFGSVTLEQLSLISGNLESGEAADIAHEVLVMVCTDPKNGLMPGSNLRGNEKRLLDLMKKLKATEVVHHKKLLLAIVSNRLSLCSAYMNEFPYNIEPRSSPSWFSAISLAADVIASAKCNSIVQTLSSSSHGLVSVDDEEVQVVLKCMVPNVCSRAMINRGLLHSDDLVKHGSLRLVFESVNLLCYITESINCMVSKGRLKSEFIGSEKVTMKIDGFPVLSCSDATDASLVDEVHQGDEMQVKRWTSLREYIQDEVHGAMPDPQVFLKLLSSTSQKHQSYSQSIQKNNAQLSEPPQKKRRCSPSCEVDDIIIGGIDVEQDKDASEEQGLELKNDRTTTLCEIWSLDKQDPKTKDANVVENVFHSKLLDVLRLYLGVMPSSFDGSYDFFKIIPPNPLDLSMDEQQSLLSFLLEYSGQSRGCLDPERVPESMYKYLQPLVYIMLHSQIKNIRDQAYILVKAAMASSGAFDHNFTEIDAWLVFLPGYEAKWCVRENLRIGAPNKLSHIVIPFLCDAISVVGNNLYKYQEHTHKLISKSGQLEGYSTQHLEVQSYTRSLQFHCMCATRSTLFFSLRYYSKRKI

SEQ ID NO: 166495 - protein, 583 aa, Zea Mays
MGYIEPAEFARLGLLAITLVSIASPDNELRMLGYECLGTFKKSLEYAQRSKETWQLQLLLTYLQNGISEQWQKIPSIIAVFAAEASLTLLDGSHAQFTVMRNFLMHSTSVNLQSIPLFPTLLQSSSVHFKAERLWMLRLLSAGSNLADDAKIYKRGRVLELALAFCSSPVSDFESKVLVLKVLKKCVKLPVLAHHLVKESGILLWLLSVISVRSEVSDGSESSCSRVTELALEVVNGLISSRLITDWLQETALEQLSTISSYLSVLINNAKLLKGNVHLLTSALSVITSTMRLSMKRKIYQPHFTLSLHGVFNLCQTIGGSSRSTEHKLVMELGIDAILMNGPIPILSEMDKSRISMVVSWATSSIFWLYSNQRSLLEISCKEPPRNESLLSKILRLLAASVILGKISSIFHGKSVDLAGNTSETLCSFLDNAYERAETAKSCSVNDTLAVIILHLQDHMPKNSDSLPSVIAALCLLLLDRSMNKHLANNRGKIEMLCSKIGCPAESNPAWRWHYYQPWKDSALQRTGMERLEEEQACRSLLVLFSSAFSACLSEFPVLSLDDVEKSGLFQWERDLMAKQSST

SEQ ID NO: 166496 - protein, 576 aa, Zea Mays
MGYIEPAEFARLGLLAITLVSIASPDNELRMLGYECLGTFKKSLEYAQRSKETWQLQLLLTYLQNGISEQWQKIPSIIAVFAAEASLTLLDGSHAQFTVMRNFLMHSTSVNLQSSSVHFKAERLWMLRLLSAGSNLADDAKIYKRGRVLELALAFCSSPVSDFESKVLVLKVLKKCVKLPVLAHHLVKESGILLWLLSVISVRSEVSDGSESSCSRVTELALEVVNGLISSRLITDWLQETALEQLSTISSYLSVLINNAKLLKGNVHLLTSALSVITSTMRLSMKRKIYQPHFTLSLHGVFNLCQTIGGSSRSTEHKLVMELGIDAILMNGPIPILSEMDKSRISMVVSWATSSIFWLYSNQRSLLEISCKEPPRNESLLSKILRLLAASVILGKISSIFHGKSVDLAGNTSETLCSFLDNAYERAETAKSCSVNDTLAVIILHLQDHMPKNSDSLPSVIAALCLLLLDRSSKQVNKHLANNRGKIEMLCSKIGCPAESNPAWRWHYYQPWKDSALQRTGMERLEEEQACRSLLVLFSSAFSACLSEFPVLSLDDVEKSGLFQWERDLMAKQSST

SEQ ID NO: 166497 - protein, 583 aa, Zea Mays
MGYIEPAEFARLGLLAITLVSIASPDNELRMLGYECLGTFKKSLEYAQRSKETWQLQLLLTYLQNGISEQWQKIPSIIAVFAAEASLTLLDGSHAQFTVMRNFLMHSTSVNLQSIPLFPTLLQSSSVHFKAERLWMLRLLSAGSNLADDAKIYKRGRVLELALAFCSSPVSDFESKVLVLKKCVKLPVLAHHLVKESGILLWLLSVISVRSEVSDGSESSCSRVTELALEVVNGLISSRLITDWLQETALEQLSTISSYLSVLINNAKLLKGNVHLLTSALSVITSTMRLSMKRKIYQPHFTLSLHGVFNLCQTIGGSSRSTEHKLVMELGIDAILMNGPIPILSEMDKSRISMVVSWATSSIFWLYSNQRSLLEISCKEPPRNESLLSKILRLLAASVILGKISSIFHGKSVDLAGNTSETLCSFLDNAYERAETAKSCSVNDTLAVIILHLQDHMPKNSDSLPSVIAALCLLLLDRSSKQVNKHLANNRGKIEMLCSKIGCPAESNPAWRWHYYQPWKDSALQRTGMERLEEEQACRSLLVLFSSAFSACLSEFPVLSLDDVEKSGLFQWERDLMAKQSST

SEQ ID NO: 166498 - protein, 391 aa, Zea Mays
MGYIEPAEFARLGLLAITLVSIASPDNELRMLGYECLGTFKKSLEYAQRSKETWQLQLLLTYLQNGISEQWQKIPSIIAVFAAEASLTLLDGSHAQFTVMRNFLMHSTSVNLQSIPLFPTLLQSSSVHFKAERLWMLRLLSAGSNLADDAKIYKRGRVLELALAFCSSPVSDFESKVLVLKVLKKCVKLPVLAHHLVKESGILLWLLSVISVRSEVSDGSESSCSRVTELALEVVNGLISSRLITDWLQETALEQLSTISSYLSVLINNAKLLKGNVHLLTSALSVITSTMRLSMKRKIYQPHFTLSLHGVFNLCQTIGGSSRSTEHKLVMELGIDAILMNGPIPILSEMDKSRISMVVSWATSSIFWLYSNQRSLLEISCKEPPRNEEHQ

SEQ ID NO: 166499 - protein, 451 aa, Zea Mays
MLRLLSAGSNLADDAKIYKRGRVLELALAFCSSPVSDFESKVLVLKVLKKCVKLPVLAHHLVKESGILLWLLSVISVRSEVSDGSESSCSRVTELALEVVNGLISSRLITDWLQETALEQLSTISSYLSVLINNAKLLKGNVHLLTSALSVITSTMRLSMKRKIYQPHFTLSLHGVFNLCQTIGGSSRSTEHKLVMELGIDAILMNGPIPILSEMDKSRISMVVSWATSSIFWLYSNQRSLLEISCKEPPRNESLLSKILRLLAASVILGKISSIFHGKSVDLAGNTSETLCSFLDNAYERAETAKSCSVNDTLAVIILHLQDHMPKNSDSLPSVIAALCLLLLDRSSKQVNKHLANNRGKIEMLCSKIGCPAESNPAWRWHYYQPWKDSALQRTGMERLEEEQACRSLLVLFSSAFSACLSEFPVLSLDDVEKSGLFQWERDLMAKQSST

SEQ ID NO: 166500 - protein, 582 aa, Zea Mays
METNLRAQSPLCSRTRPALAVRPDAAATGLTLSVIRRSRFTRGGLVRCMVSSSDYHKSSPRRTSTSKSKGVPSGGYASRPTAESSTKKIEQSSDDEGDFSRTNGSLYGEAAEQASTAEESSQVYSTGDISSSAERGEAGTEEEADQNQSSALFSVSVDDDSIDRKLDEYRGKISALASSKPKSSSLASVAGQNEPVGGQEEPVTGSKEHDSSIVDAPIRGRPFAEAVVGYKDFTESVAGMAASKNEEEQLVSLEDVVGISTDADIEAPVEDDVDPEVLLRRLQELADENYLIGNNCFSFPEVVMADSMIDLYLNRSMSALASESNVFVKGAFNGWRWNAFTETMHKSELRGDWWCCKLYIPKQAYRLDFVFFNGDTVYENNNHNDFFLEIESGIDEHSFEDFLVEEKRKELERLAAEEAERKIQAEEERKRGEERAAMEADRAQARSEVEMKKEKLRQLLSSASRYADNLWYIEPNTYRGGDRVRLYYHRSSRPLMHDTEIWMHGGYNNWIDGLSIAERLVKSHEKEGDWWYAEGIMITMEDRISMLSFRITYRMISFGWKKNIGSLQGFNKREEKGRALKE

SEQ ID NO: 166501 - protein, 629 aa, Zea Mays
METNLRAQSPLCSRTRPALAVRPDAAATGLTLSVIRRSRFTRGGLVRCMVSSSDYHKSSPRRTSTSKSKGVPSGGYASRPTAESSTKKIEQSSDDEGDFSRTNGSLYGEAAEQASTAEESSQVYSTGDISSSAERGEAGTEEEADQNQSSALFSVSVDDDSIDRKLDEYRGKISALASSKPKSSSLASVAGQNEPVGGQEEPVTGSKEHDSSIVDAPIRGRPFAEAVVGYKDFTESVAGMAASKNEEEQLVSLEDVVGISTDADIEAPVEDDVDPEVLLRRLQELADENYLIGNNCFSFPEVVMADSMIDLYLNRSMSALASESNVFVKGAFNGWRWNAFTETMHKSELRGDWWCCKLYIPKQAYRLDFVFFNGDTVYENNNHNDFFLEIESGIDEHSFEDFLVEEKRKELERLAAEEAERKIQAEEERKRGEERAAMEADRAQARSEVEMKKEKLRQLLSSASRYADNLWYIEPNTYRGGDRVRLYYHRSSRPLMHDTEIWMHGGYNNWIDGLSIAERLVKSHEKEGDWWYAEVTLPERALLFDWVFADGPPGNARNYDNNGRQDFHAIVPNNISDDIFWVEEEHRIFTRLQQERREREGAERIKAERSAKMKAEMKEKTMRAKKKKK

SEQ ID NO: 166502 - protein, 608 aa, Zea Mays
METNLRAQSPLCSRTRPALAVRPDAAATGLTLSVIRRSRFTRGGLVRCMVSSSDYHKSSPRRTSTSKSKGVPSGGYASRPTAESSTKKIEQSSDDEGDFSRTNGSLYGEAAEQASTAEESSQVYSTGDISSSAERGEAGTEEEADQNQSSALFSVSVDDDSIDRKLDEYRGKISALASSKPKSSSLASVAGQNEPVGGQEEPVTGSKEHDSSIVDAPIRGRPFAEAVVGYKDFTESVAGMAASKNEEEQLVSLEDVVGISTDADIEAPVEDDVDPEVLLRRLQELADENYLIGNNCFSFPEVVMADSMIDLYLNRSMSALASESNVFVKGAFNGWRWNAFTETMHKSELRGDWWCCKLYIPKQAYRLDFVFFNGDTVYENNNHNDFFLEIESGIDEHSFEDFLVEEKRKELERLAAEEAERKIQAEEERKRGEERAAMEADRAQARSEVEMKKEKLRQLLSSASRYADNLWYIEPNTYRGGDRVRLYYHRSSRPLMHDTEIWMHGGYNNWIDGLSIAERLVKSHEKEGDWWYAEVTLPERALLFDWVFADGPPGNARNYDNNGRQDFHAIVPNNISDDIFWVEEEHRIFTRLQQERREREGAERIKAE

SEQ ID NO: 166503 - protein, 192 aa, Zea Mays
MHKSELRGDWWCCKLYIPKQAYRLDFVFFNGDTVYENNNHNDFFLEIESGIDEHSFEDFLVEEKRKELERLAAEEAERKIQAEEERKRGEERAAMEADRAQARSEVEMKKEKLRQLLSSASRYADNLWYIEPNTYRGGDRVRLYYHRSSRPLMHDTEIWMHGGYNNWIDGLSIAERLVKSHEKEGDWWYAEG

SEQ ID NO: 166504 - protein, 266 aa, Zea Mays
MMDFVFSESEGGIYDNRNGMDYHIPVSDSVAREPPMHIVHIAVEMAPIAKVGGLGDVVTSLSRAVQDLGHKVEVILPKYDCLNLNSVKDLRYQQSFTWGGTEIKVWFGKVEDLPVYFLEPQNGMFWVGCVYGKNDESRFGFFCHSALEFLLQKGSSPDIIHCHDWSSAPVAWLYKEHYALNGIGNGRIVFTIHNLEFGAHHIGKAMAHCDKATTVSDTYSKEVAGHGAIAPHYYKFHGIRNGIDPDIWDPYTDKFIPGPLYIRECC

SEQ ID NO: 166505 - protein, 361 aa, Zea Mays
MFWVGCVYGKNDESRFGFFCHSALEFLLQKGSSPDIIHCHDWSSAPVAWLYKEHYALNGIGNGRIVFTIHNLEFGAHHIGKAMAHCDKATTVSDTYSKEVAGHGAIAPHYYKFHGIRNGIDPDIWDPYTDKFIPVHYTSENVVEGKSAAKKALQQMLGLQQTDTPVVGIITRLTVQKGIHLIKHAMHRALERNGQVVLLGSAPDPRIQSDFTNLASKLHGEYHGRVKLCLTYDEPLSHLIYAGADFILVPSIFEPCGLTQLIAMRYGSIPVVRKTGGLYDTVFDVDNDKDRAQAQGLEPNGFSFEGADSSGVDYALDRAITTFYDARDWFNSLCKRVMEQDWSWNRPALDYMELYHSARKS

SEQ ID NO: 166506 - protein, 103 aa, Zea Mays
MAKTSSFKLEHPLEKRQSEANRIREKYPDRIPVIVEKAERSDIPDIDKKKKRIKLSAEKAIFIFVKNTLPPTAALMSSIYEENKDEDGFLYMTYSGENTFGLL

SEQ ID NO: 166507 - protein, 1503 aa, Zea Mays
MGSLALLHLRIYINEFRWYIRFVVIYMMVGEAAMFNLVLSVRQYYSSSSIFYLYCSEIVCQFLFGILMVVYLPSLDPYPGYTPIRNEVLVDNTDYEPLPGGEQICPERHANIFARIFFSWMTPLMQQGFRRPITDKDIWKLDSWDETETLYSQFQKRWNDELQKPNPWLLRALHSSLWGRFWLGGFFKIGNDASQFVGPLVLNLLLESMQKGDPSWSGYIYAFSIFAGVSLGVLAEAQYFQNVMRVGFRLRSTLIAAVFRKSLRLTNDSRRKFASGRITNLISTDAESLQQVCQQLHSLWSAPFRIVISMVLLYAQLGPAALVGALMLVLLFPIQTVIISKMQKLTKEGLQRTDKRISLMNEVLAAMDTVKCYAWEQSFQSKVQDIRDDELSWFRRAQLLAALNSFILNSIPVVVTVVSFGVYSLLGGDLTPAKAFTSLSLFAVLRFPLFMLPNLITQVVNCKVSLKRLEDLLLAEERLLLPNPPIDPDLPAISIKNGYFSWESEAQRPTLSNVNLDVPVGSLVAIVGSTGEGKTSLISAMLGEIPPVSGSGTSVVIRGSVAYVPQVSWIFNATVRDNILFGSPFQPPRYEKAIDATSLRHDLDLLPGGDLTEIGERGVNISGGQKQRVSMARAVYSDSDVYIFDDPLSALDAHVGRQVFDKCIKGELQHKTRVLVTNQLHFLPYVDKILLIHDGVIKEEGTFDELSNSGELFKKLMENAGKMEEQVEEDESKPKDVAKQTVNGDVTIADEGSQKSQDSSSKTKPGKSVLIKQEERETGVVSARVLSRYKNALGGIWVVSILFFCYALTEVLRISSSTWLSIWTDEGSLKIHGSGYYNLIYGILSFGQVLVTLSNSYWLIISSLRAAKRLHDAMLRSILRAPMVFFHTNPLGRIINRFSKDMGDIDRNVAVFVNMFMAQISQLLSTFVLIGFVSTMSLWAIMPLLILFYAAYLYYQATSREVKRLDSITRSPVYAQFSEALNGLSTIRAYKAYDRMANINGRSMDNNIRFTLVNMGANRWLAIRLETLGGIMIWFTATFAVMQNQRAENQKAFASTMGLLLTYTLNITNLLTAVLRLASLAENSLNAVERVGTYIELPSEAPPVIEDHRPPPGWPSSGVIKFEDVVLRYRPELPPVLHGISFVINGSEKVGIVGRTGAGKSSMLNALFRIVELERGRILIDDCDTSKFGIWDLRKVLGIIPQAPVLFSGSVRFNLDPFNEHNDADLWEALERAHLKDVIRRNSLGLDAEVSEAGENFSVGQRQLLSLARALLRRAKILVLDEATAAVDVRTDALIQKTIREEFKSCTMLIIAHRLNTVIDCDRLLILSSGQVLEFDSPENLLSNEGSAFSKMVQSTGPSNAEYLKSLVFASGEERSRREEIKLQDIQRRWVASNRWAEAAQFALARSLTSSHSDLLALEAAEGNNILRRTKDAVITLQSVLEGKHNTEIDESLTQYQVPADRWWSSLYKVIEGLATMSRLGRNRLQQPSYNFENNNSIDWDQM

SEQ ID NO: 166508 - protein, 1383 aa, Zea Mays
MTPLMQQGFRRPITDKDIWKLDSWDETETLYSQFQKRWNDELQKPNPWLLRALHSSLWGRFWLGGFFKIGNDASQFVGPLVLNLLLESMQKGDPSWSGYIYAFSIFAGVSLGVLAEAQYFQNVMRVGFRLRSTLIAAVFRKSLRLTNDSRRKFASGRITNLISTDAESLQQVCQQLHSLWSAPFRIVISMVLLYAQLGPAALVGALMLVLLFPIQTVIISKMQKLTKEGLQRTDKRISLMNEVLAAMDTVKCYAWEQSFQSKVQDIRDDELSWFRRAQLLAALNSFILNSIPVVVTVVSFGVYSLLGGDLTPAKAFTSLSLFAVLRFPLFMLPNLITQVVNCKVSLKRLEDLLLAEERLLLPNPPIDPDLPAISIKNGYFSWESEAQRPTLSNVNLDVPVGSLVAIVGSTGEGKTSLISAMLGEIPPVSGSGTSVVIRGSVAYVPQVSWIFNATVRDNILFGSPFQPPRYEKAIDATSLRHDLDLLPGGDLTEIGERGVNISGGQKQRVSMARAVYSDSDVYIFDDPLSALDAHVGRQVFDKCIKGELQHKTRVLVTNQLHFLPYVDKILLIHDGVIKEEGTFDELSNSGELFKKLMENAGKMEEQVEEDESKPKDVAKQTVNGDVTIADEGSQKSQDSSSKTKPGKSVLIKQEERETGVVSARVLSRYKNALGGIWVVSILFFCYALTEVLRISSSTWLSIWTDEGSLKIHGSGYYNLIYGILSFGQVLVTLSNSYWLIISSLRAAKRLHDAMLRSILRAPMVFFHTNPLGRIINRFSKDMGDIDRNVAVFVNMFMAQISQLLSTFVLIGFVSTMSLWAIMPLLILFYAAYLYYQATSREVKRLDSITRSPVYAQFSEALNGLSTIRAYKAYDRMANINGRSMDNNIRFTLVNMGANRWLAIRLETLGGIMIWFTATFAVMQNQRAENQKAFASTMGLLLTYTLNITNLLTAVLRLASLAENSLNAVERVGTYIELPSEAPPVIEDHRPPPGWPSSGVIKFEDVVLRYRPELPPVLHGISFVINGSEKVGIVGRTGAGKSSMLNALFRIVELERGRILIDDCDTSKFGIWDLRKVLGIIPQAPVLFSGSVRFNLDPFNEHNDADLWEALERAHLKDVIRRNSLGLDAEVSEAGENFSVGQRQLLSLARALLRRAKILVLDEATAAVDVRTDALIQKTIREEFKSCTMLIIAHRLNTVIDCDRLLILSSGQVLEFDSPENLLSNEGSAFSKMVQSTGPSNAEYLKSLVFASGEERSRREEIKLQDIQRRWVASNRWAEAAQFALARSLTSSHSDLLALEAAEGNNILRRTKDAVITLQSVLEGKHNTEIDESLTQYQVPADRWWSSLYKVIEGLATMSRLGRNRLQQPSYNFENNNSIDWDQM

SEQ ID NO: 166509 - protein, 269 aa, Zea Mays
MGHNAGRTPLIDISNTSVTGDQIGSNSLGPIDDANERKRQRDRERYATMSIEQKNEKNRKRREARQRNTGLPLKSESSRGPIKNTPLAGNSIERKRQRDRERRATMSVEQRNEYNNKRRQMRRRNKGQNVMPDVSGDGDNKVNVDLDDDSDWLHRNETFQTNDYVATTDLLSPDAETVLDDLDMSKIYIIGGLVDRNRWKGITLKKSAEQGIQSAKLPIGNYLKMSSSQVLTVNQVFEIMLKFVETRDWKTAFFHVIPQRKRGEAETGD

SEQ ID NO: 166510 - protein, 164 aa, Zea Mays
MSVEQRNEYNNKRRQMRRRNKGQNVMPDVSGDGDNKVNVDLDDDSDWLHRNETFQTNDYVATTDLLSPDAETVLDDLDMSKIYIIGGLVDRNRWKGITLKKSAEQGIQSAKLPIGNYLKMSSSQVLTVNQVFEIMLKFVETRDWKTAFFHVIPQRKRGEAETGD

SEQ ID NO: 166511 - protein, 132 aa, Zea Mays
MPQPRNILHASVSASPPCNRPTRRLPLRKTAMPPPRLTLRADPQPPDPPGPRLSFPFALKQPSRGPRSHTNCHDLARSVMPPPRTIHRAFPSVQPPDPPGTRLSFPLRAQAEEMHPQIWKPRQWRPIWLWRA

SEQ ID NO: 166512 - protein, 222 aa, Zea Mays
MSIEQKNEKNRKRREARQRNTGLPLKSESSRGPIKNTPLAGNSIERKRQRDRERRATMSVEQRNEYNNKRRQMRRRNKGQNVMPDVSGDGDNKVNVDLDDDSDWLHRNETFQTNDYVATTDLLSPADAETVLDDLDMSKIYIIGGLVDRNRWKGITLKKSAEQGIQSAKLPIGNYLKMSSSQVLTVNQVFEIMLKFVETRDWKTAFFHVIPQRKRGEAETGD

SEQ ID NO: 166513 - protein, 218 aa, Zea Mays
MPINNAPLGWSIFIDLPVPGLRGPRVCQGGGPAVYIPTASFLHPQPQSTRAHAQTRGGEKLPLPTTAKEGIPEGGGTHGRPSAGMLAADVSSVARLLRGEAVKKGGPEIVTMDLLGGCGGGVAAEDEVVDLDVTVPAGWERRLDLLSGKTFLTPRHQSVQGGHQDLNLPPPAAGSASAPNTNNSSAAVCTLDMVRSALERATAGRTAASPATSSTAPR

SEQ ID NO: 166514 - protein, 236 aa, Zea Mays
MADNMATLAKQANKGLLYLAELSQQAVVIGEMGEEYNQRYLHKGEYRETPETGIQWVTNCMGRPRYFYKMFRMSTDVFMALHDLLVSSYDLTSTNNVSSMESLAMFLWIVGGPQSFSQAENRFTRSLWTVHTKFHEVLKCLRKLSKDNIKPRYPTFKTEHDRIKEERFWPYFQGAIGAIDGSHVPVTVPAAEVLNYTCRHGYTSQNVLAICDFDMRFIFVVAGWPGSAHDTRILNH

SEQ ID NO: 166515 - protein, 404 aa, Zea Mays
MADNMATLAKQANKGLLYLAELSQQAVVIGEMGEEYNQRYLHKGEYRETPETGIQWVTNCMGRPRYFYKMFRMSTDVFMALHDLLVSSYDLTSTNNVSSMESLAMFLWIVGGPQSFSQAENRFTRSLWTVHTKFHEVLKCLRKLSKDNIKPRYPTFKTEHDRIKEERFWPYFQGAIGAIDGSHVPVTVPAAEVLNYTCRHGYTSQNVLAICDFDMRFIFVVAGWPGSAHDTRILNHALANFPSFPVPPKGKYYLVDSGYPNRQGYLAPFKGSTYHILEFRLRNGRPPQGKYEIFNFLHSSLRNVIERAFGVLKQKWRILKGIPSFSTRTQKHIIIACMALRNFIRDSNSEDKLFDRCDADEEYLVQQSFTSQAQGDDNPEGENENTMNTIRIKIADALSSARGR

SEQ ID NO: 166516 - protein, 284 aa, Zea Mays
MRPGSTSRPSPRRCLYVYGSASALPKLLLLLLAASSSAQAQQAARMKTDPVEAAAVNAVFAKLRQTASSEWNISGDPCTGIATDGTVIEDNGNFNPGIKCECSDQNNITVCHVTKLKIYALNAVGPIPQELQNLTRLINLDLSKNYLTGSLPSFLGNLTAMQYMTLGTNALSGSVPKELGNLVNLVSLGFGSNYLNGPLPWELGNLAKLEQLYIDSAGLSGLLPSSLSRLTRMNILWASDNDFTGQIPDYIGSWTNLTDLRFQGNSFQGPLPASFSNLVQLTNL

SEQ ID NO: 166517 - protein, 528 aa, Zea Mays
MRKPRLSVGGGGGLLHGFPSPVLLFLLLLLLSSWRVAAQAQQAPQTDPVEAAAVNAILSKLRLSAPPSWNISGNPCSGAATDDTSIDDNPAFNPAIKCDCSDQNNTLCHVTRLKINTLDAVGPIPEELRNLTHLVKLTVGINALSGPVPKELGNLTNLLSLALGSNNFNGTLPDELGKLTKLRQIYIDSNDFSGSLPSTLSQLKNLSILWASDNNFSGQIPDYLGSLTNLTQLRLQGNSFQGPIPTSLSNLVNLKKLRIGDIVNGSSSLSFIGNLTSLGELVLRNSIISDTLASVDFSNFVNLYLLDLSFNNITGQIPQSILNLTSLSYLFLGNNSLSGSLPATKSPLVTNIDFSYNHISGNFPSWATDKNLQLNLVANDFVMDSSNNSVLPWGLECLQHSTPCFLGSPKSASFAVDCGGSRAISGSDNSVYQADNANLSAASYYVAGAPTWAVSSVGLFLDADAPNASYIIYSSRQFENTLDSALFQTARMSPSSLRYYGIGLENGNYTVTLQFAEVDFPDMQSWRS

SEQ ID NO: 166518 - protein, 552 aa, Zea Mays
MRKPRLSVGGGGGLLHGFPSPVLLFLLLLLLSSWRVAAQAQQAPQTDPVEAAAVNAILSKLRLSAPPSWNISGNPCSGAATDDTSIDDNPAFNPAIKCDCSDQNNTLCHVTRLKINTLDAVGPIPEELRNLTHLVKLDFRKNYFYGPLPAFIGELTALESMTVGINALSGPVPKELGNLTNLLSLALGSNNFNGTLPDELGKLTKLRQIYIDSNDFSGSLPSTLSQLKNLSILWASDNNFSGQIPDYLGSLTNLTQLRLQGNSFQGPIPTSLSNLVNLKKLRIGDIVNGSSSLSFIGNLTSLGELVLRNSIISDTLASVDFSNFVNLYLLDLSFNNITGQIPQSILNLTSLSYLFLGNNSLSGSLPATKSPLVTNIDFSYNHISGNFPSWATDKNLQLNLVANDFVMDSSNNSVLPWGLECLQHSTPCFLGSPKSASFAVDCGGSRAISGSDNSVYQADNANLSAASYYVAGAPTWAVSSVGLFLDADAPNASYIIYSSRQFENTLDSALFQTARMSPSSLRYYGIGLENGNYTVTLQFAEVDFPDMQSWRS

SEQ ID NO: 166519 - protein, 1033 aa, Zea Mays
MRKPRLSVGGGGGLLHGFPSPVLLFLLLLLLSSWRVAAQAQQAPQTDPVEAAAVNAILSKLRLSAPPSWNISGNPCSGAATDDTSIDDNPAFNPAIKCDCSDQNNTLCHVTRLKINTLDAVGPIPEELRNLTHLVKLDFRKNYFYGPLPAFIGELTALESMTVGINALSGPVPKELGNLTNLLSLALGSNNFNGTLPDELGKLTKLRQIYIDSNDFSGSLPSTLSQLKNLSILWASDNNFSGQIPDYLGSLTNLTQLRLQGNSFQGPIPTSLSNLVNLKKLRIGDIVNGSSSLSFIGNLTSLGELVLRNSIISDTLASVDFSNFVNLYLLDLSFNNITGQIPQSILNLTSLSYLFLGNNSLSGSLPATKSPLVTNIDFSYNHISGNFPSWATDKNLQLNLVANDFVMDSSNNSVLPWGLECLQHSTPCFLGSPKSASFAVDCGGSRAISGSDNSVYQADNANLSAASYYVAGAPTWAVSSVGLFLDADAPNASYIIYSSRQFENTLDSALFQTARMSPSSLRYYGIGLENGNYTVTLQFAEGERKEQNFDIRKAAGGKSFTAVKKQYVVPVTKNFLEIHLFWAGKGTCCIPYKGYYGPAISALSATPNFVPTVRSSEDSKSSHKTGVIAGVAVGVSVFALIALAGIFLWCQKRRKLLLELEELYTIVGRPNVFSYSELRSATENFCSSNLLGEGGYGSVYKGKLSDGKVVAVKQLSQSSNQGKMQFAAEIETISRVQHRNLVRLYGCCLESKTPLLVYEYLENGSLDHALFGKGSLNLDWPTRFEICLGVARGIAYLHEESTIRIVHRDIKASNVLIDADLNPKISDFGLAKLYDDKKTHVITNVAGTFGYLAPEYAMRGHMTEKVDVFAFGVVALEIVAGESNYQNALDEGTTYIFERVWELYENGRPLEFVDPKLTEYDAYEVLRVIRVALHCTQGSPHKRPSMSRVVAMLNGDADAAEDVAKPSYITEWQVMAADVSGSFASSHVGSSSTQTQPTSSSGGHGGAQASPEPGDLTPAVPSPLYTSIIEEGR

SEQ ID NO: 166520 - protein, 506 aa, Zea Mays
MRKPRLSVGGGGGLLHGFPSPVLLFLLLLLLSSWRVAAQAQQAPQTDPVEAAAVNAILSKLRLSAPPSWNISGNPCSGAATDDTSIDDNPAFNPAIKCDCSDQNNTLCHVTRLKINTLDAVGPIPEELRNLTHLVKLTVGINALSGPVPKELGNLTNLLSLALGSNNFNGTLPDELGKLTKLRQIYIDSNDFSGSLPSTLSQLKNLSILWASDNNFSGQIPDYLGSLTNLTQLRLQGNSFQGPIPTSLSNLVNLKKLRIGDIVNGSSSLSFIGNLTSLGELVLRNSIISDTLASVDFSNFVNLYLLDLSFNNITGQIPQSILNLTSLSYLDFSYNHISGNFPSWATDKNLQLNLVANDFVMDSSNNSVLPWGLECLQHSTPCFLGSPKSASFAVDCGGSRAISGSDNSVYQADNANLSAASYYVAGAPTWAVSSVGLFLDADAPNASYIIYSSRQFENTLDSALFQTARMSPSSLRYYGIGLENGNYTVTLQFAEVDFPDMQSWRS

SEQ ID NO: 166521 - protein, 523 aa, Zea Mays
MRKPRLSVGGGGGLLHGFPSPVLLFLLLLLLSSWRVAAQAQQAPQTDPVEAAAVNAILSKLRLSAPPSWNISGNPCSGAATDDTSIDDNPAFNPAIKCDCSDQNNTLCHVTRLKINTLDAVGPIPEELRNLTHLVKLDFRKNYFYGPLPAFIGELTALESMTVGINALSGPVPKELGNLTNLLSLALGSNNFNGTLPDELGKLTKLRQIYIDSNDFSGSLPSTLSQLKNLSILWASDNNFSGQIPDYLGSLTNLTQLRLQGNSFQGPIPTSLSNLVNLKKLRIGDIVNGSSSLSFIGNLTSLGELVLRNSIISDTLASVDFSNFVNLYLLDLSFNNITGQIPQSILNLTSLSYLDFSYNHISGNFPSWATDKNLQLKTYCLVIAHKTCRFNITIPIKQYSENLDAAASFAVDCGGSRAISGSDNSVYQADNANLSAASYYVAGAPTWAVSSVGLFLDADAPNASYIIYSSRQFENTLDSALFQTARMSPSSLRYYGIGLENGNYTVTLQFAEVDFPDMQSWRS

SEQ ID NO: 166522 - protein, 455 aa, Zea Mays
MRKPRLSVGGGGGLLHGFPSPVLLFLLLLLLSSWRVAAQAQQAPQTDPVEAAAVNAILSKLRLSAPPSWNISGNPCSGAATDDTSIDDNPAFNPAIKCDCSDQNNTLCHVTRLKINTLDAVGPIPEELRNLTHLVKLTVGINALSGPVPKELGNLTNLLSLALGSNNFNGTLPDELGKLTKLRQMWASDNNFSGQIPDYLGSLTNLTQLRLQGNSFQGPIPTSLSNLVNLKKLDLSFNNITGQIPQSILNLTSLSYLFLGNNSLSGSLPATKSPLVTNIDFSYNHISGNFPSWATDKNLQLNLVANDFVMDSSNNSVLPWGLECLQHSTPCFLGSPKSASFAVDCGGSRAISGSDNSVYQADNANLSAASYYVAGAPTWAVSSVGLFLDADAPNASYIIYSSRQFENTLDSALFQTARMSPSSLRYYGIGLENGNYTVTLQFAEVDFPDMQSWRS

SEQ ID NO: 166523 - protein, 311 aa, Zea Mays
MRKPRLSVGGGGGLLHGFPSPVLLFLLLLLLSSWRVAAQAQQAPQTDPVEAAAVNAILSKLRLSAPPSWNISGNPCSGAATDDTSIDDNPAFNPAIKCDCSDQNNTLCHVTRLKINTLDAVGPIPEELRNLTHLVKLDFRKNYFYGPLPAFIGELTALESMTVGINALSGPVPKELGNLTNLLSLALGSNNFNGTLPDELGKLTKLRQIYIDSNDFSGSLPSTLSQLKNLSILWASDNNFSGQIPDYLGSLTNLTQLRLQGNSFQGPIPTSLSNLVNLKKLDLSFNNITGQIPQSILNLTSLSYLFRSYSP

SEQ ID NO: 166524 - protein, 518 aa, Zea Mays
MSPSSLRYYGIGLENGNYTVTLQFAEGERKEQNFDIRKAAGGKSFTAVKKQYVVPVTKNFLEIHLFWAGKGTCCIPYKGYYGPAISALSATPNFVPTVRSSEDSKSSHKTGVIAGVAVGVSVFALIALAGIFLWCQKRRKLLLELEELYTIVGRPNVFSYSELRSATENFCSSNLLGEGGYGSVYKGKLSDGKVVAVKQLSQSSNQGKMQFAAEIETISRVQHRNLVRLYGCCLESKTPLLVYEYLENGSLDHALFGKGSLNLDWPTRFEICLGVARGIAYLHEESTIRIVHRDIKASNVLIDADLNPKISDFGLAKLYDDKKTHVITNVAGTFGYLAPEYAMRGHMTEKVDVFAFGVVALEIVAGESNYQNALDEGTTYIFERVWELYENGRPLEFVDPKLTEYDAYEVLRVIRVALHCTQGSPHKRPSMSRVVAMLNGDADAAEDVAKPSYITEWQVMAADVSGSFASSHVGSSSTQTQPTSSSGGHGGAQASPEPGDLTPAVPSPLYTSIIEEGR

SEQ ID NO: 166525 - protein, 835 aa, Zea Mays
MTVGINALSGPVPKELGNLTNLLSLALGSNNFNGTLPDELGKLTKLRQIYIDSNDFSGSLPSTLSQLKNLSILWASDNNFSGQIPDYLGSLTNLTQLRLQGNSFQGPIPTSLSNLVNLKKLRIGDIVNGSSSLSFIGNLTSLGELVLRNSIISDTLASVDFSNFVNLYLLDLSFNNITGQIPQSILNLTSLSYLFLGNNSLSGSLPATKSPLVTNIDFSYNHISGNFPSWATDKNLQLNLVANDFVMDSSNNSVLPWGLECLQHSTPCFLGSPKSASFAVDCGGSRAISDAPNASYIIYSSRQFENTLDSALFQTARMSPSSLRYYGIGLENGNYTVTLQFAEGERKEQNFDIRKAAGGKSFTAVKKQYVVPVTKNFLEIHLFWAGKGTCCIPYKGYYGPAISALSATPNFVPTVRSSEDSKSSHKTGVIAGVAVGVSVFALIALAGIFLWCQKRRKLLLELEELYTIVGRPNVFSYSELRSATENFCSSNLLGEGGYGSVYKGKLSDGKVVAVKQLSQSSNQGKMQFAAEIETISRVQHRNLVRLYGCCLESKTPLLVYEYLENGSLDHALFGKGSLNLDWPTRFEICLGVARGIAYLHEESTIRIVHRDIKASNVLIDADLNPKISDFGLAKLYDDKKTHVITNVAGTFGYLAPEYAMRGHMTEKVDVFAFGVVALEIVAGESNYQNALDEGTTYIFERVWELYENGRPLEFVDPKLTEYDAYEVLRVIRVALHCTQGSPHKRPSMSRVVAMLNGDADAAEDVAKPSYITEWQVMAADVSGSFASSHVGSSSTQTQPTSSSGGHGGAQASPEPGDLTPAVPSPLYTSIIEEGR

SEQ ID NO: 166526 - protein, 368 aa, Zea Mays
MTVGINALSGPVPKELGNLTNLLSLALGSNNFNGTLPDELGKLTKLRQMWASDNNFSGQIPDYLGSLTNLTQLRLQGNSFQGPIPTSLSNLVNLKKLRIGDIVNGSSSLSFIGNLTSLGELVLRNSIISDTLASVDFSNFVNLYLLDLSFNNITGQIPQSILNLTSLSYLFLGNNSLSGSLPATKSPLVTNIDFSYNHISGNFPSWATDKNLQLNLVANDFVMDSSNNSVLPWGLECLQHSTPCFLGSPKSASFAVDCGGSRAISGSDNSVYQADNANLSAASYYVAGAPTWAVSSVGLFLDADAPNASYIIYSSRQFENTLDSALFQTARMSPSSLRYYGIGLENGNYTVTLQFAEVDFPDMQSWRS

SEQ ID NO: 166527 - protein, 771 aa, Zea Mays
MTVGINALSGPVPKELGNLTNLLSLALGSNNFNGTLPDELGKLTKLRQMWASDNNFSGQIPDYLGSLTNLTQLRLQGNSFQGPIPTSLSNLVNLKKLDLSFNNITGQIPQSILNLTSLSYLDFSYNHISGNFPSWATDKNLQLKTYCLVIAHKTCRFNITIPIKQYSENLDAAASFAVDCGGSRAISGSDNSVYQADNANLSAASYYVAGAPTWAVSSVGLFLDADAPNASYIIYSSRQFENTLDSALFQTARMSPSSLRYYGIGLENGNYTVTLQFAEGERKEQNFDIRKAAGGKSFTAVKKQYVVPVTKNFLEIHLFWAGKGTCCIPYKGYYGPAISALSATPNFVPTVRSSEDSKSSHKTGVIAGVAVGVSVFALIALAGIFLWCQKRRKLLLELEELYTIVGRPNVFSYSELRSATENFCSSNLLGEGGYGSVYKGKLSDGKVVAVKQLSQSSNQGKMQFAAEIETISRVQHRNLVRLYGCCLESKTPLLVYEYLENGSLDHALFGKGSLNLDWPTRFEICLGVARGIAYLHEESTIRIVHRDIKASNVLIDADLNPKISDFGLAKLYDDKKTHVITNVAGTFGYLAPEYAMRGHMTEKVDVFAFGVVALEIVAGESNYQNALDEGTTYIFERVWELYENGRPLEFVDPKLTEYDAYEVLRVIRVALHCTQGSPHKRPSMSRVVAMLNGDADAAEDVAKPSYITEWQVMAADVSGSFASSHVGSSSTQTQPTSSSGGHGGAQASPEPGDLTPAVPSPLYTSIIEEGR

SEQ ID NO: 166528 - protein, 385 aa, Zea Mays
MTVGINALSGPVPKELGNLTNLLSLALGSNNFNGTLPDELGKLTKLRQIYIDSNDFSGSLPSTLSQLKNLSILWASDNNFSGQIPDYLGSLTNLTQLRLQGNSFQGPIPTSLSNLVNLKKLRIGDIVNGSSSLSFIGNLTSLGELVLRNSIISDTLASVDFSNFVNLYLLDLSFNNITGQIPQSILNLTSLSYLFLGNNSLSGSLPATKSPLVTNIDFSYNHISGNFPSWATDKNLQLKTYCLVIAHKTCRFNITIPIKQYSENLDAAASFAVDCGGSRAISGSDNSVYQADNANLSAASYYVAGAPTWAVSSVGLFLDADAPNASYIIYSSRQFENTLDSALFQTARMSPSSLRYYGIGLENGNYTVTLQFAEVDFPDMQSWRS

SEQ ID NO: 166529 - protein, 310 aa, Zea Mays
MQFAAEIETISRVQHRNLVRLYGCCLESKTPLLVYEYLENGSLDHALFGKGSLNLDWPTRFEICLGVARGIAYLHEESTIRIVHRDIKASNVLIDADLNPKISDFGLAKLYDDKKTHVITNVAGTFGYLAPEYAMRGHMTEKVDVFAFGVVALEIVAGESNYQNALDEGTTYIFERVWELYENGRPLEFVDPKLTEYDAYEVLRVIRVALHCTQGSPHKRPSMSRVVAMLNGDADAAEDVAKPSYITEWQVMAADVSGSFASSHVGSSSTQTQPTSSSGGHGGAQASPEPGDLTPAVPSPLYTSIIEEGR

SEQ ID NO: 166530 - protein, 208 aa, Zea Mays
MHAQFVLGICAHGLAAQECTSVLELDTEHAGALMLRAQTLVTLKDYQSALFDVNRLVEINPSSEVYRNLQARLKTQLSLAPIPECEEESLCREEEDEELPPRVQKTDTSSIAKPDQPATKLVLENKPSAGPILHRKPATEPLKAVVPSTSPSKPQGWEAIPKPKSHSGLDYSKWDKIEEDSSEDEDDEEDELPQYKFKVRSVGVRSVK

SEQ ID NO: 166531 - protein, 113 aa, Zea Mays
MASSSSDGLFRFAICLGASWSSRTGDMPTKFEMNWRSSTLITAASSPSVVAETSCRGSCSILIPRGSKISTFSSGAGTAAVDDSPTAELAAATNASLCCCTASLSRINSVSYL

SEQ ID NO: 166532 - protein, 89 aa, Zea Mays
MQMANCMRLVLPTASFRIHFLSVKITSPATKHEAFATICLSICSYGESASFATLYRFHQSSAFDDSDSLLLQQAFVVCKLQRLPRLPEV

SEQ ID NO: 166533 - protein, 822 aa, Zea Mays
MAPSSPSSARPTRASGRKRSAMAEEIHQNQEEEEEVVAASTAKRRRKAASSGKKPKPTPKQAKPAVAGMKKKGETEKTEPVVDDVCAEEPDEEELAMGEEEAEAEEQAMQEVVAAVAAGSPGKKRVGRRSAAASGDHVPEFIGSPVAAAEAHSNWPKRYERSTAANKPEEDDELKARCHYRSAKVDNIVYCLGDDVYVKAGENEADYIGRITEFFEGTDRCHYFTCRWFFRAEDTVINSLVSINVDGHKHDPRRVFLSEEKNDNVLDCIISKVKIVHVDPNRWAVDLNSFACQSLKYNHPQTEVRNEKADEFLALLKEWAVLCEKYVHQDVDSNLAGSEDQEDADTLDKDEFVVQKLIGIRYDGTGRKKGVYFKVQWEGYGPEEDTWEPIDNLSDCPLKIREFVQEGRKRKILPLPGDVDVICGGPPCQGISGFNRFRNRDEPLKDEKNKQMVTFMDIVAYLKPKYVLMENVVDILKFADGYLGKYALSCLVAMKYQARLGMMVAGCYGLPQFRMRVFLWGALSSMVLPKYPLPTYDVVVRGGAPNAFSQCMVAYDETQRPSLKKALLLGDAFSDLPKVENHQPNDVMEYGGSPKTEFQRYIRLGRKDMLDWSFGEEAGPDEGKLLDHQPLRLNNDDYERVKQIPVKKGANFRDLKGVKVGANNVVEWDPEVERVYLSSGKPLVPDYAMSFIKGKSLKPFGRLWWDETVPTVVTRAEPHNQVILHPTQARVLTIRENARLQGFPDYYRLFGPIKEKYIQVGNAVAVPVARALGYCLGQAYLGESDGSQPLYQLPASFTSVGRTAVQANAVSVGTPAGEVVEQ

SEQ ID NO: 166534 - protein, 901 aa, Zea Mays
MAPSSPSSARPTRASGRKRSAMAEEIHQNQEEEEEVVAASTAKRRRKAASSGKKPKPTPKQAKPAVAGMKKKGETEKTEPVVDDVCAEEPDEEELAMGEEEAEAEEQAMQEVVAAVAAGSPGKKRVGRRSAAASGDHVPEFIGSPVAAAEAHSNWPKRYERSTAANKPEEDDELKARCHYRSAKVDNIVYCLGDDVYVKAGENEADYIGRITEFFEGTDRCHYFTCRWFFRAEDTHDPRRVFLSEEKNDNVLDCIISKVKIVHVDPNMDPKAKAQLIEHCDLYYDMSYSVAYSTFANISSENGQSGSETASGISSDDAGLETSSNMPERTATLLDLYSGCGGMSTGLCLGAALSGLKLETRWAVDLNSFACQSLKYNHPQTEVRNEKADEFLALLKEWAVLCEKYVHQDVDSNLAGSEDQEDADTLDKDEFVVQKLIGIRYDGTGRKKGVYFKVQWEGYGPEEDTWEPIDNLSDCPLKIREFVQEGRKRKILPLPGDVDVICGGPPCQGISGFNRFRNRDEPLKDEKNKQMVTFMDIVAYLKPKYVLMENVVDILKFADGYLGKYALSCLVAMKYQARLGMMVAGCYGLPQFRMRVFLWGALSSMVLPKYPLPTYDVVVRGGAPNAFSQCMVAYDETQRPSLKKALLLGDAFSDLPKVENHQPNDVMEYGGSPKTEFQRYIRLGRKDMLDWSFGEEAGPDEGKLLDHQPLRLNNDDYERVKQIPVKKGANFRDLKGVKVGANNVVEWDPEVERVYLSSGKPLVPDYAMSFIKGKSLKPFGRLWWDETVPTVVTRAEPHNQVILHPTQARVLTIRENARLQGFPDYYRLFGPIKEKYIQVGNAVAVPVARALGYCLGQAYLGESDGSQPLYQLPASFTSVGRTAVQANAVSVGTPAGEVVEQ

SEQ ID NO: 166535 - protein, 817 aa, Zea Mays
MAPSSPSSARPTRASGRKRSAMAEEIHQNQEEEEEVVAASTAKRRRKAASSGKKPKPTPKQAKPAVAGMKKKGETEKTEPVVDDVCAEEPDEEELAMGEEEAEAEEQAMQEVVAAVAAGSPGKKRVGRRSAAASGDHVPEFIGSPVAAAEAHSNWPKRYERSTAANKPEEDDELKARCHYRSAKVDNIVYCLGDDVYVKAGENEADYIGRITEFFEGTDRCHYFTCRWFFRAEDTVINSLVSINVDGHKHDPRRVFLSEEKNDNVLDCIISKVKIVHVDPNMDPKAKAQLIEHCDLYYDMSYSVAYSTFANISSENGQSGSETASGISSDDAGLETSSNMPERTATLLDLYSGCGGMSTGLCLGAALSGLKLETRWAVDLNSFACQSLKYNHPQTEVRNEKADEFLALLKEWAVLCEKYVHQDVDSNLAGSEDQEDADTLDKDEFVVQKLIGIRYDGTGRKKGVYFKVQWEGYGPEEDTWEPIDNLSDCPLKIREFVQEGRKRKILPLPGDVDVICGGPPCQGISGFNRFRNRDEPLKDEKNKQMVTFMDIVAYLKPKYVLMENVVDILKFADGYLGKYALSCLVAMKYQARLGMMVAGCYGLPQFRMRVFLWGALSSMVLPKYPLPTYDVVVRGGAPNAFSQCMVAYDETQRPSLKKALLLGDAFSDLPKVENHQPNDVMEYGGSPKTEFQRYIRLGRKDMLDWSFGEEAGPDEGKLLDHQPLRLNNDDYERVKQIPVKKGANFRDLKGVKVGANNVVEWDPEVERVYLSSGKPLVPDYAMSFIKGKSLKPFGRLWWDETVPTVVTRAEPHNQQES

SEQ ID NO: 166536 - protein, 452 aa, Zea Mays
MAPSSPSSARPTRASGRKRSAMAEEIHQNQEEEEEVVAASTAKRRRKAASSGKKPKPTPKQAKPAVAGMKKKGETEKTEPVVDDVCAEEPDEEELAMGEEEAEAEEQAMQEVVAAVAAGSPGKKRVGRRSAAASGDHVPEFIGSPVAAAEAHSNWPKRYERSTAANKPEEDDELKARCHYRSAKVDNIVYCLGDDVYVKAGENEADYIGRITEFFEGTDRCHYFTCRWFFRAEDTVINSLVSINVDGHKHDPRRVFLSEEKNDNVLDCIISKVKIVHVDPNMDPKAKAQLIEHCDLYYDMSYSVAYSTFANISSENGQSGSETASGISSDDAGLETSSNMPERTATLLDLYSGCGGMSTGLCLGAALSGLKLETRWAVDLNSFACQSLKYNHPQTEVQRIKRMLTLLTRMNLLYRSLLEYAMMALEGKKAYILRSNGKDMVLKRIHGNLLIT

SEQ ID NO: 166537 - protein, 322 aa, Zea Mays
MVTFMDIVAYLKPKYVLMENVVDILKFADGYLGKYALSCLVAMKYQARLGMMVAGCYGLPQFRMRVFLWGALSSMVLPKYPLPTYDVVVRGGAPNAFSQCMVAYDETQRPSLKKALLLGDAFSDLPKVENHQPNDVMEYGGSPKTEFQRYIRLGRKDMLDWSFGEEAGPDEGKLLDHQPLRLNNDDYERVKQIPVKKGANFRDLKGVKVGANNVVEWDPEVERVYLSSGKPLVPDYAMSFIKGKSLKPFGRLWWDETVPTVVTRAEPHNQSLDYPGERKVTGLPRLLPIVWTDQGEVYSSRERSGSPCCTGTGLLSGSSLPG

SEQ ID NO: 166538 - protein, 589 aa, Zea Mays
MGSQAVKPLRVFLLMMRVWRRHLICQRGQQPFLTCIRAVGACPLVFAWRWAVDLNSFACQSLKYNHPQTEVRNEKADEFLALLKEWAVLCEKYVHQDVDSNLAGSEDQEDADTLDKDEFVVQKLIGIRYDGTGRKKGVYFKVQWEGYGPEEDTWEPIDNLSDCPLKIREFVQEGRKRKILPLPGDVDVICGGPPCQGISGFNRFRNRDEPLKDEKNKQMVTFMDIVAYLKPKYVLMENVVDILKFADGYLGKYALSCLVAMKYQARLGMMVAGCYGLPQFRMRVFLWGALSSMVLPKYPLPTYDVVVRGGAPNAFSQCMVAYDETQRPSLKKALLLGDAFSDLPKVENHQPNDVMEYGGSPKTEFQRYIRLGRKDMLDWSFGEEAGPDEGKLLDHQPLRLNNDDYERVKQIPVKKGANFRDLKGVKVGANNVVEWDPEVERVYLSSGKPLVPDYAMSFIKGKSLKPFGRLWWDETVPTVVTRAEPHNQVILHPTQARVLTIRENARLQGFPDYYRLFGPIKEKYIQVGNAVAVPVARALGYCLGQAYLGESDGSQPLYQLPASFTSVGRTAVQANAVSVGTPAGEVVEQ

SEQ ID NO: 166539 - protein, 256 aa, Zea Mays
MCMQSYTYSSLQVENHQPNDVMEYGGSPKTEFQRYIRLGRKDMLDWSFGEEAGPDEGKLLDHQPLRLNNDDYERVKQIPVKKGANFRDLKGVKVGANNVVEWDPEVERVYLSSGKPLVPDYAMSFIKGKSLKPFGRLWWDETVPTVVTRAEPHNQVILHPTQARVLTIRENARLQGFPDYYRLFGPIKEKYIQVGNAVAVPVARALGYCLGQAYLGESDGSQPLYQLPASFTSVGRTAVQANAVSVGTPAGEVVEQ

SEQ ID NO: 166540 - protein, 243 aa, Zea Mays
MVTFMDIVAYLKPKYVLMENVVDILKFADGYLGKYALSCLVAMKYQARLGMMVAGCYGLPQFRMRVFLWGALSSMVLPKYPLPTYDVVVRGGAPNAFSQCMVAYDETQRPSLKKALLLGDAFSDLPKVENHQPNDVMEYGGSPKTEFQRYIRLGRKDMLDWSFGEEAGPDEGKLLDHQPLRLNNDDYERVKQIPVKKGANFRDLKGVKVGANNVVEWDPEVERVYLSSGKPLMRWCKYCEIHG

SEQ ID NO: 166541 - protein, 499 aa, Zea Mays
MTYGRLLEESCLASRIAFTLIVFPCLLLAYTGQAAYIISNKTHVADAFYRSIPDAIYWPAFVIATAAAIVASQATISATYSIIKQALALGCFPRVKIVHTSKKFLGQIYMPDINWILLVLCIAVTAGFKNQSQIGNAYGTAVVIVMLVTTFLMVPIMLLVWKSHWILVVTFIVLSLMVEVPYFVACILKIDQGGWVPLVVATAFFLIMYVWHFCTVKRYEFEMHSKVSMAWILGLGPSLGLVRVPGIGFVYTELASGVPHIFSHFITNLPAIHSVVVFVCVKYLPVYTVPTEERFLVRRIGPRSFHMFRCVARYGYKDLHKRDEDFEKVLFDCVLFFVRLESMMEGYSDSDEFSVPEQAPGIGRAAFLSVGERTCATVCSSGDLSFSSQDSVVPAAAQSSRAPTGLRVLHYSASASAAGQGSSGGTVGDELEFLNRCKDAGVVHILGNTIVRARRDSGVVKKLAVDYMYAFMRRVCRENSVIFNVPHESLLNVGQIFYI

SEQ ID NO: 166542 - protein, 808 aa, Zea Mays
MSSMASLSESELTNRGSMWELDQNLDQPMDEEAGRLKNMYREKFSSALLLRLAFQSLGVVFGDLGTSPLYVFYNIFPRGIGEGEDEDVIGALSLIIYTLTFIPLLKYVFVVLRANDNGQGGTFALYSLLCRHAKINTIPNQHRTDEELTTYSRQTYEENSVAAKIKRWIESHAYKRNILLVLVLIGTCTAIGDGILTPAISVLSASGGIRVQNQNMSTDVVVLVAVVILIGLFSMQHYGTDKVGLLFAPIVLLWFILIGSVGAINIHKYNNSVLRAYNPISIYRFFQRRRNYDIWTSLGGIMLSITGTEALFADLCHFPVLAIQIAFTLIVFPCLLLAYTGQAAYIISNKTHVADAFYRSIPDAIYWPAFVIATAAAIVASQATISATYSIIKQALALGCFPRVKIVHTSKKFLGQIYMPDINWILLVLCIAVTAGFKNQSQIGNAYGTAVVIVMLVTTFLMVPIMLLVWKSHWILVVTFIVLSLMVEVPYFVACILKIDQGGWVPLVVATAFFLIMYVWHFCTVKRYEFEMHSKVSMAWILGLGPSLGLVRVPGIGFVYTELASGVPHIFSHFITNLPAIHSVVVFVCVKYLPVYTVPTEERFLVRRIGPRSFHMFRCVARYGYKDLHKRDEDFEKVLFDCVLFFVRLESMMEGYSDSDEFSVPEQAPGIGRAAFLSVGERTCATVCSSGDLSFSSQDSVVPAAAQSSRAPTGLRVLHYSASASAAGQGSSGGTVGDELEFLNRCKDAGVVHILGNTIVRARRDSGVVKKLAVDYMYAFMRRVCRENSVIFNVPHESLLNVGQIFYI

SEQ ID NO: 166543 - protein, 540 aa, Zea Mays
MPLHLHLLSSPATAAKLAAGLRAAPLRRCHSLAPAPRHTDRVALASSLSAVARSAGPAVAAAQTKPSVSGKKQVLISLSDKTDLAYLGNGLQGLGYSIVSTGGTASSLEAAGVSVTKVEEITHFPEMLDGRVKTLHPSIHGGILARRDQEHHLKALKDHGIGTFDVVVVNLYPFYDKVTSGNISFEDGIENIDIGGPTMIRAAAKNHKDVLIVVDHNDYPALLEYLKGKRDDQQFPRMLAWKAMQHVASYDSAVSEWLWKQSNKGEMFPPSFTVPLELKSTLRYGENPHQSAAFYADKSLSLVGAGGIATAIQHHGKEMSYNNYLDADAAWNCVSEFDSPTCVVVKHTNPCGVASRKDILEAYRLAVRGDAVSAFGGIVAFNTTIDEDLAKEIREFRSPTDGETRMFYEIVVAPGYTEKGLEVLRGKSKALRILEAKRSGKGMLSLRQNNCMLGMGSGQPNRRESVRIAFRKAGEEAKGAALASDAFFPFAWNDAVEEACQNGIGIIAQPGGSKKDEDAVACCNKYGVSLVLTGVRHFKH

SEQ ID NO: 166544 - protein, 501 aa, Zea Mays
MKEEMMVGLSAPEPVGRWGAAPPQAMLERMKDYGQEGAFALWDDLSPEDQELLVRDIESLDLSRIDRIIRRSLGSQGIPLPAVEPVPESSVSKVEGRSAEDKERWWKKGLKAISEGKLAVVLLAGGQGTRLGSSDPKGCFNIGLPSGKSLFQLQAERILCVQKLAAQSSESPSNTVPIHWYIMTSPFTDAATAKFFETRRYFGLDPDQVTFFQQGTLPCVSADGRFIMETPYRVAKAPDGNGGVYAALKSKKLMEDMAARGVKYVDCYGVDNALVRVADPTFLGYFIDKGASSAAKVVRKPIEHSTQQAYPQENVGVFVQRGRGGPLSVVEYSEMDAAMATEMNQSTGRLRYCWSNICLHMFTLDFLNQVANSLEKDSVYHLAEKKIPSIHGFTTGLKLEQFIFDAFTYSPSTALFEVMREEEFAPVKNASGATYDTPDSAKLMLLRLHSRWVVAAGGFLTHSVPLYMTGVEVSPLSSYAGENLEAICRGRTFHAPSEISF

SEQ ID NO: 166545 - protein, 490 aa, Zea Mays
MKEEMMVGLSAPEPVGRWGAAPPQAMLERMKDYGQEGAFALWDDLSPEDQELLVRDIELGILRQSYVVFIPITGIPLPAVEPVPESSVSKVEGRSAEDKERWWKKGLKAISEGKLAVVLLAGGQGTRLGSSDPKGCFNIGLPSGKSLFQLQAERILCVQKLAAQSSESPSNTVPIHWYIMTSPFTDAATAKFFETRRYFGLDPDQVTFFQQGTLPCVSADGRFIMETPYRVAKAPDGNGGVYAALKSKKLMEDMAARGVKYVDCYGVDNALVRVADPTFLGYFIDKGASSAAKVVRKAYPQENVGVFVQRGRGGPLSVVEYSEMDAAMATEMNQSTGRLRYCWSNICLHMFTLDFLNQVANSLEKDSVYHLAEKKIPSIHGFTTGLKLEQFIFDAFTYSPSTALFEVMREEEFAPVKNASGATYDTPDSAKLMLLRLHSRWVVAAGGFLTHSVPLYMTGVEVSPLSSYAGENLEAICRGRTFHAPSEISF

SEQ ID NO: 166546 - protein, 88 aa, Zea Mays
MVVSLADQPSTRLLKHIIRCYLRLSDNPRACAALQSCLPDMLKDGTFNNCLRDDPATRRWLQQLLHNVTGGGMGGAPQPGMDPMNMGM

SEQ ID NO: 166547 - protein, 436 aa, Zea Mays
MAKPLNLTPAFLSLMATSCRFSSGGHAHRFASSLPCGRTTPTPRTTSSSTRPAAQVSPDRSKQRDDEAASETTIRQQLQQVDVLENTGISRHFAGEIKCILDRTYRCWLERHEEIMQDTTTCAMAFRILRMNGYDVSCDLLYHVVETSGIHDPLRGHLNDTRTLLELHKASTVSISEDESILDSIGLRSSTLLREQMESSGALQNPPLFREVEHALYHPFYATLDRLTHRWNIENFNTTEHQMLDTPYLSSRYTSRDILALGIRDFNSSQLTYQQELQHLKSWVKECRLDQLPFVRQNLAYFLLSAAGCMYSPELSEARTLCAKNGALITVVDDFFDVGGSKEELENLVMLVELWDEHRKIEFYSEHVEIIFSSIYNSVNQYGAKASLLQDRNVTKHLVQIWLDLLKSMMTERCILLDRRSRSLLLKIQNTMSCSS

SEQ ID NO: 166548 - protein, 480 aa, Zea Mays
MAKPLNLTPAFLSLMATSCRFSSGGHAHRFASSLPCGRTTPTPRTTSSSTRPAAQVSPDRSKQRDDEAASETTIRQQLQQVDVLENTGISRHFAGEIKCILDRTYRCWLERHEEIMQDTTTCAMAFRILRMNGYDVSCDLLYHVVETSGIHDPLRGHLNDTRTLLELHKASTVSISEDESILDSIGLRSSTLLREQMESSGALQNPPLFREVEHALYHPFYATLDRLTHRWNIENFNTTEHQMLDTPYLSSRYTSRDILALGIRDFNSSQLTYQQELQHLKSWVKECRLDQLPFVRQNLAYFLLSAAGCMYSPELSEARTLCAKNGALITVVDDFFDVGGSKEELENLVMLVELWDEHRKIEFYSEHVEIIFSSIYNSVNQYGAKASLLQDRNVTKHLVQISMMTEVEWRLNKYVPTEEEYMTNASLTFALGPIVLPALYFVGPKIPESIVKDPEYDELFKLMSTCGRLLNDVQSFEVHY

SEQ ID NO: 166549 - protein, 550 aa, Zea Mays
MAKPLNLTPAFLSLMATSCRFSSGGHAHRFASSLPCGRTTPTPRTTSSSTRPAAQVSPDRSKQRDDEAASETTIRQQLQQVDVLENTGISRHFAGEIKYLLYHVVETSGIHDPLRGHLNDTRTLLELHKASTVSISEDESILDSIGLRSSTLLREQMESSGALQNPPLFREVEHALYHPFYATLDRLTHRWNIENFNTTEHQMLDTPYLSSRYTSRDILALGIRDFNSSQLTYQQELQHLKSWVKECRLDQLPFVRQNLAYFLLSAAGCMYSPELSEARTLCAKNGALITVVDDFFDVGGSKEELENLVMLVELWDEHRKIEFYSEHVEIIFSSIYNSVNQYGAKASLLQDRNVTKHLVQIWLDLLKSMMTEVEWRLNKYVPTEEEYMTNASLTFALGPIVLPALYFVGPKIPESIVKDPEYDELFKLMSTCGRLLNDVQSFEREYKEGKLNIVSLLVLHGGSMSISDARRKLQKPIDTCRRDLLRLVLREESVVPRPCKELFWKMCKVCYFFYSRTDGFRSPVERAKEVNAVINEPLKLQENHTHMSVL

SEQ ID NO: 166550 - protein, 182 aa, Zea Mays
MMTEVEWRLSKYVPTEKEYMINASLTFGLGPIVLPALYFVGPKISESIVKDPEYDELFKLMSTCGRLLNDVQTFEREYNEGKLNSVSLLVLHGGSMSISDAKRKLQKPIDTCRRDLLSLVLREESVVPRPCKELFWKMCKVCYFFYSTTDGFSSQVERAKEVDAVINEPLKLQGSHTLVSDV

SEQ ID NO: 166551 - protein, 335 aa, Zea Mays
MGISRHFAAEIKCILDRTYRSWLQRHEEIMLDTMTCAMAFRILRLNGYNVSSDELYHVVEASGLHNSLGGYLNDTRTLLELHKASTVSISEDESILDSIGSRSRTLLREQLESGGALRKPSLFKEVEHALDGPFYTTLDRLHHRWNIENFNIIEQHMLETPYLSNQHTSRDILALSIRDFSSSQFTYQQELQHLESWVKECRLDQLQFARQKLAYFYLSAAGTMFSPELSDARTLWAKNGVLTTIVDDFFDVAGSKEELENLVMLVEMWDEHHKVEFYSEQVEIIFSSIYDSVNQLGEKASLVQDRSITKHLVEIVSIVYRLVGSIFFLLFSFQL

SEQ ID NO: 166552 - protein, 388 aa, Zea Mays
MAMPVKLTPASLSLKAVCCRFSSGGHALRFGSSLPCWRRTPTQRSTSSSTTRPAAEVSSGKSKQHDQEASEATIRQQLQLVDVLENMGISRHFAAEIKCILDRTYRSWLQRHEEIMLDTMTCAMAFRILRLNGYNVSSDELYHVVEASGLHNSLGGYLNDTRTLLELHKASTVSISEDESILDSIGSRSRTLLREQLESGGALRKPSLFKEVEHALDGPFYTTLDRLHHRWNIENFNIIEQHMLETPYFWVKECRLDQLQFARQKLAYFYLSAAGTMFSPELSDARTLWAKNGVLTTIVDDFFDVAGSKEELENLVMLVEMWDEHHKVEFYSEQVEIIFSSIYDSVNQLGEKASLVQDRSITKHLVEIVSIVYRLVGSIFFLLFSFQL

SEQ ID NO: 166553 - protein, 743 aa, Zea Mays
MFLALQTLAVVFGDIGIGPLYTFDVMFNKYPILGEEDVLGALSLVLYTLILMPLVKYVLVVLWANDDGEGGLFALYSLICRNAKVCLIPNQVQSEKRMSSFRLKLPTPELERSIKVKEKLESSLLLKKVLLGLVLFGTSMFISNGVITPAMSVLSAVSGLKVGLPNTSQDAVVMISIALLVVLFSVQRYATSKVGFAIGPSLLLWFCCLGGIGIYNLSIYGSTAFRAFNPLYIIYYFGRNPFQAWLSLGGCLLCATGSEAIFSNLCYFPVRYVQYMFVLLVLPCLVLAYLGQAAFLIANQKSSEHVFFSSIPSGVFWPVFLVANLAALIASRTMTVAIFQCLKQSIALGCFPRLKIVHTSRKFMAKIYIPVVNWFLLVSCLGFIILFRNIYDVGNAYAIAELGVMIMATVYVTIIMLLIWESNITKVLSFVITFLFLELIFFSSALSSVGDGGWALLIFASVLLMIMFIWNYGSKLKYDSEVKQKLPKDLMRKLGPNLGTIRAPGLGLVCSDIVKGVPAIFGHFLTSLPAIHSIIVFVCIRNVPVPVVPQSERFLFQRVCSRGYHLFRCIARYGYKDKKQEHHSVFERLLIEGLEKFIQREAVELSLQSEDDIDSDEEPPTPVKIITAPNGSLYSLDVPLLADYVPSTELIHEASCSTPQHDPVLDYAQNLELELAFIEQSKRSGVIYLIDNPIIKARKDSWFFKKLMINYFFAFLRNNCRRAIMLMSIPHSNMMQVRMTSYV

SEQ ID NO: 166554 - protein, 468 aa, Zea Mays
MFVLLVLPCLVLAYLGQAAFLIANQKSSEHVFFSSIPSGVFWPVFLVANLAALIASRTMTVAIFQCLKQSIALGCFPRLKIVHTSRKFMAKIYIPVVNWFLLVSCLGFIILFRNIYDVGNAYAIAELGVMIMATVYVTIIMLLIWESNITKVLSFVITFLFLELIFFSSALSSVGDGGWALLIFASVLLMIMFIWNYGSKLKYDSEVKQKLPKDLMRKLGPNLGTIRAPGLGLVCSDIVKGVPAIFGHFLTSLPAIHSIIVFVCIRNVPVPVVPQSERFLFQRVCSRGYHLFRCIARYGYKDKKQEHHSVFERLLIEGLEKFIQREAVELSLQSEDDIDSDEEPPTPVKIITAPNGSLYSLDVPLLADYVPSTELIHEASCSTPQHDPVLDYAQNLELELAFIEQSKRSGVIYLIDNPIIKARKDSWFFKKLMINYFFAFLRNNCRRAIMLMSIPHSNMMQVRMTSYV

SEQ ID NO: 166555 - protein, 509 aa, Zea Mays
MELSHQQCQAWLSLGGCLLCATGSEAIFSNLCYFPVRYVQYMFVLLVLPCLVLAYLGQAAFLIANQKSSEHVFFSSIPSGVFWPVFLVANLAALIASRTMTVAIFQCLKQSIALGCFPRLKIVHTSRKFMAKIYIPVVNWFLLVSCLGFIILFRNIYDVGNAYAIAELGVMIMATVYVTIIMLLIWESNITKVLSFVITFLFLELIFFSSALSSVGDGGWALLIFASVLLMIMFIWNYGSKLKYDSEVKQKLPKDLMRKLGPNLGTIRAPGLGLVCSDIVKGVPAIFGHFLTSLPAIHSIIVFVCIRNVPVPVVPQSERFLFQRVCSRGYHLFRCIARYGYKDKKQEHHSVFERLLIEGLEKFIQREAVELSLQSEDDIDSDEEPPTPVKIITAPNGSLYSLDVPLLADYVPSTELIHEASCSTPQHDPVLDYAQNLELELAFIEQSKRSGVIYLIDNPIIKARKDSWFFKKLMINYFFAFLRNNCRRAIMLMSIPHSNMMQVRMTSYV

SEQ ID NO: 166556 - protein, 336 aa, Zea Mays
MIMATVYVTIIMLLIWESNITKVLSFVITFLFLELIFFSSALSSVGDGGWALLIFASVLLMIMFIWNYGSKLKYDSEVKQKLPKDLMRKLGPNLGTIRAPGLGLVCSDIVKGVPAIFGHFLTSLPAIHSIIVFVCIRNVPVPVVPQSERFLFQRVCSRGYHLFRCIARYGYKDKKQEHHSVFERLLIEGLEKFIQREAVELSLQSEDDIDSDEEPPTPVKIITAPNGSLYSLDVPLLADYVPSTELIHEASCSTPQHDPVLDYAQNLELELAFIEQSKRSGVIYLIDNPIIKARKDSWFFKKLMINYFFAFLRNNCRRAIMLMSIPHSNMMQVTEA

SEQ ID NO: 166557 - protein, 180 aa, Zea Mays
MHKMIIDAGAYPSPLGYGGFPKSVCTSVNECMCHGIPDSRELQDGDIINIDVTVYLNVTEECLLRGISTCKHGTSFKKIGRRISEHAERNGFGVVECFVGHGVGRVFHSEPIIYHQRNNRPGQMIEGQTFTIEPIISMGSIECDMWDDGWTAVTTDGSLAAQFEHTILITRTGAEILTKC

SEQ ID NO: 166558 - protein, 317 aa, Zea Mays
MAIGVPSMELHRSSPLLSGGRGGNTCLQKKPFFVQAKRLVGMEKASTRPGTQESGQTKKRAPLVRGTVSPPLPVPGNIPRPPYVGTEYVPEIAKEIQMHDKEGIVHMRAACELAARVLDYAGTLVKPSVTTDEIDKAVHKMIIDAGAYPSPLGYGGFPKSVCTSVNECMCHGIPDSRELQDGDIINIDVTVYLNVTEECLLRGISTCKHGTSFKKIGRRISEHAERNGFGVVECFVGHGVGRVFHSEPIIYHQRNNRPGQMIEGQTFTIEPIISMGSIECDMWDDGWTAVTTDGSLAAQFEHTILITRTGAEILTKC

SEQ ID NO: 166559 - protein, 244 aa, Zea Mays
MHDKEGIVHMRAACELAARVLDYAGTLVKPSVTTDEIDKAVHKMIIDAGAYPSPLGYGGFPKSVCTSVNECMCHGIPDSRELQDGDIINIDVTVYLNGYHGDTSKTFLCGEVDEASKRLVKVTEECLLRGISTCKHGTSFKKIGRRISEHAERNGFGVVECFVGHGVGRVFHSEPIIYHQRNNRPGQMIEGQTFTIEPIISMGSIECDMWDDGWTAVTTDGSLAAQFEHTILITRTGAEILTKC

SEQ ID NO: 166560 - protein, 280 aa, Zea Mays
MAIGVPSMELHRSSPLLSGGRGGNTCLQKKPFFVQAKRLVGMEKASTRPGTQESGQTKKRAPLVRGTVSPPLPVPGNIPRPPYVGTEYVPEIAKEIQMHDKEGIVHMRAACELAARVLDYAGTLVKPSVTTDEIDKAVHKMIIDAGAYPSPLGYGGFPKSVCTSVNECMCHGIPDSRELQDGDIINIDVTVYLNVTEECLLRGISTCKHGTSFKKIGRRISEHAERNGFGVVECFVGHGVGRVFHSEPIIYHQRNNRPGQMIEGQTFTIGSRHPSSFHAD

SEQ ID NO: 166561 - protein, 128 aa, Zea Mays
MAIGVPSMELHRSSPLLSGGRGNTCLQKKPFFVQAKRLVGMEKASTRPGTQESGQTKKRAPLVRGTVSPPLPVPGNIPRPPYVGTEYVPEIAKEIQMHDKEGIVHMRAACELAARVLDYAGTLVKCTR

SEQ ID NO: 166562 - protein, 249 aa, Zea Mays
MAIGVPSMELHRSSPLLSGGRGGNTCLQKKPFFVQAKRLVGMEKASTRPGTQESGQTKKRAPLVRGTVSPPLPVPGNIPRPPYVGTEYVPEIAKEIQMHDKEGIVHMRAACELAARVLDYAGTLVKVTEECLLRGISTCKHGTSFKKIGRRISEHAERNGFGVVECFVGHGVGRVFHSEPIIYHQRNNRPGQMIEGQTFTIEPIISMGSIECDMWDDGWTAVTTDGSLAAQFEHTILITRTGAEILTKC

SEQ ID NO: 166563 - protein, 97 aa, Zea Mays
MPFMFLELDCLRGIPLCQVFIEPLFNISQPHTVIPLLYLGRVAVKFCTKYPHNQVLKSEAYSVGDLGPTILIKLKYLLYVYNKHKVDCVNALLIVAF

SEQ ID NO: 166564 - protein, 97 aa, Zea Mays
MPFMFLELDCLRGIPLCQVFIEPLFNISQPHTVIPLLYLGRVAVKFCTKYPHNQVLKSEAYSVGDLGPTVLIKLKYLLYVYNKHKVDCVNALLIVAF

SEQ ID NO: 166565 - protein, 238 aa, Zea Mays
MEDYHVAEYKYVKNHELGLFAIFDGHLGDKVPSYLKANLFSNIMKEPLFWSSPEEAIKNAYCSTNKYILENGKQLGPGGSTAVTAIVVDGKDMLIANVGDSRAVVCEMGSANQLTVDHEPDTTEERQRIEKHGGFVTTFPGDVPRVNGQLAVARAFGDQSLKAHLSSKPDTRHVPIDSSIEFVILASDGLWKVMKNQEAVDLVKSIKDPKAAAKRLTTEALARKSKDDISCIVIRFRC

SEQ ID NO: 166566 - protein, 169 aa, Zea Mays
MVGRMERQTASSSASCSSSSSSSSVCGGKKRPDILNMIRNAACLNSSSTDTGKGRSKLSTNKVTHGFHLVEGKSGHGMEDYHVAEYKYVKNHELGLFAIFDGHLGDKVPSYLKANLFSNIMKEPLFWSSPEEAIKNAYCSTNKYILENGKQLGPGGSTAVTAIVVDAHC

SEQ ID NO: 166567 - protein, 867 aa, Zea Mays
MLEKCILDGKYQQAMGMAVECRRLDKLEEAIVRCDNIHGALSYCINLSHQYVNHREYRFEVLRCIVKIYQTLPNPDYQSICQCLMFLGEPETVASILDTLLSGNKDDALLAYQTAFDLVENENQAFLLNVRNRLASPTPVPSNPDSEPAVQDDQTASTVGTGTEAAGDVQMRDDTAPNGNAHTVDPNEVAHADRLQKIKGILSGETSIQLTLQFLYSHNRSDLLILKTIKQAVEMRNSVCHSSTICANAIMHAGTTVDTFLRENLEWLSRATNWAKFSATAGLGVIHRGHLQQGRALMAPYLPQSGAVGGGSPYSEGGALYALGLIHANHGEGIKQFLRESLRNTSAEVIQHGACLGLGLAALGTSDEEIYEDIKNVLYTDSAVAGEAAGIGMGLLMVGTASEKASEMLAYAHDTQHEKIIRGLSLGIALTVYGREEEADTLIEQMTRDQDPILRYGGMYALALAYRGTANNKAIHQLLHFAVSDVSDDVRRTAVMALGFVLYNEPEQTPRIVSLLSESYNPHVRYGAALAVGISCAGSGLSDAISLLEPLTSDVVDFVRQGALIAMAMVMIQTNESFDSRVGAFRRQLEKIILDKHEDTMSKMGAILASGVLDAGGRNVTIKLLSRNKHDKLTAVIGLAVFSQFWYWYPLLYFISLAFSPTAFIGLNSDLKVPKFEFLSHAKPSLFEYPKPTTQQTTTSTVKLPTAILSTYAKAKSRAKKDAESKANQEKATEEASGSTSSKAAKAQEKDADVMQVDNATEKKAPEPEATYQLLTNPARVIPAQEKFIKFLENSRYVPVKPAPSGFILLRDLQPTEAEDLALTDAPTAVGGSTGNTATAASQQGSGSSAMAVDDEPQPPQPFEYSS

SEQ ID NO: 166568 - protein, 194 aa, Zea Mays
MEKSHLLVSPIRLMAIQTKRPNRSTAGAARQDSSRLLEKKLYDVRLLTAGCRRSVRSLVIGWPIRRASPSRALDASFRAPCGGYSSPREQIRRAPNHQPLETSNTRAAAATHWQTCLAGGEGEENDETGRALHSPLAVVTRRRLLPTHTPASRMLPLPRVRVRHRGDRLVQRGSTARGVHLQLQVAGRRPPGGS

SEQ ID NO: 166569 - protein, 120 aa, Zea Mays
MAQRTCVWMSVGTTSEGKHVRSRRDPSNLAMWRQRDRQTFLTRAHSRKMWNLSSVVAPHWACRVGEDIIVKQTHPHVQPVFEKQLEKHQNYSTTLVSRPAKGISFTKKGFLEATILRASR

SEQ ID NO: 166570 - protein, 374 aa, Zea Mays
MKAVPLPRPRAATRRRAWMLAVAAFIFVALVWAYLYPPPRYTSPVRDWLPGRLPAEPAREFTDEERASRVVFRQILTTPPVRSKNSKIAFMFLTPGTLPFERLWEKFFEGHEGRYTIYVHASREKPEHVSPIFVGREIHSEKVTWGTISMVDAERRLLANALQDMDNQHFILLSDSCVPLHNFDYVYDYLMGANLSFIDCFYDPGPHGNFRYSKNMLPEVTEADFRKGSQWFSVKRQHALMIIADSLYYTKFKLHCRPGMEDGRNCYADEHYLPTVFHMMDPDGIANWSVTHVDWSEGKWHPKAYRAKDVTFELLKNITSIDISHHVTSDSKKVVTEKACLWNETKRPCYLFARKFYPESINNLLTLFANYTLI

SEQ ID NO: 166571 - protein, 293 aa, Zea Mays
MKLHQVWQLGIKDMKAVPLPRPRAATRRRAWMLAVAAFIFVALVWAYLYPPPRYTSPVRDWLPGRLPAEPAREFTDEERASRVVFRQILTTPPVRSKNSKIAFMFLTPGTLPFERLWEKFFEGHEGRYTIYVHASREKPEHVSPIFVGREIHSEKVTWGTISMVDAERRLLANALQDMDNQHFILLSDSCVPLHNFDYVYDYLMGANLSFIDCFYDPGPHGNFRYSKNMLPEVTEADFRKGSQWFSVKRQHALMIIADSLYYTKFKLHCRPGMEDGRNCYADEHYLPTVFHPC

SEQ ID NO: 166572 - protein, 174 aa, Zea Mays
MKMSASVAAASPTLRFSSATHPLHRPLRRRLPSVRCSLAAAAGPGVRAPPELVDSILSKVKGTDRGVLLPKDGHQEVAEVALQLGKYCIDDPVKSPLIFGEWEVVYCSVPTSPGGLYRTPLGRLVFKTDEMVQAVEAPDVVRNKVSFSVFGLEGAVSLKVRWRERSQAGDHLCR

SEQ ID NO: 166573 - protein, 249 aa, Zea Mays
MAYPHFTRPAAIPTLQASSYHHTHEEQAMKMSASVAAASPTLRFSSATHPLHRPLRRRLPSVRCSLAAAAGPGVRAPPELVDSILSKVKGTDRGVLLPKDGHQEVAEVALQLGKYCIDDPVKSPLIFGEWEVVYCSVPTSPGGLYRTPLGRLVFKTDEMVQAVEAPDVVRNKVSFSVFGLEGAVSLKGKLNVLDSKWIQVVFEAPELKVGSLGFQYGGESEVKLEITYVDEKIRLGRGSRGSLFVFLRR

SEQ ID NO: 166574 - protein, 124 aa, Zea Mays
MAVLLWRCICGPQQSFSKNRGASTPSPLAGRRSKYSGQSVKAMPMRLLTVGKKRSRGTQLLVEEYKEKLGHYCEFEDTLIRSNPKLTSDVKVQVEAEDTAMMQQLKSDDFLCWMKTGRMSYPSR

SEQ ID NO: 166575 - protein, 226 aa, Zea Mays
MAVLLWRCICGPQQSFSKNRGASTPSPLAGRRSKYSGQSVVRSARIDLFLLHLCIWFISPEKKVHWRQKKAMPMRLLTVGKKRSRGTQLLVEEYKEKLGHYCEFEDTLIRSNPKLTSDVKVQVEAEDTAMMQQLKSDDFVVVLDENGKDVISEQIADLIGDAGNTGSSRLTFCIGGPYGLGLQVRERADATIRLSSLVLNHQVALIVLMEQLYRAWTIIKGQKYHH

SEQ ID NO: 166576 - protein, 126 aa, Zea Mays
MSEVLPPSVLFSDAFFSDVKVQVEAEDTAMMQQLKSDDFVVVLDENGKDVISEQIADLIGDAGNTGSSRLTFCIGGPYGLGLQVRERADATIRLSSLVLNHQVALIVLMEQLYRAWTIIKGQKYHH

SEQ ID NO: 166577 - protein, 153 aa, Zea Mays
MARLLAARALALARPSGTPSALRFCPSRALSDEVEFVEIDLSEESPASSSGGEGEGDSATVQAQMGSRRLEDAIYGVLVRRAAPEWLPFVPGASYWVPPLPRPLGVASLLGAAVYTARGATAMTEEEAFSFTTVRGCPSAAYFVGGGQSFWSP

SEQ ID NO: 166578 - protein, 184 aa, Zea Mays
MARLLAARALALARPSGTPSALRFCPSRALSDEVEFVEIDLSEESPASSSGGEGEGDSATVQAQMGSRRLEDAIYGVLVRRAAPEWLPFVPGASYWVPPLPRPLGVASLLGAAVYTARGATAMTEEEAFSFTTVRGCPSAAYFVGGLSGFANQAVCMYSGLGWVALHRKISASSEEIKGRCYSN

SEQ ID NO: 166579 - protein, 168 aa, Zea Mays
MARLLAARALALARPSGTPSALRFCPSRALSDEVEFVEIDLSEESPASSSGGEGEGDSATVQAQMGSRRLEDAIYGVLVRRAAPEWLPFVPGASYWVPPLPRPLGVASLLGAAVYTARGATAMTEEEAFSFTTVRGCPSAAYFVGGLSGFANQAVCMYSGLGWVALHS

SEQ ID NO: 166580 - protein, 586 aa, Zea Mays
MESSSSGGGLARRRSSGGWGSFSGDTDPFDIPAKGAPLERLRKWRQAALVLNASRRFRYTLDLKKEEQNEEIRRKIRAKAYVITAAFRFKEAGRVHVRSEETKVPIADGALGFGIKEDEITALTRDHNYSGLQQYGGVSGVAHMLKTDSEKGISGDDSDLIARKNTFGSNTYPRKKGRSFLAFVWDACKDLTLIILMVAAAVSLALGITTEGIKEGWYDGASIAFAVLLVVFVTAISDYKQSLQFQNLNEEKQNIRLEVVRGGRRITVSIYDLVVGDVVPLKIGDQVPADGILINGHSLSIDESSMTGESKIVHKDQKSPFLMSGCKVADGYGTMLVTAVGVNTEWGLLMASISEDSGEETPLQVRLNGVATFIGMVGLSVALAVLVVLLARYFTGHTYNPDGSVQYVKGKMGVGQTIRGVVRIFTVAVTIVVVAVPEGLPLAVTLTLAFSMRKMMKDKALVRRLSACETMGSATTICSDKTGTLTLNQMTVVEAYFGGKKMDSPDNAQMLSADVTSLIVEGIAQNTSGSIFEPEGGQEPEVTGSPTEKAILSWGLKLGMKFNETRLKSSILHVFPFNSEKKRGWP

SEQ ID NO: 166581 - protein, 634 aa, Zea Mays
MRKMMKDKALVRRLSACETMGSATTICSDKTGTLTLNQMTVVEAYFGGKKMDSPDNAQMLSADVTSLIVEGIAQNTSGSIFEPEGGQEPEVTGSPTEKAILSWGLKLGMKFNETRLKSSILHVFPFNSEKKRGGVAVHLDGPEVHIHWKGAAEIILDSCTSWLDTDGSKHSMTPEKIAEFKKFIEDMAVASLRCVAFAYITHEMDDVPNEDQRAEWKLPEDNLIMLGIVGIKDPCRPGVRDSVRLCQAAGIKVRMVTGDNLQTARAIALECGILDDPNVLEPVIIEGKAFRVLSDLEREEAAEKISVMGRSSPNDKLLLVKALRARGHVVAVTGDGTNDAPALHEADIGLSMGIQGTEVAKESSDIIILDDNFASVVRVVRWGRSVYANIQKFIQFQLTVNVAALIINVVAAVSSGNVPLNAVQLLWVNLIMDTLGALALATEPPTNHLMERPPVGRREPLITNIMWRNLIIMALFQVSVLLTLNFKGISLLQLKNDDPAHADKVKNTFIFNTFVLCQVFNEFNSRKPDELNIFKGISGNHLFIGIIAITVVLQALIVEFLGKFASTVRLSWQLWLVSIGLAFFGWPLAFVGKLIPVPKRPLGEFFACCCICKGSKQAPDDATSNDKEDNKPEP

SEQ ID NO: 166582 - protein, 1066 aa, Zea Mays
MESSSSGGGLARRRSSGGWGSFSGDTDPFDIPAKGAPLERLRKWRQAALVLNASRRFRYTLDLKKEEQNEEIRRKIRAKAYVITAAFRFKEAGRVHVRSEETKVPIADGALGFGIKEDEITALTRDHNYSGLQQYGGVSGVAHMLKTDSEKGISGDDSDLIARKNTFGSNTYPRKKGRSFLAFVWDACKDLTLIILMVAAAVSLALGITTEGIKEGWYDGASIAFAVLLVVFVTAISDYKQSLQFQNLNEEKQNIRLEVVRGGRRITVSIYDLVVGDVVPLKIGDQVPADGILINGHSLSIDESSMTGESKIVHKDQKSPFLMSGCKVADGYGTMLVTAVGVNTEWGLLMASISEDSGEETPLQVRLNGVATFIGMVGLSVALAVLVVLLARYFTGHTYNPDGSVQYVKGKMGVGQTIRGVVRIFTVAVTIVVVAVPEGLPLAVTLTLAFSMRKMMKDKALVRRLSACETMGSATTICSDKTGTLTLNQMTVVEAYFGGKKMDSPDNAQMLSADVTSLIVEGIAQNTSGSIFEPEGGQEPEVTGSPTEKAILSWGLKLGMKFNETRLKSSILHVFPFNSEKKRGGVAVHLDGPEVHIHWKGAAEIILDSCTSWLDTDDMAVASLRCVAFAYITHEMDDVPNEDQRAEWKLPEDNLIMLGIVGIKDPCRPGVRDSVRLCQAAGIKVRMVTGDNLQTARAIALECGILDDPNVLEPVIIEGKAFRVLSDLEREEAAEKISVMGRSSPNDKLLLVKALRARGHVVAVTGDGTNDAPALHEADIGLSMGIQGTEVAKESSDIIILDDNFASVVRVVRWGRSVYANIQKFIQFQLTVNVAALIINVVAAVSSGNVPLNAVQLLWVNLIMDTLGALALATEPPTNHLMERPPVGRREPLITNIMWRNLIIMALFQVSVLLTLNFKGISLLQLKNDDPAHADKVKNTFIFNTFVLCQVFNEFNSRKPDELNIFKGISGNHLFIGIIAITVVLQALIVEFLGKFASTVRLSWQLWLVSIGLAFFGWPLAFVGKLIPVPKRPLGEFFACCCICKGSKQAPDDATSNDKEDNKPEP

SEQ ID NO: 166583 - protein, 159 aa, Zea Mays
MAAAEGQWVLMATGRTPTNIAVIKYWGKRDEALILPINDSISVTLDPDHLSATTTIAVSPSFPSDRMWLNGKEISLLGGRFQSCLKEIRKRARDIEDKEKDVKIKKEDWGKLHVHIASYNNFPTSAGLASSAADLACFDRDCECKFSPFMPGVVTRNKA

SEQ ID NO: 166584 - protein, 161 aa, Zea Mays
MAAAEGQWVLMATGRTPTNIAVIKYWGKRDEALILPINDSISVTLDPDHLSATTTIAVSPSFPSDRMWLNGKEISLLGGRFQSCLKEIRKRARDIEDKEKDVKIKKEDWGKLHVHIASYNNFPTSAGLASSAADLACFGTDRDCECKFSPFMPGVVTRNKA

SEQ ID NO: 166585 - protein, 141 aa, Zea Mays
MAAAEGQWVLMATGRTPTNIAVIKYWGKRDEALILPINDSISVTLDPDHLSATTTIAVSPSFPSDRMWLNGKEISLLGGRFQSCLKEIRKRARDIEDKEKDVKIKKEDWGKLHVHIASYNNFPTSAGLASSAADLACFGLR

SEQ ID NO: 166586 - protein, 54 aa, Zea Mays
MPPASRVVLRSPSGFDLPGCCCCWSKRNKATVLGQARQAQTNLVLVGAPAAAAY

SEQ ID NO: 166587 - protein, 348 aa, Zea Mays
MDEHMGRRTVGGLLFTKGGSILLFREDGSRPKAKNCCTRHGCSGQHPADRAKGKEVHRAAAVGSESTPATPRRSQAFRKPNRRPPHEGSASGSIVRDVGGPCSETGSGSRDAPGRDLLARLKERVNTSRKRSLNRENSPQSPSGLSVCASSPSNSRSVSRPSHRTASRIREADEGANAGADSVVRRNAARRGSERSDDDLLLVEQGELSSLDDSMEDPNGYLRFDVGGIEELENYFIFNDRHRGMRMDIDGMSYEELLALGERIGTVNTGLSDDALSACLNRRLYMPTASGSHEDCERKCSVCQEEYLAGEEVGEMACKHYYHLSCIDHWLRQKNWCPICKSVALKIN

SEQ ID NO: 166588 - protein, 482 aa, Zea Mays
MDRLGLVDFLKGLLEFDPNKRWSPLQALYHPFITGKSFTGPYEPVPETTRIPVVRAAAIDHNPGGGHWLHSGLSPQVGSVNRYLPSNNAYPPKVPFSYGSSYGSFGSHGSYTANAGFGNSYGSIGDVNAINMYYSPLSSSGLTQIGSSPDVRLRMLLPHDRGIRLSPGSLGPMSLGASPSQFTPPNYQMQIPANSVGKHGSGSPASGGIHGSPLGKSAGVGPYNMRRNLPMPPHDYVSQHGHGRCGDGVSFSHFDACARGHTGHSHSAAGPSSYHSGWRPQIGSRSGISLEASSSHVLSQAPSQSFDFSPSSALDPANWDPNYSDESLLQDNSLSAELSSNLHFGDATGQGSGSIRSANFQGHVFATSNPVPTNQRADQLFHVSSQGLSAHSSVPVNYGGYNPPNYPPQNLRPRRGQPILHQRYNQATSSPMRPMGSHHSGQPAWPSFGMGDGVPWGGTGGHSFTTSGLSSSLARKDYGSIF

SEQ ID NO: 166589 - protein, 721 aa, Zea Mays
MYLQLNQKFDPDDQHNIVRMLDYLSFQNHLCIAFEMLGQNLYELLKRNHLRGLKLKYVQAFSKQILDAMVVMREAGIIHCDLKPENILLAPSVTTAAEVKVIDFGSACLEGKTVYSYIQSRYYRSPEVLLGYPYTTAIDMWSFGCIVAELFLGLPLFPGASEYDVLQRMMKILGGQPPDELLREAKNTARFFKHVGSIYPGNEAPTGLCSAYKSLSEEDVEVRDSKKPQMGKWYFPHLKLDKLICTYPWNNSELTETEKMDRLGLVDFLKGLLEFDPNKRWSPLQALYHPFITGKSFTGPYEPVPETTRIPVVRAAAIDHNPGGGHWLHSGLSPQVGSVNRYLPSNNAYPPKVPFSYGSSYGSFGSHGSYTANAGFGNSYGSIGDVNAINMYYSPLSSSGLTQIGSSPDVRLRMLLPHDRGIRLSPGSLGPMSLGASPSQFTPPNYQMQIPANSVGKHGSGSPASGGIHGSPLGKSAGVGPYNMRRNLPMPPHDYVSQHGHGRCGDGVSFSHFDACARGHTGHSHSAAGPSSYHSGWRPQIGSRSGISLEASSSHVLSQAPSQSFDFSPSSALDPANWDPNYSDESLLQDNSLSAELSSNLHFGDATGQGSGSIRADQLFHVSSQGLSAHSSVPVNYGGYNPPNYPPQNLRPRRGQPILHQRYNQATSSPMRPMGSHHSGQPAWPSFGMGDGVPWGGTGGHSFTTSGLSSSLARKDYGSIF

SEQ ID NO: 166590 - protein, 673 aa, Zea Mays
MVVMREAGIIHCDLKPENILLAPSVTTAAEVKVIDFGSACLEGKTVYSYIQSRYYRSPEVLLGYPYTTAIDMWSFGCIVAELFLGLPLFPGASEYDVLQRMMKILGGQPPDELLREAKNTARFFKHVGSIYPGNEAPTGLCSAYKSLSEEDVEVRDSKKPQMGKWYFPHLKLDKLICTYPWNNSELTETEKMDRLGLVDFLKGLLEFDPNKRWSPLQALYHPFITGKSFTGPYEPVPETTRIPVVRAAAIDHNPGGGHWLHSGLSPQVGSVNRYLPSNNAYPPKVPFSYGSSYGSFGSHGSYTANAGFGNSYGSIGDVNAINMYYSPLSSSGLTQIGSSPDVRLRMLLPHDRGIRLSPGSLGPMSLGASPSQFTPPNYQMQIPANSVGKHGSGSPASGGIHGSPLGKSAGVGPYNMRRNLPMPPHDYVSQHGHGRCGDGVSFSHFDACARGHTGHSHSAAGPSSYHSGWRPQIGSRSGISLEASSSHVLSQAPSQSFDFSPSSALDPANWDPNYSDESLLQDNSLSAELSSNLHFGDATGQGSGSIRSANFQGHVFATSNPVPTNQRADQLFHVSSQGLSAHSSVPVNYGGYNPPNYPPQNLRPRRGQPILHQRYNQATSSPMRPMGSHHSGQPAWPSFGMGDGVPWGGTGGHSFTTSGLSSSLARKDYGSIF

SEQ ID NO: 166591 - protein, 331 aa, Zea Mays
MDRLGLVDFLKGLLEFDPNKRWSPLQALYHPFITGKSFTGPYEPVPETTRIPVVRAAAIDHNPGGGHWLHSGLSPQVGSVNRYLPSNNAYPPKVPFSYGSSYGSFGSHGSYTANAGFGNSYGSIGDVNAINMYYSPLSSSGLTQIGSSPDVRLRMLLPHDRGIRLSPGSLGPMSLGASPSQFTPPNYQMQIPANSVGKHGSGSPASGGIHGSPLGKSAGVGPYNMRRNLPMPPHDYVSQHGHGRCGDGVSFSHFDACARGHTGHSHSAAGPSSYHSGWRPQIGSRSGISLEASSSHVLSQAPSQSFDFSPSSALDPANWDPNYRTIHCQLN

SEQ ID NO: 166592 - protein, 741 aa, Zea Mays
MYLQLNQKFDPDDQHNIVRMLDYLSFQNHLCIAFEMLGQNLYELLKRNHLRGLKLKYVQAFSKQILDAMVVMREAGIIHCDLKPENILLAPSVTTAAEVKVIDFGSACLEGKTVYSYIQSRYYRSPEVLLGYPYTTAIDMWSFGCIVAELFLGLPLFPGASEYDVLQRMMKILGGQPPDELLREAKNTARFFKHVGSIYPGNEAPTGLCSAYKSLSEEDVEVRDSKKPQMGKWYFPHLKLDKLICTYPWNNSELTETEKMDRLGLVDFLKGLLEFDPNKRWSPLQALYHPFITGKSFTGPYEPVPETTRIPVVRAAAIDHNPGGGHWLHSGLSPQVGSVNRYLPSNNAYPPKVPFSYGSSYGSFGSHGSYTANAGFGNSYGSIGDVNAINMYYSPLSSSGLTQIGSSPDVRLRMLLPHDRGIRLSPGSLGPMSLGASPSQFTPPNYQMQIPANSVGKHGSGSPASGGIHGSPLGKSAGVGPYNMRRNLPMPPHDYVSQHGHGRCGDGVSFSHFDACARGHTGHSHSAAGPSSYHSGWRPQIGSRSGISLEASSSHVLSQAPSQSFDFSPSSALDPANWDPNYSDESLLQDNSLSAELSSNLHFGDATGQGSGSIRSANFQGHVFATSNPVPTNQRADQLFHVSSQGLSAHSSVPVNYGGYNPPNYPPQNLRPRRGQPILHQRYNQATSSPMRPMGSHHSGQPAWPSFGMGDGVPWGGTGGHSFTTSGLSSSLARKDYGSIF

SEQ ID NO: 166593 - protein, 602 aa, Zea Mays
MWSFGCIVAELFLGLPLFPGASEYDVLQRMMKILGGQPPDELLREAKNTARFFKHVGSIYPGNEAPTGLCSAYKSLSEEDVEVRDSKKPQMGKWYFPHLKLDKLICTYPWNNSELTETEKMDRLGLVDFLKGLLEFDPNKRWSPLQALYHPFITGKSFTGPYEPVPETTRIPVVRAAAIDHNPGGGHWLHSGLSPQVGSVNRYLPSNNAYPPKVPFSYGSSYGSFGSHGSYTANAGFGNSYGSIGDVNAINMYYSPLSSSGLTQIGSSPDVRLRMLLPHDRGIRLSPGSLGPMSLGASPSQFTPPNYQMQIPANSVGKHGSGSPASGGIHGSPLGKSAGVGPYNMRRNLPMPPHDYVSQHGHGRCGDGVSFSHFDACARGHTGHSHSAAGPSSYHSGWRPQIGSRSGISLEASSSHVLSQAPSQSFDFSPSSALDPANWDPNYSDESLLQDNSLSAELSSNLHFGDATGQGSGSIRSANFQGHVFATSNPVPTNQRADQLFHVSSQGLSAHSSVPVNYGGYNPPNYPPQNLRPRRGQPILHQRYNQATSSPMRPMGSHHSGQPAWPSFGMGDGVPWGGTGGHSFTTSGLSSSLARKDYGSIF

SEQ ID NO: 166594 - protein, 662 aa, Zea Mays
MLDYLSFQNHLCIAFEMLGQNLYELLKRNHLRGLKLKYVQAFSKQILDAMVVMREAGIIHCDLKPENILLAPSVTTAAEVKVIDFGSACLEGKTVYSYIQSRYYRSPEVLLGYPYTTAIDMWSFGCIVAELFLGLPLFPGASEYDVLQRMMKILGGQPPDELLREAKNTARFFKHVGSIYPGNEAPTGLCSAYKSLSEEDVEVRDSKKPQMGKWYFPHLKLDKLICTYPWNNSELTETEKMDRLGLVDFLKGLLEFDPNKRWSPLQALYHPFITGKSFTGPYEPVPETTRIPVVRAAAIDHNPGGGHWLHSGLSPQVGSVNRYLPSNNAYPPKVPFSYGSSYGSFGSHGSYTANAGFGNSYGSIGDVNAINMYYSPLSSSGLTQIGSSPDVRLRMLLPHDRGIRLSPGSLGPMSLGASPSQFTPPNYQMQIPANSVGKHGSGSPASGGIHGSPLGKSAGVGPYNMRRNLPMPPHDYVSQHGHGRCGDGVSFSHFDACARGHTGHSHSAAGPSSYHSGWRPQIGSRSGISLEASSSHVLSQAPSQSFDFSPSSALDPANWDPNYSDESLLQDNSLSAELSSNLHFGDATGQGSGSIRSANFQGHVFATSNPVPTNQRSIISCVFSRIECPFQCSRQLRWLQPSKLSSAKSPSSSWTTNSSSAI

SEQ ID NO: 166595 - protein, 723 aa, Zea Mays
MLDYLSFQNHLCIAFEMLGQNLYELLKRNHLRGLKLKYVQAFSKQILDAMVVMREAGIIHCDLKPENILLAPSVTTAAEVKVIDFGSACLEGKTVYSYIQSRYYRSPEVLLGYPYTTAIDMWSFGCIVAELFLGLPLFPGASEYDVLQRMMKILGGQPPDELLREAKNTARFFKHVGSIYPGNEAPTGLCSAYKSLSEEDVEVQRDSKKPQMGKWYFPHLKLDKLICTYPWNNSELTETEKMDRLGLVDFLKGLLEFDPNKRWSPLQALYHPFITGKSFTGPYEPVPETTRIPVVRAAAIDHNPGGGHWLHSGLSPQVGSVNRYLPSNNAYPPKVPFSYGSSYGSFGSHGSYTANAGFGNSYGSIGDVNAINMYYSPLSSSGLTQIGSSPDVRLRMLLPHDRGIRLSPGSLGPMSLGASPSQFTPPNYQMQIPANSVGKHGSGSPASGGIHGSPLGKSAGVGPYNMRRNLPMPPHDYVSQHGHGRCGDGVSFSHFDACARGHTGHSHSAAGPSSYHSGWRPQIGSRSGISLEASSSHVLSQAPSQSFDFSPSSALDPANWDPNYSDESLLQDNSLSAELSSNLHFGDATGQGSGSIRSANFQGHVFATSNPVPTNQRADQLFHVSSQGLSAHSSVPVNYGGYNPPNYPPQNLRPRRGQPILHQRYNQATSSPMRPMGSHHSGQPAWPSFGMGDGVPWGGTGGHSFTTSGLSSSLARKDYGSIF

SEQ ID NO: 166596 - protein, 364 aa, Zea Mays
MLDYLSFQNHLCIAFEMLGQNLYELLKRNHLRGLKLKYVQAFSKQILDAMVVMREAGIIHCDLKPENILLAPSVTTAAEVKVIDFGSACLEGKTVYSYIQSRYYRSPEVLLGYPYTTAIDMWSFGCIVAELFLGLPLFPGASEYDVLQRMMKILGGQPPDELLREAKNTARFFKHVGSIYPGNEAPTGLCSAYKSLSEEDVEVRDSKKPQMGKWYFPHLKLDKLICTYPWNNSELTETEKMDRLGLVDFLKGLLEFDPNKRWSPLQALYHPFITGKSFTGPYEPVPETTRIPVVRAAAIDHNPGGGHWLHSGLSPQSRSIISCVFSRIECPFQCSRQLRWLQPSKLSSAKSPSSSWTTNSSSAI

SEQ ID NO: 166597 - protein, 720 aa, Zea Mays
MLDYLSFQNHLCIAFEMLGQNLYELLKRNHLRGLKLKYVQAFSKQILDAMVVMREAGIIHCDLKPENILLAPSVTTAAEVKVIDFGSACLEGKTVYSYIQSRYYRSPEVLLGYPYTTAIDMWSFGCIVAELFLGLPLFPGASEYDVLQRMMKILGGQPPDELLREAKNTARFFKHVGSIYPGNEAPTGLCSAYKSLSEEDVEVRDSKKPQMGKWYFPHLKLDKLICTYPWNNSELTEKMDRLGLVDFLKGLLEFDPNKRWSPLQALYHPFITGKSFTGPYEPVPETTRIPVVRAAAIDHNPGGGHWLHSGLSPQVGSVNRYLPSNNAYPPKVPFSYGSSYGSFGSHGSYTANAGFGNSYGSIGDVNAINMYYSPLSSSGLTQIGSSPDVRLRMLLPHDRGIRLSPGSLGPMSLGASPSQFTPPNYQMQIPANSVGKHGSGSPASGGIHGSPLGKSAGVGPYNMRRNLPMPPHDYVSQHGHGRCGDGVSFSHFDACARGHTGHSHSAAGPSSYHSGWRPQIGSRSGISLEASSSHVLSQAPSQSFDFSPSSALDPANWDPNYSDESLLQDNSLSAELSSNLHFGDATGQGSGSIRSANFQGHVFATSNPVPTNQRADQLFHVSSQGLSAHSSVPVNYGGYNPPNYPPQNLRPRRGQPILHQRYNQATSSPMRPMGSHHSGQPAWPSFGMGDGVPWGGTGGHSFTTSGLSSSLARKDYGSIF

SEQ ID NO: 166598 - protein, 571 aa, Zea Mays
MLDYLSFQNHLCIAFEMLGQNLYELLKRNHLRGLKLKYVQAFSKQILDAMVVMREAGIIHCDLKPENILLAPSVTTAAEVKVIDFGSACLEGKTVYSYIQSRYYRSPEVLLGYPYTTAIDMWSFGCIVAELFLGLPLFPGASEYDVLQRMMKILGGQPPDELLREAKNTARFFKHVGSIYPGNEAPTGLCSAYKSLSEEDVEVRDSKKPQMGKWYFPHLKLDKLICTYPWNNSELTETEKMDRLGLVDFLKGLLEFDPNKRWSPLQALYHPFITGKSFTGPYEPVPETTRIPVVRAAAIDHNPGGGHWLHSGLSPQVGSVNRYLPSNNAYPPKVPFSYGSSYGSFGSHGSYTANAGFGNSYGSIGDVNAINMYYSPLSSSGLTQIGSSPDVRLRMLLPHDRGIRLSPGSLGPMSLGASPSQFTPPNYQMQIPANSVGKHGSGSPASGGIHGSPLGKSAGVGPYNMRRNLPMPPHDYVSQHGHGRCGDGVSFSHFDACARGHTGHSHSAAGPSSYHSGWRPQIGSRSGISLEASSSHVLSQAPSQSFDFSPSSALDPANWDPNYRTIHCQLN

SEQ ID NO: 166599 - protein, 326 aa, Zea Mays
MLDYLSFQNHLCIAFEMLGQNLYELLKRNHLRGLKLKYVQAFSKQILDAMVVMREAGIIHCDLKPENILLAPSVTTAAEVKVIDFGSACLEGKTVYSYIQSRYYRSPEVLLGYPYTTAIDMWSFGCIVAELFLGLPLFPGASEYDVLQRMMKILGGQPPDELLREAKNTARFFKHVGSIYPGNEAPTGLCSAYKSLSEEDVEVRDSKKPQMGKWYFPHLKLDKLICTYPWNNSELTETEKMDRLGLVDFLKGLLEFDPNKRWSPLQALYHPFITGKSFTGPYEPVPETTRIPVVRAAAIDHNPGGGHWLHSGLSPQENLQEWAHTT

SEQ ID NO: 166600 - protein, 238 aa, Zea Mays
MLGQNLYELLKRNHLRGLKLKYVQAFSKQILDAMVVMREAGIIHCDLKPENILLAPSVTTAAEVKVIDFGSACLEGKTVYSYIQSRYYRSPEVLLGYPYTTAIDMWSFGCIVAELFLGLPLFPGASEYDVLQRMMKILGGQPPDELLREAKNTARFFKHVGSIYPGNEAPTGLCSAYKSLSEEDVEVRDSKKPQMGKWYFPHLKLDKLICTYPWNNSELTAIHVGIQTPCSTFGWMTL

SEQ ID NO: 166601 - protein, 403 aa, Zea Mays
MGACNSCEATAVAAAPGPATAEARVVLADGALRRFPGGTRASQAVKAAAAGAASWFLCSADGLELGGAVVPVRPEEALQPGQLYFVLPAAMRRRPLQAEEMAALAIRASAALAGDHDGPLVFPEAAAAAGAGARCGKGPARFTPFGLGGRRAHAAEAPTALAALRYATLRTAFLRFSGSPLRRKLLEMAAKSGYTRRLPLTGETAPPPPSAVLYVANCGPAVGVTDADVRSTFGAFGEVAGVQAADDSGARIIVRFHEPAAAEAAMAALHGRPCDLLAGRVLHIRYSVPVKPKARPGGSVPVAHAASELGIPGIYMVQEFVTAAEEQELLSAVDSKTWKRLAKRRVQHYGYEFLYETRNVDSKQFLGELPTFVSTVLEKIASFPGVKDCATRLVDQLTVCLHI

SEQ ID NO: 166602 - protein, 433 aa, Zea Mays
MSSPSVASLRLPMLPASPPLSRRAIAGVTPSAAAPRALLLQPLAPKALAAYHQPALLLHQRRRHGPPPVAAVTASKPVLKDPKKYQEWDSMTAKFAGAANIPFLLLQLPQIVLNTRNLLAGNKTALFAVPWLGMLTGLLGNLSLLSYFAKKKETEAVIVQTLGVISTYAVLVQLAMAESMPVPQFVATSVVVAAGLILNFLNYFGWIPGTLLLLWEDFITVGGLAVLPQVMWSTFVPFIPNSVLPGIISGSLAVAAVAMARMGKLSNAGVKFVGSLSGWTATLLFMWMPVAQMWTNYLNPSNIKGLSAFSMLLAMLGNGLMIPRAVFIRDLMWFTGSAWASVLQGWGNLACMYCFNSISGEVFFATSAGLLLWLGLLSLQYLVCFFPNINVLIRNISFWQFVRSTHISEFQHFREEFLSKNIFVKRTCFGTNT

SEQ ID NO: 166603 - protein, 334 aa, Zea Mays
MSSPSVASLRLPMLPASPPLSRRAIAGVTPSAAAPRALLLQPLAPKALAAYHQPALLLHQRRRHGPPPVAAVTASKPVLKDPKKYQEWDSMTAKFAGAANIPFLLLQLPQIVLNTRNLLAGNKTALFAVPWLGMLTGLLGNLSLLSYFAKKKETEAVIVQTLGVISTYAVLVQLAMAESMPVPQFVATSVVVAAGLILNFLNYFGWIPGTLLLLWEDFITVGGLAVLPQVMWSTFVPFIPNSVLPGIISGSLAVAAVAMARMGKLSNAGVKFVGSLSGWTATLLFMWMPVAQMWTNYLNPSNIKGLSAFSMLLAMLGNGLMIPRAVFIRDLMWY

SEQ ID NO: 166604 - protein, 200 aa, Zea Mays
MMLPITHFEGKETSDPENGRQCPFFEELHGVFTERARNMQQQLLESESGVSVKTKLKRPGGDWSSRESDDKEDDGEESDDEKPMHNRKRKADDKKQQHQRMSEKSRTGISSIHELLQDFLVQQQHIDVRWREMIERRAQERVVFEQQWRLTMQRLEQERLLLEHSWMEREERRRMKEEARAEKRDALLTTLLNKLLQEDL

SEQ ID NO: 166605 - protein, 242 aa, Zea Mays
MEGQPLPLLLGLRPAPPPSPHPQPPYPPPTPRTPSRVEPARRSAFEASIGQSDAHGPDRSGWERLTVSSLPFLFPNRARVLALPPPLGAAAVVEATQEDWRRTRSGTWEAALQKWKTKTYALSVPLRKGALRGSFPPSWIKDFVEVQGKKLKFSAELRANLDGIFSEMSRCMDKGQVQPKSAMAADVVSLGDSWLGYAICKELLEPVKNAEEQDWFRRLSDRWKDWEDLWRPELAGRISMVY

SEQ ID NO: 166606 - protein, 91 aa, Zea Mays
MGQAWGNLQDRLQGRRWKEHQVRKITDKVFDRLTEDAQKRDKEALRFEEVYIAVLCVYNDINKYLPGPHHDPPSKEKLRAMMEVTTSFSFV

SEQ ID NO: 166607 - protein, 333 aa, Zea Mays
MRTVLLAIAVDSPGFTPLSRVCVWLPCSWVRALLRQEGGPGARAVPAYGRQEVAVLQGGRPGLQVLRAPHAPRPQPFKKACGSAARAPAARPAAAAAAGPRAHRWLPEPPHVPIHPRRQRRRRRRGRWWCWWRWHVRPGAHLSAAHGQCRCLRDCCWWREQRSQVLCLRGEVSVGRAQPALVRRRRHGRVNGQLVAPVAVPNRRHVPGHKLPSVRRAERSGREHHRLAAQDAEGAPLLLRERLRDPEAGEPDAAPLLRRVAQVEGLVAGAERGQQPRLLGHPALHLHPHGALRLQHQLQIAEWNTVKMNLSNHADPNISELTTLCCWPGLIVP

SEQ ID NO: 166608 - protein, 178 aa, Zea Mays
MSIKEKDFILGGESKRSKAKGPDFVFGIILTHLLMTKGEAITSKGSNDSVFGDSCQKGGEMSPKQKDRTTTTKFKNLVLSKSIYHLVSYCVQKGEKVVFQKWYIKTLLNTKRWISFRGSFIKSKEEHLKQGETISNLENALQTLIHLPLTICKRTLKRIYKRICKNKTRGANVVQNAK

SEQ ID NO: 166609 - protein, 114 aa, Zea Mays
MLKSLQSAVFKKSGSVDPVTITITIFLRHFDIGIDVALLSQYISLMFIGMLVVISVRGFLANVMKFFFASSRVGSRSTTNVVLVLSEIMARYFISSILLIRKSLANEYRYSVRP

SEQ ID NO: 166610 - protein, 138 aa, Zea Mays
MLKSLQSAVFKKSGSVDPVTITITIFLRHFDIGIDVALLSQFFFASSRVGSRSTTNVVLVLSEIMARYFISSILLIRKSLANEYRYSGDHYCGVLGGDIQFDFYHRWFDAIFLASAFLSLVLISAQYTTRQTDKRPID

SEQ ID NO: 166611 - protein, 90 aa, Zea Mays
MLKSLQSAVFKKSGSVDPVTITITIFLRHFDIGIDVALLSQFFFASSRVGSRSTTNVVLVLSEIMARYFISSILLIRKSLANEYRYSVRP

SEQ ID NO: 166612 - protein, 107 aa, Zea Mays
MLKSLQSAVFKKSGSVDPVTITITIFLRHFDIGIDVALLSQFFFASSRVGSRSTTNVVLVLSEIMARDSRGISMCRNVDRGPLPTTEQEESFSLLIFDSFISHLLIT

SEQ ID NO: 166613 - protein, 213 aa, Zea Mays
MDPTAPSPAPPAGDGAQPSDQNRQRPRSALRGALGVAFPIAVSFLFSFLVGLAGLALGGLSSTASVSMPSTCRILSSGVDLRSSKVCELGLLNYRAKHVFYPSSKRRFRCHDDYYWASVLQVEYTEYFSGQLSYAVAEAPKEALPHNCRPDFGAAWSTTLKFKVNESYSCRYMLGSNKADIHSNKLFNCTAEEPSTGELFKRILILIMQTSIY

SEQ ID NO: 166614 - protein, 281 aa, Zea Mays
MDPTAPSPAPPAGDGAQPSDQNRQRPRSALRGALGVAFPIAVSFLFSFLVGLAGLALGGLSSTASVSMPSTCRILSSGVDLRSSKVCELGLLNYRAKHVFYPSSKRRFRCHDDYYWASVLQVEYTEYFSGQLSYAVAEAPKEALPHNCRPDFGAAWSTTLKFKVNESYSCRYMLGSNKADIHSNKLFNCTAEEPSTGELFKRILILCCAGHAEFDVHYGLIQRYVWVVARCRQVGCEEALHQSICQPVEACLPSCRLCIRCWLDHLAVQQIYRVERTLVGF

SEQ ID NO: 166615 - protein, 52 aa, Zea Mays
MIQSSVASTVLNCLTQNRLELSIQYSQLTATSGLVLFPSERVPEMALLGLTV

SEQ ID NO: 166616 - protein, 318 aa, Zea Mays
MAAFTVHTSAATSPYSPAGTAILLRSRSRAYPTATIRVSCSKTVVIGVAADSGCGKTTFTRRLASVLGGGAEPPRAGRNPGSNTLVSDTTTVICLDDYHSLDRVGRKAKGVTALDPRFVDFDLMYEQVRAIKEGRAVEKPVYNHVTGLLDPPELITPPNILVIKGLHPMFDERVRDLLDFSIYLDISNEVKLAWKIQRDMGERGGHSLESIKASIEARKPDFEAYIEPQKQYADAVIEVLPTQLIPGDDECKVVRVKLIMKEGVEHFAPVHLFDEGSTVYWIPCGRKLSCSYPGIRCRWWRWTGSSTSWTSSSTWRPT

SEQ ID NO: 166617 - protein, 149 aa, Zea Mays
MAMGLINANPIIHEKKERRIRQAPETTDENAVESIDQLEIFDHIRDIKDPEHPYSLEQLNVVTEDSIELNDESNHVRVIFTPTVEHCSMATIIGLCIRVKLVDIRVAPGSHATEAAVNKQLNDKERVAAALENPNLLDMVEECLSPTFD

SEQ ID NO: 166618 - protein, 157 aa, Zea Mays
MAMGLINANPIIHEKKERRIRQAPETTDENAVESIDQLEIFDILLNDFPYINVVKLAFSFICESSILAIWLLRSLTFLHHIRDIKDPEHPYSLEQLNVVTEDSIELNDESNHGYFHPNSGALQYGNYYWPLHTCETCTESPSLLQGGHKGCPWITRN

SEQ ID NO: 166619 - protein, 90 aa, Zea Mays
MPSLFAAPSPPRPAVTRPRRDAGVGPSGARARLAIPRNRLLDHVDIWRQAARRRGIKQVLLQGTRPVEGCIGLSQCADPRLPADQTKETA

SEQ ID NO: 166620 - protein, 131 aa, Zea Mays
MAGDGADDRDGGDIFFEGRNFAGSRNSDPSASSFFERSDGLAGSFVPPNARRQPRPPRRPPANLEPLHCSAAACRSPPSTAPASRRPAFCFCVGAAALQLQLRRPAYCYCSSSSSQLPPPAYVQLQLQRPL

SEQ ID NO: 166621 - protein, 102 aa, Zea Mays
MLGGLSKQYCLVTRPLTSPAQNILTKWSLVMQWASYLVARSLLLVLHPWMKMLVMLAHFWHSTWDCLFLALNYLFKEKGSLSSSVLELKRWMQLPVLEVIFL

SEQ ID NO: 166622 - protein, 230 aa, Zea Mays
MDRVVSQLLVEIDGLSDNSQDLFIIGATNRPDLLDSALLRPGRFDKLLYVGVNTEASYRERILKAQTRKYKLHKNVSLLSVAQRCPPNFTGADIYALCADAWFHAAKRSVETFETDPSRSNDASAEEVIVEIDDFITCQQRCLLVRARQVGRCEQNPYVIVSSGAILRGSAHGRGLGGLAGSFVPPNGKEGGRRGCRTVNSSTRGTVPLASSPGSDPLPPPRKGEVLPEG

SEQ ID NO: 166623 - protein, 251 aa, Zea Mays
MDRVVSQLLVEIDGLSDNSQDLFIIGATNRPDLLDSALLRPGRFDKLLYVGVNTEASYRERILKAQTRKYKLHKNVSLLSVAQRCPPNFTGADIYALCADAWFHAAKRSVETFETDPSRSNDASAEEVIVEIDDFITCQQRCLLVRARQVGRCEQNPYVIVSSGAILRGSAHGRGLGGLAGSFVPPNGFTCSASAQPAPPPLPLALPSGKEGGRRGCRTVNSSTRGTVPLASSPGSDPLPPPRKGEVLPEG

SEQ ID NO: 166624 - protein, 169 aa, Zea Mays
MDLQEQGSVKGPELINMYVGESEKNGRDIFEKARSARPCVIFFDELDSLAPARGSSADSGGVMDRVVSQLLVEIDGLSDNSQDLFIIGATNRPDLLDSALLRLGRFDKLLYVGVNTEASYRERILKAQTRKYKLHKNVSLLSVAQEWFHAAKRSVSISADPLRHMLGSS

SEQ ID NO: 166625 - protein, 163 aa, Zea Mays
MYKHLFSSKLRKRSGVLLYGPPGTGKARSARPCVIFFDELDSLAPARGSSADSGGVMDRVVSQLLVEIDGLSDNSQDLFIIGATNRPDLLDSALLRLGRFDKLLYVGVNTEASYRERILKAQTRKYKLHKNVSLLSVAQEWFHAAKRSVSISADPLRHMLGSS

SEQ ID NO: 166626 - protein, 276 aa, Zea Mays
MDRVVSQLLVEIDGLSDNSQDLFIIGATNRPDLLDSALLRPGRFDKLLYVGVNTEASYRERILKAQTRKYKLHKNVSLLSVAQRCPPNFTGADIYALCADAWFHAAKRSVETFETDPSRSNDASAEEVIVEIDDFITCQQRCLLVRARQVGRCEQNPYVIVSSGAILRGSAHGRGLGGLAGSFVPPNGFTCSASAQPAPPPLPLALPSDSRNRRVLILDLIVLSEMIASVKSFPRDDPKKPCHLTAFLGYKAGMTHIVVRSRSLAPSSTRRKLVRL

SEQ ID NO: 166627 - protein, 166 aa, Zea Mays
MDRVVSQLLVEIDGLSDNSQDLFIIGATNRPDLLDSALLRPGRFDKLLYVGVNTEASYRERILKAQTRKYKLHKNVSLLSVAQRCPPNFTGADIYALCADAWFHAAKRSVETFETDPSRSNDASAEEVIVEIDDFITVLGDIAPSLSLDELQNYEQLRQKVEGPSR

SEQ ID NO: 166628 - protein, 350 aa, Zea Mays
MAKPEGPTIGVKLFVDKEKKKVLFAESDKEFVDVLFSFLTMPLGTIVRLLDKQSQMGCLDQLYKSVEDLNLEYFQTSACKAMLLKPLNAASGHCCRLKINVDGSFPRVVYVCKDTSCSALSDNAFSSFPGTVCKCGKVMEFVGRCPKYDGDTETAAAACSEDGVFVIGCLKFIVTDDLQVAPASTSLMMSFFEKFGVLDPAVLEQQVLQFSSEKIKCLLKRLLTSKQPLTDHYFEALVPQDDASLEALVQNLHPKQENEDQEMPGNQKIRVLQTKDNSALLYDEVGVDFVDSLFGLLSIPLGSAIKLYCQCSAKGCLGNAYRSIDGSVKEFVREECQSLLLDPKFFARIR

SEQ ID NO: 166629 - protein, 56 aa, Zea Mays
MSKKRKPNIFKEPDGAKLINKAMRLREGRCRKKENNGRRSDCRLEVDRGHEAEGAR

SEQ ID NO: 166630 - protein, 243 aa, Zea Mays
MAVIVTPANDYELPSSVLAALEPKDTKPSALQKAEDIVGTMLAKGFILGRDALDKAKALDEKHQLTSTATARVSSFDKRIGLSEKISVGTSVVNDKVKEMDQKYQVSEKTKSALAAAEHSVSTAGSAIMKNRYVLTGAAWVTGAFSKVTSAANEAGAKAKEKIAVEQEHKNAEGGPAQANISETHEAHRGLDGGFSRLHDSETPEDIPISTASVPAVTDEEPSKASPPAGVPEKPEAAHELVL

SEQ ID NO: 166631 - protein, 202 aa, Zea Mays
MAHTKIFMHLLFSNYCIARVLMSCAGQSSQNHEKAKKVLLIVKPHYGFGEKGRPTVGEEGVVMSIILFYIITNELVELLVALVETRYLNASIRELGDHFQTKRDGENGVDASIEKRTPKLLQFTFQELKSATLNFRPGNILGEGGFGYVFNGWIEPNSTAPAKPGTGVTVAVKSLKPDALQGHREWVKLTFWDSCIINTLLS

SEQ ID NO: 166632 - protein, 89 aa, Zea Mays
MKIVLGAAKGVAFLHGGPKPVIYRDFKTSNVLLDVEYNAKLSDFSLAKAGPQGDKTHVYTRVVGTYGYAAPEYVMTGIRDKLKDFSSYL

SEQ ID NO: 166633 - protein, 145 aa, Zea Mays
MGEVDFLGQLHHKHLVKLIGYCIEDDQRLLVYEFMARGSLENHLFRRALPLPWSNRMKIVLGAAKGVAFLHGGPKPVIYRDFKTSNVLLDVEYNAKLSDFSLAKAGPQGDKTHVYTRVVGTYGYAAPEYVMTGIRDKLKDFSSYL

SEQ ID NO: 166634 - protein, 298 aa, Zea Mays
MASSSTCVLKKNYRCDRSLQQFYTGGPFAVGLAPGGDGEGGAEAEAFLACACGGEVRVVSSADASAIGEPVDGDSEAITALALSPDSRLLFAAGHSRLIRAWDLASRACIRSWKGHDGPIMAMACHVSGGLLATAGADKKVCVWDVDGGFCTHFLRGHTGVVTSVMFHKDPKRLLLFSGSEDGTVRVWNLETKKCVAVLKEHFSAVTSLALSDDGQTLLSAGRDKIVTAWDIRKYSSKKTIPTYEMIEAVSFIGPGSEFLACLGIELANKKEKDTAYFLTVGERGVVRIWCLESKHLM

SEQ ID NO: 166635 - protein, 165 aa, Zea Mays
MSLLAGALFGQLRGLALVVFAATAGASSCYFLSKMIGKPLVFTLWPDKLSFFQRQVAKRREKLLNYMLFLRVTPTLPNTFINLASPIVDVPYHIFLLGTLIGLIPAAYVTVRAGIALGELTSLSDLYDTQSIALLFLIGVVSVTPALLGKDEAQEKPPEMAVGAS

SEQ ID NO: 166636 - protein, 216 aa, Zea Mays
MAIDDESPLRVNTRGGAMGGGERDGGENQRWPPWLKPLLGTSFFGQCKLHADAHKSECNMYCLDCISGVQTYIINSARVVFLNERPQPRPGKGVTNTCEVCERSLLDTFRFCSLGCKIVRTSGDFRIRKKHAIVAKKKREKKHAPQQKQHRGAADSADDDDDDSSTSTSGGSDKSSVVQSFTPSTPPATTANSFRAGKRRKGVPHRSPFGSLVVEF

SEQ ID NO: 166637 - protein, 224 aa, Zea Mays
MLCLRLCFGWWSADTEVLLPRRDPGVGDPEGAGHQRRADLHHQQRARGVPERAAAAEARQGRHQHLRGLRAQPPRHLPLLLPRLQDRQDLRRLPHPEEARHRRKEEEGEEACAAAEAAQGRGGLGGRRRRRLVHQHQRRQRQEQRGAELHPVDPAGDDRQQLPRREAAQGRAAPVAVRQPRGGVLDKKKGAPPGRDGRSPKKKHTHTAVHHCSIRTSSTYHYHL

SEQ ID NO: 166638 - protein, 154 aa, Zea Mays
MQPLQDRDNWRNQKVEKHLVGGYADTLMCSKTTTEIRKVMKPYLDKNKRYRLIFLDDDDGHEQQGQEGQQDTTSVHQPSSGTAAKRKRAAFQFRTAAPQPSNMEKEKGKVATMLRRTPEQVVDDRRSFLRVTPNHHRGQNSYFGYAQIHFLVLI

SEQ ID NO: 166639 - protein, 125 aa, Zea Mays
MPMTAVPRTGPGCLGSPPAQALSSSLAGVQGAPKRLGASKPSWIVRTESNVRRERAKRPDPPCTICKGTGRIDCRNCFGRGRTNHADVAMLPNGEWPQWCRICGGSGLDYCLRCHGTAFITKAME

SEQ ID NO: 166640 - protein, 159 aa, Zea Mays
MLPNGEWPQWCRICGGSGLDYCLRCHGTEESPGGWGSSFQPFSRSNLHAMTSQGPASNEVLANAFQWLSPRSVTACRAVCLRWSELLSSPRLEFLADVDDGNADSSACFAGLGGASAGRARRRRRRRRGDTVPAATWFPSLPKLQQRRSKKKQAYRRMF

SEQ ID NO: 166641 - protein, 80 aa, Zea Mays
MSVSTNSYAAKKGKISIDEVMKHVLACGATYGSNEHFIATELFVKLTQKEMFMTFLTEHRFNWLSGKYITKYGNYKGPWV

SEQ ID NO: 166642 - protein, 79 aa, Zea Mays
MATSVACAFFFKPLSRNSDIFMYKGDTPFCSEDCRYEQMGLVRGRQGGRVRGQLVSSKSKHSDAEKGGGGGGEEEGRAG

SEQ ID NO: 166643 - protein, 53 aa, Zea Mays
MENICLQKEIDIKYMTSSCAIVDDPDFLFFKVPSDWQQVCTVLGRYIQCFVFY

SEQ ID NO: 166644 - protein, 105 aa, Zea Mays
MDLGLSVAGRTGSGGGRGGLPLGHFLEACFLCRKPLPSNRDIFMYRGDIPFCTEDCRREQIEMDEEMERKESKPKNVAPRGAPSPKDVDSPPRPPKARAGSILAG

SEQ ID NO: 166645 - protein, 224 aa, Zea Mays
MARPARKALIGAPSAARSRGLRRHAFPRSAVALFLALLVALSLAVLYRAAVSRSLGTSWSWGWDSLALPSFATSQEEEGAEGDDLDSEDLKLERVLKKASMRDNTVILTTLNAAWASPGSLIDLFIDSFRSGVRTNLLLKHLVIVAFDWKAYEECVKIHPYCFALGTDGVDFSEEKRFLTSGYLEMMWRRLDFLRLVLEKGCRHYVVSQSIPTFLSRCRLSDCM

SEQ ID NO: 166646 - protein, 700 aa, Zea Mays
MTSTEIQAFFRGRSWLFRCKIPTTAVSSALFKPCNSWRKTRSRSSGHSLQSLRTSYPTSQMNSSDQFQMASVAAIVDYYGWKMVTAVYIDDDYGRNGVSSLDDELAKRRLKILYKAAIRPGARKSEMAAVLVKAAMMESRVFVLHARDDSGIDVFSLAYNLSMTSGGYVWIATDWLTACLDSAPRLGTGLLNTMQGVLTLRQHTENTSRKKALVSRWSEVAKEEEEEDGGSLPNTYGLYAYDTVWMLAHGLDAFFNSGGNISFSPDPRLRAVVGGALNLDALSVFDEGTLLLERIRNVSFMGATGPVKLDSDGNLIQPAYDIVNVVGSGLRTIGYWSNYSGLSVVSPETLYKKPFNVSANQELHAAIWPGETVTRPRGWVFPNNGNELRIGVPDRVSYRQFISVDNQTGTVGGFCIDVFAAAINLLQYPVTYRFVPFGNGRENPSYTELIGRILTNEFDAVVGDVAIVTNRTKVVDFTQPYVASGLVILTAVKTQSSDAWAFLQPFTIRMWSVTGVFFLVVGAVIWLLEHRINDDFRGPPAKQVITVFWFSFSTLFFAHREDTRSTLGRVVVIIWLFVVLIIQSSYTASLTSILTVQQLTSPIKGIDSLIASDEPIGFQVGSFAESYLVHELGVSPSRLKALGTPDEYKNALELGPRKGGVVAIVDERPYVEVFLVQHDKFAIVGAEFTKSGWGFVSVPA

SEQ ID NO: 166647 - protein, 781 aa, Zea Mays
MKSMLQVWGIFCCVCSCALGQNTSARPSVVNVGALFTFHSTIGRAAKVAIAAAVNDINRDPSVLQGTKLVVQMQDTNYSGFISIVQALQFMEKDTIAIIGPQSSVVAHVISHVANELQVPLMSFAATDPTLTPLQYPFFVRTVHSDQFQMASVAAIVDYYGWKMVTAVYIDDDYGRNGVSSLDDELAKRRLKILYKAAIRPGARKSEMAAVLVKAAMMESRVFVLHARDDSGIDVFSLAYNLSMTSGGYVWIATDWLTACLDSAPRLGTGLLNTMQGVLTLRQHTENTSRKKALVSRWSEVAKEEEEEDGGSLPNTYGLYAYDTVWMLAHGLDAFFNSGGNISFSPDPRLRAVVGGALNLDALSVFDEGTLLLERIRNVSFMGATGPVKLDSDGNLIQPAYDIVNVVGSGLRTIGYWSNYSGLSVVSPETLYKKPFNVSANQELHAAIWPGETVTRPRGWVFPNNGNELRIGVPDRVSYRQFISVDNQTGTVGGFCIDVFAAAINLLQYPVTYRFVPFGNGRENPSYTELIGRILTNEFDAVVGDVAIVTNRTKVVDFTQPYVASGLVILTAVKTQSSDAWAFLQPFTIRMWSVTGVFFLVVGAVIWLLEHRINDDFRGPPAKQVITVFWFSFSTLFFAHREDTRSTLGRVVVIIWLFVVLIIQSSYTASLTSILTVQQLTSPIKGIDSLIASDEPIGFQVGSFAESYLVHELGVSPSRLKALGTPDEYKNALELGPRKGGVVAIVDERPYVEVFLVQHDKFAIVGAEFTKSGWGFVSVPA

SEQ ID NO: 166648 - protein, 513 aa, Zea Mays
MDDILIYKSEAHVDTQDEAGKPGLRNDEDIRKHKSCFGRVCFCCAIFTTGDCRGGDEANHQEDYGEEALFCTLCNAEVRKHSKHCRSCDKCVDGFDHHCRLAAECGVGIAVFVRCFTDKTVIEDQIGEKLGYGLSRAPFATIVALATALSMLASVPLGELFFFHMILIRKGITTYEYVVAMRAQSEPPGPSVNDDQQSLASSPMSSAPTAFSGSSFARHYKGAWCTPPRIFIDQDEIIPHLEPGRVPSTVDPDTTDPMERTKTHPKRPVRISAWKLAKLDSNEAMKAAAKARASSSVLKPINTRNQYEADSDSLSSRNSVISADTGHHRYPRSCGNSQYKPSYPPSRASADDIELYPQTPSSFQSNSRTSTPIAEHHPSKHFNPIYQTSANRSPFSAKASVSEAPVSEITNAGRSYPPPQADRSSRSSVYWDQEAGRFVSAQANQGSSSRPAYPDLLYTGQNIFFGGPLIADPAARSFRDPGGSSQRSAGPRSHQLPVFVPSDPQKDQLSRLP

SEQ ID NO: 166649 - protein, 268 aa, Zea Mays
MATASVATSLPFGLLLPPRLFRGRLVRWPRQIRASASSNASNVAGGERKLGALKGRVGDLRALVASMPDAVGSIQKNIGPNFVAGFCVGIAFLAAVARQITLRSREHDNKGSVADLVRRGQLKSGQRGTAKPRTFDDPFNNPLVKIDEGTSTVQMFGKEYRLAPVRLTKEEQEMHQKRRSRAYQWKRPTVFLREGDSLPPDVDPDTVRWIPANHPFAAASSEVDEETAKQNVYQKDGVPSRVKAEHEALQARLEASNDTPSGSKEYAA

SEQ ID NO: 166650 - protein, 195 aa, Zea Mays
MPLARAKPRTFDDPFNNPLVKIDEGTSTVQMFGKEYRLAPVRLTKEEQEMHQKRRSRAYQWKRPTVFLREGDSLPPDVDPDTVRWIPANHPFAAASSEVDEETAKQNVYQKDGVPSRVKAEHEALQARLEASNDVTRLPPDPRSMQRNERQMELSGKPSENLQGSKFENQDRQLVIESGKHSSDGSLQSNEPEGQ

SEQ ID NO: 166651 - protein, 165 aa, Zea Mays
MFGKEYRLAPVRLTKEEQEMHQKRRSRAYQWKRPTVFLREGDSLPPDVDPDTVRWIPANHPFAAASSEVDEETAKQNVYQKDGVPSRVKAEHEALQARLEASNDVTRLPPDPRSMQRNERQMELSGKPSENLQGSKFENQDRQLVIESGKHSSDGSLQSNEPEGQ

SEQ ID NO: 166652 - protein, 981 aa, Zea Mays
MAGSFDLRTPTRGVEQAIVALKKGAHLLKCGKRGKPKFCAFRISSDETTLIWYSKGREKHLSLSSVSAVVLGQKTIKFLRQRCPEKEPHSFSLIYKNGERSLDLICSDRDQAENWYLGLRALLPTPCNPCSSIESRSSRQIDSCTNTPSSYIQLKSKLLSVHGTPRHIQVCSSQRKPKKAHGTFFGGSADCSESLFYTRQRTFSDIGTYLENLTRKMSNPEIHDLKDVMVGNQEKEQKITQTPKLKTFEGPRAACRLDSLKDVFFWGDAFGSILECGDTSKPLPMLVDSTNMLDVQSIACGETHAAIITKQGEVYSWGNESSGRIGNQVNIKVSRPKVVQSLASLHVKDVAYGSKHTCAVTVSGELIEWGEGPYMGQLDSYARNQWFPHKLFSPLDGISVVKIACGPWHTAIITSSGQLYTYGDGTFGVLGHGDTQGTTRPKEVESLKGSRVKCVACGPWHTAAIVEVISDFKSNSPRSKLFTWGDADRGKLGHADKKMKLIPTCVDSLTDYDFIQVSCGTALTVALSVTGVVFTSGSSMHGQLGNPHADGKTVSAVEGLLKSEFVRHISSGSSHVAVVTTNGKVFTWGKGKEGQLGLGDFLNRSTPTLVDALEGRHVESLSCGYNYTAAVCLHKVISRKDLSVCSGCKMAFGFTRKKHNCYHCGSMFCNSCSSNKVAKAALAPDKSRRYRVCDGCFSQLLKVVDSGKVKSELNTSKGAEIIRSYTPKLSRIFRDVNLPVEKEKVALVQRSNQRNEVLYTPVQAKSQRWGQVECPAQFLSAEDSSHYQSISKNHMYSASVSERMHDPTVLKSGRSLQQPNDDQRKDLNSIEETLLTEEVKQLRSQMTLLMEQYHQKALQVELYKQKLDETWLIVRNEAAKCKAAKDIIKVLTDQCKALSEKLLVGQQYENLETKSNISQGQTFSADLQHHPSEKFATGKFGQLDNTKNHQTSSQGDEEYTPSSSSDVQKGIPLLLASPPMV

SEQ ID NO: 166653 - protein, 765 aa, Zea Mays
MSNPEIHDLKDVMVGNQEKEQKITQTPKLKTFEGPRAACRLDSLKDVFFWGDAFGSILECGDTSKPLPMLVDSTNMLDVQSIACGETHAAIITKQGEVYSWGNESSGRIGNQVNIKVSRPKVVQSLASLHVKDVAYGSKHTCAVTVSGELIEWGEGPYMGQLDSYARNQWFPHKLFSPLDGISVVKIACGPWHTAIITSSGQLYTYGDGTFGVLGHGDTQGTTRPKEVESLKGSRVKCVACGPWHTAAIVEVISDFKSNSPRSKLFTWGDADRGKLGHADKKMKLIPTCVDSLTDYDFIQVSCGTALTVALSVTGVVFTSGSSMHGQLGNPHADGKTVSAVEGLLKSEFVRHISSGSSHVAVVTTNGKVFTWGKGKEGQLGLGDFLNRSTPTLVDALEGRHVESLSCGYNYTAAVCLHKVISRKDLSVCSGCKMAFGFTRKKHNCYHCGSMFCNSCSSNKVAKAALAPDKSRRYRVCDGCFSQLLKVVDSGKVKSELNTSKGAEIIRSYTPKLSRIFRDVNLPVEKEKVALVQRSNQRNEVLYTPVQAKSQRWGQVECPAQFLSAEDSSHYQSISKNHMYSASVSERMHDPTVLKSGRSLQQPNDDQRKDLNSIEETLLTEEVKQLRSQMTLLMEQYHQKALQVELYKQKLDETWLIVRNEAAKCKAAKDIIKVLTDQCKALSEKLLVGQQYENLETKSNISQGQTFSADLQHHPSEKFATGKFGQLDNTKNHQTSSQGDEEYTPSSSSDVQKGIPLLLASPPMV

SEQ ID NO: 166654 - protein, 1028 aa, Zea Mays
MVLKREGKTLELKLRVSCGSWPEDDFRILQIKFLRQRCPEKEPHSFSLIYKNGERSLDLICSDRDQAENWYLGLRALLPTPCNPCSSIESRSSRQIDSCTNTPSSYIQLKSKLLSVHGTPRHIQVCSSQRKPKKAHGTFFGGSADCSESLFYTRQRTFSDIGTYLENLTRKMSNPEIHDLKDVMVGNQEKEQKITQTPKLKTFEGPRAACRLDSLKDVFFWGDAFGSILECGDTSKPLPMLVDSTNMLDVQSIACGETHAAIITKQGEVYSWGNESSGRIGNQVNIKVSRPKVVQSLASLHVKDVAYGSKHTCAVTVSGELIEWGEGPYMGQLDSYARNQWFPHKLFSPLDGISVVKIACGPWHTAIITSSGQLYTYGDGTFGVLGHGDTQGTTRPKEVESLKGSRVKCVACGPWHTAAIVEVISDFKSNSPRSKLFTWGDADRGKLGHADKKMKLIPTCVDSLTDYDFIQVSCGTALTVALSVTGVVFTSGSSMHGQLGNPHADGKTVSAVEGLLKSEFVRHISSGSSHVAVVTTNGKVFTWGKGKEGQLGLGDFLNRSTPTLVDALEGRHVESLSCGYNYTAAVCLHKVISRKDLSVCSGCKMAFGFTRKKHNCYHCGSMFCNSCSSNKVAKAALAPDKSRRYRVCDGCFSQLLKVVDSGKVKSELNTSKGAEIIRSYTPKLSRIFRDVNLPVEKEKVALVQRSNQRNEVLYTPVQAKSQRWGQVECPAQFLSAEDSSHYQSISKNHMYSASVSERMHDPTVLKSGRSLQQPNDDQRKDLNSIEETLLTEEVKQLRSQMTLLMEQYHQKALQVELYKQKLDETWLIVRNEAAKCKAAKDIIKVLTDQCKALSEKLLVGQQYENLETKSNISQGQTFSADLQHHPSEKFATGKFGQLDNTKNHQTSSQGDEEYTPSSSSDVQVEGLCGHLNGSRTFDSNGRITEGNSIVARVTSNGVIEQIERGVYVTFAVSPCGKKDIKRVRFSRKHFGEKEAQHWWEENKGSVYAKYSTEKAQHQLEVTIKSVQE

SEQ ID NO: 166655 - protein, 939 aa, Zea Mays
MAGSFDLRTPTRGVEQAIVALKKGAHLLKCGKRGKPKFCAFRISSDETTLIWYSKGREKHLSLSSVSAVVLGQKTICSDRDQAENWYLGLRALLPTPCNPCSSIESRSSRQIDSCTNTPSSYIQLKSKLLSVHGTPRHIQVCSSQRKPKKAHGTFFGGSADCSESLFYTRQRTFSDIGTYLENLTRKMSNPEIHDLKDVMVGNQEKEQKITQTPKLKTFEGPRAACRLDSLKDVFFWGDAFGSILECGDTSKPLPMLVDSTNMLDVQSIACGETHAAIITKQGEVYSWGNESSGRIGNQVNIKVSRPKVVQSLASLHVKDVAYGSKHTCAVTVSGELIEWGEGPYMGQLDSYARNQWFPHKLFSPLDGISVVKIACGPWHTAIITSSGQLYTYGDGTFGVLGHGDTQGTTRPKEVESLKGSRVKCVACGPWHTAAIVEVISDFKSNSPRSKLFTWGDADRGKLGHADKKMKLIPTCVDSLTDYDFIQVSCGTALTVALSVTGVVFTSGSSMHGQLGNPHADGKTVSAVEGLLKSEFVRHISSGSSHVAVVTTNGKVFTWGKGKEGQLGLGDFLNRSTPTLVDALEGRHVESLSCGYNYTAAVCLHKVISRKDLSVCSGCKMAFGFTRKKHNCYHCGSMFCNSCSSNKVAKAALAPDKSRRYRVCDGCFSQLLKVVDSGKVKSELNTSKGAEIIRSYTPKLSRIFRDVNLPVEKEKVALVQRSNQRNEVLYTPVQAKSQRWGQVECPAQFLSAEDSSHYQSISKNHMYSASVSERMHDPTVLKSGRSLQQPNDDQRKDLNSIEETLLTEEVKQLRSQMTLLMEQYHQKALQVELYKQKLDETWLIVRNEAAKCKAAKDIIKVLTDQVRPCQRNFWSVSNMRTLRQNLISAKDKHFQQICNIIPVKNLPQANSDNSTTPKITRPAAKETKNIHLLQVLMCR

SEQ ID NO: 166656 - protein, 1431 aa, Zea Mays
MPSAFFAWRSQHGTSLVGILFSALGVFGVGREVARHDFRPTSLGHREARVPWDCLTWSSARLCKDKHSVWFNAHVEVERLSLHDYHAVPAKEGLAVEWELVSAAQGKGFDSLVILVFGAFGRHGIADKRQGLDCGLPLATPTSRRCTRLALRTERCNAAYALVVQMISHGCTLRGVIILLVLALRVRRPTTDNATRVAGRLQRAKVRRKMNGNGYDKRSWKKKRRRQTEGFEAVAMYWARAKKDGKFGLSYLDNQVFSWSVSDIFDRDLLRKKVKRIPDTFTSFESYLDSFTWPLIEEVHADVFSSLDGYSEANFIEVTQVGNLDASKPILGFRVAEPVKDEKSRETYVPVENDIIVLSSHKPRHVSDLTQNKSSFVLGSVIKTGEEDGFPPDWCVVHLSSAILVEADCHTKIPKRPLFLVFLINMKTYNRIWRCLHLGQNCSNLFELQNKKSSGPVTKAWEFKPKPAEAESSQCSQPSQCFDGRLIEWLGLEKFGLNDSQLNAVSDCVSLMDSNSSSIKLLWGPPGTGKTKTISSILWAMLIKGRRTLACAPTNTAVLEIAARIVSLTVKSSDGTVFLNDIVLFGNKKKMKIDNDYYLSKVYLNFRAERLLPCFKSNTGWRHCLCVLIDLLVNSVTKYQLNNEDKTFKQHLKDDYNKLSRNLHSYITILYNDHPRNLETGQSFQCMLEVRELLKILHTLINAGNGGDIWSDELLRSTIEEEVNPELWPSQLACIRTNSCNKSKFVAARSLCLQELIYLCKNMELPNCYSAQDVRLYLLSRTRLIICTVCSSFKLYNIPMRNSSPSLHQLLNKPKILIPLELLIIDEAAQLKECETLIPLQLPGIRHAVLIGDEYQLPSLVKSKISDSANFGRSVFERLSSLGYSKHLLNIQYRMHPDISRFPVGKLFRPYSFINIDGSHETNEMHGRSLKNSLEVDAVVMIVQSLLKETLSTRSKLSIGVVCPYNAQVRAIQEKVGKPCRKYDYFSVKVKSVDGFQGAEEDIIIISTVRSNGAGTVGFLSNLQRTNVALTRAKHCLWIVGNGTTLFNSNSVWQKIVKDTRDRGCFFNATDEKELLNAIFKPAVEYPHADNLAKHEQHGQNISDLSATDTIQQLACQFTPGSDLPPKFSITLNVGYTTRKFSSSSTLLNSSPLQLTATAVPNAEPASHGSSATGAVELPVTEDGRLVDGKISFQNTVRSTLIRIDHDPRLAFDFLAVATTREQAAPLTREQFKKHDRMVESPAPVTAEGSECCIRLNEQEQVAPPTKLQSKKRGRNVKDPAAATTGALKCSIGLDEIATRQQAAPPTPEQSKKRGRKSEPLPQVITEGLRRSSRLSEKGKHHQVAPSQEQAKKHGRKGATLSPVTTEALRRSSRLNEKGTHQQIALSIPEQAKKCGRKAKRLPRVTIEGLKRSKRMSRNNSEELADVDCNP

SEQ ID NO: 166657 - protein, 1423 aa, Zea Mays
MPSAFFAWRSQHGTSLVGILFSALGVFGVGREVARHDFRPTSLGHREARVPWDCLTWSSARLCKDKHSVWFNAHVEVERLSLHDYHAVPAKEGLAVEWELVSAAQGKGFDSLVILVFGAFGRHGIADKRQGLDCGLPLATPTSRRCTRLALRTERCNAAYALVVQMISHGCTLRGVIILLVLALRVRRPTTDNATRVAGRLQRAKVRRKMNGNGYDKRSWKKKRRRQTEGFEAVAMYWARAKKDGKFGLSYLDNQVFSWSVSDIFDRDLLRKKVKRIPDTFTSFESYLDSFTWPLIEEVHADVFSSLDGYSEANFIEVTQVGNLDASKPILGFRVAEPVKDEKSRETYVPVENDIIVLSSHKPRHVSDLTQNKSSFVLGSVIKTGEEDGFPPDWCVVHLSSAILVEADCHTKIPKRPLFLVFLINMKTYNRIWRCLHLGQNCSNLFELQNKKSSGPVTKAWEFKPKVCWSYAHKPAEAESSQCSQPSQCFDGRLIEWLGLEKFGLNDSQLNAVSDCVSLMDSNSSSIKLLWGPPGTGKTKTISSILWAMLIKGRRTLACAPTNTAVLEIAARIVSLTVKSSDGTVFLNDIVLFGNKKKMKIDNDYYLSKVYLNFRAERLLPCFKSNTGWRHCLCVLIDLLVNSVTKYQLNNEDKTFKQHLKDDYNKLSRNLHSYITILYNDHPRNLETGQSFQCMLEVRELLKILHTLINAGNGGDIWSDELLRSTIEEEVNPELWPSQLACIRTNSCNKSKFVAARSLCLQELIYLCKNMELPNCYSAQDVRLYLLSRTRLIICTVCSSFKLYNIPMRNSSPSLHQLLNKPKILIPLELLIIDEAAQLKECETLIPLQLPGIRHAVLIGDEYQLPSLVKSKISDSANFGRSVFERLSSLGYSKHLLNIQYRMHPDISRFPVGTFYDGKLSDGPNVSHKDYNKMFLAGKLFRPYSFINIDGSHETNEMHGRSLKNSLEVDAVVMIVQSLLKETLSTRSKLSIGVVCPYNAQVRAIQEKVGKPCRKYDYFSVKVKSVDGFQGAEEDIIIISTVRSNGAGTVGFLSNLQRTNVALTRAKHCLWIVGNGTTLFNSNSVWQKIVKDTRDRGCFFNATDEKELLNAIFKPAVEYPHADNLAKHEQHGQNISDLSATDTIQQLASTAVPNAEPASHGSSATGAVELPVTEDGRLVDGKISFQNTVRSTLIRIDHDPRLAFDFLAVATTREQAAPLTREQFKKHDRMVESPAPVTAEGSECCIRLNEQEQVAPPTKLQSKKRGRNVKDPAAATTGALKCSIGLDEIATRQQAAPPTPEQSKKRGRKSEPLPQVITEGLRRSSRLSEKGKHHQVAPSQEQAKKHGRKGATLSPVTTEALRRSSRLNEKGTHQQIALSIPEQAKKCGRKAKRLPRVTIEGLKRSKRMSRNNSEELADVDCNP

SEQ ID NO: 166658 - protein, 507 aa, Zea Mays
MHGRSLKNSLEVDAVVMIVQSLLKETLSTRSKLSIGVVCPYNAQVRAIQEKVGKPCRKYDYFSVKVKSVDGFQGAEEDIIIISTVRSNGAGTVGFLSNLQRTNVALTRAKHCLWIVGNGTTLFNSNSVWQKIVKDTRDRGCFFNATDEKELLNAIFKPAVEYPHADNLAKHEQHGQNISDLSATDTIQQLACQFTPGSDLPPKFSITLNVGYTTRKFSSSSTLLNSSPLQLTATAVPNAEPASHGSSATGAVELPVTEDGRLVDGKISFQNTVRSTLIRIDHDPRLAFDFLAVATTREQAAPLTREQFKKHDRMVESPAPVTAEGSECCIRLNEQEQVAPPTKLQSKKRGRNVKDPAAATTGALKCSIGLDEIATRQQAAPPTPEQSKKRGRKSEPLPQVITEGLRRSSRLSEKGKHHQVAPSQEQAKKHGRKGATLSPVTTEALRRSSRLNEKGTHQQIALSIPEQAKKCGRKAKRLPRVTIEGLKRSKRMSRNNSEELADVDCNP

SEQ ID NO: 166659 - protein, 214 aa, Zea Mays
MQQQAASQIDKSYAWWLLCFDRQVVGTYATEARALALRLLEAISESLGLERSHMVAAMGRHAQHMAVNYYPPCPQPELTYGLPGHKDPNAITLLLQDGVSGLQVQRGGRWVAVNPVPNALVINIGDQMQALSNDRYKSVLHRVIVNSESERISVPTFYCPSPDAVIAPADALVDDGHPLAYRPFTYQEYYDAFWNMGLQSASCLDRFRPGGSLE

SEQ ID NO: 166660 - protein, 155 aa, Zea Mays
MVAASPEKLHCGAAGSSDKEKEVAGRDDAEVMLPQLSDEPLREKAQRIQVMLTGGMSERLPDRGKKLLATLDAIHREQDRRQAQGDGARAPLGSLTSGNWNAVIVQYSDGLGFVAKPAMLPDGSVNLMLWNCVVPGKEGVMLSGKQHLVADVPGQ

SEQ ID NO: 166661 - protein, 168 aa, Zea Mays
MSGILSSVQQLANQLADAHFARPHPTIHTSSRSQMPQNVQSAMRLRVLSFLWERMHIRIREPLDTGAFSVAQTRAATREMRFRIRPPLDTNTTILLNLLLETKTRDMLYYGNHTIKLFCFLALAAKRGLVGSSPGLIKLFCFICKYSPFLLVLSSLFFVNHTTFSIGG

SEQ ID NO: 166662 - protein, 128 aa, Zea Mays
MLPDGSVNLMLWNCVVPGKEGTDWEGGYFPVTLHFTENYPSNPPTCKFPRRFFHVNVYDSGDVCLSILGDAWAPSITVRQILIGIQELLENPNPASPAQDFAYDVFAENMPEYKRRVREQAKRYPSLV

SEQ ID NO: 166663 - protein, 211 aa, Zea Mays
MAQAPARAASAVRLFDAHCHLQDPRIAAVAPALIRAAGASGVARFAVNGTSEKDWHLVKQMAEDHPAVVPCFGLHPWWVPERSPDWMNLLRRFFAETPEAAVGEIGLDKGSHGKTINFGEQVEVFQRQLELAKELERPVSVHCVRAFGDLLEVLKQTGPFPAGVLLHSYMGSAEMVSALANLGCYFSLSGFLTGMKSTKAKHMLKSFRCRY

SEQ ID NO: 166664 - protein, 52 aa, Zea Mays
MTKHEGKKTREYIYKLTCLTLLDITQENGGSQMKRHCGTYKIPVRYPMMCIR

SEQ ID NO: 166665 - protein, 104 aa, Zea Mays
MSPPLGRPHPPPPISSHHGRSWADVVDIICVRWRRKSAIARYLTVVIPPPVGAGTSHLGTGVSSAWSPGFGLDMNPSSLLSAPSRSLPTSPMPSLLPSPPGLAL

SEQ ID NO: 166666 - protein, 193 aa, Zea Mays
MGLRSAPRLALRRPGAVSGHRSRTGRGKFPVASTSLDDYLPMRSTEVKNRTLTGDITSLRLITAVKTPYLPDGRFDLEAYDSLINMQIEGGSEGVIVGGTTGEGHLMSWDEHIMLIGHTVNCFGTRIKVIGNTGSNSTREAVHATEQGFAVGMHAALHINPYYGKEWPGYSSSSYRDTLRLSKHGRSERMCRT

SEQ ID NO: 166667 - protein, 287 aa, Zea Mays
MGLRSAPRLALRRPGAVSGHRTLTGDITSLRLITAVKTPYLPDGRFDLEAYDSLINMQIEGGSEGVIVGGTTGEGHLMSWDEHIMLIGHTVNCFGTRIKVIGNTGSNSTREAVHATEQGFAVGMHAALHINPYYGKVSTEGLISHFEAVLPMGPTIIYNVPSRSGQDIPPQVIETLSGYPNMAGVKECVGHERVKCYTDKGENALLNEKLLPLTKWLFCLPNPIALNTALAQLGVARPVFRLPYVPLPLEKRIEFVRIVEAIGRGNFVGQQEARVLDDDDFVLISRY

SEQ ID NO: 166668 - protein, 74 aa, Zea Mays
MLLLECKPAEEDIPRFRRRQHISFRPILQPACIEGASLAHVRDGQTPTLLTSIASSRPACALNWRAFVQNSEHL

SEQ ID NO: 166669 - protein, 560 aa, Zea Mays
MTSVYIPVQGTEEEVQVALDQLPHDASDILDILKAEQAPLHLWLIIAREYFKQGKIEQFRQILEEGSGPEIDEYYADVKYERIAILTALGAFHTFLGKVDRAPQKESHFKDATQYYNRASRIDETEPSTWIGRGQLCIAKGELQMASDSFKIVLDEDENNFPALLGQASVYFLMGEAEQQHKKSLEHYRNSLDLYKKALRVYCNCPAAVRLGIAFCRYKLGQVEKARQAFQRVLELDPQNVDALVALAIMDLQTNEAGGIRRGMEKMKKAFEIYPYYTLALNHLANHYFFTGQHFVVEQLTETALSSSNHGLLKSHAYYNLARSYHSKGDIETAGRYYMASVNEISKPQDFVLPYIGLGQIQLKFGDFKSSLGSFEKVLEVHPENCESLKAIGHIHAKSGETEKAIETFKKVTRIDPKDHQAFVELGELLVESDWAAAMEYLKTARNLLKKAGEAVPVELLNGIGLLHFEKGEFEMAEQSFKEALGDGLWVSIMDGKVGSSMINWSVQNKDQSFFHQLEGVPLELHSNKVTTLFNYARLLEELHDSVRASIFYRFIIFKQ

SEQ ID NO: 166670 - protein, 1061 aa, Zea Mays
MTSVYIPVQGTEEEVQVALDQLPHDASDILDILKAEQAPLHLWLIIAREYFKQGKIEQFRQILEEGSGPEIDEYYADVKYERIAILTALGAFHTFLGKVDRAPQKESHFKDATQYYNRASRIDETEPSTWIGRGQLCIAKGELQMASDSFKIVLDEDENNFPALLGQASVYFLMGEAEQQHKKSLEHYRNSLDLYKKALRVYCNCPAAVRLGIAFCRYKLGQVEKARQAFQRVLELDPQNVDALVALAIMDLQTNEAGGIRRGMEKMKKAFEIYPYYTLALNHLANHYFFTGQHFVVEQLTETALSSSNHGLLKSHAYYNLARSYHSKGDIETAGRYYMASVNEISKPQDFVLPYIGLGQIQLKFGDFKSSLGSFEKVLEVHPENCESLKAIGHIHAKSGETEKAIETFKKVTRIDPKDHQAFVELGELLVESDWAAAMEYLKTARNLLKKAGEAVPVELLNGIGLLHFEKGEFESFKEALGDGLWVSIMDGKVGSSMINWSVQNKDQSFFHQLEGVPLELHSNKVTTLFNYARLLEELHDSVRASIFYRFIIFKYPDYIDAYLRLAAIAKQRNNVQLSIELIGDALKIDEKNPNALSMLGSLELQSDEAWLTAKEHFRNAKEATKGDTYSLLQLGNWNYFAANRPEKKAPKIEATHREKAMELYQTQVLKQHRSNMFAANGIGILYAEKAKWDVAKELFTQVHEAASGSIFVHMPDVWINLAHTYFAQGHFQQAVKLYQNCLRKFFHNTDATILLYLARTHYEAERWQDCRKTLLRAIHLAPSNYLLRFNVGVSMQKFSASTLQKTKQTVDEVRATVTELQNAIRVFSLLSVASTYHSHGFDERKIETHVEYCKHLLDAAKVHRDAAEQAEQQNKQKMEVARQIALAEEARRRAEEQRKFQLERRREEDELKQVKQQEEHFQRVKEQWKTSSNTPGKRKDRSKTEDEEVGNKKRRRKGIRRKDQKTKMQYGEEEDEYKDEPEADDDYADLARYNGADNSERAPDHLLAAAGLDDSDAEDDMGHPQSAIERKRRAWSESEDDEPVKKPAAQPSPGADGLSE

SEQ ID NO: 166671 - protein, 937 aa, Zea Mays
MPCCLGQLCIAKGELQMASDSFKIVLDEDENNFPALLGQASVYFLMGEAEQQHKKSLEHYRNSLDLYKKALRVYCNCPAAVRLGIAFCRYKLGQVEKARQAFQRVLELDPQNVDALVALAIMDLQTNEAGGIRRGMEKMKKAFEIYPYYTLALNHLANHYFFTGQHFVVEQLTETALSSSNHGLLKSHAYYNLARSYHSKGDIETAGRYYMASVNEISKPQDFVLPYIGLGQIQLKFGDFKSSLGSFEKVLEVHPENCESLKAIGHIHAKSGETEKAIETFKKVTRIDPKDHQAFVELGELLVESDWAAAMEYLKTARNLLKKAGEAVPVELLNGIGLLHFEKGEFEMAEQSFKEALGDGLWVSIMDGKVGSSMINWSVQNKDQSFFHQLEGVPLELHSNKVTTLFNYARLLEELHDSVRASIFYRFIIFKYPDYIDAYLRLAAIAKQRNNVQLSIELIGDALKIDEKNPNALSMLGSLELQSDEAWLTAKEHFRNAKEATKGDTYSLLQLGNWNYFAANRPEKKAPKIEATHREKAMELYQTQVLKQHRSNMFAANGIGILYAEKAKWDVAKELFTQVHEAASGSIFVHMPDVWINLAHTYFAQGHFQQAVKLYQNCLRKFFHNTDATILLYLARTHYEAERWQDCRKTLLRAIHLAPSNYLLRFNVGVSMQKFSASTLQKTKQTVDEVRATVTELQNAIRVFSLLSVASTYHSHGFDERKIETHVEYCKHLLDAAKVHRDAAEQAEQQNKQKMEVARQIALAEEARRRAEEQRKFQLERRREEDELKQVKQQEEHFQRVKEQWKTSSNTPGKRKDRSKTEDEEVGNKKRRRKGIRRKDQKTKMQYGEEEDEYKDEPEADDDYADLARYNGADNSERAPDHLLAAAGLDDSDAEDDMGHPQSAIERKRRAWSESEDDEPVKKPAAQPSPGADGLSE

SEQ ID NO: 166672 - protein, 106 aa, Zea Mays
MRKGIRRKDQKTKMQYGEEEDEYKDEPEADDDYADLARYNGADNSERAPDHLLAAAGLDDSDAEDDMGHPQSAIERKRRAWSESEDDEPVKKPAAQPSPGADGLSE

SEQ ID NO: 166673 - protein, 1192 aa, Zea Mays
MEAAASSLSTLLSTLRVNGPWTPPGTWESVIPESGAARVSHLGGRPRLQPIYELASVTDDALIHLALHALYGVKTSLDEIEELSALSSSNPADRTSNRVPNVWLRSSSTTSMGSILKSFRSTGLAVFFLCKFVHFYLFQSREMNCASREVHEHEDSGDKDTKQHQPYTLVNQAFAAAVNKVLEGYFCSLNTLLASIRLRRSVGQSGIASKISNGMSCDPTSEVTLLEVYLHTEELRRHVKSLGNICFPKFAGLTLCQEGLNTDANVEFENFPRGTDLLSYLYVHIRDADPVHYGLLKYLFIRSCEPYFNFIKSWIYRASVDDPYEEFLITQTENKGAQGISSDITDDFILFPLKGRNHVSAPCFLKEICHPLLRTGQQLQVLMNLLKYCNLAATEGDVYPSRNIIHMEGVLPWFDTPIESSMNSFTFSKSAIEALTCKRDAMYKLMMEKLQHFFSNVEVIAFDTASNFLHKRTDLVDASVSDAELFYGDSDAVLPCNMAADEKDDSSSNSQESSDKEDPLESSECSSYTSMDDTEVESSTACENLSSSMFSLYCTSTGEAKGSLVTSKLLSSQSSSVDHGINCAIPIECEKDDRLSCKHVLVHPQNTKHTAVPDGSELDYQYSQFSPFDRFMKRASCSFESMNSVGEFLYSDHKRSVGNAVYPLHSESGSTKLSNSKNYEKFVTINQPWNTSIPYNLSLNPILKNAACYHTESDMQQKSKNQSLASFDFESVMDPCEVYCARSPSLLVESVNGAATAGQPSTQPYEQPDCSTKLLQAQTRSQSSLTSSGEMSTGDSLQKNASGGAFWEISLLYNDKSKEKPAMDFSSQFDMPLDIVIDKCIIQEILLQYKYVSSFTMKLLEEGFDLCAHLLALRRYHFMEIADWADSFIASIYQKKWSFVKSEQKRSEIQGLMDLALQRSSCDSDPYKERLFIYMRESPVDSVDASPCGLDLLDDILLGYKAEWPMNIVITVDALKIYAEIFCYLLQVRFAVFSLTEVWRFLKELTQFIGRSSHSRSDVLKKLNFVMKLRHKLYHFLSTLQQYLHCHLSDISWRRFQHSLKNQVRDILDLEYVHICYITDALDICFLSDESKQVATIIKSMLQLALELRSCFQSGDTCDLSVNQLSNLQYLINFSQVDVIRTKFEDNIKDLYILHSKSSKYTELGLSRFWGYLNYNEYHSTKVSKDMDNFYF

SEQ ID NO: 166674 - protein, 1067 aa, Zea Mays
MEAAASSLSTLLSTLRVNGPWTPPGTWESVIPESGAARVSHLGGRPRLQPIYELASVTDDALIHLALHALYGVKTSLDEIEELSALSSSNPADRTSNRVPNVWLRSSSTTSMGSILKSFRSTGLAVFFLCKFVHFYLFQSREMNCASREVHEHEDSGDKDTKQHQPYTLVNQAFAAAVNKVLEGYFCSLNTLLASIRLRRSVGQSGIASKISNGMSCDPTSEVTLLEVYLHTEELRRHVKSLGNICFPKFAGLTLCQEGLNTDANVEFENFPRGTDLLSYLYVHIRDADPVHYGLLKYLFIRSCEPYFNFIKSWIYRASVDDPYEEFLITQTENKGAQGISSDITDDFILFPLKGRNHVSAPCFLKEICHPLLRTGQQLQVLMNLLKYCNLAATEGDVYPSRNIIHMEGVLPWFDTPIESSMNSFTFSKSAIEALTCKRDAMYKLMMEKLQHFFSNVEVIAFDTASNFLHKRTDLVDASVSDAELFYGDSDAVLPCNMAADEKDDSSSNSQESSDKEDPLESSECSSYTSMDDTEVESSTACENLSSSMFSLYCTSTGEAKGSLVTSKLLSSQSSSVDHGINCAIPIECEKDDRLSCKHVLVHPQNTKHTAVPDGSELDYQYSQFSPFDRFMKRASCSFESMNSVGEFLYSDHKRSVGNAVYPLHSESGSTKLSNSKNYEKFVTINQPWNTSIPYNLSLNPILKNAACYHTESDMQQKSKNQSLASFDFESVMDPCEVYCARSPSLLVESVNGAATAGQPSTQPYEQPDCSTKLLQAQTRSQSSLTSSGEMSTGDSLQKNASGGAFWEISLLYNDKSKEKPAMDFSSQFDMPLDIVIDKCIIQEILLQYKYVSSFTMKLLEEGFDLCAHLLALRRYHFMEIADWADSFIASIYQKKWSFVKSEQKRSEIQGLMDLALQRSSCDSDPYKERLFIYMRESPVDSVDASPCGLDLLDDILLGYKAEWPMNIVITVDALKIYAEIFCYLLQVRFAVFSLTEVWRFLKELTQFIGRSSHSRSDVLKKLNFVMKLRHKLYHFLSTLQQYLHCHLSDISWRRFQHSLKNQMFLI

SEQ ID NO: 166675 - protein, 1186 aa, Zea Mays
MEAAASSLSTLLSTLRVNGPWTPPGTWESVIPESGAARVSHLGGRPRLQPIYELASVTDDALIHLALHALYGVKTSLDEIEELSALSSSNPADRTSNRVPNVWLRSSSTTSMGSILKSFRSTGLAVFFLCKFVHFYLFQSREMNCASREVHEHEDSGDKDTKQHQPYTLVNQAFAAAVNKVLEGYFCSLNTLLASIRLRRSVGQSGIASKISNGMSCDPTSEVTLLEVYLHTEELRRHVKSLGNICFPKFAGLTLCQEGLNTDANVEFENFPRGTDLLSYLYVHIRDADPVHYGLLKYLFIRSCEPYFNFIKSWIYRASVDDPYEEFLITQTENKGAQGISSDITDDFILFPLKGRNHVSAPCFLKEICHPLLRTGQQLQVLMNLLKYCNLAATEGDVYPSRNIIHMEGVLPWFDTPIESSMNSFTFSKSAIEALTCKRDAMYKLMMEKLQHFFSNVEVIAFDTASNFLHKRTDLVDASVSDAELFYGDSDAVLPCNMAADEKDDSSSNSQESSDKEDPLESSECSSYTSMDDTEVESSTACENLSSSMFSLYCTSTGEAKGSLVTSKLLSSQSSSVDHGINCAIPIECEKDDRLSCKHVLVHPQNTKHTAVPDGSELDYQYSQFSPFDRFMKRASCSFESMNSVGEFLYSDHKRSVGNAVYPLHSESGSTKLSNSKNYEKFVTINQPWNTSIPYNLSLNPILKNAACYHTESDMQQKSKNQSLASFDFESVMDPCEVYCARSPSLLVESVNGAATAGQPSTQPYEQPDCSTKLLQAQTRSQSSLTSSGEMSTGDSLQKNASGGAFWEISLLYNDKSKEKPAMDFSSQFDMPLDIVIDKCIIQEILLHFTMKLLEEGFDLCAHLLALRRYHFMEIADWADSFIASIYQKKWSFVKSEQKRSEIQGLMDLALQRSSCDSDPYKERLFIYMRESPVDSVDASPCGLDLLDDILLGYKAEWPMNIVITVDALKIYAEIFCYLLQVRFAVFSLTEVWRFLKELTQFIGRSSHSRSDVLKKLNFVMKLRHKLYHFLSTLQQYLHCHLSDISWRRFQHSLKNQVRDILDLEYVHICYITDALDICFLSDESKQVATIIKSMLQLALELRSCFQSGDTCDLSVNQLSNLQYLINFSQVDVIRTKFEDNIKDLYILHSKSSKYTELGLSRFWGYLNYNEYHSTKVSKDMDNFYF

SEQ ID NO: 166676 - protein, 810 aa, Zea Mays
MNLLKYCNLAATEGDVYPSRNIIHMEGVLPWFDTPIESSMNSFTFSKSAIEALTCKRDAMYKLMMEKLQHFFSNVEVIAFDTASNFLHKRTDLVDASVSDAELFYGDSDAVLPCNMAADEKDDSSSNSQESSDKEDPLESSECSSYTSMDDTEVESSTACENLSSSMFSLYCTSTGEAKGSLVTSKLLSSQSSSVDHGINCAIPIECEKDDRLSCKHVLVHPQNTKHTAVPDGSELDYQYSQFSPFDRFMKRASCSFESMNSVGEFLYSDHKRSVGNAVYPLHSESGSTKLSNSKNYEKFVTINQPWNTSIPYNLSLNPILKNAACYHTESDMQQKSKNQSLASFDFESVMDPCEVYCARSPSLLVESVNGAATAGQPSTQPYEQPDCSTKLLQAQTRSQSSLTSSGEMSTGDSLQKNASGGAFWEISLLYNDKSKEKPAMDFSSQFDMPLDIVIDKCIIQEILLQYKYVSSFTMKLLEEGFDLCAHLLALRRYHFMEIADWADSFIASIYQKKWSFVKSEQKRSEIQGLMDLALQRSSCDSDPYKERLFIYMRESPVDSVDASPCGLDLLDDILLGYKAEWPMNIVITVDALKIYAEIFCYLLQVRFAVFSLTEVWRFLKELTQFIGRSSHSRSDVLKKLNFVMKLRHKLYHFLSTLQQYLHCHLSDISWRRFQHSLKNQVRDILDLEYVHICYITDALDICFLSDESKQVATIIKSMLQLALELRSCFQSGDTCDLSVNQLSNLQYLINFSQVDVIRTKFEDNIKDLYILHSKSSKYTELGLSRFWGYLNYNEYHSTKVSKDMDNFYF

SEQ ID NO: 166677 - protein, 847 aa, Zea Mays
MRLRSFQHCLPQIRLTGPLTVSQMCGYVPRAPHPWGVFSNLSARQDADPVHYGLLKYLFIRSCEPYFNFIKSWIYRASVDDPYEEFLITQTENKGAQGISSDITDDFILFPLKVIAFDTASNFLHKRTDLVDASVSDAELFYGDSDAVLPCNMAADEKDDSSSNSQESSDKEDPLESSECSSYTSMDDTEVESSTACENLSSSMFSLYCTSTGEAKGSLVTSKLLSSQSSSVDHGINCAIPIECEKDDRLSCKHVLVHPQNTKHTAVPDGSELDYQYSQFSPFDRFMKRASCSFESMNSVGEFLYSDHKRSVGNAVYPLHSESGSTKLSNSKNYEKFVTINQPWNTSIPYNLSLNPILKNAACYHTESDMQQKSKNQSLASFDFESVMDPCEVYCARSPSLLVESVNGAATAGQPSTQPYEQPDCSTKLLQAQTRSQSSLTSSGEMSTGDSLQKNASGGAFWEISLLYNDKSKEKPAMDFSSQFDMPLDIVIDKCIIQEILLQYKYVSSFTMKLLEEGFDLCAHLLALRRYHFMEIADWADSFIASIYQKKWSFVKSEQKRSEIQGLMDLALQRSSCDSDPYKERLFIYMRESPVDSVDASPCGLDLLDDILLGYKAEWPMNIVITVDALKIYAEIFCYLLQVRFAVFSLTEVWRFLKELTQFIGRSSHSRSDVLKKLNFVMKLRHKLYHFLSTLQQYLHCHLSDISWRRFQHSLKNQVRDILDLEYVHICYITDALDICFLSDESKQVATIIKSMLQLALELRSCFQSGDTCDLSVNQLSNLQYLINFSQVDVIRTKFEDNIKDLYILHSKSSKYTELGLSRFWGYLNYNEYHSTKVSKDMDNFYF

SEQ ID NO: 166678 - protein, 1193 aa, Zea Mays
MEAAASSLSTLLSTLRVNGPWTPPGTWESVIPESGAARVSHLGGRPRLQPIYELASVTDDALIHLALHALYGVKTSLDEIEELSALSSSNPADRTSNRVPNVWLRSSSTTSMGSILKSFRSTGLAVFFLCKFVHFYLFQSREMNCASREVHEHEDSGDKDTKQHQPYTLVNQAFAAAVNKVLEGYFCSLNTLLASIRLRRSVGQSGIASKISNGMSCDPTSEVTLLEVYLHTEELRRHVKSLGNICFPKFAGLTLCQEGLNTDANVEFENFPRGTDLLSYLYVHIRDADPVHYGLLKYLFIRSCEPYFNFIKSWIYRASVDDPYEEFLITQTENKGAQGISSDITDDFILFPLKQGRNHVSAPCFLKEICHPLLRTGQQLQVLMNLLKYCNLAATEGDVYPSRNIIHMEGVLPWFDTPIESSMNSFTFSKSAIEALTCKRDAMYKLMMEKLQHFFSNVEVIAFDTASNFLHKRTDLVDASVSDAELFYGDSDAVLPCNMAADEKDDSSSNSQESSDKEDPLESSECSSYTSMDDTEVESSTACENLSSSMFSLYCTSTGEAKGSLVTSKLLSSQSSSVDHGINCAIPIECEKDDRLSCKHVLVHPQNTKHTAVPDGSELDYQYSQFSPFDRFMKRASCSFESMNSVGEFLYSDHKRSVGNAVYPLHSESGSTKLSNSKNYEKFVTINQPWNTSIPYNLSLNPILKNAACYHTESDMQQKSKNQSLASFDFESVMDPCEVYCARSPSLLVESVNGAATAGQPSTQPYEQPDCSTKLLQAQTRSQSSLTSSGEMSTGDSLQKNASGGAFWEISLLYNDKSKEKPAMDFSSQFDMPLDIVIDKCIIQEILLQYKYVSSFTMKLLEEGFDLCAHLLALRRYHFMEIADWADSFIASIYQKKWSFVKSEQKRSEIQGLMDLALQRSSCDSDPYKERLFIYMRESPVDSVDASPCGLDLLDDILLGYKAEWPMNIVITVDALKIYAEIFCYLLQVRFAVFSLTEVWRFLKELTQFIGRSSHSRSDVLKKLNFVMKLRHKLYHFLSTLQQYLHCHLSDISWRRFQHSLKNQVRDILDLEYVHICYITDALDICFLSDESKQVATIIKSMLQLALELRSCFQSGDTCDLSVNQLSNLQYLINFSQVDVIRTKFEDNIKDLYILHSKSSKYTELGLSRFWGYLNYNEYHSTKVSKDMDNFYF

SEQ ID NO: 166679 - protein, 685 aa, Zea Mays
MNLLKYCNLAATEGDVYPSRNIIHMEGVLPWFDTPIESSMNSFTFSKSAIEALTCKRDAMYKLMMEKLQHFFSNVEVIAFDTASNFLHKRTDLVDASVSDAELFYGDSDAVLPCNMAADEKDDSSSNSQESSDKEDPLESSECSSYTSMDDTEVESSTACENLSSSMFSLYCTSTGEAKGSLVTSKLLSSQSSSVDHGINCAIPIECEKDDRLSCKHVLVHPQNTKHTAVPDGSELDYQYSQFSPFDRFMKRASCSFESMNSVGEFLYSDHKRSVGNAVYPLHSESGSTKLSNSKNYEKFVTINQPWNTSIPYNLSLNPILKNAACYHTESDMQQKSKNQSLASFDFESVMDPCEVYCARSPSLLVESVNGAATAGQPSTQPYEQPDCSTKLLQAQTRSQSSLTSSGEMSTGDSLQKNASGGAFWEISLLYNDKSKEKPAMDFSSQFDMPLDIVIDKCIIQEILLQYKYVSSFTMKLLEEGFDLCAHLLALRRYHFMEIADWADSFIASIYQKKWSFVKSEQKRSEIQGLMDLALQRSSCDSDPYKERLFIYMRESPVDSVDASPCGLDLLDDILLGYKAEWPMNIVITVDALKIYAEIFCYLLQVRFAVFSLTEVWRFLKELTQFIGRSSHSRSDVLKKLNFVMKLRHKLYHFLSTLQQYLHCHLSDISWRRFQHSLKNQMFLI

SEQ ID NO: 166680 - protein, 823 aa, Zea Mays
MGELVTLYRQSHLGGRLPAYDGRKSLYTAGPLPFTSMTFEITLQDEEDSVGGGQGGQRRERVFRVVIKFAARADLHHLAMFLAGRQADAPQEALQVLDIVLRELPTARYSPVGRSFYSPNLGRRQQLGEGLESWRGFYQSIRPTQMGLSLNIDMSSTAFIEPLPVIDFVAQLLNRDISVRPLSDSDRVKIKKALRGVKVEVTHRGNMRRKYRISGLTSQATRELSFPVDDRGTVKTVVQYFMETYGFSIQHTTLPCLQVGNQQRPNYLPMEVCKIVEGQRYSKRLNEKQITALLKVTCQRPQERELDILQTVHHNAYYEDPYAQEFGIRIDERLAAVEARVLPPPRLKYHDSGREKDVLPRVGQWNMMNKKMVNGGRVSNWACINFSRNVQDSAARGFCHELAIMCQISGMDFSLEPVLPPVTARPEHVERALKARYQDAMNILRPQGRELDLLIVILPDINGSLYGDLKRICETDLGLVSQCCLTKHVFKMSKQYLANVALKINVKVGGRNTVLVDALTRRIPLVSDRPTIIFGADVTHPHPGEDSSPSIAAVVASQDWPEVTKYAGLVSAQAHRQELIQDLFKVWQDPQRRTVTGGMIKELLISFKRATGQKPQRIIFYRDGVSEGQFYQVLLYELDAIRKACASLEPNYQPPVTFVVVQKRHHTRLFANNHNDQRTVDRSGNILPGTVVDSKICHPTEFDFYLCSHAGIQGTSRPAHYHVLWDENKFTADELQTLTNNLCYTYARCTRSVSIVPPAYYAHLAAFRARFYMEPDTSDSGSMASGARGPPPGAARSMRGAGSVAVRPLPALKENVKRVMFYC

SEQ ID NO: 166681 - protein, 52 aa, Zea Mays
MSLMHSIAEVVPNRKGSDHSQDIQTTVSEIQRARATKWPSTEPINPALPTSN

SEQ ID NO: 166682 - protein, 1027 aa, Zea Mays
MFVKKLVERASKKQHIGSISSLRPENVSPRLAFHYGVPADAALLAYDPVLHVLAVATRNGQIKLFGRDNTQALLQSPSPLPSRFLQFAEGQGVLLNVNTQNQIEVWDIDAKKLCYLHPAEKAITAFSVLQKSFYIYVGDSSGSVSPLKLDLAQRCLADLPYWIPFTESYGSTTSAGNDVEVVFVSPQPLSESNRVLIIFRDGVMSLWDIKASKAVSISGKTTQQQSQKEAKNVTSACWVCAKGSKIAIGYDNGDLYIWAIPEVTSTQNSSSMGGQNLPIQRLNLGYKLDKLPIVSLQWIPSDGKAGRLYINGFNDHGHLFQVLILNEESESRIVKMVLPIAESCQGMELVTGLSDPNKHRQSALALLLKSGHICLYDDSEIERYLLHSQSRSPPTLPNCSYVKLPYGDSGISVAKFYTSNPAALASLDEDYFSSATKYPCLFSMKGKGQTLTSFTNIHKTRNLYITGHLDGTISFWDASCPHLLQIFMIKQQNKDDTSTGNPITSLQFDMSSSILLSGERSGMVHIITFKKDSSDNIFSFLNAKQGDNYDVRSIKLKGAVTTMSSISKSKHFAVGTEKGIVSVINVEDATILYQEQFECRLPGGIASLQFEIYSHNGYDKDILIIAMEDSSIFVIEEETGKLLNPNPVQTDKPSKAILLQMLELSPIDTPAVSDNQDTVSKESLLLLCTENAIRLFSLGHAIQGTKKIINKKKLSSCCCFASLIHSSSNDIGLILVFSNGKLEIRSLPDLSLLKDAFLRGFVYSRNLNSSSSITCSSDGEAILINGEETYFFSTLCQDEIYRHVDSISTVYRKENSTREDSSFVVKSPKEKKKGLFGMIMKDNKGSKSKESDAIGSEQCIATTSEELASIFSSTNFAPPSEGRNSSLRDDENAELDIDDIDIDDNPQKPKGPHFPGLSKDKISKGLQTLKGKLKPKTEEKISSGNKKTEDETSVSQVDQIKMKYGYANTTNDDSTSVTKMIGNKLQENMKKLEGINLRAADMASGAQSFSTMAKELLRTTKNEKGTS

SEQ ID NO: 166683 - protein, 583 aa, Zea Mays
MFVKKLVERASKKQHIGSISSLRPENVSPRLAFHYGVPADAALLAYDPVLHVLAVATRNGQIKLFGRDNTQALLQSPSPLPSRFLQFAEGQGVLLNVNTQNQIEVWDIDAKKLCYLHPAEKAITAFSVLQKSFYIYVGDSSGSVSPLKLDLAQRCLADLPYWIPFTESYGSTTSAGNDVEVVFVSPQPLSESNRVLIIFRDGVMSLWDIKASKAVSISGKTTQQQSQKEAKNVTSACWVCAKGSKIAIGYDNGDLYIWAIPEVTSTQNSSSMGGQNLPIQRLNLGYKLDKLPIVSLQWIPSDGKAGRLYINGFNDHGHLFQVLILNEESESRIVKMVLPIAESCQGMELVTGLSDPNKHRQSALALLLKSGHICLYDDSEIERYLLHSQSRSPPTLPNCSYVKLPYGDSGISVAKFYTSNPAALASLDEDYFSSATKYPCLFSMKGKGQTLTSFTNIHKTRNLYITGHLDGTISFWDASCPHLLQIFMIKQQNKDDTSTGNPITSLQFDMSSSILLSGERSGMVHIITFKKDSSDNIFSFLNAKQGDNYDVRSIKLKGAVTTMSSISKSKHFAVGTEKGILST

SEQ ID NO: 166684 - protein, 824 aa, Zea Mays
MSLWDIKASKAVSISGKTTQQQSQKEAKNVTSACWVCAKGSKIAIGYDNGDLYIWAIPEVTSTQNSSSMGGQNLPIQRLNLGYKLDKLPIVSLQWIPSDGKAGRLYINGFNDHGHLFQVLILNEESESRIVKMVLPIAESCQGMELVTGLSDPNKHRQSALALLLKSGHICLYDDSEIERYLLHSQSRSPPTLPNCSYVKLPYGDSGISVAKFYTSNPAALASLDEDYFSSATKYPCLFSMKGKGQTLTSFTNIHKTRNLYITGHLDGTISFWDASCPHLLQIFMIKQQNKDDTSTGNPITSLQFDMSSSILLSGERSGMVHIITFKKDSSDNIFSFLNAKQGDNYDVRSIKLKGAVTTMSSISKSKHFAVGTEKGIVSVINVEDATILYQEQFECRLPGGIASLQFEIYSHNGYDKDILIIAMEDSSIFVIEEETGKLLNPNPVQTDKPSKAILLQMLELSPIDTPAVSDNQDTVSKESLLLLCTENAIRLFSLGHAIQGTKKIINKKKLSSCCCFASLIHSSSNDIGLILVFSNGKLEIRSLPDLSLLKDAFLRGFVYSRNLNSSSSITCSSDGEAILINGEETYFFSTLCQDEIYRHVDSISTVYRKENSTREDSSFVVKSPKEKKKGLFGMIMKDNKGSKSKESDAIGSEQCIATTSEELASIFSSTNFAPPSEGRNSSLRDDENAELDIDDIDIDDNPQKPKGPHFPGLSKDKISKGLQTLKGKLKPKTEEKISSGNKKTEDETSVSQVDQIKMKYGYANTTNDDSTSVTKMIGNKLQENMKKLEGINLRAADMASGAQSFSTMAKELLRTTKNEKGTS

SEQ ID NO: 166685 - protein, 452 aa, Zea Mays
MVTNKVSVINVEDATILYQEQFECRLPGGIASLQFEIYSHNGYDKDILIIAMEDSSIFVIEEETGKLLNPNPVQTDKPSKAILLQMLELSPIDTPAVSDNQDTVSKESLLLLCTENAIRLFSLGHAIQGTKKIINKKKLSSCCCFASLIHSSSNDIGLILVFSNGKLEIRSLPDLSLLKDAFLRGFVYSRNLNSSSSITCSSDGEAILINGEETYFFSTLCQDEIYRHVDSISTVYRKENSTREDSSFVVKSPKEKKKGLFGMIMKDNKGSKSKESDAIGSEQCIATTSEELASIFSSTNFAPPSEGRNSSLRDDENAELDIDDIDIDDNPQKPKGPHFPGLSKDKISKGLQTLKGKLKPKTEEKISSGNKKTEDETSVSQVDQIKMKYGYANTTNDDSTSVTKMIGNKLQENMKKLEGINLRAADMASGAQSFSTMAKELLRTTKNEKGTS

SEQ ID NO: 166686 - protein, 54 aa, Zea Mays
MMGEICSGRHLQYIIDPPPSLSNEGQEDLLEGYDEVASHVFLRVSAHDVVHDAR

SEQ ID NO: 166687 - protein, 77 aa, Zea Mays
MHRSSHKICSCLGKNHGYRLLDILDCVCEAMELGVHRGVAMALAITQHHFSCNLSDDISLPARSTMADLDLLAGEFY

SEQ ID NO: 166688 - protein, 220 aa, Zea Mays
MRLNVGLLVPLMAQYSAPTWATLVAGFFMLLALSLSTYLIFEHLSAYNNPEEQKFVLGVILMVPCYAIESCISLINPSTSVYCGILRDGYEAFAMYCFGRYITACLGGEDKTIAFLKREGGSGSGQSLLHHTSEKGIIHHHFPVNYVLKPWRLGTRFYLIIKFGIFQYVIIKTLTATLSLLLESFGVYCDGEFNLRCGTDGHCFSCSPLCVPSQALCTLN

SEQ ID NO: 166689 - protein, 476 aa, Zea Mays
MDPFRNNDVRPPLRELSNNTLEGIPTNKMPYVTSQQGFKMGKNNGLGGRANAMQHECPDMSISDGSIIDCTIPCDTTPGGRDDARQRKRERERVRYATMSAEKKNELKKRRESRKKGNVMHHEYSKVCNIPANKDNNNHQNNEIEDVDDDSYQLHKNNSFEVHRRLGSEKLSTHLSDECPQVFVSDRSIKNPTVHCDNTLVALGQTSHQHDSNQSSEVLDPRECKRIRERTRFATQTKEQRALRNRESCNKMARKNYKRRQREIKLQDLIGIEDPKFTPELVWSSTDAEAPHGSLCSSEGMSIPELSPTPFVPNPSQTEDVEKDSMTESPRRQRHKRHVSSGQRQTLVSRQNQKFHLAIGTNFATATRDRVMENDVDNEIDHQTVSEIDNNESTGLCPFPHTESNNMTEGADIGMQHQAAPTVTTNDDVEDVLFTEDDDEAVLFEDDEDEGYLFAGQGSPFNQCSWKWSKLPFWTF

SEQ ID NO: 166690 - protein, 368 aa, Zea Mays
MRIPRKCTSKCYESRVLPALLKKHVVQLTKFDYRLSNKLETDLQKLRCRVNYHALRFTDPILQMGETLVQRMRGKSGRFIALHLRFEPDMLAFSGCYYGGGDIERRELGEIRKRWKTLHASNPDRERRHGKCPLTPEEVGLMLRALGFGKDVHLYVASGDVYGGEETLAPLKALFPNFHSKETLANKELAPFLPYSSRMAALDFIVCDRSDVFVTNNNGNMARMLAGRRRYFGHRRTIRPNTKKLYSLFLNRTSMSWDTFASKVQTFQKGFMGEPNEIKLGRGEFHEHPVDCICAKSKGKSVQSRHHLVKGAGEAVENHSIDGELDWKDLDYGEHTPLGRGDSSNETESDDVRIGGSDIPELEDMMSD

SEQ ID NO: 166691 - protein, 600 aa, Zea Mays
MGSRRRRHHHHGRWVVPSVAPAAAAFAAAGLLLLVVAFHCFLSLPLSDASGGSRVFRRPNPPFLLNKPADVRRNVIGAVDFAVPSGGSKLGEELWESKAAGNFFGCSNATKQFADAEAVTKSDRYLMIATSGGLNQQRTGIIDAVVAARILNATLVIPKLDEESFWKDASDFAEIFDVDSFISSLSNDVKIIRQVPDRNGKPPSPYKMRIPRKCTSKCYESRVLPALLKKHVVQLTKFDYRLSNKLETDLQKLRCRVNYHALRFTDPILQMGETLVQRMRGKSGRFIALHLRFEPDMLAFSGCYYGGGDIERRELGEIRKRWKTLHASNPDRERRHGKCPLTPEEVGLMLRALGFGKDVHLYVASGDVYGGEETLAPLKALFPNFHSKETLANKELAPFLPYSSRMAALDFIVCDRSDVFVTNNNGNMARMLAGRRRYFGHRRTIRPNTKKLYSLFLNRTSMSWDTFASKVQTFQKGFMGEPNEIKLGRGEFHEHPVDCICAKSKGKSVQSRHHLVKGAGEAVENHSIDGELDWKDLDYGEHTPLGRGDSSNETESDDVRIGGSDIPELEDMIHIETSFCQLDKQERPGRARASYRKDSL

SEQ ID NO: 166692 - protein, 496 aa, Zea Mays
MEAEARNILERAAESSFPPLHAVHHLLSVGVCVRCILRLLGAYSSACSYACLTASVLHSFLEEHDESIKGGSCPCLSMNDAYCSVCLGVLLPTFHRDEGLETPNGISHIDNMSSVISQAVHGESYQVDEFSLEISLPPVIAANERAVRLYMKQKYGNENWFKDKMFAQQTMSVKEALRLLIAPSLEKLMNAKHGNNSFRIRLTYTHGDASQKLHSLLPNEHSRKRKPDSRKGGDASNEAHKRNSADGNPIQTSESDSFIYKSLEGIQDQEFCNAFQLPPEKVFKPCHLLISCLRSPTYLGGRYLKLSRNVSQSCWIIDDERMGEASVEEIIGENVRAICRGDSCKFHAAGREDIDVIVRNLKLVDNEIWTMMREGEAEKQKQYTALIWTSRDLTDDDLHNISIMKEMEIVQKTPIRVLHRRSPLERKRIIHWMEIEKITGSSNYYLLHLCTQAGTYIKEFVHGDLGRTHPSIGAIIGCRAEILQLDVTDVKMDFLP

SEQ ID NO: 166693 - protein, 352 aa, Zea Mays
MEAEARNILERAAESSFPPLHAVHHLLSVGVCVRCILRLLGAYSSACSYACLTASVLHSFLEEHDESIKGGSCPCLSMNDAYCSVCLGVLLPTFHRDEGLETPNGISHIDNMSSVISQAVHGESYQVDEFSLEISLPPVIAANERAVRLYMKQKYGNENWFKDKMFAQQTMSVKEALRLLIAPSLEKLMNAKHGNNSFRIRLTYTHGDASQKLHSLLPNEHSRKRKPDSRKGGDASNEAHKRNSADGNPIQTSESDSFIYKSLEGIQDQEFCNAFQLPPEKVFKPCHLLISCLRSPTYLGGRYLKLSRNVSQSCWIIDDERMGEASVEEIIGENVRAICRGTDAWIWSSISS

SEQ ID NO: 166694 - protein, 358 aa, Zea Mays
MEAEARNILERAAESSFPPLHAVHHLLSVGVCVRCILRLLGAYSSACSYACLTASVLHSFLEEHDESIKGGSCPCLSMNDAYCSVCLGVLLPTFHRDEGLETPNGISHIDNMSSVISQAVHGESYQVDEFSLEISLPPVIAANERAVRLYMKQKYGNENWFKDKMFAQQTMSVKEALRLLIAPSLEKLMNAKHGNNSFRIRLTYTHGDASQKLHSLLPNEHSRKRKPDSRKGGDASNEAHKRNSADGNPIQTSESDSFIYKSLEGIQDQEFCNAFQLPPEKVFKPCHLLISCLRSPTYLGGRYLKLSRNVSQSCWIIDDERMGEASVEEIIGENVRAICRGDSCKFHAAGREDIDVML

SEQ ID NO: 166695 - protein, 501 aa, Zea Mays
MEAEARNILERAAESSFPPLHAVHHLLSVGVCVRCILRLLGAYSSACSYACLTASVLHSFLEEHDESIKGGSCPCLSMNDAYCSVCLGVLLPTFHRDEGLETPNGISHIDNMSSVISQAVHGESYQVDEFSLEISLPPVIAANERAVRLYMKQKYGNENWFKDKMFAQQTMSVKEALRLLIAPSLEKLMNAKHGNNSFRIRLTYTHGDASQKLHSLLPNEHSRKRKPDSRKGGDASNEAHKRNSADGNPIQTSESDSFIYKSLEGIQDQEFCNAFQLPPEKVFKPCHLLISCLRSPTYLGGRYLKLSRNVSQSCWIIDDERMGEASVEEIIGENVRAICRGDSCKFHAAGREDIDVRMLGSGRPFLVEVLNVRSIPSETEVQQIEERINNSEKKYVIVRNLKLVDNEIWTMMREGEAEKQKQYTALIWTSRDLTDDDLHNISIMKEMEIVQKTPIRVLHRRSPLERKRIIHWMEIEKITGSSNYYLLHLCTQHRSHNRVQS

SEQ ID NO: 166696 - protein, 504 aa, Zea Mays
MEAEARNILERAAESSFPPLHAVHHLLSVGVCVRCILRLLGAYSSACSYACLTASVLHSFLEEHDESIKGGSCPCLSMNDAYCSVCLGVLLPTFHRDEGLETPNGISHIDNMSSVISQAVHGESYQVDEFSLEISLPPVIAANERAVRLYMKQKYGNENWFKDKMFAQQTMSVKEALRLLIAPSLEKLMNAKHGNNSFRIRLTYTHGDASQKLHSLLPNEHSRKRKPDSRKGGDASNEAHKRNSADGNPIQTSESDSFIYKSLEGIQDQEFCNAFQLPPEKVFKPCHLLISCLRSPTYLGGRYLKLSRNVSQSCWIIDDERMGEASVEEIIGENVRAICRGDSCKFHAAGREDIDVRMLGSGRPFLVEVLNVRSIPSETEVQQIEERINNSEKKYVIVRNLKLVDNEIWTMMREGEAEKQKQYTALIWTSRDLTDDDLHNISIMKEMEIVQKTPIRVLHRRSPLERKRIIHWMEIEKITGSSNYYLLHLCTQILDMFRRYQGDA

SEQ ID NO: 166697 - protein, 471 aa, Zea Mays
MEAEARNILERAAESSFPPLHAVHHLLSVGVCVRCILRLLGAYSSACSYACLTASVLHSFLEEHDESIKGGSCPCLSMNDAYCSVCLGVLLPTFHRDEGLETPNGISHIDNMSSVISQAVHGESYQVDEFSLEISLPPVIAANERAVRLYMKQKYGNENWFKDKMFAQQTMSVKEALRLLIAPSLEKLMNAKHGNNSFRIRLTYTHGDASQKLHSLLPNEHSRKRKPDSRKGGDASNEAHKRNSADGNPIQTSESDSFIYKSLEGIQDQEFCNAFQLPPEKVFKPCHLLISCLRSPTYLGGRYLKLSRNVSQSCWIIDDERMGEASVEEIIGENVRAICRGDSCKFHAAGREDIDKQYTALIWTSRDLTDDDLHNISIMKEMEIVQKTPIRVLHRRSPLERKRIIHWMEIEKITGSSNYYLLHLCTQAGTYIKEFVHGDLGRTHPSIGAIIGCRAEILQLDVTDVKMDFLP

SEQ ID NO: 166698 - protein, 309 aa, Zea Mays
MEAEARNILERAAESSFPPLHAVHHLLSVGVCVRCILRLLGAYSSACSYACLTASVLHSFLEEHDESIKGGSCPCLSMNDAYCSVCLGVLLPTFHRDEGLETPNGISHIDNMSSVISQAVHGESYQVDEFSLEISLPPVIAANERAVRLYMKQKYGNENWFKDKMFAQQTMSVKEALRLLIAPSLEKLMNAKHGNNSFRIRLTYTHGDASQKLHSLLPNEHSRKRKPDSRKGGDASNEAHKRNSADGNPIQTSESDSFIYKSLEGIQDQEFCNAFQLPPEKVFKPCHLLISCLRSPTYLGGRYLKVLVP

SEQ ID NO: 166699 - protein, 124 aa, Zea Mays
MMMRVIDESPSHRWTGQTALRNRSSVDRHGGDTRKPLLDCLIVELRSLRTADGGPPGGERIAGATEKNDSSLDAAVRVARDKHGDGSLVRSARHNPAAVPTTNRARKRKRRGRQSKQKGEGKAV

SEQ ID NO: 166700 - protein, 644 aa, Zea Mays
MPTWWGKSSSKDVKKTTKENLIDTFHRLISPNEQKGSTKSKRNCRRGNNTAAEKVCKSTTVSRPTSPSKEVSRCQSFSADRLHAQPLPIPGVRPRVTRAVADVNVSKPILEKRGKPPLLLPLPKPNPLHRGPGSSDIPSEIVVASVSSNCSADSEDRADSQLQSPVGNDTNNVKKVSSKNKSSNVCKDHSGAITTKTTKEILKPAANAFLSNHTQSAPPRGISADNNQLNLQNPQPVVFESAPNSLMSSPSRSPRPICPDHILTSAFWAVKPHADVTFLGSGQCSSPGSGQTSGHNSVGGDMLSQLFLQPTRGSPECSPVPSPRMTSPGPSSRVHSGSVSPLHPRSGGLAPESPTSRHDGGKKKQTHKLPLPPLSIAHSPFFPNNSTPSSPISVPRSPGRTENPSSPASRWKKGKLIGRGTSGHVYVGFNSDSGEMCAMKEVTLFLDDPKSKESAKQLGQEISLLSRLRHPNIVQYYGSEMVEDKLYIYLEYVSGGSIHKLLQEYGQLGEPAIRSYTLQILSGLAYLHAKNTVHRDIKGANILVNPSGRVKLADFGMAKHINGQHCPFSFKGSPYWMAPEVIKNSNGCNLVVDIWSLGCTVLEMATSKPPWSQYEGGKEAAQDQDAAHTSVLSSQVQGVRVLGS

SEQ ID NO: 166701 - protein, 766 aa, Zea Mays
MPTWWGKSSSKDVKKTTKENLIDTFHRLISPNEQKGSTKSKRNCRRGNNTAAEKVCKSTTVSRPTSPSKEVSRCQSFSADRLHAQPLPIPGVRPRVTRAVADVNVSKPILEKRGKPPLLLPLPKPNPLHRGPGSSDIPSEIVVASVSSNCSADSEDRADSQLQSPVGNDTNNVKKVSSKNKSSNVCKDHSGAITTKTTKEILKPAANAFLSNHTQSAPPRGISADNNQLNLQNPQPVVFESAPNSLMSSPSRSPRPICPDHILTSAFWAVKPHADVTFLGSGQCSSPGSGQTSGHNSVGGDMLSQLFLQPTRGSPECSPVPSPRMTSPGPSSRVHSGSVSPLHPRSGGLAPESPTSRHDGGKKKQTHKLPLPPLSIAHSPFFPNNSTPSSPISVPRSPGRTENPSSPASRWKKGKLIGRGTSGHVYVGFNSDSGEMCAMKEVTLFLDDPKSKESAKQLGQEISLLSRLRHPNIVQYYGSEMVEDKLYIYLEYVSGGSIHKLLQEYGQLGEPAIRSYTLQILSGLAYLHAKNTVHRDIKGANILVNPSGRVKLADFGMAKHINGQHCPFSFKGSPYWMAPEVIKNSNGCNLVVDIWSLGCTVLEMATSKPPWSQYEGIAAVFKIGNSKELPPIPDYLSEHCRDFIRKCLQRDPSQRPTAVELLQHPFIQNGISLEKSVTPNHLEHLAAISCRTKPKVAVQTRNASLGFEGQTIYQRRGVKLSSKHSFSMSEPPAKGEVPPTHKWQNVTLSYFEPQNYIRHFHTPIWW

SEQ ID NO: 166702 - protein, 641 aa, Zea Mays
MSSPSRSPRPICPDHILTSAFWAVKPHADVTFLGSGQCSSPGSGQTSGHNSVGGDMLSQLFLQPTRGSPECSPVPSPRMTSPGPSSRVHSGSVSPLHPRSGGLAPESPTSRHDGGKKKQTHKLPLPPLSIAHSPFFPNNSTPSSPISVPRSPGRTENPSSPASRWKKGKLIGRGTSGHVYVGFNSDSGEMCAMKEVTLFLDDPKSKESAKQLGQEISLLSRLRHPNIVQYYGSEMVEDKLYIYLEYVSGGSIHKLLQEYGQLGEPAIRSYTLQILSGLAYLHAKNTVHRDIKGANILVNPSGRVKLADFGMAKHINGQHCPFSFKGSPYWMAPEVIKNSNGCNLVVDIWSLGCTVLEMATSKPPWSQYEGIAAVFKIGNSKELPPIPDYLSEHCRDFIRKCLQRDPSQRPTAVELLQHPFIQNGISLEKSVTPNHLEHLAAISCRTKPKVAVQTRNASLGFEGQTIYQRRGVKLSSKHSDIHIRSNTSCPVSPCRSPLLKARSPQHTSGKMSPSPISSPRTTSGTSTPLSGGNGAIPFNHLRYATYSSEGFGTTSRGLDDHFSNCHKDLNLGHFAEAHQVSQGPRERVVSEADILSPQFRKKLGNVFDLRERLSPSEHFTRRALVDHVELNPSNPGLKRGK

SEQ ID NO: 166703 - protein, 627 aa, Zea Mays
MPTWWGKSSSKDVKKTTKENLIDTFHRLISPNEQKGSTKSKRNCRRGNNTAAEKVCKSTTVSRPTSPSKEVSRCQSFSADRLHAQPLPIPGVRPRVTRAVADVNVSKPILEKRGKPPLLLPLPKPNPLHRGPGSSDIPSEIVVASVSSNCSADSEDRADSQLQSPVGNDTNNVKKVSSKNKSSNVCKDHSGAITTKTTKEILKPAANAFLSNHTQSAPPRGISADNNQLNLQNPQPVVFESAPNSLMSSPSRSPRPICPDHILTSAFWAVKPHADVTFLGSGQCSSPGSGQTSGHNSVGGDMLSQLFLQPTRGSPECSPVPSPRMTSPGPSSRVHSGSVSPLHPRSGGLAPESPTSRHDGGKKKQTHKLPLPPLSIAHSPFFPNNSTPSSPISVPRSPGRTENPSSPASRWKKGKLIGRGTSGHVYVGFNSDSGEMCAMKEVTLFLDDPKSKESAKQLGQEISLLSRLRHPNIVQYYGSEMVEDKLYIYLEYVSGGSIHKLLQEYGQLGEPAIRSYTLQILSGLAYLHAKNTVHRDIKGANILVNPSGRVKLADFGMAKHINGQHCPFSFKGSPYWMAPEVIKNSNGCNLVVDIWSLGCTVLEMATSKPPWSQYEGVTCIWKTSRMD

SEQ ID NO: 166704 - protein, 985 aa, Zea Mays
MPFVPPAILLPAVFNVQGCKRNRQGEAQWGKSHRFARPSPLRSLQRHRRRRLRTTTPRDAGAVSLLARRPPPPPRRLDTIAISSCLDTPVPTNSLTPNMPTWWGKSSSKDVKKTTKENLIDTFHRLISPNEQKGSTKSKRNCRRGNNTAAEKVCKSTTVSRPTSPSKEVSRCQSFSADRLHAQPLPIPGVRPRVTRAVADVNVSKPILEKRGKPPLLLPLPKPNPLHRGPGSSDIPSEIVVASVSSNCSADSEDRADSQLQSPVGNDTNNVKKVSSKNKSSNVCKDHSGAITTKTTKEILKPAANAFLSNHTQSAPPRGISADNNQLNLQNPQPVVFESAPNSLMSSPSRSPRPICPDHILTSAFWAVKPHADVTFLGSGQCSSPGSGQTSGHNSVGGDMLSQLFLQPTRGSPECSPVPSPRMTSPGPSSRVHSGSVSPLHPRSGGLAPESPTSRHDGGKKKQTHKLPLPPLSIAHSPFFPNNSTPSSPISVPRSPGRTENPSSPASRWKKGKLIGRGTSGHVYVGFNSDSGEMCAMKEVTLFLDDPKSKESAKQLGQEISLLSRLRHPNIVQYYGSEMVEDKLYIYLEYVSGGSIHKLLQEYGQLGEPAIRSYTLQILSGLAYLHAKNTVHRDIKGANILVNPSGRVKLADFGMAKHINGQHCPFSFKGSPYWMAPEVIKNSNGCNLVVDIWSLGCTVLEMATSKPPWSQYEGIAAVFKIGNSKELPPIPDYLSEHCRDFIRKCLQRDPSQRPTAVELLQHPFIQNGISLEKSVTPNHLEHLAAISCRTKPKVAVQTRNASLGFEGQTIYQRRGVKLSSKHSDIHIRSNTSCPVSPCRSPLLKARSPQHTSGKMSPSPISSPRTTSGTSTPLSGGNGAIPFNHLRYATYSSEGFGTTSRGLDDHFSNCHKDLNLGHFAEAHQVSQGPRERVVSEADILSPQFRKKLGNVFDLRERLSPSEHFTRRALVDHVELNPSNPGLKRGK

SEQ ID NO: 166705 - protein, 320 aa, Zea Mays
MYLMSCSSDGVFMNGKLVPYGSIELNPAAAVLNYGQGLLEGLRSHRKEDGSILLFRPHENARRMEIGADRLCMPAPSVEQFLEAVKLTVLANKHWVPPFGKGSLYIRPQLIGSGAMLGVAPAPQYTFIVFVCPVGHYFKGGLAPISLLTEEEYHRAAPGGTGDIKTIGNYASVVSAQRRSKEKGHSDVLYLDPLHNKFVEEVSSCNIFMVKDNIISTPLLTGTILPGITRRSVIEISQNLGFQVEERLITIDELLGADEVFCTGTAVVLSPVGSITYRGRRVEYGKNQEAGVVSQQLYAALTAIQKGLTEDSMGWTLQLT

SEQ ID NO: 166706 - protein, 285 aa, Zea Mays
MGLLEGLRSHRKEDGSILLFRPHENARRMEIGADRLCMPAPSVEQFLEAVKLTVLANKHWVPPFGKGSLYIRPQLIGSGAMLGVAPAPQYTFIVFVCPVGHYFKGGLAPISLLTEEEYHRAAPGGTGDIKTIGNYASVVSAQRRSKEKGHSDVLYLDPLHNKFVEEVSSCNIFMVKDNIISTPLLTGTILPGITRRSVIEISQNLGFQVEERLITIDELLGADEVFCTGTAVVLSPVGSITYRGRRVEYGKNQEAGVVSQQLYAALTAIQKGLTEDSMGWTLQLT

SEQ ID NO: 166707 - protein, 73 aa, Zea Mays
MVKDNIISTPLLTGTILPGITRRSVIEISQNLGFQVEERLITIDELLGADEVFCTGTAVVLSPVGSITYRGRR

SEQ ID NO: 166708 - protein, 816 aa, Zea Mays
MIKRDKKGLDDIHGNISANNGKDHRVELIYVGRSSIRTLMEEEMASSTQPLKQAQSNVAGICSEDIDLNLAGSLMEIYRSHTEGQETRRSIESGRSSISTDEEKNTDPPAHHYQIPSSIQRALEDVAEAVIRHQSANKKYINSGDETRSREFVDALQLLSSNKELFVMLMQDPSSRLLECLQNLYMSLGSTRLDSEEYDEGTELQGTTDSLEQSATSPSKVKRRHNSFLKEDGLVTRKPPKLNDGSRGLSRIVILKPSPARGHSSLISGSATSSPLSNHIDWQVQEGSDKHDCHFSLRELKRRLRIAISNNQKDHQLNSTSSDIHEAEADSGKLLPVTSMSETESLASTDSSDRAKEPSIVDEKIVPEDSESGMRNDVAHGVGVSSFSYEKAKMYIIERLNDQGEESCQIVQKSESFERLISLPENGTFSPIDFPQEEKISIAHEATKPLNLHTVEQEDGSASPYSTMQYEETESADTSNLGTETLIEPTIDHGSYSQNEGAISQELVREGVKIMLDIMENSSLCAETGTSQEGVGVKNPDECSLEEPQSMNLLPEPALYSPDDFVNEQENHSPSEIVELVKPSVLTFPYSPENTNDKEEKLSPQSVLDPIAEVTSPRHKTPKQDEFSMPTSRVLFKEVDAPSASPTLWNGPQVAILDDRATRVSFIKAVLEASGLLSEENSQIWYTEEPLLDVSVLAEVGNSYCLTDDAVLLFDYVEEVLLEIRDKFFGSDPWVNSLKHNVRPAPVGRRLVREVAKGIDSLVGKEFPHTLEQVMMKDLDSGSWLDLGGDTGSVVVELWDGLLDDLLEELVFDLWL

SEQ ID NO: 166709 - protein, 497 aa, Zea Mays
METYLLMSSIRTLMEEEMASSTQPLKQAQSNVAGICSEDIDLNLAGSLMEIYRSHTEGQETRRSIESGRSSISTDEEKNTDPPAHHYQIPSSIQRALEDVAEAVIRHQSANKKYINSGDETRSREFVDALQLLSSNKELFVMLMQDPSSRLLECLQNLYMSLGSTRLDSEEYDEGTELQGTTDSLEQSATSPSKVKRRHNSFLKEDGLVTRKPPKLNDGSRGLSRIVILKPSPARGHSSLISGSATSSPLSNHIDWQVQEGSDKHDCHFSLRELKRRLRIAISNNQKDHQLNSTSSDIHEAEADSGKLLPVTSMSETESLASTDSSDRAKEPSIVDEKIVPEDSESGMRNDVAHGVGVSSFSYEKAKMYIIERLNDQGEESCQIVQKSESFERLISLPENGTFSPIDFPQEEKISIAHEATKPLNLHTVEQEDGSASPYSTMQYEETESADTSNLGTETLIEPTIDHGSYSQNEGAISQELVREDHARYNGELIALC

SEQ ID NO: 166710 - protein, 777 aa, Zea Mays
MEEEMASSTQPLKQAQSNVAGICSEDIDLNLAGSLMEIYRSHTEGQETRRSIESGRSSISTDEEKNTDPPAHHYQIPSSIQRALEDVAEAVIRHQSANKKYINSGDETRSREFVDALQLLSSNKELFVMLMQDPSSRLLECLQNLYMSLGSTRLDSEEYDEGTELQGTTDSLEQSATSPSKVKRRHNSFLKEDGLVTRKPPKLNDGSRGLSRIVILKPSPARGHSSLISGSATSSPLSNHIDWQVQEGSDKHDCHFSLRELKRRLRIAISNNQKDHQLNSTSSDIHEAEADSGKLLPVTSMSETESLASTDSSDRAKEPSIVDEKIVPEDSESGMRNDVAHGVGVSSFSYEKAKMYIIERLNDQGEESCQIVQKSESFERLISLPENGTFSPIDFPQEEKISIAHEATKPLNLHTVEQEDGSASPYSTMQYEETESADTSNLGTETLIEPTIDHGSYSQNEGAISQELVREGVKIMLDIMENSSLCAETGTSQEGVGVKNPDECSLEEPQSMNLLPEPALYSPDDFVNEQENHSPSEIVELVKPSVLTFPYSPENTNDKEEKLSPQSVLDPIAEVTSPRHKTPKQDEFSMPTSRVLFKEVDAPSASPTLWNGPQVAILDDRATRVSFIKAVLEASGLLSEENSQIWYTEEPLLDVSVLAEVGNSYCLTDDAVLLFDYVEEVLLEIRDKFFGSDPWVNSLKHNVRPAPVGRRLVREVAKGIDSLVGKEFPHTLEQVMMKDLDSGSWLDLGGDTGSVVVELWDGLLDDLLEELVFDLWL

SEQ ID NO: 166711 - protein, 480 aa, Zea Mays
MQRSEQLRELYEALQSGECDRRAARPVGSLSPEDLGDTEWYYVICMTYAFLPGQGLPGRSSASNEHVWLCNAHLAGSKDFPRALLAKVPEDPDLINRATAAFREPQCPIYSEQPSSNPSADETGEAADIAVFEGLDHNAMDMETAGIAVFEGLDHNAMDMETVTAAAGRHGTGQELGEADSPSNASLEHITKGIDEFYNLCEEMDVQPLEDAWIMDGSNFEVPSSALPVDGSSAPADGSRATSFVAWTRSSQSCSGEAAAVPVIEEPQKLLKKAVAGGGAWANTNCGGGGTTVTAQENGAKNHVMLERKRREKLNEMFLVLKSLVPSIHKVDKASILAETIAYLKELQRRVQELESRRQGGSGCVSKKVCVGSNSKRKSPEFAGGAKEHPWVLPMDGTSNVTVTVSDRDVLLEVQCLWEKLLMTRVFDAIKSLHLDALSVQASALDGFMRLKIGAQVSHQLIIKPWRLQALVASSFATQP

SEQ ID NO: 166712 - protein, 93 aa, Zea Mays
MPLLWLWLQSCVAYLRTLSFQEMHQRVRLKMLSATVVILFGAMPALNRENMFVKESRRRPALFLFIPSIVNTLSVVRVQYPLNFWSKSLKLTQ

SEQ ID NO: 166713 - protein, 331 aa, Zea Mays
MGSKDGTGDISEAQGYAADIDSIREAQARIAPYVHRTPVMSSTSIDAMVGKKLFFKGAFKIRGASNSIFALDDEQVSKGVVTHSSGNHAAAVALAAKLRGIPAHIVIPRNAPACKVENVKRYGGHIIWSDASIESREYVCKRVQEETGAVLIHPFNSKYTISGQGTVSLELLEQVPEIDTIIVPISGGGLISGVALAAKAINPSIRILAAEPKGADDSAQSKAAGKIITLPSTNTIADGLRAFLGDLTWPVVRDLVDDVIVVDDTAIVDAMKMCYEILKVAVEPSGAIGLAAALSDEFKQSSAWHESSKIGIIVSGGNVDLGTLWQSMYKH

SEQ ID NO: 166714 - protein, 308 aa, Zea Mays
MLPTLIPSGRRRPALRRTFTGRPLCRRRPSMPWGAFKIRGASNSIFALDDEQVSKGVVTHSSGNHAAAVALAAKLRGIPAHIVIPRNAPACKVENVKRYGGHIIWSDASIESREYVCKRVQEETGAVLIHPFNSKYTISGQGTVSLELLEQVPEIDTIIVPISGGGLISGVALAAKAINPSIRILAAEPKGADDSAQSKAAGKIITLPSTNTIADGLRAFLGDLTWPVVRDLVDDVIVVDDTAIVDAMKMCYEILKVAVEPSGAIGLAAALSDEFKQSSAWHESSKIGIIVSGGNVDLGTLWQSMYKH

SEQ ID NO: 166715 - protein, 327 aa, Zea Mays
MLPTLIPSGRRRPALRRTFTGRPLCRRRPSMPWWGRSSSSSASASRKLLLCRGAFKIRGASNSIFALDDEQVSKGVVTHSSGNHAAAVALAAKLRGIPAHIVIPRNAPACKVENVKRYGGHIIWSDASIESREYVCKRVQEETGAVLIHPFNSKYTISGQGTVSLELLEQVPEIDTIIVPISGGGLISGVALAAKAINPSIRILAAEPKGADDSAQSKAAGKIITLPSTNTIADGLRAFLGDLTWPVVRDLVDDVIVVDDTAIVDAMKMCYEILKVAVEPSGAIGLAAALSDEFKQSSAWHESSKIGIIVSGGNVDLGTLWQSMYKH

SEQ ID NO: 166716 - protein, 159 aa, Zea Mays
MKFCYNCGESGHSLSKCPKPIENGGTNFASCFICNQQGHLSKNCPENKHGIYPKGGCCKVCGEVTHLARHCPNKGRQDLISSRDDDVNMEEHSQECPAVHHGGDDLEDDFVNEEEPKPAKSKKAKQSGSRPATGTGNDVKSASAKTKAKQAPKVVKFFG

SEQ ID NO: 166717 - protein, 2848 aa, Zea Mays
MAEDAHELFDSSPPREEGSDEQLAAVPLGDEAGVVEEEEASDPGMSTSMPATPATPYEPPPRPRRPPGVPADAPLEVVRAVEEAIAGGADLLREVVSQEQGELAHSVVDVLLGTMGGVDEAGDATGTGAPPTVMISSRAAVAAAELLPYLPEDDEPSPRTRTALGLHAALRACTRNRAMCSSAGLLAALLASAEKLFVEMDQGSRWDGTPLLQCIQMLGGHSLSVKDLHSWLDLVRKSLGTSWATPLMLALEKAMGSMEAKGPAVTFEFDGESSGLLGPGDSRWPFLNGYGFATWIYIESFSDTLSTATAAAAIAAAAAATSGKSSAMSAAAAASALAGEGTTHMPRLFSFLSSDNQGVEAYFHGQFLVVESVGGRGKKASLHFTYAFKPQCWYFVGLEHTNKHSLLGKDDSELSLYVDGSLYESRPFEFPRISKPLAFCCIGTNPPPTIAGLQRRRRQCPLFAEMGPVYIFKEPIGPDRMRRLASRGGDTLPSFGNGAGLPWKATNDQVKSMAEESFSLNNGIGGSLHLLYHPSLLTGRFCPDASPSGSSGTHRRPAEVLGLVHVSPRVRPSESLWALAYGGPMALLPLTIGNVHVDSLEPAPGDLPSSLATISLSAPVFRIISQAIQHPGNNEELCRTFAPELLSRVLHYVLQALPKLESGEEVLTDEELVAAIVSLCQSQRNNHELKVQLFSSLLLDLNLWSSCNYGLQKELLSSLADMVFTESACMRDAKAMQMLLDGCRRCYWVIQEPDSIDNFAFTGTKRSLGEVNALVDELLVVIELLLGAASSTAAADDVRCLIGFIVDCPQPNQVARVLHLIYRLNVQPNISRANLFSQSFITSGGVEALLVLLQREAKVGNKNILDHSSASENNVPKDGSSNRKADSADTSCQVDENQSAERHETVFHEEAIEHEATNAKDMLDSNIGSKVPGSENGLLKNLGGISFSITSDNVRNNVYNVDKGDGIVVGIIHILGALIGSGHLKFDSGAGSANIPGGSQTTLNEEGNTMSEDRVSLLLFALQKAFQAAPRRLMTANVYMALISAVINVSSADESLNLYDSGHRFEHIQLLLVLLRSLPYASRAFQARAIQDILFLACSHLDNRTTMTSISEWPEWILEVLISNHEMDTKKNADGVSIGEIEDLIHNFLIIMLEHSMRQKDGWKDVEATIHCAEWLSIVGGSSTGDQRIRREESLPIFKRRLLGDLLDFSARELQVQTEVIAAAAAGVAAEGLSPEEAKIQAENAAHLSVALAENAIVILMLVEDHLRSQAQHFCTSLTGDSITSSTSMTSLAASRSNSLSTAGKEPMAAGVSRRASLSSDAGGLPLDLLTSMADSNGQISAAVMERLTAATAAEPYDSVKHAFVSYGSCITDLGESWKYRSRLWYGVGIPPKSDIFGGGGSGWESWRSILEKDSNGIWIEFPLVKKSVAVLQALLLDESGLGGGLGIGGGSGPGMGVMTALYQLLDSDQPFLCMLRMVLVSMREDDNGEGDAFTKDVSIKDVVSEGMGHQAGSVMPFDGNSYSSPRKPRSALLWSVLGPILNMPITESKRQRVLVASSILYSEVWHAIGRDRKPLRKQYIELILPPFVAILRRWRPLLAGIHELTSSDGQNPLIADDRALAADALPVEASLLMISPGWAAAFASPPVAMALAMMAAGASGTETRTPPRNTLNRRDKALPERKAAAKLQTFSSFQMPMETASNKPGSTLKDKAAAKAAALAAARDLERTAKIGSRRGLSAVAMATSGQRRSSGDIERAKRWNTSEAMSAAWVECLQSDDSKSVVGRDFSALSYKYVAVLVSCLALARNLQRAEMERQTLVDVLIRHRASTGLRAWRHLLHCLTEMGRLYGPFEHLCTPDRVFWKLDFTESSSRMRRFVKRNYKGCDHLGAAADYEDRKLLNTSAQSNEHNSEDANSSLTSTLPSSASVIMADAMSMNDRNVENEQLETDTTRSSVDDDQLQHSSAADQQSVKGSIGSRTSDICADRNLVRSTVLAPSYVPSEADERIIVELPSLMVRPLKVVRGTFQVTSKRINFIIDERSNDSNIDDAASTSGQCDQQDKDRSWLVSSLYQIYSRRYLLRRSALELFMVDRSNFFFDFADIDARKNAYRAIVHTKPPNLNDIFLATQRAEQILKRTQLMERWANWEINNFEYLMELNTLAGRSYNDITQYPVFPWVVADYKSRVLNLDDPLSYRDLSKPIGALNPERLKKFQERYSTFEDPIIPKFHYGSHYSSAGTVLYYLFRVEPFTTLSIQLQDGKFDHADRMFSDLSGTWDSVLEDMSDVKELVPEMFYLPEVFTNINGIDFGTTQLGGKLDSVELPPWAENHVDFVHKHRKALESEHVSAHLHEWIDLIFGYKQRGKEAIMANNVFFYITYEGTVDIDKITNPVDRRATQDQIAYFGQTPSQLLTVPHMKRKPLAEVLQLQTIFRNPSELKSYVLPHSDRCNVPASAMLVSNDSIVVVDVNAPAAHVALHQWQANTPDGQGTPFLFHHGRNSTNSTSGALMRIFKGSAGSAEDYGFPRAIAFAASAIRSSAVVAVTCDKEIITGGHVDGSLKLISLDGAKTIETASGHIAPVTCLALSPDSNYLVTGSRDTTVILWRIHQTGSSHKKNAQEPPPTTPTTPRSPLSGSTSTMSSLSETKRRRVEGPMHVMRGHLGEVTCCSVSPDLGLVASSSNATGILLHSLRTGRLIRRLDVDEAHAICLSSQGIILVWNGTKKTLSTFTVNGLPIANSVLLPFSGQVSCIEISTDGHFALFGTSLFNNYKCDNSTETGDHELGPNGTDDVSKNSEQSVHAPSICFVDLHTLKVFHTLKLAKGQDITAIALNKENTNLLVSTADNFFYSLY

SEQ ID NO: 166718 - protein, 2821 aa, Zea Mays
MAEDAHELFDSSPPREEGSDEQLAAVPLGDEAGVVEEEEASDPGMSTSMPATPATPYEPPPRPRRPPGVPADAPLEVVRAVEEAIAGGADLLREVVSQEQGELAHSVVDVLLGTMGGVDEAGDATGTGAPPTVMISSRAAVAAAELLPYLPEDDEPSPRTRTALGLHAALRACTRNRAMCSSAGLLAALLASAEKLFVEMDQGSRWDGTPLLQCIQMLGGHSLSVKDLHSWLDLVRKSLGTSWATPLMLALEKAMGSMEAKGPAVTFEFDGESSGLLGPGDSRWPFLNGYGFATWIYIESFSDTLSTATAAAAIAAAAAATSGKSSAMSAAAAASALAGEGTTHMPRLFSFLSSDNQGVEAYFHGQFLVVESVGGRGKKASLHFTYAFKPQCWYFVGLEHTNKHSLLGKDDSELSLYVDGSLYESRPFEFPRISKPLAFCCIGTNPPPTIAGLQRRRRQCPLFAEMGPVYIFKEPIGPDRMRRLASRGGDTLPSFGNGAGLPWKATNDQVKSMAEESFSLNNGIGGSLHLLYHPSLLTGRFCPDASPSGSSGTHRRPAEVLGLVHVSPRVRPSESLWALAYGGPMALLPLTIGNVHVDSLEPAPGDLPSSLATISLSAPVFRIISQAIQHPGNNEELCRTFAPELLSRVLHYVLQALPKLESGEEVLTDEELVAAIVSLCQSQRNNHELKVQLFSSLLLDLNLWSSCNYGLQKELLSSLADMVFTESACMRDAKAMQMLLDGCRRCYWVIQEPDSIDNFAFTGTKRSLGEVNALVDELLVVIELLLGAASSTAAADDVRCLIGFIVDCPQPNQVARVLHLIYRLNVQPNISRANLFSQSFITSGGVEALLVLLQREAKVGNKNILDHSSASENNVPKDGSSNRKADSADTSCQVDENQSAERHETVFHEEAIEHEATNAKDMLDSNIGSKVPGSENGLLKNLGGISFSITSDNVRNNVYNVDKGDGIVVGIIHILGALIGSGHLKFDSGAGSANIPGGSQTTLNEEGNTMSEDRVSLLLFALQKAFQAAPRRLMTANVYMALISAVINVSSADESLNLYDSGHRFEHIQLLLVLLRSLPYASRAFQARAIQDILFLACSHLDNRTTMTSISEWPEWILEVLISNHEMDTKKNADGVSIGEIEDLIHNFLIIMLEHSMRQKDGWKDVEATIHCAEWLSIVGGSSTGDQRIRREESLPIFKRRLLGDLLDFSARELQVQQTEVIAAAAAGVAAEGLSPEEAKIQAENAAHLSVALAENAIVILMLVEDHLRSQAQHFCTSLTGDSITSSTSMTSLAASRSNSLSTAGKEPMAAGVSRRASLSSDAGGLPLDLLTSMADSNGQISAAVMERLTAATAAEPYDSVKHAFVSYGSCITDLGESWKYRSRLWYGVGIPPKSDIFGGGGSGWESWRSILEKDSNGIWIEFPLVKKSVAVLQALLLDESGLGGGLGIGGGSGPGMGVMTALYQLLDSDQPFLCMLRMVLVSMREDDNGEGDAFTKDVSIKDVVSEGMGHQAGSVMPFDGNSYSSPRKPRSALLWSVLGPILNMPITESKRQRVLVASSILYSEVWHAIGRDRKPLRKQYIELILPPFVAILRRWRPLLAGIHELTSSDGQNPLIADDRALAADALPVEASLLMISPGWAAAFASPPVAMALAMMAAGASGTETRTPPRNTLNRRDKALPERKAAAKLQTFSSFQMPMETASNKPGSTLKDKAAAKAAALAAARDLERTAKIGSRRGLSAVAMATSGQRRSSGDIERAKRWNTSEAMSAAWVECLQSDDSKSVVGRDFSALSYKYVAVLVSCLALARNLQRAEMERQTLVDVLIRHRASTGLRAWRHLLHCLTEMGRLYGPFEHLCTPDRVFWKLDFTESSSRMRRFVKRNYKGCDHLGAAADYEDRKLLNTSAQSNEHNSEDANSSLTSTLPSSASVIMADAMSMNDRNVENEQLETDTTRSSVDDDQLQHSSAADQQSVKGSIGSRTSDICADRNLVRSTVLAPSYVPSEADERIIVELPSLMVRPLKVVRGTFQVTSKRINFIIDERSNDSNIDDAASTSGQCDQQDKDRSWLVSSLYQIYSRRYLLRRSALELFMVDRSNFFFDFARAEQILKRTQLMERWANWEINNFEYLMELNTLAGRSYNDITQYPVFPWVVADYKSRVLNLDDPLSYRDLSKPIGALNPERLKKFQERYSTFEDPIIPKFHYGSHYSSAGTVLYYLFRVEPFTTLSIQLQDGKFDHADRMFSDLSGTWDSVLEDMSDVKELVPEMFYLPEVFTNINGIDFGTTQLGGKLDSVELPPWAENHVDFVHKHRKALESEHVSAHLHEWIDLIFGYKQRGKEAIMANNVFFYITYEGTVDIDKITNPVDRRATQDQIAYFGQTPSQLLTVPHMKRKPLAEVLQLQTIFRNPSELKSYVLPHSDRCNVPASAMLVSNDSIVVVDVNAPAAHVALHQWQANTPDGQGTPFLFHHGRNSTNSTSGALMRIFKGSAGSAEDYGFPRAIAFAASAIRSSAVVAVTCDKEIITGGHVDGSLKLISLDGAKTIETASGHIAPVTCLALSPDSNYLVTGSRDTTVILWRIHQTGSSHKKNAQEPPPTTPTTPRSPLSGSTSTMSSLSETKRRRVEGPMHVMRGHLGEVTCCSVSPDLGLVASSSNATGILLHSLRTGRLIRRLDVDEAHAICLSSQGIILVWNGTKKTLSTFTVNGLPIANSVLLPFSGQVSCIEISTDGHFALFGTSLFNNYKCDNSTETGDHELGPNGTDDVSKNSEQSVHAPSICFVDLHTLKVFHTLKLAKGQDITAIALNKENTNLLVSTADNFFYSLY

SEQ ID NO: 166719 - protein, 1572 aa, Zea Mays
MLVEDHLRSQAQHFCTSLTGDSITSSTSMTSLAASRSNSLSTAGKEPMAAGVSRRASLSSDAGGLPLDLLTSMADSNGQISAAVMERLTAATAAEPYDSVKHAFVSYGSCITDLGESWKYRSRLWYGVGIPPKSDIFGGGGSGWESWRSILEKDSNGIWIEFPLVKKSVAVLQALLLDESGLGGGLGIGGGSGPGMGVMTALYQLLDSDQPFLCMLRMVLVSMREDDNGEGDAFTKDVSIKDVVSEGMGHQAGSVMPFDGNSYSSPRKPRSALLWSVLGPILNMPITESKRQRVLVASSILYSEVWHAIGRDRKPLRKQYIELILPPFVAILRRWRPLLAGIHELTSSDGQNPLIADDRALAADALPVEASLLMISPGWAAAFASPPVAMALAMMAAGASGTETRTPPRNTLNRRDKALPERKAAAKLQTFSSFQMPMETASNKPGSTLKDKAAAKAAALAAARDLERTAKIGSRRGLSAVAMATSGQRRSSGDIERAKRWNTSEAMSAAWVECLQSDDSKSVVGRDFSALSYKYVAVLVSCLALARNLQRAEMERQTLVDVLIRHRASTGLRAWRHLLHCLTEMGRLYGPFEHLCTPDRVFWKLDFTESSSRMRRFVKRNYKGCDHLGAAADYEDRKLLNTSAQSNEHNSEDANSSLTSTLPSSASVIMADAMSMNDRNVENEQLETDTTRSSVDDDQLQHSSAADQQSVKGSIGSRTSDICADRNLVRSTVLAPSYVPSEADERIIVELPSLMVRPLKVVRGTFQVTSKRINFIIDERSNDSNIDDAASTSGQCDQQDKDRSWLVSSLYQIYSRRYLLRRSALELFMVDRSNFFFDFADIDARKNAYRAIVHTKPPNLNDIFLATQRAEQILKRTQLMERWANWEINNFEYLMELNTLAGRSYNDITQYPVFPWVVADYKSRVLNLDDPLSYRDLSKPIGALNPERLKKFQERYSTFEDPIIPKFHYGSHYSSAGTVLYYLFRVEPFTTLSIQLQDGKFDHADRMFSDLSGTWDSVLEDMSDVKELVPEMFYLPEVFTNINGIDFGTTQLGGKLDSVELPPWAENHVDFVHKHRKALESEHVSAHLHEWIDLIFGYKQRGKEAIMANNVFFYITYEGTVDIDKITNPVDRRATQDQIAYFGQTPSQLLTVPHMKRKPLAEVLQLQTIFRNPSELKSYVLPHSDRCNVPASAMLVSNDSIVVVDVNAPAAHVALHQWQANTPDGQGTPFLFHHGRNSTNSTSGALMRIFKGSAGSAEDYGFPRAIAFAASAIRSSAVVAVTCDKEIITGGHVDGSLKLISLDGAKTIETASGHIAPVTCLALSPDSNYLVTGSRDTTVILWRIHQTGSSHKKNAQEPPPTTPTTPRSPLSGSTSTMSSLSETKRRRVEGPMHVMRGHLGEVTCCSVSPDLGLVASSSNATGILLHSLRTGRLIRRLDVDEAHAICLSSQGIILVWNGTKKTLSTFTVNGLPIANSVLLPFSGQVSCIEISTDGHFALFGTSLFNNYKCDNSTETGDHELGPNGTDDVSKNSEQSVHAPSICFVDLHTLKVNIKNFDSPSFSFVLPSPEKFL

SEQ ID NO: 166720 - protein, 2830 aa, Zea Mays
MAEDAHELFDSSPPREEGSDEQLAAVPLGDEAGVVEEEEASDPGMSTSMPATPATPYEPPPRPRRPPGVPADAPLEVVRAVEEAIAGGADLLREVVSQEQGELAHSVVDVLLGTMGGVDEAGDATGTGAPPTVMISSRAAVAAAELLPYLPEDDEPSPRTRTALGLHAALRACTRNRAMCSSAGLLAALLASAEKLFVEMDQGSRWDGTPLLQCIQMLGGHSLSVKDLHSWLDLVRKSLGTSWATPLMLALEKAMGSMEAKGPAVTFEFDGESSGLLGPGDSRWPFLNGYGFATWIYIESFSDTLSTATAAAAIAAAAAATSGKSSAMSAAAAASALAGEGTTHMPRLFSFLSSDNQGVEAYFHGQFLVVESVGGRGKKASLHFTYAFKPQCWYFVGLEHTNKHSLLGKDDSELSLYVDGSLYESRPFEFPRISKPLAFCCIGTNPPPTIAGLQRRRRQCPLFAEMGPVYIFKEPIGPDRMRRLASRGGDTLPSFGNGAGLPWKATNDQVKSMAEESFSLNNGIGGSLHLLYHPSLLTGRFCPDASPSGSSGTHRRPAEVLGLVHVSPRVRPSESLWALAYGGPMALLPLTIGNVHVDSLEPAPGDLPSSLATISLSAPVFRIISQAIQHPGNNEELCRTFAPELLSRVLHYVLQALPKLESGEEVLTDEELVAAIVSLCQSQRNNHELKVQLFSSLLLDLNLWSSCNYGLQKELLSSLADMVFTESACMRDAKAMQMLLDGCRRCYWVIQEPDSIDNFAFTGTKRSLGEVNALVDELLVVIELLLGAASSTAAADDVRCLIGFIVDCPQPNQVARVLHLIYRLNVQPNISRANLFSQSFITSGGVEALLVLLQREAKVGNKNILDHSSASENNVPKDGSSNRKADSADTSCQVDENQSAERHETVFHEEAIEHEATNAKDMLDSNIGSKVPGSENGLLKNLGGISFSITSDNVRNNVYNVDKGDGIVVGIIHILGALIGSGHLKFDSGAGSANIPGGSQTTLNEEGNTMSEDRVSLLLFALQKAFQAAPRRLMTANVYMALISAVINVSSADESLNLYDSGHRFEHIQLLLVLLRSLPYASRAFQARAIQDILFLACSHLDNRTTMTSISEWPEWILEVLISNHEMDTKKNADGVSIGEIEDLIHNFLIIMLEHSMRQKDGWKDVEATIHCAEWLSIVGGSSTGDQRIRREESLPIFKRRLLGDLLDFSARELQVQQTEVIAAAAAGVAAEGLSPEEAKIQAENAAHLSVALAENAIVILMLVEDHLRSQAQHFCTSLTGDSITSSTSMTSLAASRSNSLSTAGKEPMAAGVSRRASLSSDAGGLPLDLLTSMADSNGQISAAVMERLTAATAAEPYDSVKHAFVSYGSCITDLGESWKYRSRLWYGVGIPPKSDIFGGGGSGWESWRSILEKDSNGIWIEFPLVKKSVAVLQALLLDESGLGGGLGIGGGSGPGMGVMTALYQLLDSDQPFLCMLRMVLVSMREDDNGEGDAFTKDVSIKDVVSEGMGHQAGSVMPFDGNSYSSPRKPRSALLWSVLGPILNMPITESKRQRVLVASSILYSEVWHAIGRDRKPLRKQYIELILPPFVAILRRWRPLLAGIHELTSSDGQNPLIADDRALAADALPVEASLLMISPGWAAAFASPPVAMALAMMAAGASGTETRTPPRNTLNRRDKALPERKAAAKLQTFSSFQMPMETASNKPGSTLKDKAAAKAAALAAARDLERTAKIGSRRGLSAVAMATSGQRRSSGDIERAKRWNTSEAMSAAWVECLQSDDSKSVVGRDFSALSYKYVAVLVSCLALARNLQRAEMERQTLVDVLIRHRASTGLRAWRHLLHCLTEMGRLYGPFEHLCTPDRVFWKLDFTESSSRMRRFVKRNYKGCDHLGAAADYEDRKLLNTSAQSNEHNSEDANSSLTSTLPSSASVIMADAMSMNDRNVENEQLETDTTRSSVDDDQLQHSSAADQQSVKGSIGSRTSDICADRNLVRSTVLAPSYVPSEADERIIVELPSLMVRPLKVVRGTFQVTSKRINFIIDERSNDSNIDDAASTSGQCDQQDKDRSWLVSSLYQIYSRRYLLRRSALELFMVDRSNFFFDFADIDARKNAYRAIVHTKPPNLNDIFLATQINNFEYLMELNTLAGRSYNDITQYPVFPWVVADYKSRVLNLDDPLSYRDLSKPIGALNPERLKKFQERYSTFEDPIIPKFHYGSHYSSAGTVLYYLFRVEPFTTLSIQLQDGKFDHADRMFSDLSGTWDSVLEDMSDVKELVPEMFYLPEVFTNINGIDFGTTQLGGKLDSVELPPWAENHVDFVHKHRKALESEHVSAHLHEWIDLIFGYKQRGKEAIMANNVFFYITYEGTVDIDKITNPVDRRATQDQIAYFGQTPSQLLTVPHMKRKPLAEVLQLQTIFRNPSELKSYVLPHSDRCNVPASAMLVSNDSIVVVDVNAPAAHVALHQWQANTPDGQGTPFLFHHGRNSTNSTSGALMRIFKGSAGSAEDYGFPRAIAFAASAIRSSAVVAVTCDKEIITGGHVDGSLKLISLDGAKTIETASGHIAPVTCLALSPDSNYLVTGSRDTTVILWRIHQTGSSHKKNAQEPPPTTPTTPRSPLSGSTSTMSSLSETKRRRVEGPMHVMRGHLGEVTCCSVSPDLGLVASSSNATGILLHSLRTGRLIRRLDVDEAHAICLSSQGIILVWNGTKKTLSTFTVNGLPIANSVLLPFSGQVSCIEISTDGHFALFGTSLFNNYKCDNSTETGDHELGPNGTDDVSKNSEQSVHAPSICFVDLHTLKVFHTLKLAKGQDITAIALNKENTNLLVSTADNFFYSLY

SEQ ID NO: 166721 - protein, 1647 aa, Zea Mays
MAEDAHELFDSSPPREEGSDEQLAAVPLGDEAGVVEEEEASDPGMSTSMPATPATPYEPPPRPRRPPGVPADAPLEVVRAVEEAIAGGADLLREVVSQEQGELAHSVVDVLLGTMGGVDEAGDATGTGAPPTVMISSRAAVAAAELLPYLPEDDEPSPRTRTALGLHAALRACTRNRAMCSSAGLLAALLASAEKLFVEMDQGSRWDGTPLLQCIQMLGGHSLSVKDLHSWLDLVRKSLGTSWATPLMLALEKAMGSMEAKGPAVTFEFDGESSGLLGPGDSRWPFLNGYGFATWIYIESFSDTLSTATAAAAIAAAAAATSGKSSAMSAAAAASALAGEGTTHMPRLFSFLSSDNQGVEAYFHGQFLVVESVGGRGKKASLHFTYAFKPQCWYFVGLEHTNKHSLLGKDDSELSLYVDGSLYESRPFEFPRISKPLAFCCIGTNPPPTIAGLQRRRRQCPLFAEMGPVYIFKEPIGPDRMRRLASRGGDTLPSFGNGAGLPWKATNDQVKSMAEESFSLNNGIGGSLHLLYHPSLLTGRFCPDASPSGSSGTHRRPAEVLGLVHVSPRVRPSESLWALAYGGPMALLPLTIGNVHVDSLEPAPGDLPSSLATISLSAPVFRIISQAIQHPGNNEELCRTFAPELLSRVLHYVLQALPKLESGEEVLTDEELVAAIVSLCQSQRNNHELKVQLFSSLLLDLNLWSSCNYGLQKELLSSLADMVFTESACMRDAKAMQMLLDGCRRCYWVIQEPDSIDNFAFTGTKRSLGEVNALVDELLVVIELLLGAASSTAAADDVRCLIGFIVDCPQPNQVARVLHLIYRLNVQPNISRANLFSQSFITSGGVEALLVLLQREAKVGNKNILDHSSASENNVPKDGSSNRKADSADTSCQVDENQSAERHETVFHEEAIEHEATNAKDMLDSNIGSKVPGSENGLLKNLGGISFSITSDNVRNNVYNVDKGDGIVVGIIHILGALIGSGHLKFDSGAGSANIPGGSQTTLNEEGNTMSEDRVSLLLFALQKAFQAAPRRLMTANVYMALISAVINVSSADESLNLYDSGHRFEHIQLLLVLLRSLPYASRAFQARAIQDILFLACSHLDNRTTMTSISEWPEWILEVLISNHEMDTKKNADGVSIGEIEDLIHNFLIIMLEHSMRQKDGWKDVEATIHCAEWLSIVGGSSTGDQRIRREESLPIFKRRLLGDLLDFSARELQVQTEVIAAAAAGVAAEGLSPEEAKIQAENAAHLSVALAENAIVILMLVEDHLRSQAQHFCTSLTGDSITSSTSMTSLAASRSNSLSTAGKEPMAAGVSRRASLSSDAGGLPLDLLTSMADSNGQISAAVMERLTAATAAEPYDSVKHAFVSYGSCITDLGESWKYRSRLWYGVGIPPKSDIFGGGGSGWESWRSILEKDSNGIWIEFPLVKKSVAVLQALLLDESGLGGGLGIGGGSGPGMGVMTALYQLLDSDQPFLCMLRMVLVSMREDDNGEGDAFTKDVSIKDVVSEGMGHQAGSVMPFDGNSYSSPRKPRSALLWSVLGPILNMPITESKRQRVLVASSILYSEVWHAIGRDRKPLRKQYIELILPPFVAILRRWRPLLAGIHELTSSDGQNPLIADDRALAADALPVEIFKTNIVPFSMIVLMRKF

SEQ ID NO: 166722 - protein, 2130 aa, Zea Mays
MAEDAHELFDSSPPREEGSDEQLAAVPLGDEAGVVEEEEASDPGMSTSMPATPATPYEPPPRPRRPPGVPADAPLEVVRAVEEAIAGGADLLREVVSQEQGELAHSVVDVLLGTMGGVDEAGDATGTGAPPTVMISSRAAVAAAELLPYLPEDDEPSPRTRTALGLHAALRACTRNRAMCSSAGLLAALLASAEKLFVEMDQGSRWDGTPLLQCIQMLGGHSLSVKDLHSWLDLVRKSLGTSWATPLMLALEKAMGSMEAKGPAVTFEFDGESSGLLGPGDSRWPFLNGYGFATWIYIESFSDTLSTATAAAAIAAAAAATSGKSSAMSAAAAASALAGEGTTHMPRLFSFLSSDNQGVEAYFHGQFLVVESVGGRGKKASLHFTYAFKPQCWYFVGLEHTNKHSLLGKDDSELSLYVDGSLYESRPFEFPRISKPLAFCCIGTNPPPTIAGLQRRRRQCPLFAEMGPVYIFKEPIGPDRMRRLASRGGDTLPSFGNGAGLPWKATNDQVKSMAEESFSLNNGIGGSLHLLYHPSLLTGRFCPDASPSGSSGTHRRPAEVLGLVHVSPRVRPSESLWALAYGGPMALLPLTIGNVHVDSLEPAPGDLPSSLATISLSAPVFRIISQAIQHPGNNEELCRTFAPELLSRVLHYVLQALPKLESGEEVLTDEELVAAIVSLCQSQRNNHELKVQLFSSLLLDLNLWSSCNYGLQKELLSSLADMVFTESACMRDAKAMQMLLDGCRRCYWVIQEPDSIDNFAFTGTKRSLGEVNALVDELLVVIELLLGAASSTAAADDVRCLIGFIVDCPQPNQVARVLHLIYRLNVQPNISRANLFSQSFITSGGVEALLVLLQREAKVGNKNILDHSSASENNVPKDGSSNRKADSADTSCQVDENQSAERHETVFHEEAIEHEATNAKDMLDSNIGSKVPGSENGLLKNLGGISFSITSDNVRNNVYNVDKGDGIVVGIIHILGALIGSGHLKFDSGAGSANIPGGSQTTLNEEGNTMSEDRVSLLLFALQKAFQAAPRRLMTANVYMALISAVINVSSADESLNLYDSGHRFEHIQLLLVLLRSLPYASRAFQARAIQDILFLACSHLDNRTTMTSISEWPEWILEVLISNHEMDTKKNADGVSIGEIEDLIHNFLIIMLEHSMRQKDGWKDVEATIHCAEWLSIVGGSSTGDQRIRREESLPIFKRRLLGDLLDFSARELQVQQTEVIAAAAAGVAAEGLSPEEAKIQAENAAHLSVALAENAIVILMLVEDHLRSQAQHFCTSLTGDSITSSTSMTSLAASRSNSLSTAGKEPMAAGVSRRASLSSDAGGLPLDLLTSMADSNGQISAAVMERLTAATAAEPYDSVKHAFVSYGSCITDLGESWKYRSRLWYGVGIPPKSDIFGGGGSGWESWRSILEKDSNGIWIEFPLVKKSVAVLQALLLDESGLGGGLGIGGGSGPGMGVMTALYQLLDSDQPFLCMLRMVLVSMREDDNGEGDAFTKDVSIKDVVSEGMGHQAGSVMPFDGNSYSSPRKPRSALLWSVLGPILNMPITESKRQRVLVASSILYSEVWHAIGRDRKPLRKQYIELILPPFVAILRRWRPLLAGIHELTSSDGQNPLIADDRALAADALPVEASLLMISPGWAAAFASPPVAMALAMMAAGASGTETRTPPRNTLNRRDKALPERKAAAKLQTFSSFQMPMETASNKPGSTLKDKAAAKAAALAAARDLERTAKIGSRRGLSAVAMATSGQRRSSGDIERAKRWNTSEAMSAAWVECLQSDDSKSVVGRDFSALSYKYVAVLVSCLALARNLQRAEMERQTLVDVLIRHRASTGLRAWRHLLHCLTEMGRLYGPFEHLCTPDRVFWKLDFTESSSRMRRFVKRNYKGCDHLGAAADYEDRKLLNTSAQSNEHNSEDANSSLTSTLPSSASVIMADAMSMNDRNVENEQLETDTTRSSVDDDQLQHSSAADQQSVKGSIGSRTSDICADRNLVRSTVLAPSYVPSEADERIIVELPSLMVRPLKVVRGTFQVTSKRINFIIDERSNDSNIDDAASTSGQCDQQDKDRSWLVSSLYQIYSRRYLLRRSALELFMVDRSNFFFDFADIDARKNAYRAIVHTKPPNLNDIFLATQI

SEQ ID NO: 166723 - protein, 2434 aa, Zea Mays
MAEDAHELFDSSPPREEGSDEQLAAVPLGDEAGVVEEEEASDPGMSTSMPATPATPYEPPPRPRRPPGVPADAPLEVVRAVEEAIAGGADLLREVVSQEQGELAHSVVDVLLGTMGGVDEAGDATGTGAPPTVMISSRAAVAAAELLPYLPEDDEPSPRTRTALGLHAALRACTRNRAMCSSAGLLAALLASAEKLFVEMDQGSRWDGTPLLQCIQMLGGHSLSVKDLHSWLDLVRKSLGTSWATPLMLALEKAMGSMEAKGPAVTFEFDGESSGLLGPGDSRWPFLNGYGFATWIYIESFSDTLSTATAAAAIAAAAAATSGKSSAMSAAAAASALAGEGTTHMPRLFSFLSSDNQGVEAYFHGQFLVVESVGGRGKKASLHFTYAFKPQCWYFVGLEHTNKHSLLGKDDSELSLYVDGSLYESRPFEFPRISKPLAFCCIGTNPPPTIAGLQRRRRQCPLFAEMGPVYIFKEPIGPDRMRRLASRGGDTLPSFGNGAGLPWKATNDQVKSMAEESFSLNNGIGGSLHLLYHPSLLTGRFCPDASPSGSSGTHRRPAEVLGLVHVSPRVRPSESLWALAYGGPMALLPLTIGNVHVDSLEPAPGDLPSSLATISLSAPVFRIISQAIQHPGNNEELCRTFAPELLSRVLHYVLQALPKLESGEEVLTDEELVAAIVSLCQSQRNNHELKVQLFSSLLLDLNLWSSCNYGLQKELLSSLADMVFTESACMRDAKAMQMLLDGCRRCYWVIQEPDSIDNFAFTGTKRSLGEVNALVDELLVVIELLLGAASSTAAADDVRCLIGFIVDCPQPNQVARVLHLIYRLNVQPNISRANLFSQSFITSGGVEALLVLLQREAKVGNKNILDHSSASENNVPKDGSSNRKADSADTSCQVDENQSAERHETVFHEEAIEHEATNAKDMLDSNIGSKVPGSENGLLKNLGGISFSITSDNVRNNVYNVDKGDGIVVGIIHILGALIGSGHLKFDSGAGSANIPGGSQTTLNEEGNTMSEDRVSLLLFALQKAFQAAPRRLMTANVYMALISAVINVSSADESLNLYDSGHRFEHIQLLLVLLRSLPYASRAFQARAIQDILFLACSHLDNRTTMTSISEWPEWILEVLISNHEMDTKKNADGVSIGEIEDLIHNFLIIMLEHSMRQKDGWKDVEATIHCAEWLSIVGGSSTGDQRIRREESLPIFKRRLLGDLLDFSARELQVQTEVIAAAAAGVAAEGLSPEEAKIQAENAAHLSVALAENAIVILMLVEDHLRSQAQHFCTSLTGDSITSSTSMTSLAASRSNSLSTAGKEPMAAGVSRRASLSSDAGGLPLDLLTSMADSNGQISAAVMERLTAATAAEPYDSVKHAFVSYGSCITDLGESWKYRSRLWYGVGIPPKSDIFGGGGSGWESWRSILEKDSNGIWIEFPLVKKSVAVLQALLLDESGLGGGLGIGGGSGPGMGVMTALYQLLDSDQPFLCMLRMVLVSMREDDNGEGDAFTKDVSIKDVVSEGMGHQAGSVMPFDGNSYSSPRKPRSALLWSVLGPILNMPITESKRQRVLVASSILYSEVWHAIGRDRKPLRKQYIELILPPFVAILRRWRPLLAGIHELTSSDGQNPLIADDRALAADALPVEASLLMISPGWAAAFASPPVAMALAMMAAGASGTETRTPPRNTLNRRDKALPERKAAAKLQTFSSFQMPMETASNKPGSTLKDKAAAKAAALAAARDLERTAKIGSRRGLSAVAMATSGQRRSSGDIERAKRWNTSEAMSAAWVECLQSDDSKSVVGRDFSALSYKYVAVLVSCLALARNLQRAEMERQTLVDVLIRHRASTGLRAWRHLLHCLTEMGRLYGPFEHLCTPDRVFWKLDFTESSSRMRRFVKRNYKGCDHLGAAADYEDRKLLNTSAQSNEHNSEDANSSLTSTLPSSASVIMADAMSMNDRNVENEQLETDTTRSSVDDDQLQHSSAADQQSVKGSIGSRTSDICADRNLVRSTVLAPSYVPSEADERIIVELPSLMVRPLKVVRGTFQVTSKRINFIIDERSNDSNIDDAASTSGQCDQQDKDRSWLVSSLYQIYSRRYLLRRSALELFMVDRSNFFFDFADIDARKNAYRAIVHTKPPNLNDIFLATQRAEQILKRTQLMERWANWEINNFEYLMELNTLAGRSYNDITQYPVFPWVVADYKSRVLNLDDPLSYRDLSKPIGALNPERLKKFQERYSTFEDPIIPKFHYGSHYSSAGTVLYYLFRVEPFTTLSIQLQDGKFDHADRMFSDLSGTWDSVLEDMSDVKELVPEMFYLPEVFTNINGIDFGTTQLGGKLDSVELPPWAENHVDFVHKHRKALESEHVSAHLHEWIDLIFGYKQRGKEAIMANNVFFYITYEGTVDIDKITNPVDRRATQDQIAYFGQTPSQLLTVPHMKRKPLAEVLQLQVATLMVH

SEQ ID NO: 166724 - protein, 1575 aa, Zea Mays
MAEDAHELFDSSPPREEGSDEQLAAVPLGDEAGVVEEEEASDPGMSTSMPATPATPYEPPPRPRRPPGVPADAPLEVVRAVEEAIAGGADLLREVVSQEQGELAHSVVDVLLGTMGGVDEAGDATGTGAPPTVMISSRAAVAAAELLPYLPEDDEPSPRTRTALGLHAALRACTRNRAMCSSAGLLAALLASAEKLFVEMDQGSRWDGTPLLQCIQMLGGHSLSVKDLHSWLDLVRKSLGTSWATPLMLALEKAMGSMEAKGPAVTFEFDGESSGLLGPGDSRWPFLNGYGFATWIYIESFSDTLSTATAAAAIAAAAAATSGKSSAMSAAAAASALAGEGTTHMPRLFSFLSSDNQGVEAYFHGQFLVVESVGGRGKKASLHFTYAFKPQCWYFVGLEHTNKHSLLGKDDSELSLYVDGSLYESRPFEFPRISKPLAFCCIGTNPPPTIAGLQRRRRQCPLFAEMGPVYIFKEPIGPDRMRRLASRGGDTLPSFGNGAGLPWKATNDQVKSMAEESFSLNNGIGGSLHLLYHPSLLTGRFCPDASPSGSSGTHRRPAEVLGLVHVSPRVRPSESLWALAYGGPMALLPLTIGNVHVDSLEPAPGDLPSSLATISLSAPVFRIISQAIQHPGNNEELCRTFAPELLSRVLHYVLQALPKLESGEEVLTDEELVAAIVSLCQSQRNNHELKVQLFSSLLLDLNLWSSCNYGLQKELLSSLADMVFTESACMRDAKAMQMLLDGCRRCYWVIQEPDSIDNFAFTGTKRSLGEVNALVDELLVVIELLLGAASSTAAADDVRCLIGFIVDCPQPNQVARVLHLIYRLNVQPNISRANLFSQSFITSGGVEALLVLLQREAKVGNKNILDHSSASENNVPKDGSSNRKADSADTSCQVDENQSAERHETVFHEEAIEHEATNAKDMLDSNIGSKVPGSENGLLKNLGGISFSITSDNVRNNVYNVDKGDGIVVGIIHILGALIGSGHLKFDSGAGSANIPGGSQTTLNEEGNTMSEDRVSLLLFALQKAFQAAPRRLMTANVYMALISAVINVSSADESLNLYDSGHRFEHIQLLLVLLRSLPYASRAFQARAIQDILFLACSHLDNRTTMTSISEWPEWILEVLISNHEMDTKKNADGVSIGEIEDLIHNFLIIMLEHSMRQKDGWKDVEATIHCAEWLSIVGGSSTGDQRIRREESLPIFKRRLLGDLLDFSARELQVQQTEVIAAAAAGVAAEGLSPEEAKIQAENAAHLSVALAENAIVILMLVEDHLRSQAQHFCTSLTGDSITSSTSMTSLAASRSNSLSTAGKEPMAAGVSRRASLSSDAGGLPLDLLTSMADSNGQISAAVMERLTAATAAEPYDSVKHAFVSYGSCITDLGESWKYRSRLWYGVGIPPKSDIFGGGGSGWESWRSILEKDSNGIWIEFPLVKKSVAVLQALLLDESGLGGGLGIGGGSGPGMGVMTALYQLLDSDQPFLCMLRMVLVSMREDDNGEGDAFTKDVSIKDVVSEGMGHQAGSVMPFDGNSYSSPRKPRSALLWSVLGPILNMPITESKRQRVLVASSILYSEGQETPKETIH

SEQ ID NO: 166725 - protein, 1215 aa, Zea Mays
MISPGWAAAFASPPVAMALAMMAAGASGTETRTPPRNTLNRRDKALPERKAAAKLQTFSSFQMPMETASNKPGSTLKDKAAAKAAALAAARDLERTAKIGSRRGLSAVAMATSGQRRSSGDIERAKRWNTSEAMSAAWVECLQSDDSKSVVGRDFSALSYKYVAVLVSCLALARNLQRAEMERQTLVDVLIRHRASTGLRAWRHLLHCLTEMGRLYGPFEHLCTPDRVFWKLDFTESSSRMRRFVKRNYKGCDHLGAAADYEDRKLLNTSAQSNEHNSEDANSSLTSTLPSSASVIMADAMSMNDRNVENEQLETDTTRSSVDDDQLQHSSAADQQSVKGSIGSRTSDICADRNLVRSTVLAPSYVPSEADERIIVELPSLMVRPLKVVRGTFQVTSKRINFIIDERSNDSNIDDAASTSGQCDQQDKDRSWLVSSLYQIYSRRYLLRRSALELFMVDRSNFFFDFADIDARKNAYRAIVHTKPPNLNDIFLATQRAEQILKRTQLMERWANWEINNFEYLMELNTLAGRSYNDITQYPVFPWVVADYKSRVLNLDDPLSYRDLSKPIGALNPERLKKFQERYSTFEDPIIPKFHYGSHYSSAGTVLYYLFRVEPFTTLSIQLQDGKFDHADRMFSDLSGTWDSVLEDMSDVKELVPEMFYLPEVFTNINGIDFGTTQLGGKLDSVELPPWAENHVDFVHKHRKALESEHVSAHLHEWIDLIFGYKQRGKEAIMANNVFFYITYEGTVDIDKITNPVDRRATQDQIAYFGQTPSQLLTVPHMKRKPLAEVLQLQTIFRNPSELKSYVLPHSDRCNVPASAMLVSNDSIVVVDVNAPAAHVALHQWQANTPDGQGTPFLFHHGRNSTNSTSGALMRIFKGSAGSAEDYGFPRAIAFAASAIRSSAVVAVTCDKEIITGGHVDGSLKLISLDGAKTIETASGHIAPVTCLALSPDSNYLVTGSRDTTVILWRIHQTGSSHKKNAQEPPPTTPTTPRSPLSGSTSTMSSLSETKRRRVEGPMHVMRGHLGEVTCCSVSPDLGLVASSSNATGILLHSLRTGRLIRRLDVDEAHAICLSSQGIILVWNGTKKTLSTFTVNGLPIANSVLLPFSGQVSCIEISTDGHFALFGTSLFNNYKCDNSTETGDHELGPNGTDDVSKNSEQSVHAPSICFVDLHTLKVFHTLKLAKGQDITAIALNKENTNLLVSTADNFFYSLY

SEQ ID NO: 166726 - protein, 724 aa, Zea Mays
MISPGWAAAFASPPVAMALAMMAAGASGTETRTPPRNTLNRRDKALPERKAAAKLQTFSSFQMPMETASNKPGSTLKDKAAAKAAALAAARDLERTAKIGSRRGLSAVAMATSGQRRSSGDIERAKRWNTSEAMSAAWVECLQSDDSKSVVGRDFSALSYKYVAVLVSCLALARNLQRAEMERQTLVDVLIRHRASTGLRAWRHLLHCLTEMGRLYGPFEHLCTPDRVFWKLDFTESSSRMRRFVKRNYKGCDHLGAAADYEDRKLLNTSAQSNEHNSEDANSSLTSTLPSSASVIMADAMSMNDRNVENEQLETDTTRSSVDDDQLQHSSAADQQSVKGSIGSRTSDICADRNLVRSTVLAPSYVPSEADERIIVELPSLMVRPLKVVRGTFQVTSKRINFIIDERSNDSNIDDAASTSGQCDQQDKDRSWLVSSLYQIYSRRYLLRRSALELFMVDRSNFFFDFADIDARKNAYRAIVHTKPPNLNDIFLATQRAEQILKRTQLMERWANWEINNFEYLMELNTLAGRSYNDITQYPVFPWVVADYKSRVLNLDDPLSYRDLSKPIGALNPERLKKFQERYSTFEDPIIPKFHYGSHYSSAGTVLYYLFRVEPFTTLSIQLQDGKFDHADRMFSDLSGTWDSVLEDMSDVKELVPEMFYLPEVFTNINGIDFGTTQLGGKLDSVELPPWAENHVDFVHKHRKALESEHVSAHLHEWIDLIFG

SEQ ID NO: 166727 - protein, 124 aa, Zea Mays
MLSQRIKCAESKSWCFGMLRECLVSSSMRLGVPFIAPRQLGVVESIPGRQSLPSVAWRTGQSGAPLDTVRCGSLSLFGEADHCRFRAVGAPDTVRCTPDSLVPPCDRWLGHASRVESSADRWPG

SEQ ID NO: 166728 - protein, 146 aa, Zea Mays
MKVRDYEIDQYGVVNNAIYASYCQHGRHELLESVGISADAVARSGESLALSELNLKYFAPLRSGDKFVVKVRLAGIKGVRMIFDHIITKLPNHELILEAKATAVCLNKDYYPTRIPRELLSKMQLFLPVDSRGSNEDVNNRNNSCN

SEQ ID NO: 166729 - protein, 186 aa, Zea Mays
MQQQMAGLVHHQAIGMVSFSSGANARHHVAVHAGRARLGRVTAAARPKYCPLRGAAAVAAPLASGRELLDQHTRPSNTTSSQQLTTTVRKDKFFEIEMEVRDDELDEYGVVNNAIYASYLHSGRDVVLEKLGISVDYWTSTGNAMALSELNLKYFAPLRVRREGEACPNQRRADDCGAHDRGPAGS

SEQ ID NO: 166730 - protein, 243 aa, Zea Mays
MLLTKPYLSNSLLPVPSPPPSGPTLSSNHASPLAAPTCRRSRLRISATSTAAPSPSSAAAATASLSRVDVLSEALPFIQRFKGKTVVVKYGGAAMKSPELQASVIRDLVLLSCVGLRPVLVHGGGPEINSWLLRVGVEPQFRDGLRVTDALTMEVVEMVLVGKRRWDSSARFRAWTPPSSIPSSPRAISRLSPPLPPTRLGKPITSMLIRRLARLPLPWAPRSCCCSQMCLAFWRTVMTLGAW

SEQ ID NO: 166731 - protein, 614 aa, Zea Mays
MTSRFWGQGDSESEEEEEEVESEQGSDNDDDGGHGGAGRGAQNRYLKNQEDDSDESDTGHREIRSLRDKHNEEMRSIVDQMRNAMKINDWVSLQESFEKLNKNLEKVVRVNESTKVPKMYIKALVLLEDFKAEAPANKEAKEKMSSSNSKALNKMSQKLTKNNKQYKEQIQKCREHPESFEDEAADDKDMDDDDVDESDAEIEDPDKIAMSESEEDHDEEDGDKEGWEQKRSKKDKMMDKQFLKDPSEITWDIVDKKLREIIASRGKKGTGRIERVEQLTFLTRVAKTPAQKLETLFHVISAQFDVNPSLLGHMPVNVWKKCVNNMLLVLDILQQYPNIVVDTSFEPDEKETQKGADYNGTIHIVGDLVAFLERLDSEFLKTLQCTDPYTKDYVQRLREEPLFLVVAQNVQDYLERVGNLKAAAKVALRRVELVYYKPQEVYDAMRKLAEQPEDCVDDDDAEAGDEHQAVDDNRGPSPFVAIPEVVHRKPTFPESGRTLMDGLMSLIYKYGDERTKARAMLCDIYHHAISDEFSVARDLLLMSHLQDGVQLMDISSQILFNRVMAQLGLCAFRAGLINEAHGCLTELYFTGRVKELLAQGVQQSRYHEKTPEQT

SEQ ID NO: 166732 - protein, 201 aa, Zea Mays
MEIGAVAAMRYVKDGIKAAKLVMEHSEHTLLVGEKATAFAISMGLPGPTNLSSPESIEKWEKWKQNHCQPNFWKNVDPVGKCGPYHPINLASVEVEGSVKNEVVGSQGGLCQGYFESDNLLEPIKSNLKVVNRHNHDTISMAVIDKMGHIAVGTSTNGATFKIPGRVGDGPIPGSSSYGDDEVGACGATGDGDIMMRFLPW

SEQ ID NO: 166733 - protein, 395 aa, Zea Mays
MGSMRRSSVRLLIGFLLIRLNWCSAVGDKGAEKVGVAFPVVVSTWPFREAVRAAWKVVSTGEGWGSAVDAVVAGCSACEDLRCDGTVGPGGSPDENGETTLDALVMNGVTSALLSRAAVQATMEIGAVAAMRYVKDGIKAAKLVMEHSEHTLLVGEKATAFAISMGLPGPTNLSSPESIEKWEKWKQNHCQPNFWKNVDPVGKCGPYHPINLASVEVEGSVKNEVVGSQGGLCQGYFESDNLLEPIKSNLKVVNRHNHDTISMAVIDKMGHIAVGTSTNGATFKIPGRVGDGPIPGSSSYGDDEVGACGATGDGDIMMRFLPCYQVVESMRQGMDPRDAATDAISRIARKYPDFIGAVFAVNKEGVHAGACHGWTFQYSVRNSSMQDVEVITVYP

SEQ ID NO: 166734 - protein, 526 aa, Zea Mays
MLPAVAAASPGLSHLPRYHHLGRRFHLRRHRLLPAIPARLSCGATHARRLLLAGAFAKGEGSSGQDVDHSAGATNSGSAYLGLFVRLLGLDNDTRDREHAVCTLYQYSLGGRKSIDEIMQFPGCIVLIISLLKSESILACEAATGLLRNITSVHIYRKMAGESGAMEEIINLLCKSTITPKILEQCLCTIWNFSIDEKWRYKVLKSDVLMKIVGYLDEEDIQVKEAAGGIISNLALSSSSHGALVEVGVIPKLVHLLQTKEDDYKIIRKEAKSSLIQLATDDCYYSLIIEEGLVRVPLVGSAAYKAFKPLPHSWPSFPDGSKIQRSSHPSKYGATELLLGLSVNENDTKPDEAKINAMIGRSNQQFLARVGAIELDDQGQEESGSEKNDMYTILPWVDGVARLVLILGLEDVSAIKKAARAMGDASINEHMRTSFKEAGAVKPLLQLLKHKDVHVREAGAYALEKLCVSATVCHNIKTEGGLELLVNIVKDRHTPVELLEKPDTEGYKDSENSAKTSVNQEMSRFV

SEQ ID NO: 166735 - protein, 544 aa, Zea Mays
MLPAVAAASPGLSHLPRYHHLGRRFHLRRHRLLPAIPARLSCGATHARRLLLAGAFAKGEGSSGQDVDHSAGATNSGSAYLGLFVRLLGLDNDTRDREHAVCTLYQYSLGGRKSIDEIMQFPGCIVLIISLLKSESILACEAATGLLRNITSVHIYRKMAGESGAMEEIINLLCKSTITPKILEQCLCTIWNFSIDEKWRYKVLKSDVLMKIVGYLDEEDIQVKEAAGGIISNLALSSSSHGALVEVGVIPKLVHLLQTKEDDYKIIRKEAKSSLIQLATDDCYYSLIIEEGLVRVPLVGSAAYKAFKPLPHSWPSFPDGSKIQRSSHPSKYGATELLLGLSVNENDTKPDEAKINAMIGRSNQQFLARVGAIELDDQGQEESGSEKNDMYTILPWVDGVARLVLILGLEDVSAIKKAARAMGDASINEHMRTSFKEAGAVKPLLQLLKHKDVHVREAGAYALEKLCVSATVCHNIKTEGGLELLVNIVKDRHTPVELLEKIIYILSRMFDMGICMVAVPDTEGYKDSENSAKTSVNQEMSRFV

SEQ ID NO: 166736 - protein, 224 aa, Zea Mays
MEGLIKGLVHVAIDAVEDAVRERDHGRADDDEVPRRRAAQSSDPDDDGEEERDERSRSTWAEVVSEQKGSDPDERRDHRSSGRDNRHERRDDEGWKRADGRNQQQHHAGRQNQCEGEERWDGSGSRRRQQQQQAQGYGNQHQEEERINDGGWQTVGEKKRHGRPQQSEAWNGYRKPPSEQKYSEDVGHIHQGLNFEPTREELNSLSKACSRLWELDMNRIVPAG

SEQ ID NO: 166737 - protein, 160 aa, Zea Mays
MAREASRRGAGAGVGKGGRCRRNGSAVPGPARAPSPMARGVTAGGGHRGPKVAGAMATARRRAPAALQTGLPTATAAAVVEEAGVADLNSASVAYLAVLAGEPVAGRLGLEEATAAGARAVVGSAAAGGSGHREAADVAATEEGRLASGSIVYTGCGIMA

SEQ ID NO: 166738 - protein, 581 aa, Zea Mays
MADRNLCVRVFVTAVAFRKLADLGYKRSAKKCKEKFENVHKYYKRTKEGRAGRQDGKSYRFFEELEALHAAAPQPPPQHLPAASTAPQLHALAAPVSPTPQQQLPASSAAPPLHAFPAPVSAPPPLSSMPLLTGPMQPAPISSAAPAPAPVDLLVAHQPLNLQGFSFSSMSDSESDDESEDDDMTAETGGNQDRLGKRKRGDGGGSSSNKMMSFFEGLMQQVVDRQEEMQRRFLETMEKREAERTAREEAWRRQEVARLNREQEQLAQERAAAASRDAAIIAFLQRIGGQSVQPPATAVVVPMPAPVSVHTTPPKQPSRQQQQPPPPSPQAGQATPQSKPISAAPLQQQPPQQQPKDTSQQDAGTPRSLPPASSQSLELVPVAATEHHVDSGLGGGDGGAASSSRWPKTEVHALIQLRMDLDMRYQETGPKGPLWEDISSGMRRLGYNRSSKRCKEKWENINKYYKKVKESNKKRPEDSKTCPYFHQLEAIYNRKHLRSLTTAATSSAAAAPRPAYPDQLNPSRQEIEGKNINDDKRNNGGSGGGTQVPTSNGETATTTTTTTLVAFDADTGMKKKTSSGS

SEQ ID NO: 166739 - protein, 663 aa, Zea Mays
MADRNLCVRVFVTAVAFRKLADLGYKRSAKKCKEKFENVHKYYKRTKEGRAGRQDGKSYRFFEELEALHAAAPQPPPQHLPAASTAPQLHALAAPVSPTPQQQLPASSAAPPLHAFPAPVSAPPPLSSMPLLTGPMQPAPISSAAPAPAPVDLLVAHQPLNLQGFSFSSMSDSESDDESEDDDMTAETGGNQDRLGKRKRGDGGGSSSNKMMSFFEGLMQQVVDRQEEMQRRFLETMEKREAERTAREEAWRRQEVARLNREQEQLAQERAAAASRDAAIIAFLQRIGGQSVQPPATAVVVPMPAPVSVHTTPPKQPSRQQQQPPPPSPQAGQATPQSKPISAAPLQQQPPQQQPKDTSQQDAGTPRSLPPASSQSLELVPVAATEHHVDSGLGGGDGGAASSSRWPKTEVHALIQLRMDLDMRYQETGPKGPLWEDISSGMRRLGYNRSSKRCKEKWENINKYYKKVKESNKKRPEDSKTCPYFHQLEAIYNRKHLRSLTTAATSSAAAAPRPAYPDQLNPSRQEIEGKNINDDKRNNGGSGGGTQVPTSNGETATTTTTTTLVAFDADTGMKKPEDIVRELNEHPRREFTTEDETDSDDMGDEYTDDGEEGEDDGKMQYRIQFQRPNPGGTNTAPAPAAATTAAPAVPTSAPTSTFLAMVQ

SEQ ID NO: 166740 - protein, 121 aa, Zea Mays
MHLWHPPLPAGPLVCDVSLHLLPLRPRQAENILGTGLVDRETKGIHGSPQRSPSFPCPQNQASRVHFFLWLLSESKTLTKFNLSIRKKLEGLSCLFCTLPELLSEIFDRNLGAHFLSIRQL

SEQ ID NO: 166741 - protein, 93 aa, Zea Mays
MMSPPSSSMPRPHYLRSLLLSTRRRQKWHGRSATSTPHYRGPISPLPITVVHGFLESVGGPSSMEGPPPPPRSAAKMAWEIRQLTSSHYRASA

SEQ ID NO: 166742 - protein, 363 aa, Zea Mays
MEALWKQASRLKDQVSRQFGYGNSDNAFTDESEVKLHQRLEKLYLSTRAAKHFQRDIVRGVEGYIVTGSKQVEIGNKLSDDSQKYGVGNTCTSGDTLSKAATYFGKARSQMEKERGNMLKAFGTQVAEPLRAMVMGAPLEDARHMAQRYDRTRQEAEAQAVEVSRRQNRVRESTGNGDMVSKLEAAEYKLEELKSNMVGLGKEAIAAMSAVEAQQQRLTLQRLIALVEAERTYHQRVLEILDKLEEEMVSERQKIEAPPTPAAENYIPPPAPPSYDEINGAFASTSVNESVQSVDFFLGEALDSFNAESEFELTLSAGDIVIVRKISSNGWAEGECKGKAGWFPHAYIERQERVLASKVPHIF

SEQ ID NO: 166743 - protein, 231 aa, Zea Mays
MVMGAPLEDARHMAQRYDRTRQEAEAQAVEVSRRQNRVRESTGNGDMVSKLEAAEYKLEELKSNMVGLGKEAIAAMSAVEAQQQRLTLQRLIALVEAERTYHQRVLEILDKLEEEMVSERQKIEAPPTPAAENYIPPPAPPSYDEINGAFASTSVNESVQSVDFFLGEALDSFNAESEFELTLSAGDIVIVRKISSNGWAEGECKGKAGWFPHAYIERQERVLASKVPHIF

SEQ ID NO: 166744 - protein, 342 aa, Zea Mays
MPVLRSPFAGGDLPAGDADPDYLYFLEHIRIDGDSYTLELPSHGDSPPSLIKYETPFASPSDGECVSDPSQGRLSGNRSAQDEREPVESASLETGPAWYDCLHDVDEDYRLFLQHTRVVDGQLVLEIGGVVVNYDNPVAVESPGEKDTQRGEEAVFASPGEGISVAAGSDQVASGAPATAVSEQNASDWRADPSPRREVNDGGDEGLSDASALKGAYWEASSSDGRRAPPTNSGGKVEKELGIIWPTHITRRPDSDFKRRLIKALTKPVARKEYYRLFDTVTIRTPLMKLRQVRNETKFYPTEEMGSSYLDHYPDLAEQIMNNGRRNGLALMRGFLFWLQVA

SEQ ID NO: 166745 - protein, 79 aa, Zea Mays
MKLRQVRNETKFYPTEEMGSSYLDHYPDLAEQIMNNGRRNGLALMRGFLFWLQNAVHEDQFKPWVDDSNKEHEVIYLVD

SEQ ID NO: 166746 - protein, 409 aa, Zea Mays
MPPPVEPYIPSFTAGLSAHEAADADKDYLYFLRHVRLDGDAYTVVIPSKDGASCPPQIIRYEQPHSDHNAGAPVAGSECGRQRAHPPSEENSWATGEAAPHGVKRKVPGASPAGEVRSGAVRMEEDTPTLVAKSAWYDLQPDIDDDYRFFLQNARVVNDKLVFKTGNCSITIGDHSDAEEHDDTEEEEKEEEGEGEEDDEEEADDLPASGQSGEDGIGMEEAGPVSETEDGVDSDLPIPKVKDEVVSKNEEDDVGPGSDLHITNDQVYCETEKVKEGGGNTLNDLARRTTDLDPLDKKEASSSKGHLAMPLNPSELQGVIWPPHINERPNSVFKEKLIEFLIKPFTQEEYDRYFALASDRIPMVKERRTRNTVAYYHWTHEMSKSYFDRYPGALPCRSKKQKALPLDAI

SEQ ID NO: 166747 - protein, 411 aa, Zea Mays
MPPPVEPYIPSFTAGLSAHEAADADKDYLYFLRHVRLDGDAYTVVIPSKDGASCPPQIIRYEQPHSDHNAGAPVAGSECGRQRAHPPSEENSWATGEAAPHGVKRKVPGASPAGEVRSGAVRMEEDTPTLVAKSAWYDLQPDIDDDYRFFLQNARVVNDKLVFKTGNCSITIGDHSDAEEHDDTEEEEKEEEGEGEEDDEEEADDLPASGQSGEDGIGMEEAGPVSETEDGVDSDLPIPKVKDEVVSKNEEDDVGPGSDLHITNDQVYCETEKVKEGGGNTLNDLARRTTDLDPLDKKEASSSKGHLAMPLNPSELQGVIWPPHINERPNSVFKEKLIEFLIKPFTQEEYDRYFALASDRIPMVKERRTRNTVAYYHWTHEMSKSYFDRYPECAYCILQSSSTSYAWNLEH

SEQ ID NO: 166748 - protein, 249 aa, Zea Mays
MPPPVEPYIPSFTAGLSAHEAADADKDYLYFLRHVRLDGDAYTVVIPSKDGASCPPQIIRYEQPHSDHNAGAPVAGSECGRQRAHPPSEENSWATGEAAPHGVKRKVPGASPAGEVRSGAVRMEEDTPTLVAKSAWYDLQPDIDDDYRFFLQNARVVNDKLVFKTGNCSITIGDHSDAEEHDDTEEEEKEEEGEGEEDDEEEADDLPASGQSGEDGIGMEEAGPVSETEDGVDSDLPIPKLRIRSNATM

SEQ ID NO: 166749 - protein, 442 aa, Zea Mays
MPPPVEPYIPSFTAGLSAHEAADADKDYLYFLRHVRLDGDAYTVVIPSKDGASCPPQIIRYEQPHSDHNAGAPVAGSECGRQRAHPPSEENSWATGEAAPHGVKRKVPGASPAGEVRSGAVRMEEDTPTLVAKSAWYDLQPDIDDDYRFFLQNARVVNDKLVFKTGNCSITIGDHSDAEEHDDTEEEEKEEEGEGEEDDEEEADDLPASGQSGEDGIGMEEAGPVSETEDGVDSDLPIPKDEVVSKNEEDDVGPGSDLHITNDQVYCETEKVKEGGGNTLNDLARRTTDLDPLDKKEASSSKGHLAMPLNPSELQGVIWPPHINERPNSVFKEKLIEFLIKPFTQEEYDRYFALASDRIPMVKERRTRNTVAYYHWTHEMSKSYFDRYPDLAQQFSLQRNNYTNGLALLRGLFFWLQNIELEDQFRPWSDEFKKYRVVMECL

SEQ ID NO: 166750 - protein, 440 aa, Zea Mays
MPPPVEPYIPSFTAGLSAHEAADADKDYLYFLRHVRLDGDAYTVVIPSKDGASCPPQIIRYEQPHSDHNAGAPVAGSECGRQRAHPPSEENSWATGEAAPHGVKRKVPGASPAGEVRSGAVRMEEDTPTLVAKSAWYDLQPDIDDDYRFFLQNARVVNDKLVFKTGNCSITIGDHSDAEEHDDTEEEEKEEEGEGEEDDEEEADDLPASGQSGEDGIGMEEAGPVSETEDGVDSDLPIPKVKDEVVSKNEEDDVGPGSDLHITNDQTEKVKEGGGNTLNDLARRTTDLDPLDKKEASSSKGHLAMPLNPSELQGVIWPPHINERPNSVFKEKLIEFLIKPFTQEEYDRYFALASDRIPMVKERRTRNTVAYYHWTHEMSKSYFDRYPDLAQQFSLQRNNYTNGLALLRGLFFWLQNIELEDQFRPWSDEFKKYRVVMECL

SEQ ID NO: 166751 - protein, 224 aa, Zea Mays
MEEAGPVSETEDGVDSDLPIPKDEVVSKNEEDDVGPGSDLHITNDQVYCETEKVKEGGGNTLNDLARRTTDLDPLDKKEASSSKGHLAMPLNPSELQGVIWPPHINERPNSVFKEKLIEFLIKPFTQEEYDRYFALASDRIPMVKERRTRNTVAYYHWTHEMSKSYFDRYPDLAQQFSLQRNNYTNGLALLRGLFFWLQNIELEDQFRPWSDEFKKYRVVMECL

SEQ ID NO: 166752 - protein, 216 aa, Zea Mays
MIDNGLLAKRVHIMTFERILSFIMAEIQFSFVKVKDEVVSKNEEDDVGPGSDLHITNDQVYCETEKVKEGGGNTLNDLARRTTDLDPLDKKEASSSKGHLAMPLNPSELQGVIWPPHINERPNSVFKEKLIEFLIKPFTQEEYDRYFALASDRIPMVKERRTRNTVAYYHWTHEMSKSYFDRYPDLAQQFSLQRNNYTNGLALLRGLFFWLQTMER

SEQ ID NO: 166753 - protein, 947 aa, Zea Mays
MGAIGGDEQVQLDNVDGAEVANDGGAGAAGRLEKILVSVRLRPLSDKEIARRDPAEWECINDTTIISRSTFPDRPTAPTTYSFDRVFRSDCNTKEVYEEGAKAVALSVVSGINSSVFAYGQTSSGKTYTMTGITEHTAADIYDYIGKHEERAFVLKFSAIEIYNEVVRDLLSAENTSLRLWDDAEKGTYIENLTEVILRDLDHLKELISVCEAQRRTGETYLNGNSSRSHQILKLTIESSAREFSGKDKSTTLVASVNFVDLAGSERASQALSVGARLKEGCHINRSLLTLGTVIRKLSKVRNGHIPYRDSKLTRILQISLGGNARTAIICTMSPARSHMEQSRNTLLFASCAKEVVTNAQVNVVMSDKALIKQLQKELARLESELRCPASYPGLEALVKEKDNQILEMEKEIKELKLQRDVAESRLQDLLKVVGDNHGSKHPLASSGRNFDVPQPCEDEQSTTSEVVSSGQNFRLQGRQTTQRDYRLQQSENDVQFATSLSCSVSSPPFSGMPPTNGRDDNSQISNEDSGDLCKEVRCIETNETEENKCLESSAVGSTSLQDSNVASSMHGNNNTNRSVNSRQHDESPITLEQHLENANNSLANLGMDLGSSTGNSPSSKVIDRSRSCRSLMGSTLLEDLEKQDCTPPSRSFVDYPGRPETCQRRVPALNYDVESETLSRTGSMLSEIITARDGLKENSSIAGDTESVAGIGEFVAELKEMVQAQYQKQRGNQGDDGELAEGTIRSVGLDPIMDDLQSPSRWPLDFEKKQQEIIDLWHGCNVSLVHRTYFFLLFKGDPADAIYMEVELRRLSFLKNTYSNGSMGRNVVAGSVSASLVLSAKKLQREREMLCRQMQKRLAIQERESLYTKWGVSLSSKRRRLQVARRLWTETKDLEHVRESASLVARLIVLLEPGKALREMFGLSFAPQQFTRRSHNSWRYGRSSLD

SEQ ID NO: 166754 - protein, 601 aa, Zea Mays
MAVDKWRQYLQHAEFIIYSDHRSLSHLTEQRLTTPWQQRVFSKLIGLQYKIMYRKGTDNGAADALSRRPSAELYNISSATPQWLLQVMDGYKNDDQAQKLLAALSVTPAPLGPYTLKAGILRYKDRIWIGNNFPLQNQIMLGLHDSPVGGHSGFPVTYRRVKQLFSWPSMKTSVKDYVKSCAICQQSKPDRSKYPGLLQPLPVPDQAWDVISMDFVEGLPRSSNADTILVVVDTFSKYSHFIPLLHPFSALKVAQLFMDSVYKLHGFPLSIVSDRDMIFTSRFWQELFKLAGTTLKMSSSYHPQTDGQTERVNQCLETFLRSFVHACPTKWSSWLSLAEYWYNTSFHSSLGRSPFEVLYGRTPRQLGLTLGDASSLMDLQTWLNQRELMVKLIQQHLARAQQRMKSQADKGRTEREFNVGDMVYLKLQPYVQSSVATRANHKLSFKFFGPYLILQRVGKVAYKLQLPPSASIHPVVHVSQLKLSVGNRQVSSALPDAMSQMQVPVQILDRRIVMRGGKAVQQVLIKWSQGDDTLSSWEDEEALRSKFPEAAAWGQAEFQGGDNVRRRLQVVEETDTKEEEATVQTTSRRNRKPNPRVSGAE

SEQ ID NO: 166755 - protein, 711 aa, Zea Mays
MTGITEHTAADIYDYIGKHEERAFVLKFSAIEIYNEVVRDLLSAENTSLRLWDDAEKGTYIENLTEVILRDLDHLKELISVCEAQRRTGETYLNGNSSRSHQILKLTIESSAREFSGKDKSTTLVASVNFVDLAGSERASQALSVGARLKEGCHINRSLLTLGTVIRKLSKVRNGHIPYRDSKLTRILQISLGGNARTAIICTMSPARSHMEQSRNTLLFASCAKEVVTNAQVNVVMSDKALIKQLQKELARLESELRCPASYPGLEALVKEKDNQILEMEKEIKELKLQRDVAESRLQDLLKVVGDNHGSKHPLASSGRNFDVPQPCEDEQSTTSEVVSSGQNFRLQGRQTTQRDYRLQQSENDVQFATSLSCSVSSPPFSGMPPTNGRDDNSQISNEDSGDLCKEVRCIETNETEENKCLESSAVGSTSLQDSNVASSMHGNNNTNRSVNSRQHDESPITLEQHLENANNSLANLGMDLGSSTGNSPSSKVIDRSRSCRSLMGSTLLEDLEKQDCTPPSRSFVDYPGRPETCQRRVPALNYDVESETLSRTGSMLSEIITARDGLKENSSIAGDTESVAGIGEFVAELKEMVQAQYQKQRGNQGDDGELAEGTIRSVGLDPIMDDLQSPSRWPLDFEKKQQEIIDLWHGCNVSLVHRTYFFLLFKGDPADAIYMEVELRRLSFLKNTYSNGSMGRNVVAGSVSASLVLR

SEQ ID NO: 166756 - protein, 276 aa, Zea Mays
MSGMSDSAGGVRAGAELMVQQFHLKVLHAVLAVRTPRPHAFAAPAAASFRRRDRWFHLPLHDPPPPPEAADRLDELVPGEPLVVDVLLSPAGSVGARGEVVERWTVACEPWPDAAGGEEVAVNRAYKHCFTLLRSVYAVLRVLPAYRIFRLLCANPSYNYEMGHRVDTFAEPFSRPQEAAMRSQRFVPVETQLGRLVVSVQYLPSLAAFNLEITSLSPSKIIPDYVGSPAAEPMRAFPASLTEATGSGFPPSNQQQRPHSWASPVFWSHTPAHQAR

SEQ ID NO: 166757 - protein, 279 aa, Zea Mays
MPNLPYLYAGDFIKVLKKKHASNSYSKMVIYVEACESGSIFEGLMPEDLNIYVTTASNPVENSWGTYCPGMEPSPPPEYITCLGDLYSVSWMEDSETHNLKKETIKDQYEVVKTRTSNSNKYKEGSHVMEYGPKGAVNQRDADLLFMWKRYEQLNGGTEEKLRALIEIKETVQHRKHLDSSIDFVGRLVFGFEKGPSMLEAVRTSGQPLVDDWDCLKRMVRIFESQCGSLTQYGMKYMRAFANICNSGISEMKMRESSISACSSYNSARWSPMARGHSA

SEQ ID NO: 166758 - protein, 153 aa, Zea Mays
MLWSMGPKGAVNQRDADLLFMWKRYEQLNGGTEEKLRALIEIKETVQHRKHLDSSIDFVGRLVFGFEKGPSMLEAVRTSGQPLVDDWDCLKRMVRIFESQCGSLTQYGMKYMRAFANICNSGISEMKMRESSISACSSYNSARWSPMARGHSA

SEQ ID NO: 166759 - protein, 107 aa, Zea Mays
MNSDLNSFPGDVQDESAANTSLASAIDLNSFPIDNEVLPDLNEVLHPFELNEHWGYQAKNTTKQQRDAIYSSLLERSHNGKLFKNCTQLVSVAHNVSIRTVQRIWDS

SEQ ID NO: 166760 - protein, 74 aa, Zea Mays
MRCDIAFRHKVPWYSIENENGILHFITPFCIRPMQLELMRVEGRRQITCITGKLHHGFHKKLLLEAFSLAGQRL

SEQ ID NO: 166761 - protein, 163 aa, Zea Mays
MAQGTLEVLLVGARGLENTDYLSNMDPYALLQCRSHEQKSSVASGKGCEPEWNETFVFTVSDGAAELFIKLLDSDGGTDDDFVGEATIPLEAVYTEGNIPPTVYNVVKDEEYRGEIKVGLTFTPEVIYRLCLGAIIRLSSADLLSCLLFKILFVNSVKQCYIQ

SEQ ID NO: 166762 - protein, 103 aa, Zea Mays
MAQGTLEVLLVGARGLENTDYLSNMDPYALLQCRSHEQKSSVASGKGCEPEWNETFVFTVSDGAAELFIKLLDSDGGTDDDFVGFLWKQFTRKETSLRLFTML

SEQ ID NO: 166763 - protein, 503 aa, Zea Mays
MLVALLCLLACCAGAGAAGAAAPNARPCASPYSTSAYPFCDASLSIPARARALVSLLTLDEKIAQLSNTAGGVPRLGIPPYQWWSESLHGLADNGPGVNFSSGPVRAATDFPQVILSTAAFNRSLWRAVAEAVATEALGMHNAGQAGLTYWAPNINIFRDPRWGRGQETSGEDPAVAAAYSLEYVKGFQGEEGEEGRIRLSACCKHYTAYDMEKWEGFSRYTFNAKVNAQDLEDTYQPPFKTCIQEARASCLMCAYNQVNGVPMCAHKDLLQKTRDEWGFQGYITSDCDAVAIIHENQTYTKSGEDSIAIVLKAGMDINCGSFLVRHTKSAIEKGKIQEEDIDRALFNLFSVQLRLGIFDKPSNNQWFSQLGPNSVCTKEHRELAAEAVRQGAVLLKNDHNFLPLKRSEVRHVAIIGPSANDAYAMGGDYTGVPCNPTTFLKGIQAYATQTSFAPGCKDASCNSTDLFGEAVEAAKRADIVVVIAGLNLTEEREDFDREESCL

SEQ ID NO: 166764 - protein, 517 aa, Zea Mays
MCAYNQVNGVPMCAHKDLLQKTRDEWGFQGYITSDCDAVAIIHENQTYTKSGEDSIAIVLKAGMDINCGSFLVRHTKSAIEKGKIQEEDIDRALFNLFSVQLRLGIFDKPSNNQWFSQLGPNSVCTKEHRELAAEAVRQGAVLLKNDHNFLPLKRSEVRHVAIIGPSANDAYAMGGDYTGVPCNPTTFLKGIQAYATQTSFAPGCKDASCNSTDLFGEAVEAAKRADIVVVIAGLNLTEEREDFDRVSLLLPGKQMGLIHAIASVAKKPLVLVLLGGGPVDVSFAKQDPRIASILWLGYPGEVGGQVLPEILFGEYNPGGKLPITWYPESFTAIPMTDMNMRADPSRGYPGRTYRFYTGDVVYGFGYGLSYSKYSYSISSAPKKITVSRSSDLGIISRKPAYTRRDGLGSVKTEDIASCEALVFSVHVAVSNHGSMDGSHAVLLFARSKSSVPGFPIKQLVGFESVHTAAGSASNVEITVDPCKQMSAANPEGKRVLLLGAHVLTVGDEEFELSIEL

SEQ ID NO: 166765 - protein, 451 aa, Zea Mays
MLVALLCLLACCAGAGAAGAAAPNARPCASPYSTSAYPFCDASLSIPARARALVSLLTLDEKIAQLSNTAGGVPRLGIPPYQWWSESLHGLADNGPGVNFSSGPVRAATDFPQVILSTAAFNRSLWRAVAEAVATEALGMHNAGQAGLTYWAPNINIFRDPRWGRGQETSGEDPAVAAAYSLEYVKGFQGEEGEEGRIRLSACCKHYTAYDMEKWEGFSRYTFNAKVNAQDLEDTYQPPFKTCIQEARASCLMCAYNQVNGVPMCAHKDLLQKTRDEWGFQGYITSDCDAVAIIHENQTYTKSGEDSIAIVLKAGMDINCGSFLVRHTKSAIEKGKIQEEDIDRALFNLFSVQLRLGIFDKPSNNQWFSQLGPNSVCTKEHRELAAEAVRQGAVLLKNDHNFLPLKRSEVRHVAIIGPSANDAYAMGGDYTGHSSICYTNKLCPWMQGCFL

SEQ ID NO: 166766 - protein, 111 aa, Zea Mays
MIKHTVPDVTKSTWQSLVIESELPVLVEFSAAWCGPCKMIEPVVGKLSKDYEGKLKCYKLNTDESPDIASQYGVRSIPTTMIFKDGEKKDSVIGAVPESTLVTCIEKFVER

SEQ ID NO: 166767 - protein, 195 aa, Zea Mays
MLSSKRVAALEWWAEGHTYASNMRVLDLEAYDAILGYDWLKSHSPMECDWDNKVLTFWDKGVRVQLKGDGVGSTEVLQVSAVQLSRWMKGNEVWAFVMLEAIQEEGAEKEQEPLRQILKEFEDVFAVPTGLPPVRMYDHHIPLLPGSIPVNSRPYRYSPFHKIEIERQVTELLTAGLIVPSASPFASPVLLVQKK

SEQ ID NO: 166768 - protein, 316 aa, Zea Mays
MPASGSPRDGRGAEEDEAARSGSKSLDAECNDRSKGSRNRDHRGKSKRREEEESESSGEDSSERRKRRRKEKERRHRRRRRSNSESSGSSSESESESSYSGSSVESESESELDSEEERRRRRRKRRKEREDEERRRRKKEKERRKRKEKEKERERRKKRKEGKKNLGKKGAVTNSWGKYGIIRELDMWSKRPEFTAWLSEVKQVNLEALSNWEEKQMFKEFMEDHNTATFPSKKYYNLDAYHHKAMEKEKKKGLKMIVTERTVFNDEEQRRLELLKERERRKEEEVEALKRSMQAGLVRLFWCIFFQFCFYLLIII

SEQ ID NO: 166769 - protein, 150 aa, Zea Mays
MSKRPEFTAWLSEVKQVNLEALSNWEEKQMFKEFMEDHNTATFPSKKYYNLDAYHHKAMEKEKKKGLKMIVTERTVFNDEEQRRLELLKERERRKEEEVEALKRSMQAGLAQDMKEQARLREEMNYQYRLGNFQAAAAIQKRLDPDAPLQ

SEQ ID NO: 166770 - protein, 472 aa, Zea Mays
MAAGTNVGVMSGAIIYMQKDLHITEFQQEILVGCLSVVSLLGSLSGGRTSDAIGRKWTMGLGAIVFQIGATIMTFAPSFTVLMIGRLLAGVGIGFGAMVSGVYIAEISPAGARGTLTSLPEICINFGILLGYVSNYAFSGLSEHINWRIMLGVGILPSVFIGFALFVIPESPRWLMMEKRVSEARAVLLQISESEAEAEERLAEIEEAAGLMKSMKSEDKEVWRELLNPSPAVRRMLYAGCGIQLFQQITGIDATVYYSPTIFKDAGIKSDQELLAATVAVGFTKTVFILVAIFLIDRVGRKPLLYVSTIGMTICLFLLGVALTLQNHAVGLMSPRVGIDLAIFAVCGNVAFFSIGMGPICWVLSSEVFPLRLRAQGSALGQVGGRVSSGLVSMSFLSMARAISVAGMFFVFAAISTISVLFVYFCVPETKGKTLEQIEMMFESGDEWGGGEIELEDTQHLIPSIKKSVPLG

SEQ ID NO: 166771 - protein, 241 aa, Zea Mays
MAGSVSDPAAMNASEKLDFLIREMANMTDLGTKLSAQMTTVTNRMNSHDSRLARLETEAPEGDQPVPPRHPQAADASASAVHDDTHDPSGGRAIQEVDREGHRFPDGFGGGHVQDNRAGGLYGRAAGRMRGPYGRVDDGDFYGRGHCAGGGRNGFDGGFPHRDRPKLNFPSFDGTSDPLPWLTKCVAYFRGMRTMEEKKVWMAMMHLEGIAAEWYYALERDYGILTGLASPISSTCGSDRR

SEQ ID NO: 166772 - protein, 303 aa, Zea Mays
MASSTAIATARAHDAAVYGAAGTHSNLRSFLDSVTPVVKAHTVPMASYLPLSNGYYEKIADGVRCFYLGDLWNSFYEWSACGVGTSVCIAPGETVVQYFVPYLSAIQLYTNTRNAPVSQSMIYDGRFDRNNHYSVGMYTHGYQAPLRMPTIGVEGKGELFFKYFEPDSPYERIPFADKVYELCYSCPSLSSLSSAELSPSSWMSVFWYPTSHVPMKNRKDLNTCFLTYHSLSTCKDSMQAFNHMSLAPFGLATYKLDAKVWASPNSGDQEHISSLFDASQSWLKEHNIHHYDFNYFAHRCSSK

SEQ ID NO: 166773 - protein, 99 aa, Zea Mays
MSLLKELNEKDNSLKDHRLRVNNLGEQLDLLQKDVQAREVTQMQLKDIVIRIETNIMDEVAKAFEIAMLRGEIRILSTHWTNKTKNLESQVCYISFICS

SEQ ID NO: 166774 - protein, 125 aa, Zea Mays
MALPCEAASQRPVKQRYILGGMRPASSHSMVARSRRSMRTVEHGASMANEDLSPPTIRTRRPPAPARSRGRLRTSKTSPHAARSTGAQPPVSLSSGQEKSFHWLRIRAGAGGGTFRRRGCRRRAI

SEQ ID NO: 166775 - protein, 304 aa, Zea Mays
MDPGSPRQIDPKTRSSSHRRVLEAEDCDGGGDAECECGDEEGKVDGPAPPELGEVRLGRLLVRHLDVCGRDDIGRGLEHPEPVGGERERELVASALVAEAVEAAEVVRDGGVEGEVREREQARGRPEVAALEARGRGGGDARQDQRQQEEEGQEEAPQLLLLRVGGALLLHRLVEVQLHHRAQRLRCRLASHNVYHGGGSGADAGARGGDVGRLAHRHGLPDPGAVVQIHGLACRARQPTDARHGRKRMDGVACGRAWTLDTEMQAGGSPAVGTHQLIAIHQGILVSSGQCLSLMLMLRDVKET

SEQ ID NO: 166776 - protein, 266 aa, Zea Mays
MQAAAAAAPWTTKTLPVFGNHLGNPTRFTGASSSFHSTPASFAKWRNKWDCHKSEKGARKASRNYERYVVRQKRAEGKKALKDYLLYGKSLPHLQDGSTGSFANSHAIPRFKTFRKGPQTHWSSNSWQGVHNHRKNKKDKERFCNFFHDDHHVHPDDIFEAVFGAHYGFTWSQISWEGFHFRDKSFRFRWSGRESRREKIPCDSEDEESADESRETASVGSHAHRVILGLQPCGPLTLEDVKTAFRASALRWHPDRHPGSSQVCGV

SEQ ID NO: 166777 - protein, 482 aa, Zea Mays
MGNMTRSNSPVSRRIVLSFLDFLNSVELAPGVDPEALEVAKDCLESIFSVNSTATGDAIQPGLLFELFASLEANERDQARAALLSQSVSNKPSQTAGTSNVEEDSNKCTTSNSDSQVEDTFELGDELFAKFYAALDEINFFKTSPAGAEDPGLLSKATQYFDDALLAMQKLGKKRASLVDIAESFKSRGNEFMRSNQHLKAVELYTCAIALNQQNAIYYCNRAAAYTLLNMNNKAIEDCLKSIEIDPHYSKAYSRLGSAYFAMGNYHDALYKGYLKAAELDPSNENVRQNIEVTKKKLAEQRVPPEEQNTHAGQAQGPHPIFTSGGVPFNLFPPGSSPVQEFFAGWSSDVGAPPPGHSISINLNDIFGQANVNASGQGSSQTGNSNNHTPSASFSTGAAVPPPFAFSGSGNEGTQARQASNGLEGEHGEPGIHRDDDVHINLAGPEQAAEALRAVMQMLGPQMGQHEGAPRVGVITGPNKRK

SEQ ID NO: 166778 - protein, 474 aa, Zea Mays
MGNMTRSNSPVSRRIVLSFLDFLNSVELAPGVDPEALEVAKDCLESIFSVNSTATGDAIQPGLLFELFASLEANERDQARAALLSQSVSNKPSQTAGTSNVEEDSNKCTTSNSDSQVEDTFELDHSGDELFAKFYAALDEINFFKTSPAGAEDPGLLSKATQYFDDALLKLGKKRASLVDIAESFKSRGNEFMRSNQHLKAVELYTCAIALNQQNAIYYCNRAAAYTLLNMNNKAIEDCLKSIEIDPHYSKAYSRLGSAYFAMGNYHDALYKGYLKAAELDPSNENVRQNIEVTKKKLAEQRVPPEEQNTHAGQAQGPHPIFTSGGVPFNLFPPGSSPVQEFFAGWSSDVGAPPPGHSISINLNDIFGQANVNASGQGSSQTGNSNNHTPSASFSTGAAVPPPFAFSGSGNEGTQARQASNGLEGEHGEPGIHRDDDVHINLAGPEQAAEALRAVMQMLGPQMGQHEGAPRGPG

SEQ ID NO: 166779 - protein, 399 aa, Zea Mays
MGNMTRSNSPVSRRIVLSFLDFLNSVELAPGVDPEALEVAKDCLESIFSVNSTATGDAIQPGLLFELFASLEANERDQARAALLSQSVSNKPSQTAGTSNVEEDSNKCTTSNSDSQVEDTFELGDELFAKFYAALDEINFFKTSPAGAEDPGLLSKATQYFDDALLAMQKLGKKRASLVDIAESFKSRGNEFMRSNQHLKAVELYTCAIALNQQNAIYYCNRAAAYTLLNMNNKAIEDCLKSIEIDPHYSKAYSRLGSAYFAMGNYHDALYKGYLKAAELDPSNENVRQNIEVTKKKLAEQRVPPEEQNTHAGQAQGPHPIFTSGGVPFNLFPPGNEGTQARQASNGLEGEHGEPGIHRDDDVHINLAGPEQAAEALRAVMQMLGPQMGQHEGAPRGPG

SEQ ID NO: 166780 - protein, 117 aa, Zea Mays
MVPDTLDVQWGGRRSQPEVLPPLCPTGSTRGVVVSPIGEGNPRLSSTINLAVVLNPMLDHALNELSRACAEIAELRADHVERHHQEVGSPAPVGTRHPYRSPHVHTMPTTTLTAGPR

SEQ ID NO: 166781 - protein, 84 aa, Zea Mays
MLSENFYLFITSIFIHQVTHECFTKFGIIRSQEQPNLEPVKTFISRSKCKFESQYCLITLVQTHLFGLLTVVILSDLCPNPLSR

SEQ ID NO: 166782 - protein, 222 aa, Zea Mays
MVQLLDVDNFISFPKSPRSSKLEFGAKCYAHNTKSELLKKTAAAYEMSGGPNLLKLIEANCMGQLRHPKLVELIVYCCEDDHRKVAVFCCCWFLRSITAIHLACSALCAYPFIEALWVSAKELLGIKSDDDEEQPSAMTKGPTPIHQLSRTSCATNLYPSSEWEQMRKDNYKTVNVEESLHKKCFSEHFQDEEVVAAFCAVVNAKQLSLSSTGPRSESTMTR

SEQ ID NO: 166783 - protein, 121 aa, Zea Mays
MTQQSGEMEMEHRLRMSLSKGAHTTLSFEFGEENSNVFADLKDDNGSDSGINFDYNDPDMPNNIDVDPDVSTYPDEIIAATPKSTHGTHDGIDTHESLDDDFCWLHLLFQTPIGYKMQKYS

SEQ ID NO: 166784 - protein, 1496 aa, Zea Mays
MMQAYGARSLDDSFASLDDSDVPEADWTNDRSYSTRVCDTKSKHGERNSVTRLLKDEEVSENGELLKRKLNRAPSRLRVKGKAGDSLPECEMTPLSPTSGLRIGGQATRDRNVARVDDPKEATDVNNRLFNTISKEEYEDRFRDCIIGLKDISDIVLKAVRAAEAEARSANAPDEAVKAAGDAAAELVKFAALEVWKSENNSDAVVVVAEKAASAVVEAALSISVSRSANQVGEERAMEEAVQTSEDQDLENFVISDKAQLLQLRENYSIQCLQILGEYVEALGPVLHEKGVDVCLTLLQRSMKNQEGCDHFAQLLDVLKLVCALAAHRKFAALFVDRGGIQKIVSMPRVTQTYMGLSACLFTFGSLQSTIERVCALSSDTLDSVVELALLLLECPQDLARKNVAIFFAAAFVFKAVLDLFDARNGMQKLLDILCGCASGRSGSNSGGAGSSNVNQGNDRSPAEVLTASEKQVAYHTCVALRQYFRAHLLQLVDSIRPSKSIRSIARNTSSARAGCKPFDISNEAMDAIFCQIQRDRKLGLALVRACWLALDKFVASNGHMTMLELCKFQAHGDRYLRDLTQYAIGVLHIITLMPQPHVRKSIVQGTLSNNRAGMAVLLDTVKSLDYIDHEVICPALNVLVNLVCPPPSISNKPLSSSNQQPAAAQALASESREKNFEKTISDRNLLTNLGESRERSGDGNPAEKNNTLHQGTPSTPVVPSGVVGDRRIMLGVGGGGPGLAAQLEQGYRQAREVVRANNGIKILLQLLGSRMVTHPVAIDSIRALACRVLLGLARDDTIAHILTKLQVGKKLSELIRDISAQTSGGDSGRWQTELTQVAIELIGVLTNSGKETTLAATDAAAPALRRIERAGIAAAAPISYHSRELMQLIHEHLLGSGFAATAAMLQKEAGLAPLPLTAAVLPAHQVAALEASSVQQQWPSGHVQGFLSDKINTSTYQSAQRSDPKLPSSKKKALAFSSSFSRRARSPHPSNILKSPVPIAADTGDAEMLNKAPLSLPLKRNFVDVKDISFASASKRLAITDQIYQSSAFQTPAPTRKGLSVSVDSPTSSHCGWTNFNNAFTENLDNSQGTPGALTTTALPGVNDQQSGNLERMTLDSLVVQYLKHQHRQCPAPVTTLPPLSLLHPHVCPEPSRSLSAPANIAARVGSREISRQFSGIQIPRRDRHFIYSRFKQCRVCRDEASLLTCLTFLGDAARVVAGNHTGELRIFDCNTANLLETQTCHQHLVTMMESTYTGGIEMILTSSLNEVKIWDAFSVSAGPLHTFDDCKSARFNHYGTSFAALSTDTAQREVQLYDVQTYTLATRLPDNTSSSGSGRGYVQPIIHFSPSDTMLLWNGVLWDTRQPNPVHQFDQFTDYCGGGFHPAGNEVILNSEVWDLRKFKLLRSVPSLDQTVIKFNGTGDVIYATLRRNLDDVTSCINARRVRHPLFPAFSTIDAMFVAWAWQKLTPQAAHQLLEQIIKGYTGKKHKGLKNVPK

SEQ ID NO: 166785 - protein, 1752 aa, Zea Mays
MAESEDATAAEPGSGPPHEDEDALLARAHTVISRIIDRELDPNPRLLHTLATMCELHEARYLELRSADTMFNSTNTRTAFTIGKLANLLRDNDEFYELVFCKFLSDTSYSVAVRAATARLLLSCHPAWTPPYPHVFEDSIIDNIKKWVTEDPEASNECKWKYLGNNKPTDAEMLRTYGIGLLAMALCSSGQLIEDVLTLGVSAKLMRYLRIRVLGDASSSQRDANHPQDTKHPWGGDDSRGKSRLSQDGSRLDGTRVGYGMLTNPTAEKNNEPCVGMMQAYGARSLDDSFASLDDSDVPEADWTNDRSYSTRVCDTKSKHGERNSVTRLLKDEEVSENGELLKRKLNRAPSRLRVKGKAGDSLPECEMTPLSPTSGLRIGGQATRDRNVARVDDPKEATDVNNRLFNTISKEEYEDRFRDCIIGLKDISDIVLKAVRAAEAEARSANAPDEAVKAAGDAAAELVKFAALEVWKSENNSDAVVVVAEKAASAVVEAALSISVSRSANQVGEERAMEEAVQTSEDQDLENFVISDKAQLLQLRENYSIQCLQILGEYVEALGPVLHEKGVDVCLTLLQRSMKNQEGCDHFAQLLDVLKLVCALAAHRKFAALFVDRGGIQKIVSMPRVTQTYMGLSACLFTFGSLQSTIERVCALSSDTLDSVVELALLLLECPQDLARKNVAIFFAAAFVFKAVLDLFDARNGMQKLLDILCGCASGRSGSNSGGAGSSNVNQGNDRSPAEVLTASEKQVAYHTCVALRQYFRAHLLQLVDSIRPSKSIRSIARNTSSARAGCKPFDISNEAMDAIFCQIQRDRKLGLALVRACWLALDKFVASNGHMTMLELCKFQAHGDRYLRDLTQYAIGVLHIITLMPQPHVRKSIVQGTLSNNRAGMAVLLDTVKSLDYIDHEVICPALNVLVNLVCPPPSISNKPLSSSNQQPAAAQALASESREKNFEKTISDRNLLTNLGESRERSGDGNPAEKNNTLHQGTPSTPVVPSGVVGDRRIMLGVGGGGPGLAAQLEQGYRQAREVVRANNGIKILLQLLGSRMVTHPVAIDSIRALACRVLLGLARDDTIAHILTKLQVGKKLSELIRDISAQTSGGDSGRWQTELTQVAIELIGVLTNSGKETTLAATDAAAPALRRIERAGIAAAAPISYHSRELMQLIHEHLLGSGFAATAAMLQKEAGLAPLPLTAAVLPAHQVAALEASSVQQQWPSGHVQGFLSDKINTSTYQSAQRSDPKLPSSKKKALAFSSSFSRRARSPHPSNILKSPVPIAADTGDAEMLNKAPLSLPLKRNFVDVKDISFASASKRLAITDQIYQSSAFQTPAPTRKGLSVSVDSPTSSHCGWTNFNNAFTENLDNSQGTPGALTTTALPGVNDQQSGNLERMTLDSLVVQYLKHQHRQCPAPVTTLPPLSLLHPHVCPEPSRSLSAPANIAARVGSREISRQFSGIQIPRRDRHFIYSRFKQCRVCRDEASLLTCLTFLGDAARVVAGNHTGELRIFDCNTANLLETQTCHQHLVTMMESTYTGGIEMILTSSLNEVKIWDAFSVSAGPLHTFDDCKSARFNHYGTSFAALSTDTAQREVQLYDVQTYTLATRLPDNTSSSGSGRGYVQPIIHFSPSDTMLLWNGVLWDTRQPNPVHQFDQFTDYCGGGFHPAGNEVILNSEVWDLRKFKLLRSVPSLDQTVIKFNGTGDVIYATLRRNLDDVTSCINARRVRHPLFPAFSTIDAVTYSDIATVQMDRCLAGSE

SEQ ID NO: 166786 - protein, 1893 aa, Zea Mays
MAESEDATAAEPGSGPPHEDEDALLARAHTVISRIIDRELDPNPRLLHTLATMCELHEARYLELRSADTMFNSTNTRTAFTIGKLANLLRDNDEFYELVFCKFLSDTSYSVAVRAATARLLLSCHPAWTPPYPHVFEDSIIDNIKKWVTEDPEASNECKWKYLGNNKPTDAEMLRTYGIGLLAMALCSSGQLIEDVLTLGVSAKLMRYLRIRVLGDASSSQRDANHPQDTKHPWGGDDSRGKSRLSQDGSRLDGTRVGYGMLTNPTAEKNNEPCVGMMQAYGARSLDDSFASLDDSDVPEADWTNDRSYSTRVCDTKSKHGERNSVTRLLKDEEVSENGELLKRKLNRAPSRLRVKGKAGDSLPECEMTPLSPTSGLRIGGQATRDRNVARVDDPKEATDVNNRLFNTISKEEYEDRFRDCIIGLKDISDIVLKAVRAAEAEARSANAPDEAVKAAGDAAAELVKFAALEVWKSENNSDAVVVVAEKAASAVVEAALSISVSRSANQVGEERAMEEAVQTSEDQDLENFVISDKAQLLQLRENYSIQCLQILGEYVEALGPVLHEKGVDVCLTLLQRSMKNQEGCDHFAQLLDVLKLVCALAAHRKFAALFVDRGGIQKIVSMPRVTQTYMGLSACLFTFGSLQSTIERVCALSSDTLDSVVELALLLLECPQDLARKNVAIFFAAAFVFKAVLDLFDARNGMQKLLDILCGCASGRSGSNSGGAGSSNVNQGNDRSPAEVLTASEKQVAYHTCVALRQYFRAHLLQLVDSIRPSKSIRSIARNTSSARAGCKPFDISNEAMDAIFCQIQRDRKLGLALVRACWLALDKFVASNGHMTMLELCKFQAHGDRYLRDLTQYAIGVLHIITLMPQPHVRKSIVQGTLSNNRAGMAVLLDTVKSLDYIDHEVICPALNVLVNLVCPPPSISNKPLSSSNQQPAAAQALASESREKNFEKTISDRNLLTNLGESRERSGDGNPAEKNNTLHQGTPSTPVVPSGVVGDRRIMLGVGGGGPGLAAQLEQGYRQAREVVRANNGIKILLQLLGSRMVTHPVAIDSIRALACRVLLGLARDDTIAHILTKLQVGKKLSELIRDISAQTSGGDSGRWQTELTQVAIELIGVLTNSGKETTLAATDAAAPALRRIERAGIAAAAPISYHSRELMQLIHEHLLGSGFAATAAMLQKEAGLAPLPLTAAVLPAHQVAALEASSVQQQWPSGHVQGFLSDKINTSTYQSAQRSDPKLPSSKKKALAFSSSFSRRARSPHPSNILKSPVPIAADTGDAEMLNKAPLSLPLKRNFVDVKDISFASASKRLAITDQIYQSSAFQTPAPTRKGLSVSVDSPTSSHCGWTNFNNAFTENLDNSQGTPGALTTTALPGVNDQQSGNLERMTLDSLVVQYLKHQHRQCPAPVTTLPPLSLLHPHVCPEPSRSLSAPANIAARVGSREISRQFSGIQIPRRDRHFIYSRFKQCRVCRDEASLLTCLTFLGDAARVVAGNHTGELRIFDCNTANLLETQTCHQHLVTMMESTYTGGIEMILTSSLNEVKIWDAFSVSAGPLHTFDDCKSARFNHYGTSFAALSTDTAQREVQLYDVQTYTLATRLPDNTSSSGSGRGYVQPIIHFSPSDTMLLWNGVLWDTRQPNPVHQFDQFTDYCGGGFHPAGNEVILNSEVWDLRKFKLLRSVPSLDQTVIKFNGTGDVIYATLRRNLDDVTSCINARRVRHPLFPAFSTIDAVTYSDIATVQMDRCVLDLATESNDSLIGVVAMDDHQELFSSARLFEVGRKRITDDDSDPEDAGETDDDSDDDDDDSDDGVLAPVLEGGTDSEDISSSSSDDGDEDGGDDDIPSSDGIEDDRFIDERRREFMMDLFGDGWDDDEAYMMGSFSSGDEEGWIM

SEQ ID NO: 166787 - protein, 861 aa, Zea Mays
MAESEDATAAEPGSGPPHEDEDALLARAHTVISRIIDRELDPNPRLLHTLATMCELHEARYLELRSADTMFNSTNTRTAFTIGKLANLLRDNDEFYELVFCKFLSDTSYSVAVRAATARLLLSCHPAWTPPYPHVFEDSIIDNIKKWVTEDPEASNECKWKYLGNNKPTDAEMLRTYGIGLLAMALCSGQLIEDVLTLGVSAKLMRYLRIRVLGDASSSQRDANHPQDTKHPWGGDDSRGKSRLSQDGSRLDGTRVGYGMLTNPTAEKNNEPCVGMMQAYGARSLDDSFASLDDSDVPEADWTNDRSYSTRVCDTKSKHGERNSVTRLLKDEEVSENGELLKRKLNRAPSRLRVKGKAGDSLPECEMTPLSPTSGLRIGGQATRDRNVARVDDPKEATDVNNRLFNTISKEEYEDRFRDCIIGLKDISDIVLKAVRAAEAEARSANAPDEAVKAAGDAAAELVKFAALEVWKSENNSDAVVVVAEKAASAVVEAALSISVSRSANQVGEERAMEEAVQTSEDQDLENFVISDKAQLLQLRENYSIQCLQILGEYVEALGPVLHEKGVDVCLTLLQRSMKNQEGCDHFAQLLDVLKLVCALAAHRKFAALFVDRGGIQKIVSMPRVTQTYMGLSACLFTFGSLQSTIERVCALSSDTLDSVVELALLLLECPQDLARKNVAIFFAAAFVFKAVLDLFDARNGMQKLLDILCGCASGRSGSNSGGAGSSNVNQGNDRSPAEVLTASEKQVAYHTCVALRQYFRAHLLQLVDSIRPSKSIRSIARNTSSARAGCKPFDISNEAMDAIFCQIQRDRKLGLALVRACWLALDKFVASNGHMTMLELCKVKHTAHMHCWNVWGLLMT

SEQ ID NO: 166788 - protein, 1389 aa, Zea Mays
MEEAVQTSEDQDLENFVISDKAQLLQLRENYSIQCLQILGEYVEALGPVLHEKGVDVCLTLLQRSMKNQEGCDHFAQLLDVLKLVCALAAHRKFAALFVDRGGIQKIVSMPRVTQTYMGLSACLFTFGSLQSTIERVCALSSDTLDSVVELALLLLECPQDLARKNVAIFFAAAFVFKAVLDLFDARNGMQKLLDILCGCASGRSGSNSGGAGSSNVNQGNDRSPAEVLTASEKQVAYHTCVALRQYFRAHLLQLVDSIRPSKSIRSIARNTSSARAGCKPFDISNEAMDAIFCQIQRDRKLGLALVRACWLALDKFVASNGHMTMLELCKFQAHGDRYLRDLTQYAIGVLHIITLMPQPHVRKSIVQGTLSNNRAGMAVLLDTVKSLDYIDHEVICPALNVLVNLVCPPPSISNKPLSSSNQQPAAAQALASESREKNFEKTISDRNLLTNLGESRERSGDGNPAEKNNTLHQGTPSTPVVPSGVVGDRRIMLGVGGGGPGLAAQLEQGYRQAREVVRANNGIKILLQLLGSRMVTHPVAIDSIRALACRVLLGLARDDTIAHILTKLQVGKKLSELIRDISAQTSGGDSGRWQTELTQVAIELIGVLTNSGKETTLAATDAAAPALRRIERAGIAAAAPISYHSRELMQLIHEHLLGSGFAATAAMLQKEAGLAPLPLTAAVLPAHQVAALEASSVQQQWPSGHVQGFLSDKINTSTYQSAQRSDPKLPSSKKKALAFSSSFSRRARSPHPSNILKSPVPIAADTGDAEMLNKAPLSLPLKRNFVDVKDISFASASKRLAITDQIYQSSAFQTPAPTRKGLSVSVDSPTSSHCGWTNFNNAFTENLDNSQGTPGALTTTALPGVNDQQSGNLERMTLDSLVVQYLKHQHRQCPAPVTTLPPLSLLHPHVCPEPSRSLSAPANIAARVGSREISRQFSGIQIPRRDRHFIYSRFKQCRVCRDEASLLTCLTFLGDAARVVAGNHTGELRIFDCNTANLLETQTCHQHLVTMMESTYTGGIEMILTSSLNEVKIWDAFSVSAGPLHTFDDCKSARFNHYGTSFAALSTDTAQREVQLYDVQTYTLATRLPDNTSSSGSGRGYVQPIIHFSPSDTMLLWNGVLWDTRQPNPVHQFDQFTDYCGGGFHPAGNEVILNSEVWDLRKFKLLRSVPSLDQTVIKFNGTGDVIYATLRRNLDDVTSCINARRVRHPLFPAFSTIDAVTYSDIATVQMDRCVLDLATESNDSLIGVVAMDDHQELFSSARLFEVGRKRITDDDSDPEDAGETDDDSDDDDDDSDDGVLAPVLEGGTDSEDISSSSSDDGDEDGGDDDIPSSDGIEDDRFIDERRREFMMDLFGDGWDDDEAYMMGSFSSGDEEGWIICSWRGRGRS

SEQ ID NO: 166789 - protein, 1672 aa, Zea Mays
MAESEDATAAEPGSGPPHEDEDALLARAHTVISRIIDRELDPNPRLLHTLATMCELHEARYLELRSADTMFNSTNTRTAFTIGKLANLLRDNDEFYELVFCKFLSDTSYSVAVRAATARLLLSCHPAWTPPYPHVFEDSIIDNIKKWVTEDPEASNECKWKYLGNNKPTDAEMLRTYGIGLLAMALCSSGQLIEDVLTLGVSAKLMRYLRIRVLGDASSSQRDANHPQDTKHPWGGDDSRGKSRLSQDGSRLDGTRVGYGMLTNPTAEKNNEPCVGMMQAYGARSLDDSFASLDDSDVPEADWTNDRSYSTRVCDTKSKHGERNSVTRLLKDEEVSENGELLKRKLNRAPSRLRVKGKAGDSLPECEMTPLSPTSGLRIGGQATRDRNVARVDDPKEATDVNNRLFNTISKEEYEDRFRDCIIGLKDISDIVLKAVRAAEAEARSANAPDEAVKAAGDAAAELVKFAALEVWKSENNSDAVVVVAEKAASAVVEAALSISVSRSANQVGEERAMEEAVQTSEDQDLENFVISDKAQLLQLRENYSIQCLQILGEYVEALGPVLHEKGVDVCLTLLQRSMKNQEGCDHFAQLLDVLKLVCALAAHRKFAALFVDRGGIQKIVSMPRVTQTYMGLSACLFTFGSLQSTIERVCALSSDTLDSVVELALLLLECPQDLARKNVAIFFAAAFVFKAVLDLFDARNGMQKLLDILCGCASGRSGSNSGGAGSSNVNQGNDRSPAEVLTASEKQVAYHTCVALRQYFRAHLLQLVDSIRPSKSIRSIARNTSSARAGCKPFDISNEAMDAIFCQIQRDRKLGLALVRACWLALDKFVASNGHMTMLELCKFQAHGDRYLRDLTQYAIGVLHIITLMPQPHVRKSIVQGTLSNNRAGMAVLLDTVKSLDYIDHEVICPALNVLVNLVCPPPSISNKPLSSSNQQPAAAQALASESREKNFEKTISDRNLLTNLGESRERSGDGNPAEKNNTLHQGTPSTPVVPSGVVGDRRIMLGVGGGGPGLAAQLEQGYRQAREVVRANNGIKILLQLLGSRMVTHPVAIDSIRALACRVLLGLARDDTIAHILTKLQVGKKLSELIRDISAQTSGGDSGRWQTELTQVAIELIGVLTNSGKETTLAATDAAAPALRRIERAGIAAAAPISYHSRELMQLIHEHLLGSGFAATAAMLQKEAGLAPLPLTAAVLPAHQVAALEASSVQQQWPSGHVQGFLSDKINTSTYQSAQRSDPKLPSSKKKALAFSSSFSRRARSPHPSNILKSPVPIAADTGDAEMLNKAPLSLPLKRNFVDVKDISFASASKRLAITDQIYQSSAFQTPAPTRKGLSVSVDSPTSSHCGWTNFNNAFTENLDNSQGTPGALTTTALPGVNDQQSGNLERMTLDSLVVQYLKHQHRQCPAPVTTLPPLSLLHPHVCPEPSRSLSAPANIAARVGSREISRQFSGIQIPRRDRHFIYSRFKQCRVCRDEASLLTCLTFLGDAARVVAGNHTGELRIFDCNTANLLETQTCHQHLVTMMESTYTGGIEMILTSSLNEVKIWDAFSVSAGPLHTFDDCKSARFNHYGTSFAALSTDTAQREVQLYDVQTYTLATRLPDNTSSSGSGRGYVQPIIHFSPSDTMLLWNGVLWDTRQPNPVHQFDQFTDYCGGGFHPAGNEVFFSLEPC

SEQ ID NO: 166790 - protein, 1900 aa, Zea Mays
MAESEDATAAEPGSGPPHEDEDALLARAHTVISRIIDRELDPNPRLLHTLATMCELHEARYLELRSADTMFNSTNTRTAFTIGKLANLLRDNDEFYELVFCKFLSDTSYSVAVRAATARLLLSCHPAWTPPYPHVFEDSIIDNIKKWVTEDPEASNECKWKYLGNNKPTDAEMLRTYGIGLLAMALCSSGQLIEDVLTLGVSAKLMRYLRIRVLGDASSSQRDANHPQDTKHPWGGDDSRGKSRLSQDGSRLDGTRVGYGMLTNPTAEKNNEPCVGMMQAYGARSLDDSFASLDDSDVPEADWTNDRSYSTRVCDTKSKHGERNSVTRLLKDEEVSENGELLKRKLNRAPSRLRVKGKAGDSLPECEMTPLSPTSGLRIGGQATRDRNVARVDDPKEATDVNNRLFNTISKEEYEDRFRDCIIGLKDISDIVLKAVRAAEAEARSANAPDEAVKAAGDAAAELVKFAALEVWKSENNSDAVVVVAEKAASAVVEAALSISVSRSANQVGEERAMEEAVQTSEDQDLENFVISDKAQLLQLRENYSIQCLQILGEYVEALGPVLHEKGVDVCLTLLQRSMKNQEGCDHFAQLLDVLKLVCALAAHRKFAALFVDRGGIQKIVSMPRVTQTYMGLSACLFTFGSLQSTIERVCALSSDTLDSVVELALLLLECPQDLARKNVAIFFAAAFVFKAVLDLFDARNGMQKLLDILCGCASGRSGSNSGGAGSSNVNQGNDRSPAEVLTASEKQVAYHTCVALRQYFRAHLLQLVDSIRPSKSIRSIARNTSSARAGCKPFDISNEAMDAIFCQIQRDRKLGLALVRACWLALDKFVASNGHMTMLELCKAHGDRYLRDLTQYAIGVLHIITLMPQPHVRKSIVQGTLSNNRAGMAVLLDTVKSLDYIDHEVICPALNVLVNLVCPPPSISNKPLSSSNQQPAAAQALASESREKNFEKTISDRNLLTNLGESRERSGDGNPAEKNNTLHQGTPSTPVVPSGVVGDRRIMLGVGGGGPGLAAQLEQGYRQAREVVRANNGIKILLQLLGSRMVTHPVAIDSIRALACRVLLGLARDDTIAHILTKLQVGKKLSELIRDISAQTSGGDSGRWQTELTQVAIELIGVLTNSGKETTLAATDAAAPALRRIERAGIAAAAPISYHSRELMQLIHEHLLGSGFAATAAMLQKEAGLAPLPLTAAVLPAHQVAALEASSVQQQWPSGHVQGFLSDKINTSTYQSAQRSDPKLPSSKKKALAFSSSFSRRARSPHPSNILKSPVPIAADTGDAEMLNKAPLSLPLKRNFVDVKDISFASASKRLAITDQIYQSSAFQTPAPTRKGLSVSVDSPTSSHCGWTNFNNAFTENLDNSQGTPGALTTTALPGVNDQQSGNLERMTLDSLVVQYLKHQHRQCPAPVTTLPPLSLLHPHVCPEPSRSLSAPANIAARVGSREISRQFSGIQIPRRDRHFIYSRFKQCRVCRDEASLLTCLTFLGDAARVVAGNHTGELRIFDCNTANLLETQTCHQHLVTMMESTYTGGIEMILTSSLNEVKIWDAFSVSAGPLHTFDDCKSARFNHYGTSFAALSTDTAQREVQLYDVQTYTLATRLPDNTSSSGSGRGYVQPIIHFSPSDTMLLWNGVLWDTRQPNPVHQFDQFTDYCGGGFHPAGNEVILNSEVWDLRKFKLLRSVPSLDQTVIKFNGTGDVIYATLRRNLDDVTSCINARRVRHPLFPAFSTIDAVTYSDIATVQMDRCVLDLATESNDSLIGVVAMDDHQELFSSARLFEVGRKRITDDDSDPEDAGETDDDSDDDDDDSDDGVLAPVLEGGTDSEDISSSSSDDGDEDGGDDDIPSSDGIEDDRFIDERRREFMMDLFGDGWDDDEAYMMGSFSSGDEEGWIICSWRGRGRS

SEQ ID NO: 166791 - protein, 84 aa, Zea Mays
MDLKKLLDNAGNLINTLCTDVKQSGGQYHVLLIIADGKDAMAALPCSPNSAHLPLSLRDARWIGESMAAWQGGLSQRFSKVVSY

SEQ ID NO: 166792 - protein, 889 aa, Zea Mays
MAAPAIWQPQEQGLHEICTLLEAHISPNSDQARIWQQLQHYSQFPDFNNYLTFILARGEGKSIEVRQAAGLLLKNNLRTTFISMQPSSQHYVKSELLPCIGATNRAIRSTVGTVISVLFQIVRVAGWIELFQALHKCLESNDLDHMEGAMDAIYKICEDVPEELDVDVPGLSERPINVFMPKILQFFQSPHASLRKLSLGCINQYIVVMPSALYMSMDQYIQGLFNLAKDPSADVRKLVCSAWVQLIEVRPSILESHLKNVTELILQANKDPDDEVALEACEFWSAYCDVSMPPEGLREFLPRLIPTLLSNMVYADDDESLDDAEEDESFPDRDQDLKPRFHASRLHGSQTGDDDDDDDAVNVWNLRKCSAAGLDVLSNVFGDSILPTLMPLIEQNLARTDDNSWKERETAVLCLGAIAEGCIGGLYPHLPQIVAFLIPLLDDKFPLIRSITCWTLSRYSKFIVQSLDHPNGREQFDKILMGLLRRILDTNKRVQEAACSAFATLEEEASEELVPHLEVILQHLMCAYGKYQRRNLRILYDALGTLADAVGAELNQAKYLDIFMPPLITKWQQLSNSDKDLFPLLECFTSIAQALGPGFAQFAEPVFQRCINLIQSQQLAKIDPTAAGAVYDREFIVCSLDLLSGLAEGLGAGIESLVAQSSLRDLLLQCCMDEAADVRQSALALLGDLSRVCPIHLHPRLQEFLTVAAKQLNPQSVKDAVSVANNACWAIGELAIKIGKEIAPVVITVVSCLITILKSPEGLNKSLVENSAITLGRLSWVCPDIVAPHMEHFMQAWCSALCTDDFEKEDAFHGLCAMVAANPTGAAGSLAYICQACASWTEIKSEGLHNEVCQILNGYKQLLGNNGGWEQCMAALKPDVVQKLARYGV

SEQ ID NO: 166793 - protein, 367 aa, Zea Mays
MCAYGKYQRRNLRILYDALGTLADAVGAELNQAKYLDIFMPPLITKWQQLSNSDKDLFPLLECFTSIAQALGPGFAQFAEPVFQRCINLIQSQQLAKIDPTAAGAVYDREFIVCSLDLLSGLAEGLGAGIESLVAQSSLRDLLLQCCMDEAADVRQSALALLGDLSRVCPIHLHPRLQEFLTVAAKQLNPQSVKDAVSVANNACWAIGELAIKIGKEIAPVVITVVSCLITILKSPEGLNKSLVENSAITLGRLSWVCPDIVAPHMEHFMQAWCSALCTIRDDFEKEDAFHGLCAMVAANPTGAAGSLAYICQACASWTEIKSEGLHNEVCQILNGYKQLLGNNGGWEQCMAALKPDVVQKLARYGV

SEQ ID NO: 166794 - protein, 653 aa, Zea Mays
MLSSKPATGPSNSTRGVRLPPEGEGCRPRPSTSRDIHDGLDGGTEALRIKRTRISASCSIDPQSPVSAAEALDEPIGVSSELSHPQMGTSTQCQRPTAYGGVPSHGNTAHKKRAIQMMDEDFQHTVFLREPKPEPDTDDLQCSAPASSCQNAQLGRIASHPLNASTLDALPVQAPLKISGANGRTVQHYRSTAPSSFVEPINSKTKQPQSLENGLDHATMMHNAGTGSAAGKTQEAPCLHTLVASSTMGEVEMSIKCCIDPSKFHMPDLEAVFKMVEEKCLRSHKSLPPDFSIAGLIKQICQCVARLGSDHAAEHNKQSDAFGKIRSSQDKPTTSSAPSLEPIDCMNSRSGEYKAVEESLIVEASENGPPNSTTHQQAHLVLPPNGCTHDLSDISKGKERLSISAVNEFGSENCLPSFYYIPRNLVSQDSYVNSVETIGDKDCCSDCSGNCLYASEPCACARKTGGEFAYTRDGLVRTKFLDECISMNRFPEKHNMFFCKSCPLESIRNEPSPELCRGHIIRNFIKECGSKCGCNAQCGNRVVQRGITCNLQVFSTREGKGWGLRTLDELPKGAFVCEYVGELLTNTKLHEMTTQNMHNARYSVLLDAGWGPDGVLKDEEALFLDATFCGNVGRFINHRCCLLILNLLIVMLF

SEQ ID NO: 166795 - protein, 272 aa, Zea Mays
MHRLVLEHGRTSMSWFGPSPKVTIVDPDLAKDVLSNKFGHFEKLKVPALSKMLGSGVASHEGEKWVKHRRILNHAFHLEKLKLVSRWAAESLGSDGSCELDVWPELQNLTGDIISRTVFSSSYSEGRRIFQLQVEQASLVMTNIRKIMIPGYMYLPTANNRKMRRNNREVESILREIIGKRIQAMEQGEGTKDDLVGLLLETNMRDDMGMTIEDVIEECKVFYFVGMETTLVLLMWTMVVLSMHPEWQDRAREEVTALFGRDDKPELQKRDC

SEQ ID NO: 166796 - protein, 420 aa, Zea Mays
MHRLVLEHGRTSMSWFGPSPKVTIVDPDLAKDVLSNKFGHFEKLKVPALSKMLGSGVASHEGEKWVKHRRILNHAFHLEKLKRMLPAFSTCCEELVSRWAAESLGSDGSCELDVWPELQNLTGDIISRTVFSSSYSEGRRIFQLQVEQASLVMTNIRKIMIPGYMKMRRNNREVESILREIIGKRIQAMEQGEGTKDDLVGLLLETNMRDDMGMTIEDVIEECKVFYFVGMETTLVLLMWTMVVLSMHPEWQDRAREEVTALFGRDDKPEYDGLSRLKVVTMVLYEVLRLYPPATSVVRQTYKEMEVGGVTYPAGVILELPVLLIHHDPDIWGGDAREFRPDRFSEGVSRASKDPGAFLPFGWSPRICIGQNFALLEAKMALCMILQRFEFGLAPSYAHAPHTMITLHPMHGAQLKLRAI

SEQ ID NO: 166797 - protein, 137 aa, Zea Mays
MKMRRNNREVESILREIIGKRIQAMEQGEGTKDDLVGLLLETNMRDDMGMTIEDVIEECKVFYFVGMETTLVLLMWTMVVLSMHPEWQDRAREEVTALFGRDDKPEYDGLSRLKVIAKTGLLSKLRFQWHIPSYIGH

SEQ ID NO: 166798 - protein, 863 aa, Zea Mays
MVRSAFAPQQPSAVEQPAAAGNGGDEHEARPPRIFRSVPAAEPRRATLHAVAAPPPPPGQTVVMPKPAASAPPGPAFGLVETKPPLPAKMGPRAAAAAAAKIASTYDMVEPMTYLYVSVVKARDLPNMDVTGALDPYVEVKLGNFKGVTKHLDKNPNPVWRQTFAFSREHLQSNLLEVAIKDKDMIKDDFVGRVLFDMTDIPQRVPPDSPLAPQWYRLADRSGEKLRHGEIMLAVWIGTQADEAFPEAWHSDAHSLPFEGLSNTRSKVYYSPKLAYLKVVAIAAQDVVPAGSEKGRPLAPVIAKIQLGWQVRRTRPGQPQGSANPVWNEEFMFVAADPFDEPLVVTVEERVAAGRDEPVGRVIIPVQLPSYVPRNDVAKSVEAKWFNLSRALTADEAAAGVTAAKALSEKTTFSSKIHLRLSLETAYHVLDESTHYSSDLQPSAKKLRKSPIGILELGILSARNLVPMKAKEGRLTDPYCVAKYGSKWVRTRTLLNTLAPQWNEQYTWEVFDPCTIVTVAVFDNGYVLGGGEGSKDQRIGKVRVRLSTLEIDRVYTHFYPLMTLTPGGLKKTGELHLAVRFTCTAWANMLGMYGKPLLPKMHYSHPISVLQLDYLRFQAMQMVAARLGRAEPPLRREVVEYMLDVDSHMFSLRRSKANFYRITSLFSGAVAVAKWMEGICKWKNPLTTVLVHVLFLILVCYPELILPTVFLYLFMIGMWNYRRRPRKPPHMDTVLSHAESGLVHPDELDEEFDTFPTSKPGDVVRMRYDRLRSVAGRVQTVVGDLATQGERAQALLSWRDPRATAIFIMLSLVVAVVLYVTPFQVVAVVLGLYLLRHPRFRSKQPSVPFNFYKRLPAKSDMLL

SEQ ID NO: 166799 - protein, 936 aa, Zea Mays
MKLVVEISDAADLAPKDGTASCNPYVEVDFDDQRQRTATKPADRSPYWNQTLVFDVRDPARFPSLPIDVSVFHDRRLQDHNALRPQTFLGRVRINGASVAPSPQEAVLQRYPLEKRSFFSRVSGDIAIRIYLVGDDVNNESVQVPAPPNHHHHPQQQQQQQESVAAAAATGDPERMVRSAFAPQQPSAVEQPAAAGNGGDEHEARPPRIFRSVPAAEPRRATLHAVAAPPPPPGQTVVMPKPAASAPPGPAFGLVETKPPLPAKMGPRAAAAAAAKIASTYDMVEPMTYLYVSVVKARDLPNMDVTGALDPYVEVKLGNFKGVTKHLDKNPNPVWRQTFAFSREHLQSNLKVVAIAAQDVVPAGSEKGRPLAPVIAKIQLGWQVRRTRPGQPQGSANPVWNEEFMFVAADPFDEPLVVTVEERVAAGRDEPVGRVIIPVQLPSYVPRNDVAKSVEAKWFNLSRALTADEAAAGVTAAKALSEKTTFSSKIHLRLSLETAYHVLDESTHYSSDLQPSAKKLRKSPIGILELGILSARNLVPMKAKEGRLTDPYCVAKYGSKWVRTRTLLNTLAPQWNEQYTWEVFDPCTIVTVAVFDNGYVLGGGEGSKDQRIGKVRVRLSTLEIDRVYTHFYPLMTLTPGGLKKTGELHLAVRFTCTAWANMLGMYGKPLLPKMHYSHPISVLQLDYLRFQAMQMVAARLGRAEPPLRREVVEYMLDVDSHMFSLRRSKANFYRITSLFSGAVAVAKWMEGICKWKNPLTTVLVHVLFLILVCYPELILPTVFLYLFMIGMWNYRRRPRKPPHMDTVLSHAESGLVHPDELDEEFDTFPTSKPGDVVRMRYDRLRSVAGRVQTVVGDLATQGERAQALLSWRDPRATAIFIMLSLVVAVVLYVTPFQVVAVVLGLYLLRHPRFRSKQPSVPFNFYKRLPAKSDMLL

SEQ ID NO: 166800 - protein, 431 aa, Zea Mays
MRAAMAAAVLRPTAATLRFLSTPPHQRRRVLVGHLPFARRRRHSSTATAPALEDSSPRSGEGKAVRRRRARESPQGLLRHQLDMCSRNADLTTALRLYDDALSPDNPIPLSLHHYNCLLYLCSNAAATDSDSHISATAAQRGFDIFARMEADGVQPNEATLTSVARLAAATRDPAMAFSVVRRMAAAGTPPRLRTYGPALFAYCDAKDADGAKQVEAHMDASGVVPEEPELAALLRVNADTGKADEVYRLLHRTRVLVRQVCDTTAQVVEAWFRSDAASQAGVDSWDPTKVKEGVVKGGGGWHGQGWLGKGAWSVGWTEMGKDGTCQRCGERLVCIDIDPAETDNFANSLTELAIKLEAREDFLSFQSWLRRHGPFDAVIDAANVGLYKSKDFCFSQEPCKCWSCKSPIQPEDSGQLEECWSSVCNPSWLQ

SEQ ID NO: 166801 - protein, 407 aa, Zea Mays
MRAAMAAAVLRPTAATLRFLSTPPHQRRRVLVGHLPFARRRRHSSTATAPALEDSSPRSGEGKAVRRRRARESPQGLLRHQLDMCSRNADLTTALRLYDDALSPDNPIPLSLHHYNCLLYLCSNAAATDSDSHISATAAQRGFDIFARMEADGVQPNEATLTSVARLAAATRDPAMAFSVVRRMAAAGTPPRLRTYGPALFAYCDAKDADGAKQVEAHMDASGVVPEEPELAALLRVNADTGKADEVYRLLHRTRVLVRQVCDTTAQVVEAWFRSDAASQAGVDSWDPTKVKEGVVKGGGGWHGQGWLGKGAWSVGWTEMGKDGTCQRCGERLVCIDIDPAETDNFANSLTELAIKLEAREDFLSFQSWLRRHGPFDAVIDAANVGLYKSKDFCFSQVGGGFSSAKQ

SEQ ID NO: 166802 - protein, 623 aa, Zea Mays
MYSANHWGGSFEIADGAAEDDHSRNMDLDRGALSARQHHELDETQQSWLLGPPEAKKKDKYVDLGCVVVKRKLLWWALWCVVAAFVLIGLPIIIAKSIPHKKPGPPPPDQYTEALHKALLFFNAQKSGHLPKNNGIKWRGNSGLSDGSDAKDVKGGLVGGYYDAGDNIKFHFPMAFSMTLLSWSVIEYSAKYKAMGEYDHVRELIKWGTDYLLLTFNSSASTIDKLYAQVGAAKINGSRPDDHYCWNRPEDMAYPRPSLSVSSAPDLGGEVAAALAAASIVFRDNAAYSKKLSQGAATVYKFARQSGRRTPYSLRQPDIEYYYNSTSYWDEYMWSAGWMYYATGNSSYITFATDPRLPKNAKAFFSILDFSVFSWDNKLPGAQLLLSRLRMFLNPGYPYEESLAGYHNATSLNMCMYFPRFAAFNFTKGGMALFNHGRGQPLQYVVANSFIAALYADYMEAVNVPGWYCGPNFMTTNDLREFARSQVNYILGDNPKKMSYVVGFGSKYPRHVHHRGASTPHNGVKYSCTGGYKWRDSKKADPNLLAGAMVGGPDKNDGFKDSRNTFGQNEPTLVGNAGLVAALVALTNSGRGAGVTTVDKNTMFSAVPPMFPATPPPPSSWKP

SEQ ID NO: 166803 - protein, 151 aa, Zea Mays
MRCSSTSMHVLRTAGDDGLLADSTADYSSDNRISLDAIETIFCEVDELGPQAMVNNTNHCDSCGEYLIHPTMVARGAEQYLELNDLSFSLTDGPDSCGVLFSNGVSVEQLPDLELRFEQFSPDHISNTAIASTSTTVGSSASVPLLEDHRT

SEQ ID NO: 166804 - protein, 186 aa, Zea Mays
MDSSSSSLSQQPEFDYLFKLLLIGDSGVGKSSLLLRFTADSFDDLSPTIGVDFKVKMVSIGGKKLKLAIWDTAGQERFRTLTSSYYRGAQGIIMVYDVSRRETFTNLSDIWAKEIDLYSTNQDCVKMLVGNKVDKESERAVTKKEGIEFAREYGCLFLECSAKTKVNVEQCFEELVLKYWPVCTLQ

SEQ ID NO: 166805 - protein, 80 aa, Zea Mays
MDSSSSSLSQQPEFDYLFKLLLIGDSGVGKSSLLLRFTADSFDDLSPTIGVDFKVKMVSIGGKKLKLAIWDTAYTGRGLF

SEQ ID NO: 166806 - protein, 806 aa, Zea Mays
MASPPPFDLCGDLDDDDIDEPVTAVPKDRHLPAAAPTPNGLNDHLLRFTRSLQRPTQNPNPSPNPPPPPPPAAAEEQVEKVKLAGRRRLCKLATTTTATQRVDEEEAEWDNQDDGESILDILDDLTTRFDSLSVQKPSTAARSRTQQLTPLPCAITVDDDLDDHSPDDVDAHAGASSPLQISSSDEARAPTRRSEVKIETDLVSSACTHYACDDVRGKGKNKGTTKDVGRLNRVSKASSFVDSYSDSDYDDCEEDQGTRTDYAVKQLRSKGFTRRPPNTPTFRNHGVSDDELGQEKENLGAVENNAEDVGWEKTEDFKMDPTGTAATSKPYKLPGKIFKMLFAHQREGLRWLWVLHCRGTGGILGDDMGLGKTMQVAAFLAGLFHSRLVKRVLIVAPKTLLAHWTKELSIVGLKEKIRDYSGPSTNIRNYELQYAFKEGGILITTYDIVRNNYKLIRGNSYNNSNDDDDEEGTLWNYVILDEGHLIKNNKTQRAQSLYEIPCAHRIVISGTPIQNNLKEMWTLFNFCCPDVLGDKQQFKIRYETAILRGNDKNATAREKHVGSNVAKELRERIKPYFLRRLKSEVVFDTGASEEKTLAKKNELIVWLKLTPCQRKLYEAFLNSELVHLALQPKASPLAAITILKKICDHPLLLTKKGAEGVLEGMGEMLNDQDIGMVEKMAMNLADMAHDDNALEVGQDVSCKLSFIMSLLRNLVGEGHHVLIFSQTRKMLNLIQEAIILEGYAFLRIDGTTKVSDRERIVKDFQEGCGAPVFLLTTQVGGLGLTLTKATRVIVVDPAWNPRQSKC

SEQ ID NO: 166807 - protein, 1010 aa, Zea Mays
MASPPPFDLCGDLDDDDIDEPVTAVPKDRHLPAAAPTPNGLNDHLLRFTRSLQRPTQNPNPSPNPPPPPPPAAAEEQVEKVKLAGRRRLCKLATTTTATQRVDEEEAEWDNQDDGESILDILDDLTTRFDSLSVQKPSTAARSRTQQLTPLPCAITVDDDLDDHSPDDVDAHAGASSPLQISSSDEARAPTRRSEVKIETDLVSSACTHYACDDVRGKGKNKGTTKDVGRLNRVSKASSFVDSYSDSDYDDCEEDQGTRTDYAVKQLRSKGFTRRPPNTPTFRNHGVSDDELGQEKENLGAVENNAEDVGWEKTEDFKMDPTGTAATSKPYKLPGKIFKMLFAHQREGLRWLWVLHCRGTGGILGDDMGLGKTMQVAAFLAGLFHSRLVKRVLIVAPKTLLAHWTKELSIVGLKEKIRDYSGPSTNIRNYELQYAFKEGGILITTYDIVRNNYKLIRGNSYNNSNDDDDEEGTLWNYVILDEGHLIKNNKTQRAQSLYEIPCAHRIVISGTPIQNNLKEMWTLFNFCCPDVLGDKQQFKIRYETAILRGNDKNATAREKHVGSNVAKELRERIKPYFLRRLKSEVVFDTGASEEKTLAKKNELIVWLKLTPCQRKLYEAFLNSELVHLALQPKASPLAAITILKKICDHPLLLTKKGAEGVLEGMGEMLNDQDIGMVEKMAMNLADMAHDDNALEVGQDVSCKLSFIMSLLRNLVGEGHHVLIFSQTRKMLNLIQEAIILEGYAFLRIDGTTKVSDRERIVKDFQEGCGAPVFLLTTQVGGLGLTLTKATRVIVVDPAWNPSTDNQSVDRAYRIGQTKNVIVYRLMTSATIEEKIYKLQVLKGALFRTATEQKEQTRYFSKSEIQELFSLPQQGFDVSLTHKQLQEEHGQQVVLDESLRKHIQFLEQQGIAGVSHHSLLFSKTATLPTLSENDALDSKPRGMPMMPQQYYKGSSSDYVANGASFALKPKDESFTVRNYIPSNRSAESPEEIKARINRLSQTLSNAMVVRR

SEQ ID NO: 166808 - protein, 1035 aa, Zea Mays
MASPPPFDLCGDLDDDDIDEPVTAVPKDRHLPAAAPTPNGLNDHLLRFTRSLQRPTQNPNPSPNPPPPPPPAAAEEQVEKVKLAGRRRLCKLATTTTATQRVDEEEAEWDNQDDGESILDILDDLTTRFDSLSVQKPSTAARSRTQQLTPLPCAITVDDDLDDHSPDDVDAHAGASSPLQISSSDEARAPTRRSEVKIETDLVSSACTHYACDDVRGKGKNKGTTKDVGRLNRVSKASSFVDSYSDSDYDDCEEDQGTRTDYAVKQLRSKGFTRRPPNTPTFRNHGVSDDELGQEKENLGAVENNAEDVGWEKTEDFKMDPTGTAATSKPYKLPGKIFKMLFAHQREGLRWLWVLHCRGTGGILGDDMGLGKTMQVAAFLAGLFHSRLVKRVLIVAPKTLLAHWTKELSIVGLKEKIRDYSGPSTNIRNYELQYAFKEGGILITTYDIVRNNYKLIRGNSYNNSNDDDDEEGTLWNYVILDEGHLIKNNKTQRAQSLYEIPCAHRIVISGTPIQNNLKEMWTLFNFCCPDVLGDKQQFKIRYETAILRGNDKNATAREKHVGSNVAKELRERIKPYFLRRLKSEVVFDTGASEEKTLAKKNELIVWLKLTPCQRKLYEAFLNSELVHLALQPKASPLAAITILKKICDHPLLLTKKGAEGVLEGMGEMLNDQDIGMVEKMAMNLADMAHDDNALEVGQDVSCKLSFIMSLLRNLVGEGHHVLIFSQTRKMLNLIQEAIILEGYAFLRIDGTTKVSDRERIVKDFQEGCGAPVFLLTTQVGGLGLTLTKATRVIVVDPAWNPSTDNQSVDRAYRIGQTKNVIVYRLMTSATIEEKIYKLQVLKGALFRTATEQKEQTRYFSKSEIQELFSLPQQGFDVSLTHKQLQEEHGQQVVLDESLRKHIQFLEQQGIAGVSHHSLLFSKTATLPTLSENDALDSKPRGMPMMPQQYYKGSSSDYVANGASFALKPKDESFTVRNYIPSNRSAESPEEIKVLLSKLPDGGEKIRRQINELDEKLTSAEKGLKEGGTEVISLDD

SEQ ID NO: 166809 - protein, 210 aa, Zea Mays
MQSGSGSGRRRRSRSFLPVNARERRKRQGGGVGSTLESRQRPTSEGNFDPSSTSTGGPARPRLPACLPVPGASHPIFAWPRNSVGRTPIPEVGRFLNGPQILPRLLSSCLPLNVARRFSLFLGERVFQFLPCRPPRWWDRGRRQTDGGQRHAGHAAFGAAAISASAVAVHPLDTVKHSSSFQLGSGSWWTGSGRFWPCRFLQWHWMVHNG

SEQ ID NO: 166810 - protein, 83 aa, Zea Mays
MEEKEHTRWNGEGSGHAVPVPLNTAFGPAAWPSRTDVHTDVVHELVATVLACGCLGGSSNSEMWRVLKREQRIRPGRWMGVGF

SEQ ID NO: 166811 - protein, 388 aa, Zea Mays
MATATHHSDAPGLNGAEGMEMMAEANELRRRGKPSDDRTASYGAGAEEDEAAAAAAPSSSSVERAFADQPVPSWREQLTLRAFVVSFFLAVMFSVIVMKLNLTTGIIPSLNISAGLLGFFFVRLWTKAIESVGLLRQPFTRQENTVIQTCVVASYGLSFSGGFGNYLLAMSDKIAAMVTEANNAQNIKNPQLGWIIGFLFLVSFIGLFGLVPLRKIMIVDYKLTYPSGTATAYLINGFHTPQGAKLARKQVKKLGTFFVLSFVWGFFQWFYTANPDECGFQKFPSLGLQAFDNKFFFDFSPTYVGVGMICSHIVNVSILLGAILSWGIMWPLIAKKKGVWFSADLDDNSLHGMQGLHSHCLDSRGWSIQLPEDIHPHRGLVKISSKKS

SEQ ID NO: 166812 - protein, 418 aa, Zea Mays
MICSHIVNVSILLGAILSWGIMWPLIAKKKGVWFSADLDDNSLHGMQGYRVFIAIALILGDGLYNFLKIFILTVVSLRSQVRKANASTLPISDDGTVTSTAPTSYDEERRNEHFLKDQIPWYAALGGYVAIAAISIGTVPQIFPQLKWYHILVAYIFAPILAFCNAYGNGLTDWSLVTTYGKLAIFAFGAWVGASNGGVLAGLAACGVMMNIVGTAADLMGDFKTGYLTLASPRSMFISQVIGTAMGCVIAPCVFWLFYKAFGNIGVAGSEYPAPNAVVFRSMAVLGVDGFSSLPENCLTLCYVFFAAAIVINLIRDLVPKKVSRFIPIPMAMAIPFYIGAYFAVDMFVGTVILFVWQRLDRAKADTFAPAIASGMICGDGIWVLPQSVLALAKVKPPICMKFLSRAMNDKVDVFLGS

SEQ ID NO: 166813 - protein, 71 aa, Zea Mays
MKFTDEQSSRATIPAGMRIWLPLAGARGQDGRIRSRRAVLTSPSRSILGSHKNCGRMEQQGRSSKSHQEAH

SEQ ID NO: 166814 - protein, 79 aa, Zea Mays
MLLCLYTGPFSLLPQIRCQDAYGAHDLSTRIFVQFSSSDVKSLLRCPAYSYYLRCTCSWCLLLPCLCFQHSMIILPPPP

SEQ ID NO: 166815 - protein, 194 aa, Zea Mays
MADDPNMNFGAFSQSLCNQHVVSFQTSVATSGSGGMPTYLDCSTGMDASVGMLTTPSVVVSTGSSNMPADSGQSLKYGGPLAADWTQVELEILRDGMEKYVHEQGIMKYIKIAASLPNKTVRDVAMRCQWVGKKVNTRRRKPQEHHTGRNTKERKDKFVEPALWGTNHPLQTGMTASSFVPHNGQNAMFISGGW

SEQ ID NO: 166816 - protein, 208 aa, Zea Mays
MADDPNMNFGAFSQSLCNQHVVSFQTSVATSGSGGMPTYLDCSTGMDASVGMLTTPSVVVSTGSSNMPADSGQSLKYGGPLAADWTQVELEILRDGMEKYVHEQGIMKYIKIAASLPNKTVRDVAMRCQWVGKKVNTRRRKPQEHHTGRNTKERKDKFVEPALWGTNHPLQTGMTASSFVPHNGQNAMFISGGCLRDRSSSAASAGGK

SEQ ID NO: 166817 - protein, 186 aa, Zea Mays
MSRVAKTVAVALAGSLLGHDEAAAFPAGCGETTCYLRLNRYPACPFAANTFGLVPHTDSDFLTVLSQDQVGGLQLMTDAGWVAVKPRPDALIVNIGDLFQAWSNNLYKSVEHKVVANAAAERFSAAYFLCPSYDSLVGTCGEPSPYRDFTFGEYRRKVQEDVKRTGRKIGLPNFLKHRPPPQSRPA

SEQ ID NO: 166818 - protein, 174 aa, Zea Mays
MATCNVREIVALERTGTWLIIHHPLMYSLSHVSGSIRLRPALMVLLSVRLVLLVVVSGRNMGMIMMCVYKDRICSDGSLECYKAHLVARGFQHEHGRDYDETFAPVAHMNIVHTHLVASNREWSISEFDVKLHEEVYMQPPPRYSVPMGMVCHLRRSLYGLKQAPQAWFQHLLL

SEQ ID NO: 166819 - protein, 215 aa, Zea Mays
MASNTAILESDPLNWGKAAAELTGSHLEENLKSAVKSCVMAVARKVLTTSLGGDLHSARFSEKALLTAIDREAVYGYYDDPCSANSPLMKKIRAVLVDHALASGEAEKDASASVFSKINRFEEELREALPREMEAARVAFETGAAPIANRIKESRSYPLYRFIRQDLGAVYLTGEKLKSPGEECNKVFLALSEGKLIDPMLDCLKEWDGKPLPIC

SEQ ID NO: 166820 - protein, 70 aa, Zea Mays
MLIWSKPQSLARGSLQVSQDLINYLHMPSSRIMHIPTHHTYCISNVRSCMAKIYQTTNYPLISFPIYRVT

SEQ ID NO: 166821 - protein, 326 aa, Zea Mays
MASSGYEGILLGMGNPLLDISAVVDEGFLAKYDELASKSNVEYIAGGATQNSIRVAQWMLQIPGASSYIGCIGKDKFGEEMKKNAQAAGINAHYHEDENAPTGTCAVCVVGGERSLIANLSAANCYKSEHLKKPENWALVEKAKYIYIAGFFLTVSPDSIQLVAEHAAATNKVFMMNLSAPFICEVFRDAQEKALPYVDYIFGNETEARTFAKVRGWETENVEEIALKISQLPKASGTHKKITVITQGCDPVVVADDGKVKTFPVILLPKEKLVDTNGAGDAFVGGFLSQLVQEKNIDECVRAACYAANVVIQRSGCTYPEKPDFN

SEQ ID NO: 166822 - protein, 582 aa, Zea Mays
MGCCQTNIPKKMGFYNVSFDPASDTSQISRLGLGSCSYAVLMEAEEFSFSTTYITNTTAFNDTNSGRVPVVMDWAIRDDGAPSCELATRNETGTYACRSGNSKCVESPNGPGYLCNCSGGYEGNPYLPDGCHDVDECKKNSPCPSVGGVCHNTVGAYRCSCRAGRRLNKQNNTCDPDTTLITGVTIGFLVLVIFSSFGYMILQKRKLNQVKQDHFRQHGGMILFERMRSENGLAFTVFSEAELVKATDSYDKSRIIGKGGHGTVYKGIVKGNVPIAIKRCALIDDRQKKEFGQEMLILSQINHKNIVKLEGCCLEVEVPMLVYEFVPNGTLYELIHGKNQALQIPFSTLLRIAHEAAEGLSFLHSYASPPIIHGDVKSANILLDGNYMAKVSDFGASILAPSDKEQYVTMVQGTCGYLDPEYMQTCQLTEKSDVYSFGVILLEVLTGQEPLKLDGPETQRSLSSKFLSAMKENNLDVILPSHVNGGQGSNELIRGLAELAKQCLDMCGCNRPSMKEVADELGRLRKLSLHPWVQIDAEMIESQSLLSGTTTASFEIEVGTTGYPTQEAENLPMNPRSSYYAR

SEQ ID NO: 166823 - protein, 314 aa, Zea Mays
MDSMEQPEPKTAGHYYALQVGSVFLTGYYNVLTNQPHLANQFYTDNSSVVRLDCETGRWSFGETVEVINDMMMSMKLSKVEVKTANFLESWAGAITLLVTGLVKLKHYPVRKRFAQNIVLAPKEDGYFIFSDIFKLICDEYDDQYPFADYNCADNMPQVEASYTMAEIGSDYLDGEPEAQETVDPAENHVQHQDYLEYKAGNVIDDETHLEEHIPPFPSSTDVKRDSPLALPHPPSPTLEEPVEEAPKTYASVKSFFRFMLGIFRHLLRSLILRKCSRLLEELNLMELLSEAARRLEYSLALLSSKTCLVFRML

SEQ ID NO: 166824 - protein, 235 aa, Zea Mays
MMMSMKLSKVEVKTANFLESWAGAITLLVTGLVKLKHYPVRKRFAQNIVLAPKEDGYFIFSDIFKLICDEYDDQYPFADYNCADNMPQVEASYTMAEIGSDYLDGEPEAQETVDPAENHVQHQDYLEYKAGNVIDDETHLEEHIPPFPSSTDVKRDSPLALPHPPSPTLEEPVEEAPKTYASVLRTKSKATLAITESQQAQQLAQQPQSASVHEKSNLDNHRDVSVPEDEGNEHG

SEQ ID NO: 166825 - protein, 299 aa, Zea Mays
MDSMEQPEPKTAGHYYALQVGSVFLTGYYNVLTNQPHLANQFYTDNSSVVRLDCETGRWSFGETVEVINDMMMSMKLSKVEVKTANFLESWAGAITLLVTGLVKLKHYPVRKRFAQNIVLAPKEDGYFIFSDIFKLICDEYDDQYPFADYNCADNMPQVEASYTMAEIGSDYLDGEPEAQETVDPAENHVQHQDYLEYKAGNVIDDETHLEEHIPPFPSSTDVKRDSPLALPHPPSPTLEEPVEEAPKTYASVATLAITESQQAQQLAQQPQSASVHEKSNLDNHRDVSVPEDEGNEHG

SEQ ID NO: 166826 - protein, 336 aa, Zea Mays
MRESEELDIEIAKPAGSLVEEMDVGRSVCSPAVEIEGFAERVGSSTIAPSPCIPSHDMNLQSLPVATGAPYPASMAPSSSAFSTVTTHGCFPYSTPSTAHPSLSGILPCNNNMISYSVLPEEPSGGIFSGQSPEGCADPGDIDYRVESQQIPGPGRTVDESDNRDEWFVPTDITWNWHQMAESAPVPSYPNSKSWQHDEQHMNFGTVSLSPYKVLLAFYCAKPKAILDIMNVEGLTRDQVKSHFQKYKLQVKQHPSEVPGTSVEMTMRSEAIPSDVQKHIQDYALQVQVEFQKKLHDMVESTMLEIRRSLLENHVMSLHELEQRQSSYRGSDDAGA

SEQ ID NO: 166827 - protein, 375 aa, Zea Mays
MRESEELDIEIAKPAGSLVEEMDVGRSVCSPAVEIEGFAERVGSSTIAPSPCIPSHDMNLQSLPVATGAPYPASMAPSSSAFSTVTTHGCFPYSTPSTAHPSLSGILPCNNNMISYSVLPEEPSGGIFSGQSPEGCADPGDIDYRVESQQIPGPGRTVDESDNRDEWFVPTDITWNWHQMAESAPVPSYPNSKSWQHDEQHMNFGTVSLSPYKVLLAFYCAKPKAILDIMNVEGLTRDQVKSHFQKYKLQVKQHPSEVPGTSVEMTMRSEAIPSDVQKFVTTRKNKAFANYHLCHHRHFYKKSLIFLCNQPGVHLTRHIQDYALQVQVEFQKKLHDMVESTMLEIRRSLLENHVMSLHELEQRQSSYRGSDDAGA

SEQ ID NO: 166828 - protein, 321 aa, Zea Mays
MNLQSLPVATGAPYPASMAPSSSAFSTVTTHGCFPYSTPSTAHPSLSGILPCNNNMISYSVLPEEPSGGIFSGQSPEGCADPGDIDYRVESQQIPGPGRTVDESDNRDEWFVPTDITWNWHQMAESAPVPSYPNSKSWQHDEQHMVHESVSVPSEEPQQLCPTVSPLATTNNAHCPKRAKARMRWTMEMHDRFVDAVNLLGGCESAKPKAILDIMNVEGLTRDQVKSHFQKYKLQVKQHPSEVPGTSVEMTMRSEAIPSDVQKHIQDYALQVQVEFQKKLHDMVESTMLEIRRSLLENHVMSLHELEQRQSSYRGSDDAGA

SEQ ID NO: 166829 - protein, 108 aa, Zea Mays
MLALLAEMFRTVCGRTPPPSPLSCTGSRGEKQCGFAAIGKLRNHSRGVLEHRPGSLVKMRGGSPWASWTGLEARGFEISRRRPSCRRSVARAVGRPRTRLLPREVTRI

SEQ ID NO: 166830 - protein, 109 aa, Zea Mays
MLALLAEMFRTVCGRTPPPSPLSCTGSRGEKQCGFAAIGKLRNHSRGVLEHRPGSLVKMRGGSPWASWTGLEARGFEISRRRPSCRRSVARAVGRPRTRLLPRSEVTRI

SEQ ID NO: 166831 - protein, 91 aa, Zea Mays
MHTQTKTQSTEAAVQHASTYCRLPVLHLHTGRQGDRQRQRGTWTCTDTQAAPVAHSTLIIQLSCHSVQHTQVEAKYILPPFRFSCRWIVQN

SEQ ID NO: 166832 - protein, 199 aa, Zea Mays
MPCRRRGDFFLSSTAHRSPLIFFHCVRPMASFLRCYFCRLTARMCQPVFFTAARSSLAASLWCSALAADRSFARVFLPESIPSAHHGRRACFPCWDLVRAPGSHGARFSSCPAPARSLPARALFLRCRGFKFAEIRCHAGAPSSSSCPCFSRPSLSQPGSRSCSPAAPSPCSSSSAVSFCSAAVDPPWTVSSAVAFRWF

SEQ ID NO: 166833 - protein, 74 aa, Zea Mays
MPLWSRRSGLSRPTSPAFDLRWMKMQRWCRCSIVFLVGHHFCDFGVEVSEAATLSKSACFSRCRALCNAVCTDV

SEQ ID NO: 166834 - protein, 314 aa, Zea Mays
MMSEMLKSKQHAGKLICSSMGARMDSEPKSWRILADVLYDLGTALEVVSPLCPQLFLEVAGLGNFAKGMAVVAARATRLPIYSSFAKEGNLSDLFAKGEAISTLFNVMGIGAGIGLASTVCSTTQGKLIAGPLLSAVHIYGVIQEMRATPVNTLNPQRTAMIVADFIKSGKVSSPAELRYKEDLLFPNRVIEEAGSVKIGQPLRKVFSPRLVEQLRATFPGEKFLLSQKSNRTYMVLERSASGEDALRGWLVAAFASEMERSGAGSRDDAVLSEAYEKMERVFPTFVSEVRSRGWYTDQFLDGNCSRVSFAKFR

SEQ ID NO: 166835 - protein, 163 aa, Zea Mays
MMSEMLKSKQHAGKLICSSMGARMDSEPKSWRILADVLYDLGTALEVVSPLCPQLFLEVAGLGNFAKGMAVVAARATRLPIYSSFAKEGNLSDLFAKGEAISTLFNVMGIGAGIGLASTVCSTTQGKLIAGPLLSAVHIWGHPRDESNSCKHTQPTKNSNDRG

SEQ ID NO: 166836 - protein, 207 aa, Zea Mays
MGIGAGIGLASTVCSTTQGKLIAGPLLSAVHIYGVIQEMRATPVNTLNPQRTAMIVADFIKSGKVSSPAELRYKEDLLFPNRVIEEAGSVKIGQPLRKVFSPRLVEQLRATFPGEKFLLSQKSNRTYMVLERSASGEDALRGWLVAAFASEMERSGAGSRDDAVLSEAYEKMERVFPTFVSEVRSRGWYTDQFLDGNCSRVSFAKFR

SEQ ID NO: 166837 - protein, 339 aa, Zea Mays
MLHVLSTQSLLFAAGLRPTPAQATAVSWILKDGMQHAGKLICSSMGARMDSEPKSWRILADVLYDLGTALEVVSPLCPQLFLEVAGLGNFAKGMAVVAARATRLPIYSSFAKEGNLSDLFAKGEAISTLFNVMGIGAGIGLASTVCSTTQGKLIAGPLLSAVHIYGVIQEMRATPVNTLNPQRTAMIVADFIKSGKVSSPAELRYKEDLLFPNRVIEEAGSVKIGQPLRKVFSPRLVEQLRATFPGEKFLLSQKSNRTYMVLERSASGEDALRGWLVAAFASEMERSGAGSRDDAVLSEAYEKMERVFPTFVSEVRSRGWYTDQFLDGNCSRVSFAKFR

SEQ ID NO: 166838 - protein, 199 aa, Zea Mays
MAAAIEELRLLGSIPVLEGPGEVDGVVGEEGRPRGGGDDEEILRFMDSVDSYLLLMDSLSSALRQGWLDLASARHSMGTSRVSSTLFDHKEQSAATKLQVVDHDGLKSSESIPHFALSKWSLQEECHSTYDLSERDFTEPKMRHRGSVTTPEKGNHESANTTTLSTGADASNRSKSEIKSIISLWGIGIPKTKNRPTFI

SEQ ID NO: 166839 - protein, 193 aa, Zea Mays
MAAAIEELRLLGSIPVLEGPGEVDGVVGEEGRPRGGGDDEEILRFMDSVDSYLLLMDSLSSALRQGWLDLASARHSMGTSRVSSTLFDHKEQSAATKLQVVDHDGLKSSESIPHFALSKWSLQEECHSTYDLSERDFTEPKMRHRGSVTTPEKGNHESANTTTLSTGSKSEIKSIISLWGIGIPKTKNRPTFI

SEQ ID NO: 166840 - protein, 90 aa, Zea Mays
MSNSATQKSEQRSQRGTRLSGVAPDYPVPQEDKVPTVARAPNPNGWMTWRRIGHWTMSVRWHTGLVRRRTELSRCAHRQQPPQRPPWWLG

SEQ ID NO: 166841 - protein, 229 aa, Zea Mays
MWRSPNGTIRNILNGTVFREPILCKNIPRILSGWKKPICIGRHAFGDQYRATDMIINGPGKLKMVFVPDGADPMELDVYDFKGPGVALSMYNVDESIRAFAESSMAMALSKKWPLYLSTKNTILKKYDGRFKDIFQEVYEEQWKEKFEENSIWYEHRLIDDMVAYAVKSDGGYVWACKNYDGDVQSDFLAQGFGSLGLMTSVLTFQATSERTGDKYQQYCLHIRLDPWT

SEQ ID NO: 166842 - protein, 174 aa, Zea Mays
MWRSPNGTIRNILNGKLKMVFVPDGADPMELDVYDFKGPGVALSMYNVDESIRAFAESSMAMALSKKWPLYLSTKNTILKKYDGRFKDIFQEVYEEQWKEKFEENSIWYEHRLIDDMVAYAVKSDGGYVWACKNYDGDVQSDFLAQGFGSLGLMTSVLVRCVPVLSFTLTQSPT

SEQ ID NO: 166843 - protein, 218 aa, Zea Mays
MPNLAFTIANNTFTLTPEQYIVKLEQAGQTICISGFMAFDVAPPRGPLCYAEHICTTLKCATRASTEGITVPPLAPSTPAPVCVCPLRLPATAASPPQISALVRAAQRLLPWSPLYPRPYPRPPDTNPTHTFASPTHICDPRPAAPAPAQVKHEDSDHRAPARSRRRSRASAMASFGLAYPMSTTTTRCVLSGPICSVSHIDTRSVILTLLIRGEGSA

SEQ ID NO: 166844 - protein, 64 aa, Zea Mays
MKVLIYFWFCRIIASLRANQFCERLPSPNGESTVDCHQISKMPNLAFTIANNTFTLTPEQVWLE

SEQ ID NO: 166845 - protein, 128 aa, Zea Mays
MKVLIYFWFCRIIASLRANQFCERLPSPNGESTVDCHQISKMPNLAFTIANNTFTLTPEQVKHEDSDHRAPARSRRRSRASAMASFGLAYPMSTTTTRCVLSGPICSVSHIDTRSVILTLLIRGEGSA

SEQ ID NO: 166846 - protein, 104 aa, Zea Mays
MWMNADYTTLVDSIATSEQTGGETETTLEKIGGEIADTLEQTGGKTEELAFDPKHHLRAMALRAAEFSFEPGLSRAAKPRWGCRAHGGGMTASFVSDIDEITKE

SEQ ID NO: 166847 - protein, 137 aa, Zea Mays
MVRTEEAAAHTYDLAALKYRESDCKLNFPPWTTMWMNADYTTLVDSIATSEQTGGETETTLEKIGGEIADTLEQTGGKTEELAFDPKHHLRAMALRAAEFSFEPGLSRAAKPRWGCRAHGGGMTASFVSDIDEITKE

SEQ ID NO: 166848 - protein, 486 aa, Zea Mays
MGHSLSSHSKSTLSSPPRRSRSLSPMSPPPLRLTAPMQIAAEDSGSDSSSSFAPPARDYTQDLPDEILALVFASLSPTDRNACSLACSRWMEVDATTRHRLSLLKLRGLRQLSDAGLASLAAAAPAIRKLSVASCTFGPKAFVAVLQSCPLLEDLSVKRLRGLPDTAGATTSIAEDIKFPPASSLRSVCLKDLYSALCFVPLVASSPELRSLKILRCSGAWDLPLEVITARAPGLVELHLEKLQVGDRGLAALSACANLEVLFLVKTPECTDSGIISVAEKCHRLRKLHVDGWRTNRIGDFGLMAVARGCPNLQELVLIGVNPTVLSLRMLGEHCRTLERLALCGCETVGDAEIICLAERWAALKKLCIKGCPVSDRGMEALNGGCPSLVKVKLKRCRGVSYECIENLKVTRGGSFSISLDIVLEHDARSASENGAQENGQAQITALTDQMAGMDLPVNAAGAQSSTHTITRMRSVVSALRRSVAS

SEQ ID NO: 166849 - protein, 484 aa, Zea Mays
MGHSLSSHSKSTLSSPPRRSRSLSPMSPPPLRLTAPMQIAAEDSGSDSSSSFAPPARDYTQDLPDEILALVFASLSPTDRNACSLACSRWMEVDATRLKLRGLRQLSDAGLASLAAAAPAIRKLSVASCTFGPKAFVAVLQSCPLLEDLSVKRLRGLPDTAGATTSIAEDIKFPPASSLRSVCLKDLYSALCFVPLVASSPELRSLKILRCSGAWDLPLEVITARAPGLVELHLEKLQVGDRGLAALSACANLEVLFLVKTPECTDSGIISVAEKCHRLRKLHVDGWRTNRIGDFGLMAVARGCPNLQELVLIGVNPTVLSLRMLGEHCRTLERLALCGCETVGDAEIICLAERWAALKKLCIKGCPVSDRGMEALNGGCPSLVKVKLKRCRGVSYECIENLKVTRGGSFSISLDIVLEHDARSASENGAQENGQAQITALTDQMAGMDLPVNAAGAQSSTHTITRMRSVVSALRRRFGNPPPP

SEQ ID NO: 166850 - protein, 499 aa, Zea Mays
MGHSLSSHSKSTLSSPPRRSRSLSPMSPPPLRLTAPMQIAAEDSGSDSSSSFAPPARDYTQDLPDEILALVFASLSPTDRNACSLACSRWMEVDATTRHRLSRLKLRGLRQLSDAGLASLAAAAPAIRKLSVASCTFGPKAFVAVLQSCPLLEDLSVKRLRGLPDTAGATTSIAEDIKFPPASSLRSVCLKDLYSALCFVPLVASSPELRSLKILRCSGAWDLPLEVITARAPGLVELHLEKLQVGDRGLAALSACANLEVLFLVKTPECTDSGIISVAEKCHRLRKLHVDGWRTNRIGDFGLMAVARGCPNLQELVLIGVNPTVLSLRMLGEHCRTLERLALCGCETVGDAEIICLAERWAALKKLCIKGCPVSDRGMEALNGGCPSLVKVKLKRCRGVSYECIENLKVTRGGSFSISLDIVLEHDARSASENGAQENGQAQITALTDQMAGMDLPVNAAGAQSSTHTITRMRSVVSALRRSKLNWGLHGLHDAWYHL

SEQ ID NO: 166851 - protein, 488 aa, Zea Mays
MGHSLSSHSKSTLSSPPRRSRSLSPMSPPPLRLTAPMQIAAEDSGSDSSSSFAPPARDYTQDLPDEILALVFASLSPTDRNACSLACSRWMEVDATALPSGRLSRLKLRGLRQLSDAGLASLAAAAPAIRKLSVASCTFGPKAFVAVLQSCPLLEDLSVKRLRGLPDTAGATTSIAEDIKFPPASSLRSVCLKDLYSALCFVPLVASSPELRSLKILRCSGAWDLPLEVITARAPGLVELHLEKLQVGDRGLAALSACANLEVLFLVKTPECTDSGIISVAEKCHRLRKLHVDGWRTNRIGDFGLMAVARGCPNLQELVLIGVNPTVLSLRMLGEHCRTLERLALCGCETVGDAEIICLAERWAALKKLCIKGCPVSDRGMEALNGGCPSLVKVKLKRCRGVSYECIENLKVTRGGSFSISLDIVLEHDARSASENGAQENGQAQITALTDQMAGMDLPVNAAGAQSSTHTITRMRSVVSALRRSVAS

SEQ ID NO: 166852 - protein, 298 aa, Zea Mays
MFRVAKTFDVLCSTAALRSTNVILAMVCAVLIHDLLLCIRPGIGERKATAYAILVALYPVHWFFTFLYYTDVASLAAVLAVYLFCLKKQFWISTMFGVFSILFRQTNVIWIIFFAANGAITYVKDLYPKDNASHENSEPIHQSKKASARDNKTSVQSLRRRRINSPINKVIVCESANPYNSLTEEVCDISLKLWNSKCEILIAFAPFVVVMAAFVAFIIWNGGIVLGAKEAHVVSPHFAQFLYFGLVSAAALLPWHFTPNRVLDLFHLSGKNKTCGSLAVLMGLGLSFVAVHFFRFIT

SEQ ID NO: 166853 - protein, 255 aa, Zea Mays
MGRLVVAAAVAVWAFPIAALVNSVVPEPYMDEIFHISQAQQYCRGDFWTWDPMITTPPGLYYVSLAYIASFFPVAWMFRVAKTFDVLCSTAALRSTNVILAMVCAVLIHDLLLCIRPGIGERKATAYAILVALYPVHWFFTFLYYTDVASLAAVLAVYLFCLKKQFWISTMFGVFSILFRQTNVIWIIFFAANGAITYVKDLYPKDNASHENSEPIHQSKKASARDNKTSVQSLRRRRINSPINKVLQRKCVTSA

SEQ ID NO: 166854 - protein, 273 aa, Zea Mays
MVCAVLIHDLLLCIRPGIGERKATAYAILVALYPVHWFFTFLYYTDVASLAAVLAVYLFCLKKQFWISTMFGVFSILFRQTNVIWIIFFAANGAITYVKDLYPKDNASHENSEPIHQSKKASARDNKTSVQSLRRRRINSPINKVIVCESANPYNSLTEEVCDISLKLWNSKCEILIAFAPFVVVMAAFVAFIIWNGGIVLGAKEAHVVSPHFAQFLYFGLVSAAALLPWHFTPNRVLDLFHLSGKNKTCGSLAVLMGLGLSFVAVHFFRFIT

SEQ ID NO: 166855 - protein, 237 aa, Zea Mays
MDRCCNFAGIGERKATAYAILVALYPVHWFFTFLYYTDVASLAAVLAVYLFCLKKQFWISTMFGVFSILFRQTNVIWIIFFAANGAITYVKDLYPKDNASHENSEPIHQSKKASARDNKTSVQSLRRRRINSPINKVIVCESANPYNIVMAAFVAFIIWNGGIVLGAKEAHVVSPHFAQFLYFGLVSAAALLPWHFTPNRVLDLFHLSGKNKTCGSLAVLMGLGLSFVAVHFFRFIT

SEQ ID NO: 166856 - protein, 557 aa, Zea Mays
MGSACSRKRGQLVQEDDLYSARFSKSGSFKWLLHTLPRSNFADVQRRAQGPAPNRCPSLVELCVAKVCKDINMYSDLSLLPRDLSQQIFNELVECGCLTEASLGAFRDCDLQDICLGDYPGVTDAWMEVVASQGQSLLSVDLSCSDVTDSGFNLLKDCSSMQSLACDYCDQISEHGLKTLSGFSNLTSLSIKKCAAVTAEGAKAFANLVNLVNLDLERCPKINGGLIHLKGLKKLEKLNLRYCNGITDSDMKYLSDLTNLRELQLSSCKISAFGVSYLRGLHKLGHLNLEGCAVTAVCLEVISELASLVLLNLSRCGICDEGCENLKGLTKLKALSLGFNQITDACLIHLKDLVNLECLNLDSCKIGDEGLFHLKGLRNLQSINLSFTLVTDIGLKKISGLSSLKSLNLDNRQITDTGLASLTGLTGLTHLDLFGARITDSGMSCFRFFKNIQSLEVCGGLITDAGVKNIKDLKALTLLNLSQNGKLTDKTLELISGLTALVSLNVSNSRVSNSGLHHLKPLQNLRSLSLESCRVTASEMDKLRLVALPNLISVRPE

SEQ ID NO: 166857 - protein, 250 aa, Zea Mays
MVLHSRRRFHMQDLSNNQRSVDGFSLRFAYMNISHFYPNLKTIQATLVSAAKQSNGAFKFSCSFQFLFGFCRDRDSGYLTPLIQNDSTESLLRWQCQPVSHRNYRTTREIQIRRFQGSARKYADYIPVETAPSVNGENESPRSLGDATERDEDGGSVAADALLTLVNSEGQAAGSQNNVEQASSKITDDRRVLSAMIGIVDPKFRKQMSRSGAGNEESMSDAETDEGVEEGDSDSGSDGSDSEEARALCT

SEQ ID NO: 166858 - protein, 150 aa, Zea Mays
MVLHSRRRFHMQDLSNNQRSVDGFSLRFAYMNISHFYPNLKTIQATLVSAAKQSNGAFKFSCSFQFLFGFCRDRDSGYLTPLIQNDSTESLLRWQCQPVSHRNYRTTREIQIRRFQGSARYSRVASPSPRRLLQPQTTFHLISIYTDGGD

SEQ ID NO: 166859 - protein, 237 aa, Zea Mays
MVLHSRRRFHMQDLSNNQRSVDGFSLRFAYMNISHFYPNLKTIQATLVSAAKQSNGFCRDRDSGYLTPLIQNDSTESLLRWQCQPVSHRNYRTTREIQIRRFQGSARKYADYIPVETAPSVNGENESPRSLGDATERDEDGGSVAADALLTLVNSEGQAAGSQNNVEQASSKITDDRRVLSAMIGIVDPKFRKQMSRSGAGNEESMSDAETDEGVEEGDSDSGSDGSDSEEARALCT

SEQ ID NO: 166860 - protein, 134 aa, Zea Mays
MPQSAQREPALASLLRHAHKPNSSHLFMFKVHGSYVQKLSWSPKLPSNRPFAGFCRDRDSGYLTPLIQNDSTESLLRWQCQPVSHRNYRTTREIQIRRFQGSARYSRVASPSPRRLLQPQTTFHLISIYTDGGD

SEQ ID NO: 166861 - protein, 777 aa, Zea Mays
MQPDQPVISLRPGGGGGPRAGRLFSPAFATSVSGDFLRPHGGGASGISKIGDSHFEPRERVRYTRDQLLELREIVDVSEEILRIKQEIDVELHGEDQSWVRNDSTVQGQAQAQTQAQNRYAETDSRDWRARSAQLTPTNEEKSWDNIREAKEAYASSGRQQEQANRQDQLSSQFASKAQVGPTPALIKAEVPWSARRGNLSEKERVLKTVKGILNKLTPEKFDLLKGQLMEAGITTADILKAVFEPTFCPMYAQLCSDLNEKLPTFPSEEPGGKEITFKRVILNNCQEAFEGASNLRAEISKLTGPDQGMERRDKERLVKLRTLGNIRLIGELLKQKMVPEKIVHHIVMELLGSGTDKKPCPEEEDVEAICHFFNTIGKQLDENTKSRRINDTYFIQMKELTMNPQLAPRLRFMVRDVIDLRSNNWVPRREEIKAKTISEIHSEAEKNLGLRPGAASVIRNGRSSPGGPLSPGGGFPMNRPGTGGMMPGMPGSRKMPGMPGLDNDNWEVPRSKSMPRGDSIRNQGLLLNKPSTVHKTSSINTRLLPQGSGAALIGKSALLGTGVSASRPLSFTPGPTPAQTTPKPIRAAPAVVPAPDKQASAPKGNTAELQKKTIALLEEYFGIRILDEAHQCIVELQSPDYYPEIVKEAVNLALDKGTNFVDPLVRLLEHLYTKKIFKTQDLESGCLLYGTLLDDIGIDLPKAPAQFGEIIARLTLLGALRFEALEVILKKMEDTYNRKAVSNAFMKTLEANPSGQAILGSPAAAAVIDACNSLLE

SEQ ID NO: 166862 - protein, 380 aa, Zea Mays
MKELTMNPQLAPRLRFMVRDVIDLRSNNWVPRREEIKAKTISEIHSEAEKNLGLRPGAASVIRNGRSSPGGPLSPGGGFPMNRPGTGGMMPGMPGSRKMPGMPGLDNDNWEVPRSKSMPRGDSIRNQGLLLNKPSTVHKTSSINTRLLPQGSGAALIGKSALLGTGVSASRPLSFTPGPTPAQTTPKPIRAAPAVVPAPDKQASAPKGNTAELQKKTIALLEEYFGIRILDEAHQCIVELQSPDYYPEIVKEAVNLALDKGTNFVDPLVRLLEHLYTKKIFKTQDLESGCLLYGTLLDDIGIDLPKAPAQFGEIIARLTLLGALRFEALEVILKKMEDTYNRKAVSNAFMKTLEANPSGQAILGSPAAAAVIDACNSLLE

SEQ ID NO: 166863 - protein, 149 aa, Zea Mays
MQPKISAFFERQETDPDPISGDGEGNGQGNVGAATEAKRKANGCRLDGLVSKKRNYAQLHLELGQPDFVLHTCSVCGMMYARGNDEDEKVHRAYHKSYSEGVPFKGWKKETVIARSEGGDRVVLATDENSCMSKSQRGDHSGGEGAGIW

SEQ ID NO: 166864 - protein, 149 aa, Zea Mays
MQPKISAFFERQETDPDPISGDGEGNGQGNVGAATEAKRKANGCRLDGLVSKKRNYAQLHLELGQPDFVLHTCSVCGMMYARGNDEDEKVHRAYHKSYSEGVPFKGWKKETVIARSEGGDRVVLATDENSCMSKSKVQVCPTEFLRLNF

SEQ ID NO: 166865 - protein, 51 aa, Zea Mays
MQLFRDNLTLWTSDMQYVSDANHAVYQEDGGDEMRDQYMIIYMYRNIQSVR

SEQ ID NO: 166866 - protein, 371 aa, Zea Mays
MCKYMGIQPFGTDHYLRFMLRKKLQDIKNDDKMIQAEGVESLSEYELRQACRERGHLGLLSTEEMRQQLRDWLDLSLNHSVPSSLLILSRAFTVSGKMKPEEAVVATLSSLPDEVVDTVGTVLPSEDSVSERKRKLEFLEMQEELIKEEEKRQEKDDKAKLEEPKATEEDLALKEMTEPTVREKEELKKAKTHDKKEQLCNISQALAVLASVSSVTKERQEFLSLVNKEIELYNNMLAKEGTDGEEEARRAYKAAREESDHAAEAAVGEKVSSALIDRVDAMLQKLEKEIDDVDARIGNRWQLLDRDCDGKVTPEEVAAAANYLKDTIGAEGVQELISNLSKDNEGNILVEDIVKLASQTEENNEAEETAR

SEQ ID NO: 166867 - protein, 379 aa, Zea Mays
MSRPRLVNMCKYMGIQPFGTDHYLRFMLRKKLQDIKNDDKMIQAEGVESLSEYELRQACRERGHLGLLSTEEMRQQLRDWLDLSLNHSVPSSLLILSRAFTVSGKMKPEEAVVATLSSLPDEVVDTVGTVLPSEDSVSERKRKLEFLEMQEELIKEEEKRQEKDDKAKLEEPKATEEDLALKEMTEPTVREKEELKKAKTHDKKEQLCNISQALAVLASVSSVTKERQEFLSLVNKEIELYNNMLAKEGTDGEEEARRAYKAAREESDHAAEAAVGEKVSSALIDRVDAMLQKLEKEIDDVDARIGNRWQLLDRDCDGKVTPEEVAAAANYLKDTIGAEGVQELISNLSKDNEGNILVEDIVKLASQTEENNEAEETAR

SEQ ID NO: 166868 - protein, 479 aa, Zea Mays
MASRAIIRRRNDILRHTHVPILSPSFTSTIGQGQFDCEVDHQRSVCYFSKESLADSNHAMAHCTLNKRKLCHLSSGFAWHPACEVSLPTYGSRAQNFVFPLGVRCFLQSVRTTSNTTAQGQVHIMDKKSEDEKQKQQKKEASPEECDQAVEGLSTAKAKAKAKLEEVQKTDQSVVQKLWAKLLGIGPALRIIASMSRADWAAKLKHWKDEFISTLQHYWLGTKLLWADVRISSRLLVKLASGKSLTRRERQQLTRTTADLFRLVPFAVFIIVPFMELLLPVFLKLFPNMLPSTFQDKMKEEEALKRKLKARMEYAKFLQDTAKEMAKEVQTSRSGEMKQTAEDLDEFLNKVRKGGHASNDEILSFAKLFNDELTLDNMSRPRLVNMCKYMGIQPFGTDHYLRFMLRKKLQDIKNDDKMIQAEGVESLSEYELRQACRERGHLGLLSTEEMRQQRLAGSITQSFCAIVSSNTLKSFYCIW

SEQ ID NO: 166869 - protein, 356 aa, Zea Mays
MASRAIIRRRNDILRHTHVPILSPSFTSTIGQGQFDCEVDHQRSVCYFSKESLADSNHAMAHCTLNKRKLCHLSSGFAWHPACEVSLPTYGSRAQNFVFPLGVRCFLQSVRTTSNTTAQGQVHIMDKKSEDEKQKQQKKEASPEECDQAVEGLSTAKAKAKAKLEEVQKTDQSVVQKLWAKLLGIGPALRIIASMSRADWAAKLKHWKDEFISTLQHYWLGTKLLWADVRISSRLLVKLASGKSLTRRERQQLTRTTADLFRLVPFAVFIIVPFMELLLPVFLKLFPNMLPSTFQDKMKEEEALKRKLKARMEYAKFLQDTAKEMAKEVQTSRSGEMKQTAEDLDEFLNKVCASYA

SEQ ID NO: 166870 - protein, 646 aa, Zea Mays
MASRAIIRRRNDILRHTHVPILSPSFTSTIGQGQFDCEVDHQRSVCYFSKESLADSNHAMAHCTLNKRKLCHLSSGFAWHPACEVSLPTYGSRAQNFVFPLGVRCFLQSVRTTSNTTAQGQVHIMDKKSEDEKQKQQKKEASPEECDQAVEGLSTAKAKAKAKLEEVQKTDQSVVQKLWAKLLGIGPALRIIASMSRADWAAKLKHWKDEFISTLQHYWLGTKLLWADVRISSRLLVKLASGKSLTRRERQQLTRTTADLFRLVPFAVFIIVPFMELLLPVFLKLFPNMLPSTFQDKMKEEEALKRKLKARMEYAKFLQDTAKEMAKEVQTSRSGEMKQTAEDLDEFLNKVRKGGHASNDEILSFAKLFNDELTLDNMSRPRLVNMCKYMGIQPFGTDHYLRFMLRKKLQDIKNDDKMIQAEGVESLSEYELRQACRERGHLGLLSTEEMRQQLRDWLDLSLNHSVPSSLLILSRAFTVSGKMKPEEAVVATLSSLPDEVVDTVGTVLPSEDSVSERKRKLEFLEMQEELIKEEEKRQEKDDKAKLEEPKATEEDLALKEMTEPTVREKEELKKAKTHDKKEQLCNISQALAVLASVSSVTKERQEFLSLVNKEMVKKKPGERTRLLGRNQTMLQRQLWEKRSLQL

SEQ ID NO: 166871 - protein, 482 aa, Zea Mays
MELLLPVFLKLFPNMLPSTFQDKMKEEEALKRKLKARMEYAKFLQDTAKEMAKEVQTSRSGEMKQTAEDLDEFLNKVRKGGHASNDEILSFAKLFNDELTLDNMSRPRLVNMCKYMGIQPFGTDHYLRFMLRKKLQDIKNDDKMIQAEGVESLSEYELRQACRERGHLGLLSTEEMRQQLRDWLDLSLNHSVPSSLLILSRAFTVSGKMKPEEAVVATLSSLPDEVVDTVGTVLPSEDSVSERKRKLEFLEMQEELIKEEEKRQEKDDKAKLEEPKATEEDLALKEMTEPTVREKEELKKAKTHDKKEQLCNISQALAVLASVSSVTKERQEFLSLVNKEIELYNNMLAKEGTDGEEEARRAYKAAREESDHAAEAAVGEKVSSALIDRVDAMLQKLEKEIDDVDARIGNRWQLLDRDCDGKVTPEEVAAAANYLKDTIGAEGVQELISNLSKDNEGNILVEDIVKLASQTEENNEAEETAR

SEQ ID NO: 166872 - protein, 448 aa, Zea Mays
MASRAIIRRRNDILRHTHVPILSPSFTSTIGQGQFDCEVDHQRSVCYFSKESLADSNHAMAHCTLNKRKLCHLSSGFAWHPACEVSLPTYGSRAQNFVFPLGVRCFLQSVRTTSNTTAQGQVHIMDKKSEDEKQKQQKKEASPEECDQAVEGLSTAKAKAKAKLEEVQKTDQSVVQKLWAKLLGIGPALRIIASMSRADWAAKLKHWKDEFISTLQHYWLGTKLLWADVRISSRLLVKLASGKSLTRRERQQLTRTTADLFRLVPFAVFIIVPFMELLLPVFLKLFPNMLPSTFQDKMKEEEALKRKLKARMEYAKFLQDTAKEMAKEVQTSRSGEMKQTAEDLDEFLNKVRKGGHASNDEILSFAKLFNDELTLDNMSSIKNDDKMIQAEGVESLSEYELRQACRERGHLGLLSTEEMRQQRLAGSITQSFCAIVSSNTLKSFYCIW

SEQ ID NO: 166873 - protein, 394 aa, Zea Mays
MASRAIIRRRNDILRHTHVPILSPSFTSTIGQGQFDCEVDHQRSVCYFSKESLADSNHAMAHCTLNKRKLCHLSSGFAWHPACEVSLPTYGSRAQNFVFPLGVRCFLQSVRTTSNTTAQGQVHIMDKKSEDEKQKQQKKEASPEECDQAVEGLSTAKAKAKAKLEEVQKTDQSVVQKLWAKLLGIGPALRIIASMSRADWAAKLKHWKDEFISTLQHYWLGTKLLWADVRISSRLLVKLASGKSLTRRERQQLTRTTADLFRLVPFAVFIIVPFMELLLPVFLKLFPNMLPSTFQDKMKEEEALKRKLKARMEYAKFLQDTAKEMAKEVQTSRSGEMKQTAEDLDEFLNKVRKGGHASNDEILSFAKLFNDELTLDNMSRPLLAIHASEETTRH

SEQ ID NO: 166874 - protein, 414 aa, Zea Mays
MEYAKFLQDTAKEMAKEVQTSRSGEMKQTAEDLDEFLNKVRKGGHASNDEILSFAKLFNDELTLDNMSSIKNDDKMIQAEGVESLSEYELRQACRERGHLGLLSTEEMRQQLRDWLDLSLNHSVPSSLLILSRAFTVSGKMKPEEAVVATLSSLPDEVVDTVGTVLPSEDSVSERKRKLEFLEMQEELIKEEEKRQEKDDKAKLEEPKATEEDLALKEMTEPTVREKEELKKAKTHDKKEQLCNISQALAVLASVSSVTKERQEFLSLVNKEIELYNNMLAKEGTDGEEEARRAYKAAREESDHAAEAAVGEKVSSALIDRVDAMLQKLEKEIDDVDARIGNRWQLLDRDCDGKVTPEEVAAAANYLKDTIGAEGVQELISNLSKDNEGNILVEDIVKLASQTEENNEAEETAR

SEQ ID NO: 166875 - protein, 727 aa, Zea Mays
MASRAIIRRRNDILRHTHVPILSPSFTSTIGQGQFDCEVDHQRSVCYFSKESLADSNHAMAHCTLNKRKLCHLSSGFAWHPACEVSLPTYGSRAQNFVFPLGVRCFLQSVRTTSNTTAQGQVHIMDKKSEDEKQKQQKKEASPEECDQAVEGLSTAKAKAKAKLEEVQKTDQSVVQKLWAKLLGIGPALRIIASMSRADWAAKLKHWKDEFISTLQHYWLGTKLLWADVRISSRLLVKLASGKSLTRRERQQLTRTTADLFRLVPFAVFIIVPFMELLLPVFLKLFPNMLPSTFQDKMKEEEALKRKLKARMEYAKFLQDTAKEMAKEVQTSRSGEMKQTAEDLDEFLNKVRKGGHASNDEILSFAKLFNDELTLDNMSSIKNDDKMIQAEGVESLSEYELRQACRERGHLGLLSTEEMRQQLRDWLDLSLNHSVPSSLLILSRAFTVSGKMKPEEAVVATLSSLPDEVVDTVGTVLPSEDSVSERKRKLEFLEMQEELIKVIEEEKRQEKDDKAKLEEPKATEEDLALKEMTEPTVREKEELKKAKTHDKKEQLCNISQALAVLASVSSVTKERQEFLSLVNKEIELYNNMLAKEGTDGEEEARRAYKAAREESDHAAEAAVGEKVSSALIDRVDAMLQKLEKEIDDVDARIGNRWQLLDRDCDGKVTPEEVAAAANYLKDTIGAEGVQELISNLSKDNEGNILVEDIVKLASQTEENNEAEETAR

SEQ ID NO: 166876 - protein, 117 aa, Zea Mays
MTDGSFHSPEWHAARLASLNKTHTVTWEEFKKKQKEEELKRGELEADKDKMMREYRAQLDAERAQKLANGRNHWSNSKSSYSKKERKDKDAKKRNKKRRKKFIRVKFQLIVRIFQQR

SEQ ID NO: 166877 - protein, 72 aa, Zea Mays
MEIIVLRIFLIKSDNTIVFFAFTSMSANIDKSINRGQGPYIFCINGQVHPRIGCLLPTHNNRPKFVELYIYI

SEQ ID NO: 166878 - protein, 202 aa, Zea Mays
MGANGHPPASTVAQNGSHSGGGGGGGGGVNPSNGGTGAALRHDPGLAREWSTEEQTILDELLVKYASDLPVVRYAKVAMKLPEKTVRDVALRCRWMNKKESAKRKKEDHNSSKKSKDKKEKVSDSSSKPPVHMVGRPNVPPYPLPVLPMDDDEISSKAIGGPTGEILETNAHVLGQISSNLSNIYRTISLCSAKLAIIYSGS

SEQ ID NO: 166879 - protein, 163 aa, Zea Mays
MKLPEKTVRDVALRCRWMNKKESAKRKKEDHNSSKKSKDKKEKVSDSSSKPPVHMVGRPNVPPYPLPVLPMDDDEISSKAIGGPTGEILETNAHVLGQISSNLSNMQIQDNISLLCQTRDNILRVLKEINDAPDIMKQMPPLPVKINEELVNSLLPRPTVPMQ

SEQ ID NO: 166880 - protein, 90 aa, Zea Mays
MAGRRWRASARSPPSSRTSRTRPDISATSARSTRATPTATRATGSGRARRGRSTTGAARCRSRGTTTTGPPGGTSASTGSPTPTGWRRTP

SEQ ID NO: 166881 - protein, 59 aa, Zea Mays
MFKCNLLFDILLHIKYTIMIVASPDEPHFHISILGDISCAITHICAIVQSSNMRRSIYI

SEQ ID NO: 166882 - protein, 176 aa, Zea Mays
MDYLPLSLMVTAFKKDDVKKPLEGFGVLIPYKEQQKHGLKTLGTLFSSMMFPDRAPDDQYLYTTFVGGSHNRDLAGAPTSILKQLVTSDLKKLLGVEGQPTFVKHVYWGNAFPLYGHDYSSVLEAIEKMEKNLPGFFYAGNNKDGLAVGSVIASGSKAADLAISYLESHTKHNNSH

SEQ ID NO: 166883 - protein, 138 aa, Zea Mays
MLALTASASSASSHPYRHASAHTRRPRLRAVLAMAGSDDPRAAPARSVAVVGAGVSGLAAAYRLRQSGVNVTVFEAADRAGGKIRTNSEGGFVWDEGANTMTEGEWEASRLIDDLGLQDKQHLTPNTSVTLSKMEHQH

SEQ ID NO: 166884 - protein, 249 aa, Zea Mays
MIHQGKEGIDECRFHFMVECRWSISVDSKDSGDKDLASNQTFDAVIMTAPLSNVRRMKFTKGGAPVVLDFLPKMDYLPLSLMVTAFKKDDVKKPLEGFGVLIPYKEQQKHGLKTLGTLFSSMMFPDRAPDDQYLYTTFVGGSHNRDLAGAPTSILKQLVTSDLKKLLGVEGQPTFVKHVYWGNAFPLYGHDYSSVLEAIEKMEKNLPGFFYAGNNKDGLAVGSVIASGSKAADLAISYLESHTKHNNSH

SEQ ID NO: 166885 - protein, 293 aa, Zea Mays
MLALTASASSASSHPYRHASAHTRRPRLRAVLAMAGSDDPRAAPARSVAVVGAGVSGLAAAYRLRQSGVNVTVFEAADRAGGKIRTNSEGGFVWDEGANTMTEGEWEASRLIDDLGLQDKQQYPNSQHKRYIVKDGAPALIPSDPISLMKSSVLSTKSKIALFFEPFLYKKANTRNSGKVSEEHLSESVGSFCERHFGREVVDYFVDPFVAGTSAGDPESLSIRHAFPALWNLERKYGSVIVGAILSKLAAKGDPVKTRHDSSGKRRNRRVSFSFHGGMQFFVISVTNKCTSQ

SEQ ID NO: 166886 - protein, 285 aa, Zea Mays
MLALTASASSASSHPYRHASAHTRRPRLRAVLAMAGSDDPRAAPARSVAVVGAGVSGLAAAYRLRQSGVNVTVFEAADRAGGKIRTNSEGGFVWDEGANTMTEGEWEASRLIDDLGLQDKQQYPNSQHKRYIVKDGAPALIPSDPISLMKSSVLSTKSKIALFFEPFLYKKANTRNSGKVSEEHLSESVGSFCERHFGREVVDYFVDPFVAGTSAGDPESLSIRHAFPALWNLERKYGSVIVGAILSKLAAKGDPVKTRHDSSGKRRNRRVSFSFHGGMQLEMIM

SEQ ID NO: 166887 - protein, 158 aa, Zea Mays
MSSVSNSIAVGLPSYGLYLETRFLTQTYRNFAQKSSYKYSRIRAVQGNGGRRRLVDIIRIIPELSRDYFKSRSRRALFGGISLLGGFYVAQTISLSFGTLGVNDVIAAVVCVLLTEYVTKFYYSRPKVHPCVGDSVTPFRASARIVCAYVNGYAIFYC

SEQ ID NO: 166888 - protein, 53 aa, Zea Mays
MCLPVWSVHSFRWFLGTMLYSDYFGYFSESLIVGCALRRGDDIIVALLEMDVH

SEQ ID NO: 166889 - protein, 734 aa, Zea Mays
MTTFLSKFQITMIAQELEKAGFVLDQSEKQVGDEVSELIQNEPKSNGFLDENELEFLHQIAFRVGITSSVAALTERRALRRLLERAHAEEDLKKESIAAYLLHLIRKYSNIFKSETNDSTNSLCSSPSCSSSKLSSSTDLHGNCQILEKRLPSVGSLSPKQIGGLSGTGSMPLPPEELRCPISLQLMYDPVVIASGQTYERACIEKWFHSGNTTCPKTRKQLSQLLRTPNYCIKGLIASWCEQNGVPVPAGPPESPKLEHLSISSLESTTCAATDGANTNTVLFEDTTAKDDAKSESEVSKEMFSRQNSGEATSKLRIHEEVSPENCSALQSSKEAAPDACGVEDSVDVEKGKGSHQDSKDDVPVSERCEQWLHVLNKNDAESMSEKHKLVEQIRILLKNDDELRNYAGANGITEPLIHFLKMAIHRGGVQSQEVATMALFNLAVNNDGNKRLLLSAGVIPLMEQMIQKHETCEAAIAMYLNLSCIPEAQAIIGSSVAIHFLVNSLGEGGPRSDTCRMDALLTLYNLSLHAPNIPPLMASGIIENLRRVLVPSSPWTDKALAVLLNLALTRRGKEEIAASAAMVGAIVLIVDNGEPGEKEKAVSCLYVICSGDEGSSQTVLQEGVIPALVSVTANGTARARDKAQRLLRLFREQRQRELELEEMQPRVELHEVASRAAVQQQREEEEEEMALAVLPAAAPSKPSGGGKKPRLCRSGSRRFTKVFTCLLKKWSLR

SEQ ID NO: 166890 - protein, 195 aa, Zea Mays
MPSALPRRTARRGRRRAAAAATSKFYLSAVRLSCHGDGQTALAASDLSLLRGEWPSLRWVHGCSLLHSGRSRFGCAMPERTCAMLDPVATVGKGGRAWSPVCAKPDPVGKGAISVFHLRKGAKCRSNIDDWLRENRMRCPACYKPVHSVLPCKALTTSAPLPAPVPLPTHSQLSTSFLIPGRATVWVSVVTNKDA

SEQ ID NO: 166891 - protein, 114 aa, Zea Mays
MKNENVFAGILVVQQALSAFARSAVQEVSQKYHLEEAELLVNIKDHVLVPEHVLLTPEDKKTLLERYTVKETQLPRIQITDPIARYYGMKRGQVVKITRASETAGRYITYRYVV

SEQ ID NO: 166892 - protein, 547 aa, Zea Mays
METDEKHAHFELYRSCTARSSNSHAASPPSALLTAERFQWPQAQRRHATTRPRAWTSAGGTTGSSRASSPATRWTSWPACSASSAPPSATPWSSGGRPSAGTTPASCRGSTRPRRSCARGTGRARPCRRPSRTAPWRSRAPPSRGRWSSTRSTPAPRSSWLTSRTRCRRRAHPHRRRAGHWLPRRLRPLLLPQPRCLPRRPGRRLRAVLLPAQDGALQGSEDMERGVPESGESCWDRAREHPGNGAGGDVASGVPNERDPARAARALGGAQLRPLGLHLQLRQDVPRPPGPPPPRPRPRRHGPALHALLLPPPHPHLPPSRSPRHGRHGGSDPDQGRCGGERGGTGAGAQGQAEGGARGPRRHVGGAPGAHPGDTGGLRGPPRREAEPDRRRRRARGCQRQRGGPHPAAAGRAHCGRSAAQRPRGRAVPRGVAGRLRLRPAVQPDGGRGYGGDQPRPELAVAAPRSGAGRRRCGGARDARATRTRRRGGDGEGRGRGRPRQVPKGAVRGGGQDLQPAVHRAGAGRLPHAGRVQPHRGAPSSHRNKDG

SEQ ID NO: 166893 - protein, 557 aa, Zea Mays
MLRRARGRGRPRAVRPGVRGHPHPRRAGLRGRPAARVPRRRPLRHGAAAGGPAPVRRRRAAAVRPGHDARARGGLDVRARAAGRRGPHRGDHGPRRAAEDGHQRAQLRRQGLHERKTWQADFEDALSPTWENLMHGQVNLRDAVAGTISFRDAARGRTYELNDRTAKLFVRPRGWHLPEAHILIDGEPAIGCLVDFGLYFFHNHAAFRAGQGAGFGPFFYLPKMEHSREARIWNGVFQRAEKAAGIELGSIRATVLVETLPAVFQMNEILHELREHSAGLNCGRWDYIFSYVKTFRAHPDRLLPDRALVGMAQHFMRSYSHLLIHTCHRRGVHAMGGMAAQIPIKDDAAANEAALELVRKDKLREVRAGHDGTWAAHPGLIPAIREVFEGHLGGRPNQIGDAAGHEGASVNEEDLIQPPRGARTVDGLRLNVRVGVQYLAAWLAGSGSVPLYNLMEDAATAEISRVQNWQWLRHGAALDAGGVEVRATPELLARVVEEEMARVEAEVGPDRFRKGRYAEAGRIFSRQCTAPELDDFLTLDAYNLIVAHHPGASPCKL

SEQ ID NO: 166894 - protein, 247 aa, Zea Mays
MLANESAEEMYTRLKKIIKKIRSYGSKKWTDHEVVKIMLRAYFLRNSVLCFMIRDSPNYEKMTPEVVLGRFIRHEMMENEGLLEAELGRFVMLADESAEEMYTRLKKIINKLRSYGSKRWTDHEVVKIMLRAYFLRNSVLCFLIRQSPNYEKMTPEVVLSKFIDHETLLEEAKYVDIMSKSVTASKNQDIALKANKKQKGKCVFEESTSEDNEDSSSLDEEKIALIKSFKKIMKSRNYKSNKKNDKE

SEQ ID NO: 166895 - protein, 298 aa, Zea Mays
MVKLHSFDTKVHKVDTVVSYKKNEDDTSSSSSSVIREARIELLEAELGRFVMLANESAEEMYTRLKKIIKKIRSYGSKKWTDHEVVKIMLRAYFLRNSVLCFMIRDSPNYEKMTPEVVLGRFIRHEMMENEGLLEAELGRFVMLADESAEEMYTRLKKIINKLRSYGSKRWTDHEVVKIMLRAYFLRNSVLCFLIRQSPNYEKMTPEVVLSKFIDHETLLEEAKYVDIMSKSVTASKNQDIALKANKKQKGKCVFEESTSEDNEDSSSLDEEKIALIKSFKKIMKSRNYKSNKKNDKE

SEQ ID NO: 166896 - protein, 393 aa, Zea Mays
MNGAVVYHSSEPLPAFKDVPASEKQNLFVKKVNLCCAVYDFADPTKNLKEKEVKRQTLMELVDYITSANGKFSEVVMLEITKMVSINLFRSSSPTPRENKAIEGVDLEEDEPLMDPAWSHLQIVYEVFLRFVASQETDAKLAKRFIFETEKHNGVAELLEILGSIINGFALPLKEEHKLFLVRALIPLHKPKCVSMYHQQLSYCITQFVEKDCKLADTVIRGLLKYWPVTNSSKEVMFLGELEEVLEATQLAEFQRCMVPLFRQIARSMNSSHFQVAERALFLWNNDHIENLIKQNYKVLLPIIYPALERNSRDHWNQAVRSLTLNVRKIFSDHDSAFFGECDQRFSDEELKQEESDSKREALWMRLEEMAASKPRENSPLGAPNGKPSQAAG

SEQ ID NO: 166897 - protein, 313 aa, Zea Mays
MLSYGCTRLEIGVQSTYEDVARDTNRGHTVAAVADCFCLAKDAGFKVVAHMMPDLPNVGVERDLESFREFFESPAFRADGLKIYPTLVIRGTGLYELWKTGRYRNYPPELLVDIVARILSMVPPWTRVYRVQRDIPMPLVTSGVEKGNLRELALARMDDLGLKCRDVRTREAGIQDIHHKIRPDEVELVRRDYAANEGWETFLSYEDTRQDILIGLLRLRKCGRNVTCPELVGRCSIVRELHVYGTAVPVHGRDVDKLQHQGYGTLLMEEAERIAQKEHRSEKLAVISGVGTRHYYRKLGYELEGPYMVKCLA

SEQ ID NO: 166898 - protein, 554 aa, Zea Mays
MATAATAMVVPEQPRRRKPAPGRGGVALPAGLSEEEARVRAIAEIVSAMGELSRRGEDVDLNALKSAACRRYGLARAPKLVEMIAAVPEADRAALLPRLRAKPVRTASGIAVVAVMSKPHRCPHIATTGNICVYCPGGPDSDFEYSTQSYTGYEPTSMRAIRARYNPYVQARSRIDQLKRLGHSVDKVEFILMGGTFMSLPADYRDYFIRNLHDALSGHTSANVEEAICYSEHSAVKCIGMTIETRPDYCLGPHLRQMLSYGCTRLEIGVQSTYEDVARDTNRGHTVAAVADCFCLAKDAGFKVVAHMMPDLPNVGVERDLESFREFFESPAFRADGLKIYPTLVIRGTGLYELWKTGRYRNYPPELLVDIVARILSMVPPWTRVYRVQRDIPMPLVTSGVEKGNLRELALARMDDLGLKCRDVRTREAGIQDIHHKIRPDEVELVRRDYAANEGWETFLSYEDTRQDILIGLLRLRKCGRNVTCPELVGRCSIVRELHVYGTAVPVHGRDVDKLQHQGYGTLLMEEAERIAQKEHRSEKLAVISGKDGLPNNY

SEQ ID NO: 166899 - protein, 56 aa, Zea Mays
MERGFFCFFPIPSLARMLFAGKRPTKTCATGVGRRRREVNGRRKTAKRCECRTRRA

SEQ ID NO: 166900 - protein, 408 aa, Zea Mays
MEPPTGFWASLLSFLKFLPYFCGLLVLGLIKGVLLCPWACLIMAIGISALVLGLWPMHLIWTYYCIVRTKLVGPVVKLLLLIAATAVLIIWLIIGIPGSIFAGLVYGFLAPIMATFDAVGEGKEKPFVHCFVDGTWSTITGSCTVVRDVKDLLFHSYFSLMDDLRLQKPPDGEPYEIRLLDIPGALIAAAFGLLLDGIMFTLIAFYKCPVMLFKGWKRLIQDMIGREGPFLETACVPFAGLAILLWPFAVVGAVLASILSSAPLGAYAAVVAYQESSLILGIAYVFSSVSIFDEYTNDVLDMAPGSCFPRFKYRKGKDESSHGHSVPLSRPASFNREKQEGKRPPSRVTSFKNSIDDFNPFKLLDHLFAECRNQGEDLVNRGVITMKDIEETKSGKVGSGVLNVGLPA

SEQ ID NO: 166901 - protein, 369 aa, Zea Mays
MEPPTGFWASLLSFLKFLPYFCGLLVLGLIKGVLLCPWACLIMAIGISALVLGLWPMHLIWTYYCIVRTKLVGPVVKLLLLIAATAVLIIWLIIGIPGSIFAGLVYGFLAPIMATFDAVGEGKEKPFVHCFVDGTWSTITGSCTVVRDVKDLLFHSYFSLMDDLRLQKPPDGEPYEIRLLDIPGALIAAAFGLLLDGIMFTLIAFYKCPVMLFKGWKRLIQDMIGREGPFLETACVPFAGLAILLWPFAVVGAVLASILSSAPLGAYAAVVAYQESSLILGIAYVFSSVSIFDEYTNDVLDMAPGSCFPRFKYRKGKDESSHGHSVPLSRPASFNREKQEGKRPPSRVTSFKNSIDDFNPFKEPGGGFG

SEQ ID NO: 166902 - protein, 549 aa, Zea Mays
MAIGISALVLGLWPMHLIWTYYCIVRTKLVGPVVKLLLLIAATAVLIIWLIIGIPGSIFAGLVYGFLAPIMATFDAVGEGKEKPFVHCFVDGTWSTITGSCTVVRDVKDLLFHSYFSLMDDLRLQKPPDGEPYEIRLLDIPGALIAAAFGLLLDGIMFTLIAFYKCPVMLFKGWKRLIQDMIGREGPFLETACVPFAGLAILLWPFAVVGAVLASILSSAPLGAYAAVVAYQESSLILGIAYVFSSVSIFDEYTNDVLDMAPGSCFPRFKYRKGKDESSHGHSVPLSRPASFNREKQEGKRPPSRVTSFKNSIDDFNPFKLLDHLFAECRNQGEDLVNRGVITMKDIEETKSGKVGSGVLNVGLPAYVILNALLRSAKADSVGLILSDGSEITSDNRPKNTIFDWFFDPLMVIKEQIKAENLTDEEEEYLKMRVLLAGDPSRLKGSLPHVPSLTERKKADIDAFARRLQGITKSISRYPTSKRRFDVLVKALLSELERTMGQSGNGSQSQAQRLRNSVARMLSQKSMGKTANIRDEDPEAQMTRLSRTP

SEQ ID NO: 166903 - protein, 55 aa, Zea Mays
MWQRRCPDLRTLPTKHPQNLIISSEKAKSIVQYITKVRLENSLVQAFVFLLQKER

SEQ ID NO: 166904 - protein, 87 aa, Zea Mays
MIGGTEKNKITPTERAARSGDRATSPGKPRPRRVDPYRIVSSRSVAGRARRLASPPSVTASRTLAALPRPGGVTTEVAVAHGRGLRS

SEQ ID NO: 166905 - protein, 71 aa, Zea Mays
MIPIFSRENKLISLGKMEILWENRISKLALNEIAGLVFFLFLLRDEELTLERVPKIFFLRSQREGRYSSPE

SEQ ID NO: 166906 - protein, 99 aa, Zea Mays
MDEGATTSDSSAAETFDPDLIHAIFKLVWRRRAGKGAGGGGSIEDIDAERAPETSRRNRSTTVISNVSWGHPFEHRLQEGCVSHARASDKDLIRFVVKF

SEQ ID NO: 166907 - protein, 75 aa, Zea Mays
MDEGATTSDSSAAETFDPDLIHAIFKLVWRRRAGKGAGGGGSIEDIDAERHRGEIGAQLPMRLLLKSAANFYGYL

SEQ ID NO: 166908 - protein, 199 aa, Zea Mays
MVEYLKQYGAVRTDKVKEVMETIDRALFVPEGTPYIDSPMPIGFNATISAPHMHATCLELLKDHLQPGMHALDVGSEGRAVGIEHVPEIVASSVENVQRSAAAPLLRDGSLSFHVTDGRLGFPDAAPYDAIHVGAAAPEIPQPLLDQLKPGGRMVIPVGTYSQDLQVVDKNTDGSFSVRSDAAVRYVPLTSRAAQLQGP

SEQ ID NO: 166909 - protein, 214 aa, Zea Mays
MVEYLKQYGAVRTDKVKEVMETIDRALFVPEGTPYIDSPMPIGFNATISAPHMHATCLELLKDHLQPGMHALDVGSGSGYLTACFAMMVGPEGRAVGIEHVPEIVASSVENVQRSAAAPLLRDGSLSFHVTDGRLGFPDAAPYDAIHVGAAAPEIPQPLLDQLKPGGRMVIPVGTYSQDLQVVDKNTDGSFSVRSDAAVRYVPLTSRAAQLQGP

SEQ ID NO: 166910 - protein, 73 aa, Zea Mays
MAEAAECEEERDLFADANDDVGIAGLEVADGEVHPPHHAQLQQPDEMVQHASLVTLDIMTLLHDYYFDIITYI

SEQ ID NO: 166911 - protein, 145 aa, Zea Mays
MDLPRNQTLLNRSHHQRTTICVMLRCSSTTEARSEPHRLAHTERTTREKLMGRNKKVKKRQFLQLQNQVRLPRRARMTMILMRTRLMILTRTRQTILMRVRVCLLKKAMMMIQVMKMIPVTMRRKTLQLLRSMRQARRELLKVPC

SEQ ID NO: 166912 - protein, 112 aa, Zea Mays
MSNGSEQTSVDAKDLSEKISMLESQLEQLSRELDDKIRFGQRPRSGAGRVTTLAPTSLGEEPQATVVDRPRSRGGMEPPPRQEERWGFQGSRERGSFGGSRNSDRPMARQRW

SEQ ID NO: 166913 - protein, 512 aa, Zea Mays
MAHRGHLDGLTGQAPALMRHGSFAAGSLSSRSPLQSSSTLEMLENKLAMQTTEVEKLITENQRLASSHVVLRQDIVDTEKEMQMIRTHLGEVQTETDLQIRDLLERIRLMEVDIHSGNVVNKELHQMHMEAKRLITERQMLTLEIEDVTKELQKLSASGDNKSLPELLSELDRLRKEHHNLRSQFEFEKNTNVKQVEQMRTMEMNLITMTKQAEKLRVDVANAERRAQAAAQAAAHAAGAQVTASQPGTAQATTVSAAAATDSYAGAYTSYPPAYQQGAQAGAYQQGAQAGVYQQGAQAGAYQQGAQAGAYQQGGQDGAYQQGAQAGAYQQGAQAGAYQQGAQAGAYQQGAQAGAYQQGAQAGAYQQGAQSGAYQQGAQAGAYQQGAQDGAYQQGAQDGAYQQGAQAGAYNYAYDAGTAYAYAGYSGYPVAGYAQSAVPNYSYAAPPQPTSSGAATNAAGGQYGAVGSAGYPTGQVQPSSGTANAAQAPPPPPPPAAPYPPSTYDQTRGAQR

SEQ ID NO: 166914 - protein, 459 aa, Zea Mays
MAHRGHLDGLTGQAPALMRHGSFAAGSLSSRSPLQSSSTLEMLENKLAMQTTEVEKLITENQRLASSHVVLRQDIVDTEKEMQMIRTHLGEVQTETDLQIRDLLERIRLMEVDIHSGNVVNKELHQMHMEAKRLITERQMLTLEIEDVTKELQKLSASGDNKSLPELLSELDRLRKEHHNLRSQFEFEKNTNVKQVEQMRTMEMNLITMTKQAEKLRVDVANAERRAQAAAAQAAAHAAGAQVTASQPGTAQATTVSAAAATDSYAGAYTSYPPAYQQGAQAGAYQQGAQAGAYQQGAQAGAYQQGAQAGAYQQGAQSGAYQQGAQAGAYQQGAQDGAYQQGAQDGAYQQGAQAGAYNYAYDAGTAYAYAGYSGYPVAGYAQSAVPNYSYAAPPQPTSSGAATNAAGGQYGAVGSAGYPTGQVQPSSGTANAAQAPPPPPPPAAPYPPSTYDQTRGAQR

SEQ ID NO: 166915 - protein, 358 aa, Zea Mays
MSRLKCALRGFDLRALMVLLIGVPILILMIYAHGQKVTYFLRPIWESPPKPFKTIPHYYHENVTMENLCKLHGWKVRDFPRRVFDAVLFSNELDILEIRWNELSPYVSEFVLLESNSTFTGIKKPLHFKENKHRFGFAKSRLTYGNIGGRFVKGENPFVEESYQRVALDRLLKLARIEDDDLLIMSDVDEIPSGHTIDLLRWCDGIPDILHLQLRNYLYSFEFFLDDKSWRASIHKYQAGKTRYAHFRQADELLADSGWHCSFCFRYISDFAFKMQAYSHVDRIRFKYFLNPERIQDVICRGADLFDMLPEEYTFQEIIAKLGPIPSTYSGVHLPSYLLRNVDRFRYLLPGNCRRESG

SEQ ID NO: 166916 - protein, 113 aa, Zea Mays
MHAPKRFLKACMSTWVGPPAISPHGFFVFWLCPDERIAPAVPLLPLTFLDHPTQPQQGDRKEEALYRPTRLGHWAARPLAANSLAGLTTAHNRARSKTRNEAFSGTWLGAGVR

SEQ ID NO: 166917 - protein, 497 aa, Zea Mays
MENGYARPVEGIHVVVDMQNNAVIEFEDRKLVPLPPPDHLRNYTPGETRGGVDRSDVKPLIINQPEGPSFRINGYFVEWQKWNFRIGFTPKEGLVIYSVAYVDGSRGRRPIAHRLSFVEMVVPYGDPSEPHYRKNAFDAGEDGLGKNAHSLKKGCDCLGYIKYFDAHFTNFTGGVETIENCVCLHEEDHGILWKHQDWRTGLAEVRRSRRLTVSFICTVANYEYGFYWHFYQDGKIEAEVKLTGILSLGALMPGESRKYGTTIAPGLYAPVHQHFFVARMDMAVDCKPNEAHNQVVEVNVKVESAGTHNVHNNAFYAEEKLLKSELQAMRDCDPSSARHWIVRNTRTVNRTGQPTGYRLVPGSNCLPLALPEAKFLRRAGFLKHNLWVTQYKRGEMFPGGEFPNQNPRIHEGLPTWVKNDRPLEETDIVLWYVFGLTHIPRLEDWPVMPVEHIGFMLMPHGFFNCSPAVDVPPSSSDADVKEAESPKAIQNSLISKL

SEQ ID NO: 166918 - protein, 699 aa, Zea Mays
MTRAQRCHPLDPLSAAEIAVAVATVRVAGRSPEERDSMRFVEAVLLEPEKNVVALADAYFFPPFQPSLLPRSKGSAVIPSRLPPRRARLVVYNKQSNETSIWIVELSEVHAATRGGHHRGKVISSEVIPDVQPAMDAMEYAECEATVKSYPPFIEAMKRRGVDDMDLVMVDAWCAGYYSEADAPSRRLGKPLIFCRTESDSPMENGYARPVEGIHVVVDMQNNAVIEFEDRKLVPLPPPDHLRNYTPGETRGGVDRSDVKPLIINQPEGPSFRINGYFVEWQKWNFRIGFTPKEGLVIYSVAYVDGSRGRRPIAHRLSFVEMVVPYGDPSEPHYRKNAFDAGEDGLGKNAHSLKKGCDCLGYIKYFDAHFTNFTGGVETIENCVCLHEEDHGILWKHQDWRTGLAEVRRSRRLTVSFICTVANYEYGFYWHFYQDGKIEAEVKLTGILSLGALMPGESRKYGTTIAPGLYAPVHQHFFVARMDMAVDCKPNEAHNQVVEVNVKVESAGTHNVHNNAFYAEEKLLKSELQAMRDCDPSSARHWIVRNTRTVNRTGQPTGYRLVPGSNCLPLALPEAKFLRRAGFLKHNLWVTQYKRGEMFPGGEFPNQNPRIHEGLPTWVKNDRPLEETDIVLWYVFGLTHIPRLEDWPVMPVEHIGFMLMPHGFFNCSPAVDVPPSSSDADVKEAESPKAIQNSLISKL

SEQ ID NO: 166919 - protein, 131 aa, Zea Mays
MRDRSKNRKPTQRGRYLSTEAIQAVQSLKRAALRGAPAASAAAVVEPKLRRLLKADMVAVFRELAAQGEALLALQVFEEIRKEHWYKPRLLWYVDLVTVLASKGLRTEVDRACSYLKREQLEPDTEVILTG

SEQ ID NO: 166920 - protein, 66 aa, Zea Mays
MHVFLLWFVSIAKKVMHNFYLLEASHADDTDNPFYIVFNRRWYMVVFLYDQFSMHACGIIIWTALS

SEQ ID NO: 166921 - protein, 554 aa, Zea Mays
MFGSTNDNDPIRFGGGPPSVGDGPNAFPFKPLDLKSSHYTAEAMKEQNTKSSVKTETKILTVQEASLLSQLNQLNHNSQTIINSGGPHDPKLSRPASGAGAGNEHISPPDHGQTAEESDAREDYPAMATTTPAEDGYSWRKYGQKQVKHSEYPRSYFKCTHPNCLVKKKVERSHEGHITEIIYKGAHNHPKPTQSRRPGVQPVHPFGDSAQADAADNLGSQANALDANQPRRAGVQDGMDATSSPSVPIERCDSPASMQVDSATRFGSPEGADVTSVSDEVGGDDRVTRGSMSQGGADAEGDELECKRRKLESYAIDMSTASRAVREPRVVIQTTSEVDILDDGYRWRKYGQKVVKGNPNPRSYYKCTYPGCVVRKHVERASHDLKSVITTYEGRHNHEVPAARNSGHPGTAAATGAGGPRRLEHPSLRDGLMGHLGGCGVPFGLPPPRDPLAPMGNYPTYASSIPLGGAGPTSLPSLPVPAGTLSAVDGLKLPMLAPSSLQQHPLLRHRQAMQAAGLVAPKDDVKVEGNVAGGAAPSVYQQMMCSGLRLRQQM

SEQ ID NO: 166922 - protein, 237 aa, Zea Mays
MSTASRAVREPRVVIQTTSEVDILDDGYRWRKYGQKVVKGNPNPRSYYKCTYPGCVVRKHVERASHDLKSVITTYEGRHNHEVPAARNSGHPGTAAATGAGGPRRLEHPSLRDGLMGHLGGCGVPFGLPPPRDPLAPMGNYPTYASSIPLGGAGPTSLPSLPVPAGTLSAVDGLKLPMLAPSSLQQHPLLRHRQAMQAAGLVAPKDDVKVEGNVAGGAAPSVYQQMMCSGLRLRQQM

SEQ ID NO: 166923 - protein, 80 aa, Zea Mays
MNTHLKTVKLTLKGKNPVTLDHLSVRGNNIRYYILPDSLNLETLLVEETPRVKPKKPTTGKPLGRGRGRGRGRGRGRGPR

SEQ ID NO: 166924 - protein, 64 aa, Zea Mays
MCKLRCTKEWVGCYLLVILVIVLLVGVLFGLGVFRHGYDRITEIGRNHTCFDCNTTAPGQSRFR

SEQ ID NO: 166925 - protein, 72 aa, Zea Mays
MCKLRCTKEWVGCYLLVILVIVLLVGVLFGLGVFRHGYDRITEIGRNHTCFDCNTTGPDLEQTGQGNKRPWR

SEQ ID NO: 166926 - protein, 87 aa, Zea Mays
MCKLRCTKEWVGCYLLVILVIVLLVGVLFGLGVFRHGYDRITEIGRNHTCFDCNTTDGICSESLSMQEQDWGRGAHLATSPLYLTSF

SEQ ID NO: 166927 - protein, 63 aa, Zea Mays
MHQGVGGLLPAGDPGHRPPRRRPLRPRRLQARLRQDHGDRPQPHLLRLQHNRLAKEINDHGDE

SEQ ID NO: 166928 - protein, 1118 aa, Zea Mays
MAASGAVQPHVALDVNVEEDANDDEAADRLWATIEQVASPQRRNLAIVALDPGSASQKKEEVMDVRRLDRRGAQRVLQRALATADDNAKLLRGIRDRLDAAGLDVPRVEVRFRNLTVSTEVHYGRRALPTLLNYVHDIAERLLICCHLLRPKKTKLTILDDVSGLLQPGRMTLLLGPPSSGKSTLLLALAGKLDPQLKKTGQVTYNGTSLTEFFVQRTSAYVSQTDNHIGELTVRETLDFAAKCQGASENWQECLKELRDLEGKRGIRPNPEIDAFMKTASVGGQKHNLVTDYVLRVLGLDLCADTAVGTDMDRGVSGGQKKRVTTGEMVVGPRKTLLMDEISTGLDSSTTYQIVKCMRNFVHEMEATVLMSLLQPAPETFDLFDDIILLSEGQIVYQGPTVQVVDYFNSLGFSLPPRKGIADFLQEVTSRKDQSQYWSDKSRPYSFISAATMASAFKQSEYGRALDSVLCNSYDGTNSPKVLARSKFAVSKLSLVKACFSRELVLISRNRFLYIFRTCQVAFVGIITCTIFLRTRLHPVDEQNGDLYLSCLFYGLVHMMFNGFTELPITISRLPVFYKQRDNFFHPAWAFSIPNWILRIPYSLIEALVWSCVVYYTVGFEPTADRFFRFMLLLFSLHQMALGLFRMMGAIARDMTIANTFGSAALLAIFLLGGFIVPKEAIKPWWQWAYWLSPLMYGQRAISVNEFSASRWSKVFGVGNSPVGSNVLILHNLPTQDYWYWIGVCALLAYAILFNALFTLALTFLNPLRKAQAIVPSNFEETNDALTDSISDGHAIAENNSRNCEVKGQTEGELNKGMILPFQPLTMTFHNINYFVDMPKEMKSREKRLQLLSEVSGVFRPRVLTALVGSSGAGKTTLLDVLAGRKTGGYIEGDIKISGHKKEQRTFARIAGYVEQNDIHSPQVTVEESLWFSSILRLPKDISTKTRHEFVEEVMALVELDQLRHALVGKEGSTGLSTEQRKRLTIAVELVANPSIIFLDEPTSGLDARAAAIVMRTIRNTVDTGRTVVCTIHQPSIDIFEAFDELLLLKRGGRVIYGGSLGVNSIDMIDYFQSIPGVNHISEGYNPATWMLEITTQACEEILGLDFAVVYKNSDQFS

SEQ ID NO: 166929 - protein, 1159 aa, Zea Mays
MAASGAVQPHVALDVNVEEDANDDEAADRLWATIEQVASPQRRNLAIVALDPGSASQKKEEVMDVRRLDRRGAQRVLQRALATADDNAKLLRGIRDRLDAAGLDVPRVEVRFRNLTVSTEVHYGRRALPTLLNYVHDIAERLLICCHLLRPKKTKLTILDDVSGLLQPGRMTLLLGPPSSGKSTLLLALAGKLDPQLKKTGQVTYNGTSLTEFFVQRTSAYVSQTDNHIGELTVRETLDFAAKCQGASENWQECLKELRDLEGKRGIRPNPEIDAFMKTASVGGQKHNLVTDYVLRVLGLDLCADTAVGTDMDRGVSGGQKKRVTTGEMVVGPRKTLLMDEISTGLDSSTTYQIVKCMRNFVHEMEATVLMSLLQPAPETFDLFDDIILLSEGQIVYQGPTVQVVDYFNSLGFSLPPRKGIADFLQEVTSRKDQSQYWSDKSRPYSFISAATMASAFKQSEYGRALDSVLCNSYDGTNSPKVLARSKFAVSKLSLVKACFSRELVLISRNRFLYIFRTCQVAFVGIITCTIFLRTRLHPVDEQNGDLYLSCLFYGLVHMMFNGFTELPITISRLPVFYKQRDNFFHPAWAFSIPNWILRIPYSLIEALVWSCVVYYTVGFEPTADRFFRFMLLLFSLHQMALGLFRMMGAIARDMTIANTFGSAALLAIFLLGGFIVPKEAIKPWWQWAYWLSPLMYGQRAISVNEFSASRWSKVFGVGNSPVGSNVLILHNLPTQDYWYWIGVCALLAYAILFNALFTLALTFLNPLRKAQAIVPSNFEETNDALTDSISDGHAIAENNSRNCEVKGQTEGELNKGMILPFQPLTMTFHNINYFVDMPKEMKSREKRLQLLSEVSGVFRPRVLTALVGSSGAGKTTLLDVLAGRKTGGYIEGDIKISGHKKEQRTFARIAGYVEQNDIHSPQVTVEESLWFSSILRLPKDISTKTRHEFVEEVMALVELDQLRHALVGKEGSTGLSTEQRKRLTIAVELVANPSIIFLDEPTSGLDARAAAIVMRTIRNTVDTGRTVVCTIHQPSIDIFEAFDELLLLKRGGRVIYGGSLGVNSIDMIDYFQSIPGVNHISEGYNPATWMLEITTQACEEILGLDFAVVYKNSDQFSSKLAGVSKDLFTGEVQSTMLCGYFSRQLQLSYSDRYFGMLG

SEQ ID NO: 166930 - protein, 1424 aa, Zea Mays
MAASGAVQPHVALDVNVEEDANDDEAADRLWATIEQVASPQRRNLAIVALDPGSASQKKEEVMDVRRLDRRGAQRVLQRALATADDNAKLLRGIRDRLDAAGLDVPRVEVRFRNLTVSTEVHYGRRALPTLLNYVHDIAERLLICCHLLRPKKTKLTILDDVSGLLQPGRMTLLLGPPSSGKSTLLLALAGKLDPQLKKTGQVTYNGTSLTEFFVQRTSAYVSQTDNHIGELTVRETLDFAAKCQGASENWQECLKELRDLEGKRGIRPNPEIDAFMKTASVGGQKHNLVTDYVLRVLGLDLCADTAVGTDMDRGVSGGQKKRVTTGEMVVGPRKTLLMDEISTGLDSSTTYQIVKCMRNFVHEMEATVLMSLLQPAPETFDLFDDIILLSEGQIVYQGPTVQVVDYFNSLGFSLPPRKGIADFLQEVTSRKDQSQYWSDKSRPYSFISAATMASAFKQSEYGRALDSVLCNSYDGTNSPKVLARSKFAVSKLSLVKACFSRELVLISRNRFLYIFRTCQVAFVGIITCTIFLRTRLHPVDEQNGDLYLSCLFYGLVHMMFNGFTELPITISRLPVFYKQRDNFFHPAWAFSIPNWILRIPYSLIEALVWSCVVYYTVGFEPTADRFFRFMLLLFSLHQMALGLFRMMGAIARDMTIANTFGSAALLAIFLLGGFIVPKEAIKPWWQWAYWLSPLMYGQRAISVNEFSASRWSKVFGVGNSPVGSNVLILHNLPTQDYWYWIGVCALLAYAILFNALFTLALTFLNPLRKAQAIVPSNFEETNDALTDSISDGHAIAENNSRNCEVKGQTEGELNKGMILPFQPLTMTFHNINYFVDMPKEMKSREKRLQLLSEVSGVFRPRVLTALVGSSGAGKTTLLDVLAGRKTGGYIEGDIKISGHKKEQRTFARIAGYVEQNDIHSPQVTVEESLWFSSILRLPKDISTKTRHEFVEEVMALVELDQLRHALVGKEGSTGLSTEQRKRLTIAVELVANPSIIFLDEPTSGLDARAAAIVMRTIRNTVDTGRTVVCTIHQPSIDIFEAFDELLLLKRGGRVIYGGSLGVNSIDMIDYFQSIPGVNHISEGYNPATWMLEITTQACEEILGLDFAVVYKNSDQFREVEQLIKESSIPAIGTEPLKFSSEFSQNFLTQFKACWRKQRLVYWRSPEYNVVRLFFTAIAAIIFGSIFWNVGMKRDTTEDLMLVMGSLYAACLFLGVNNASSVQPVVSTERTVYYRERAAKMYSSFPYAAAQGLVEIPYIAVQTLIFGLITYFMINYERNIGKLLLYLLFMFLTFTYFTFYGMVAVGLTPTQQVAAVVSSAFYSLWNLLSGFLIPQSRIPGWWIWFYYICPVAWTLRGIITSQLGDVQARIVGPGFDGTVQEFLEESLGFQQGMAGVTVAVLIGFSLFFFAVYATSIKVLNFQRR

SEQ ID NO: 166931 - protein, 122 aa, Zea Mays
MTKQKAVIRLGVTNDQNRSKAMQLASRFHGKDQLEVVGEDIDIPCLVNSLRKKVCRSAGIVVVEEVKDKAKVEEEKKKKEEEEKKKKAKELQEAIQKHCPPPPFYGGPPFLCEEQTTGCHIM

SEQ ID NO: 166932 - protein, 109 aa, Zea Mays
MKQKIVIKVCMPCDKCRSKAMGLAAKAGANKMGITGDGRDQLEVEGDDIDTVCLVNCLRKKVGRADIVKVEEVKPAEKKPPEEKEKEKPAEAVPLPYCWKNESAKGPRC

SEQ ID NO: 166933 - protein, 62 aa, Zea Mays
MYGIAGFKLTMSHSQGMWLDKIVLDQQAYIRIQSLIVPGGASPVPSPSLDLSTSILRIVSVP

SEQ ID NO: 166934 - protein, 729 aa, Zea Mays
MANILNGTTHLSVEIQLMAFRFLELVVLNFPSSFSSYAEQTFNNFVAVLSNDRINLHDRNKLNSVLSGLGHCLSLVAKTIENDDTSNRQAHNLSARENWKFTTDEDSTGGAFSMSNLLTKLQNLVQILTNSVEVSASELCAKSALDVQSSEALLSALQCLDLICRIFVHEVKKPQLKFSIPKNQHGPDWLRSSLLVHLNNLWGVKRLFHGKGDDKFFIFNLRIAEIFLRLNVWIDNTVFSAEEFCLFVSSLFAKAKTLRNKDLIEIYLSPLITCIPGLISNAPDDSKGYLLEVFTDSFKDCKVDCKLMLPYLDAVGGMLFPEKTSIWLAENDSGVLGYHDIWIHELPGILLQSIDKAPLVTKVALELLLRIGQYFPAVDCGRLRPFMKLFGVESLPGAVDLGPFVKLPRDCQELAISCLYYFPSLLPDVIEPLASCCLSDALEPLILFRAIEVLQSTYKAGSLHITEQLSFLLLLMARFRVHPGDIVTLEDSSKLSNWDTFKSLNRLILTSLSEMGDGSLVLELIWNNLFNAIAQKPSLHNMNGLLRIIVTLDAGTSKLMNGNVVKLIAGYLVDASLDLSKSTEFGFQPDKTRLFQYFLKPCTIMFDKNDKVLCSTLESLKSFVTGGDHLLSSVSNLNYPGELSCRVCAVTTILIFLCNDRKLHRNLSLGKLVIKGILEYIRHQLDSSVPDVTHVGKQKLKSAFEQLKTKALQLNCWDRSELEGFSSAT

SEQ ID NO: 166935 - protein, 447 aa, Zea Mays
MGRPKGGAASSSKKPKAKQKQRGGVDFKKYKHKVGRKLPPPKNATNTEIKSKAIVLPEQSMASERTGMAVNKRGLTLRELLQQTGHYNANVRRAALNGIKDIVVKHPTELKLHKVAIIEKLQERICDTDKVVRESLYNILQSLIFPSLKEDNTISVRSTLFLLMANILNGTTHLSVEIQLMAFRFLELVVLNFPSSFSSYAEQTFNNFVAVLSNDRINLHDRNKLNSVLSGLGHCLSLVAKTIENDDTSNRQAHNLSARENWKFTTDEDSTGGAFSMSNLLTKLQNLVQILTNSVEVSASELCAKSALDVQSSEALLSALQCLDLICRIFVHEVKKPQLKFSIPKNQHGPDWLRSSLLVHLNNLWGVKRLFHGKGDDKFFIFNLRIAEIFLRLNVWIDNTVFSAEEFCLFVSSLFAKVLYPMLQMTQKAICWRYLRTHLKIARWIAS

SEQ ID NO: 166936 - protein, 549 aa, Zea Mays
MGRPKGGAASSSKKPKAKQKQRGGVDFKKYKHKVGRKLPPPKNATNTEIKSKAIVLPEQSMASERTGMAVNKRGLTLRELLQQTGHYNANVRRAALNGIKDIVVKHPTELKLHKVAIIEKLQERICDTDKVVRESLYNILQSLIFPSLKEDNTISVRSTLFLLMANILNGTTHLSVEIQLMAFRFLELVVLNFPSSFSSYAEQAHNLSARENWKFTTDEDSTGGAFSMSNLLTKLQNLVQILTNSVEVSASELCAKSALDVQSSEALLSALQCLDLICRIFVHEVKKPQLKFSIPKNQHGPDWLRSSLLVHLNNLWGVKRLFHGKGDDKFFIFNLRIAEIFLRLNVWIDNTVFSAEEFCLFVSSLFAKAKTLRNKDLIEIYLSPLITCIPGLISNAPDDSKGYLLEVFTDSFKDCKVDCKLMLPYLDAVGGMLFPEKTSIWLAENDSGVLGYHDIWIHELPGILLQSIDKAPLVTKVALELLLRIGQYFPAVDCGRLRPFMKLFGHYQELWILVLLLNFLVIAKNLPFHAFIIFPVCSLTSLSHWPHVA

SEQ ID NO: 166937 - protein, 361 aa, Zea Mays
MASLCPLSAAPAFPRAARPRAASFRGPASWSGLAATASNACVCSCGLLPTGGYARLRSRLRSPVRAKIDEADKGTGAGLGFPSPRRRKLRLRLRPRLRLLWWRLRRLSPRELMTDAGAALRRAVRRVPPAAAAPVVLALLLAVARLALPKNVAREVAYSDLVAGLREGAVAAVAFEEDSRRIYFSKNAGDDVGSDTNETGENAAAPAPKWPYYARRVPHDEGFLLGLMRDGRVDYRSSPRPAGRLLVDMLSTLLTLWVSLVPVMWFIQRQMSGAGGADKRRKPRKQRVGFDDVQGIDEAKEELVEVGILCLGRILWMQSRGRNTGSLGGKKLILKGKASPSYFHGYLNLEINHQALMISED

SEQ ID NO: 166938 - protein, 133 aa, Zea Mays
MWDDANLKQLIEIFKEGIEARNRPHGCWTRKRLEEPWAKAFFFTKSGMKLVKTRLKNKLDDLDGMMQSKLLCARRNGGMKHLARCNNPERGLECGHVKFQKRGPKYLDDLHRLFDKVHVSEGFRIMSGRCLIE

SEQ ID NO: 166939 - protein, 345 aa, Zea Mays
MHIEVTEIDVFLPTNSNTKLHMFFFLAEVALASLEYEETTCKPMSIKEIYTATENLSPSNVIGQGIAGKVYRGVLTNGWPVAVKHIVKNEHAETFLREVKSLSHVRHPNLVSLRGYCDGQEECFLVYELCINGNLSEWLFGKDKNLPWIQRLQIALGSACGLWFLHIYPEGCIVHRDIKPTNILLGVDMEPKLSDFGLSRVIDLGVSHVSSEVRGTFGYVDPEYRHNHRVNAAGDVYSFGMVLLQLLSGRRAINIMNTAMPMSLDKMASTLIQDGNVSEFADPRLNGEYSTEAFDLSLKLALLCTGHKKQRPSMEQVVSRLEKALEISMRDDAKHNNISIVESLA

SEQ ID NO: 166940 - protein, 365 aa, Zea Mays
MIYFCVFGFFHAYALDGNGQSLHASLVTSTGYRLSMETYLSSLLEQQQGEREAFLCSSEVALASLEYEETTCKPMSIKEIYTATENLSPSNVIGQGIAGKVYRGVLTNGWPVAVKHIVKNEHAETFLREVKSLSHVRHPNLVSLRGYCDGQEECFLVYELCINGNLPWIQRLQIALGSACGLWFLHIYPEGCIVHRDIKPTNILLGVDMEPKLSDFGLSRVIDLGVSHVSSEVRGTFGYVDPEYRHNHRVNAAGDVYSFGMVLLQLLSGRRAINIMNTAMPMSLDKMASTLIQDGNVSEFADPRLNGEYSTEAFDLSLKLALLCTGHKKQRPSMEQVVSRLEKALEISMRDDAKHNNISIVESLA

SEQ ID NO: 166941 - protein, 125 aa, Zea Mays
MWLVEPLHPLLLTAPSLRRHRWPLQILRHLLRRPLQRCLLSFVHKQLIRRAGKVTGPWMEVWEVARHCHTAKDFVQCIFCLKILPSGIKRFKQHLAGRFGGTMNGYNRLMKLMVITAYGVLWMVH

SEQ ID NO: 166942 - protein, 338 aa, Zea Mays
MGNSDAASPASAAAARDSKKKRGSRSAAKLKQSKRDTRRNKDAKSAASPTGAVSGSPILASPHPPLPRRRADSRSRGSDPEDRDEAIAAGLEADGSGLDSPGSDKRQSGDCPQRKGFPGNGGGPSLSSGSSVWSSSRSVSDAEEDTGGPEDESEVFDDWEMAADALYVDDSSCNQSSGPTPTLPQAPTTAEPSHAAKPEPIQSKTRAWAPDDIFRPQSLPSISKQTSFPASIGNRWQDMGMSAAQQGILSLPLSCPICCDDLDLTDSSFCPCPCGFHMCLFCHNRILVEDGRCPGCRKQYNTVSAAEGGGGGGSRATVGTGREMEKRLSRSCSMGPSY

SEQ ID NO: 166943 - protein, 250 aa, Zea Mays
MACSHIAAAGVSSPAAAAARSPAHSPASAFARLRSTPRFASAGLSVKGNGAAFPLVAAAGPAAAAPVADLDGRPATEKQPIIVIDNYDSFTYNLCQYMGELGLNFEVYRNDELTIEDVRRKNPRGILISPGPGEPQDSGISLQTVLELGPTIPIFGVCMGLQCIGEAFGGKIIRAPSGVMHGKSSPVYYDEELGKALFNGLPNPFTAARYHSLVIEQETFPHDALEATAWTEDGLIMAARHKKYKHIQLF

SEQ ID NO: 166944 - protein, 755 aa, Zea Mays
MKYTKLKRCGLAASPSFPTGRRQLQLNDAAPGKRSTFRYSTVLFPFSPPLRLSLPRQLPPHGVIRPSGAGRKDATQRAMLPPRAAAVPLLLLALAAGAARGADDLASDAVALQAFLAPFGSATVSWNSSQPTCSWTGVVCTGGRVTEIHLPGEGLRGALPVGALGGLNKLAVLSLRYNALSGPLPRDLASCVELRVINLQSNLLSGELPVEVLALPALTQLNLAQNRLSGRISPAIAKNGRLQLLFLNGNRLTGELPNVSMPSLTALNVSFNNLSGEIPKSFGGMPSTSFLGMPLCGKPLPPCRAPGSEASPSQPPTPTLRPEAPAPTDNRGRGRHHLAGGAIAGIVVGCAFGFLLIAAVLVLVCGALRREPRPTYRSRDAVAAELALHSKEAMSPNGYTPRVSDARPPPPPSVPPPPAVSAAAVGRKKLFFFGRIPRPYDLEDLLRASAEVLGKGTHGTTYKAAIESGPVMAVKRLKETSLPEREFRDKVAAIGGIDHPNVVPLQAYYFSKDEKLMVYEFVAMGSLSSMLHGNRGSGRSPLSWESRRRIALASARGLEYIHATGSMVTHGNIKSSNILLSRTVDARVADHGLAHLVNPAGAATTTRVAGYRAPEVVADPRRASQKADAYSFGVLLLELLTGKAPAHAVLHDEGVDLPRWARSVVKEEWTSEVFDTELLRHPGAEDEMVEMLRLAMDCTEPAPDQRPAMPEIVARIEGLGGTASTSTATARSGRSASVDEADDRPLRTTGSIRQS

SEQ ID NO: 166945 - protein, 314 aa, Zea Mays
MSHHHPPRPSCLSDRCRGAAAGLALRLVRRAARGALGARARAVRGQARRRRRGIRGSSRRHARAAPGGALGRRGCLYTLALPSALRPGRPGLGNLAGYHQRPHRPITQLLLRPAAAQLSVVGVHLLESPLLHPMAEGLFNLVLAWTLLFAPLLFTDCRRDRYKGSLDVLWGFQMFLTNTFLIPYMAIRLNGPEADRSPPRRSQLGSVMVNGAPAVGAVGGLVCVLSIVWAFSGRGDSGFGGIAERWQYLQSYLFSERLAYAFLWDMFLYSVFQPWLIGDNLRNVKADAAGLVSVVRFVPVVGLVAYLLCLEEED

SEQ ID NO: 166946 - protein, 320 aa, Zea Mays
MAAPPVPVLCSASPCRITTHLAPPAFRTVAAARPQALPFVLCVEQRVGPSARARAPFAAKRGGGGEVSAEAPDGTRALLQAALWGAEAAYILWLFLLPYAPGDPVWAISQATISDLIGLSLNFFFVLPLLNSVGVHLLESPLLHPMAEGLFNLVLAWTLLFAPLLFTDCRRDRYKGSLDVLWGFQMFLTNTFLIPYMAIRLNGPEADRSPPRRSQLGSVMVNGAPAVGAVGGLVCVLSIVWAFSGRGDSGFGGIAERWQYLQSYLFSERLAYAFLWDMFLYSVFQPWLIGDNLRNVKADAAGLWIYSIGATAMHGNGVCS

SEQ ID NO: 166947 - protein, 103 aa, Zea Mays
MPKMVRFSSDDAKDVVHYQTISPKSLAKSVLEEGGWSNFMFSREDTQNNIDVAIVFIGSKLQSSDISKDKQVDPALADTLKSGAKKSGGCILKEHETTELWSE

SEQ ID NO: 166948 - protein, 88 aa, Zea Mays
MFSREDTQNNIDVAIVFIGSKLQSSDISKDKQVDPALADTLKVIIGTHLSDTVLYAWYLSYSALLLTLLNWSLGVWSKKKWWLYSQGT

SEQ ID NO: 166949 - protein, 78 aa, Zea Mays
MFSREDTQNNIDVAIVFIGSKLQSSDISKDKQVDPALADTLKPWSLEQKKVVAVFSRNMRPLSSGVNEGRRLWKSDIT

SEQ ID NO: 166950 - protein, 505 aa, Zea Mays
MAAAIAAALLRRSTSHHRLILPLLSHLHRTFPQPSSPWLPPQHRFFSTGESAGDPTQKPTSSLDPKKLWRELSASDPAVGSCRLPKATWDAIVGLVRGFAKSPAISDQALALYVPSSAFPSYVRRFRAFILPRLSRESAAHLLSLPAEDAHELLLPAFAEFCFSNFADKLRQHRSVMAAADLTAPHTWYPFARAMRRRIVYHCGPTNSGKTHNALTRFAAAKSGVYCSPLRLLAMEIFDKVNALGVYCSLRTGQEVKEVPFSNHVACTIEMMSTEELYEVAVVDEIQMMADPVRGFAWSRAVLGLKADEIHLCGDPSVLKIVQKICADTGDDLVVHQYERFKPLVVEAKTLLGDLKNIRSGDCVVAFSRKEIFEVKLAIEKFTKHKCCVIYGALPPETRRQQAKLFNEQDNEYDVLIASDAVGMGLNLNIRRVVFYSLAKYNGERMVPVPASQVKQIAGRAGRRGSVYPDGLTTTFLKDDLDYLIQCLQQPFEEAQKAGQYQEGC

SEQ ID NO: 166951 - protein, 474 aa, Zea Mays
MAAAIAAALLRRSTSHHRLILPLLSHLHRTFPQPSSPWLPPQHRFFSTGESAGDPTQKPTSSLDPKKLWRELSASDPAVGSCRLPKATWDAIVGLVRGFAKSPAISDQALALYVPSSAFPSYVRRFRAFILPRLSRESAAHLLSLPAEDAHELLLPAFAEFCFSNFADKLRQHRSVMAAADLTAPHTWYPFARAMRRRIVYHCGPTNSGKTHNALTRFAAAKSGVYCSPLRLLAMEIFDKVNALGVYCSLRTGQEMMADPVRGFAWSRAVLGLKADEIHLCGDPSVLKIVQKICADTGDDLVVHQYERFKPLVVEAKTLLGDLKNIRSGDCVVAFSRKEIFEVKLAIEKFTKHKCCVIYGALPPETRRQQAKLFNEQDNEYDVLIASDAVGMGLNLNIRRVVFYSLAKYNGERMVPVPASQVKQIAGRAGRRGSVYPDGLTTTFLKDDLDYLIQCLQQPFEEAQKAAGQYQEGC

SEQ ID NO: 166952 - protein, 157 aa, Zea Mays
MAGESCVPKPLFGGAIFTTFPDRFQDVSNIREVPDHQEVLVDPSRDESLIFELLDLKGEVDDAGSALWFLQDIANEQDAGDNLVVEHSGTLELAALHLGEAPAVAATAVGQLAVSKGRQGREAQNIVRIYLANIRLKNAATDVLITAYEPLLIKDKA

SEQ ID NO: 166953 - protein, 64 aa, Zea Mays
MCFCGPCLCGPCFCGPVPCRARPAHMYMYRWAHLPNADMKLDHPILKIRVKTIPSHYVPDQTYG

SEQ ID NO: 166954 - protein, 163 aa, Zea Mays
MRLIQSVIPHMMERRKGTIVNVGSITALAPGPWAGVYSASKAALHALSDSLRVELRSFGINVMTVAPGGTRSNLGNSSAAKYDQMHEWKYYKKYEEGLRARTGISQGPRSTPAEELAKAVVASVLKKNPPAWFAYGQYSAILSILYYAPLWFRDCLYKFVMKC

SEQ ID NO: 166955 - protein, 368 aa, Zea Mays
MDGLLSKLRSLDAYPKVNEDFYSRTLSGGIITLVSSAVMLLLFVSELRLYLHAVTETTLRVDTSRGETLRINFDVTFPALQCSIISLDAMDISGQEHLDVKHDVFKQRIDAHGNVIATRQDVVGGMKMEAPLQHHGGRLEHNETYCGSCYGAQESDDQCCNTCEDVREAYRKKGWGVSNPDLLDQCKREGFLQSIKDEEGEGCNIYGFIEVNKVAGNFHFAPGKSFQQSNVHVHDLLPFQKDSFNVSHKINRLSFGEYFPGVVNPLDGANWVQHSSYGMYQYFIKFSVTEHFRSGESGRMQALPGVFFFYDLSPIKVTFTEQHVSFLHFLTNVCAIVGGVFTVSGIIDSFVYHSQRAIKKKMEIGKFN

SEQ ID NO: 166956 - protein, 326 aa, Zea Mays
MDGLLSKLRSLDAYPKVNEDFYSRTLSGGIITLVSSAVMLLLFVSELRLYLHAVTETTLRVDTSRGETLRINFDVTFPALQCSIISLDAMDISGQEHLDVKHDVFKQRIDAHGNVIATRQDVVGGMKMEAPLQHHGGRLEHNETYCGSCYGAQESDDQCCNTCEDVREAYRKKGWGVSNPDLLDQVSHKINRLSFGEYFPGVVNPLDGANWVQHSSYGMYQYFIKVVPTVYTDINEHIILSNQFSVTEHFRSGESGRMQALPGVFFFYDLSPIKVTFTEQHVSFLHFLTNVCAIVGGVFTVSGIIDSFVYHSQRAIKKKMEIGKFN

SEQ ID NO: 166957 - protein, 249 aa, Zea Mays
MVEGLNTMKPIVALVMVHKNLMINVVTHVKMFVKPTGKKGGVYRIQICLTREGFLQSIKDEEGEGCNIYGFIEVNKVAGNFHFAPGKSFQQSNVHVHDLLPFQKDSFNVSHKINRLSFGEYFPGVVNPLDGANWVQHSSYGMYQYFIKVVPTVYTDINEHIILSNQFSVTEHFRSGESGRMQALPGVFFFYDLSPIKVTFTEQHVSFLHFLTNVCAIVGGVFTVSGIIDSFVYHSQRAIKKKMEIGKFN

SEQ ID NO: 166958 - protein, 389 aa, Zea Mays
MHGRRHLAASLTRALIQAPSRSISSTPSLLQTLDPSVPSPPAAGAGRLAELRRRLQADAPSLGDFTYSVEVGTRQRPLPKPKWMKETVPGGAKYAAIKAKLRELKLHTVCEEARCPNLGECWSGGETGTATATIMILGDTCTRGCRKYYIRRFCNVKTSRTPPPPDPDEPSNVAQAIASWGLEYIVITSVDRDDLPDQGSGHFAETVQKLKALKPEMLIEALVPDFRGDPSCVEKVATSGLHVFAHNIETVEELQRNVRDYRANFKQSIDVLEMAKEYAPPGTLTKTSIMLGCGETPDQVIRTMEKVRAADVDVITFGQYMRPSKRHMPVSEYVTPEAFEKYRALGVEMGFRYVASGPMVRSSYKAGEFYIKAMIEAERAKGTAADSSA

SEQ ID NO: 166959 - protein, 273 aa, Zea Mays
MERAVPVRKPHTSTADLLSWSATAPDASASPAASSRPSLKPAAGITPAMFGAPVTEQEAEDLSKSERKFCSGSKLKEMSGSGIFAEKSENGDSEASNPDNKTSLRMYQQTVTGISQISFSADGSVSPKKPSSIPEVAKQRELSGTLEDADAKINKQLSEAKTKELSGSDIFGPPPEIPARPLAARNMELQGNVDFSLPQRSVHTSVKVSNPAGGPSNISFSEEPVVKTAKKIHNQKFQELTGNNIFADGTPAPREYLGGIRKPPGGESSIALI

SEQ ID NO: 166960 - protein, 291 aa, Zea Mays
MERAVPVRKPHTSTADLLSWSATAPDASASPAASSRPSLKPAAGITPAMFGAPVTEQEAEDLSKSERKFCSGSKLKEMSGSGIFAEKSENGDSEASNPDNKTSLRMYQISFSADGSVSPKKPSSIPEVAKQRELSGTLEDADAKINKQLSEAKTKELSGSDIFGPPPEIPARPLAARNMELQGNVDFSLPQRSVHTSVKVSNPAGGPSNISFSEEPVVKTAKKIHNQKFQELTGNNIFKEDVPSSAEKSLSSAKLKEMSGSDIFADGTPAPREYLGGIRKPPGGESSIALI

SEQ ID NO: 166961 - protein, 92 aa, Zea Mays
MVMGASGSKLEKALGDQFPEGQRYFGLENFGNTCYCNSVLQKSGQTAISCIGSSTARPQHYRDEKLHCQAEKWHRRAAPRDFRFGFLQIFGF

SEQ ID NO: 166962 - protein, 75 aa, Zea Mays
MIVHSNPKQVTNTTFFILALTLARATSFPLCCTSLCLKGFGCCSPKCLSPSVIIFRWEQSAFSRMQAMPRALAKA

SEQ ID NO: 166963 - protein, 91 aa, Zea Mays
MVMGASGSKLEKALGDQFPEGQRYFGLENFGNTCYCNSVLQKSGQTAISCIGSSTARPQHYRDEKLHCQAEKWHRRAAPRDFRFGFLQIFG

SEQ ID NO: 166964 - protein, 255 aa, Zea Mays
MVMGASGSKLEKALGDQFPEGERYFGLENFGNTCYCNSVLQALYFCIPFREQLLEYYANNKTPGDVEENLLTCLADLFMQISQAKKKTGVIAPKRFVQRVKKQNELFRSYMHQDAHEFLNFLLNELVDILEKESSAAKDSPQSSSPEKAPNGPVQPLANGVKKEPPVTLVHKNFQGILTNETRCLRCETVTARDETFLDLSVDIEQNSSITSCLKNFCSTETLNAEDKFFCDKCCSLQEAQKRMKIKKAPHILES

SEQ ID NO: 166965 - protein, 116 aa, Zea Mays
MILTQTKGEKEKGTVENPMTNVLEDEENESITGIVPNAEPEPAEGVQVRANASSSQGAATQNKRKRDTQLRKRRKLIPDDEEIQSADFSTDSEDENHHFYMHSPSASSSVTLFRSF

SEQ ID NO: 166966 - protein, 538 aa, Zea Mays
MIVGNVGVILVLFPAHVWWAIYSLIKTDRINAGLKLAVLLALPVLFGLWLGLGILGSALVGLGYGFFTPWISTFEAFRQESEAKKFVHGIVDGTWGTIKGSCTVVRDFADICFHSYPVYLKELREGSQNREPHSIRLLDVPSCIVVALLGLVVDIPLYTVIALVKSPYMLFKGWQRLLHDLISREGPFLETVCVPIAGLAILFWPLVVVGSVLLAIVSSIFVGLYGAVIVFQERSFQRGVSYVVAMVAEFDEYTNDWLYLREGTVLPKPSYRKRKPSNSTEFSVRTNASGGKGADHPPGPSEAPAMLVPNLAPARSVREAIQEVKMVQIWENMMKSCEQRGRDLLNQNVITAAGLAEWLRGAKEGGHHETVSLGLPSYSLLCTVLQSIRAGSGGLVLGSFEVNQHNRPQDRLLDWFFHPVLVLKEQIQALRMTEEEVRFLEKLTVFAGNVAGAGAGGWENGAGMMVVPQDPVRLAQIQAISRRLVGIVRSLSKFPTYRRRYRHVVKLLIAYSVERESSGRSSASGRSASYFEITQLDV

SEQ ID NO: 166967 - protein, 288 aa, Zea Mays
MSASRSGRIRRAGSVALGDFLRREASAERAALGGGERPSVAAGQACRAKKGEDFALLKPACERRPGAPSTSFSAFALFDGHNGSAAAVYAEEHLLANVLGCVPADLSRDDWLAALPRALVAGFVKTDKDFQTKAHSSGTTVTLAIIDGSVVTVASVGDSRCVLDAAGSIYYLSADHRFDANEEEVGRVTECGGEVGRLNVVGGAEIGPLRCWPGGLCLSRSIGDQDVGEFIIPVPYVKQIKLSNAGGRLIISSDGVWDALTAEMAFRCARGLPPEAAAEQIVKLNQKD

SEQ ID NO: 166968 - protein, 403 aa, Zea Mays
MAPGRMGSRCKRDALAETTPTEYEKQRAAHVMRNNQMFQRLGINQLRTIMTATRVRSKDDCSEESGSLYDGEDSEGSEQEEDFQVAKGVRSHNSTHVAEKTTQGTRGHKRVVAPGVNEQQIRITRQRSATINQQSFLNLTTTTHPSSTATTNQESTQNITSATQFTSSAAAEQNYTQGLTAAAQANSPIQADISDHIADEELVPRQRSMGKQLESLSRGLGTKIPIQIYDGKRRPEPPIQVAKFASEGGIILRQHIPIFPHWKEYKKQENEGKITDYIGKLAGQFTMDVDSKAVKDACVDMIKGGQRQMRYRLKRKYFTGVPANQVRTTSPVPCMTDDQWKDLVQMWSTPNHKNNCVKNKLNCEKVQFPQCTGSQSYIAKSYVVVRNCYVWMNSLLIKFLVNV

SEQ ID NO: 166969 - protein, 280 aa, Zea Mays
MAPGRMGSRCKRDALAETTPTEYEKQRAAHVMRNNQMFQRLGINQLRTIMTATRVRSKDDCSEESGSLYDGEDSEGSEQEEDFQVAKGVRSHNSTHVAEKTTQGTRGHKRVVAPGVNEQQIRITRQRSATINQQSFLNLTTTTHPSSTATTNQESTQNITSATQFTSSAAAEQNYTQGLTAAAQANSPIQADISDHIADEELVPRQRSMGKQLESLSRGLGTKIPIQIYDGKRRPEPPIQVAKFASEGGIILRQHIPIFPHWKEYKKQENEGSIHHGCGQ

SEQ ID NO: 166970 - protein, 238 aa, Zea Mays
MPLSAQYALSVRCCHAGFSSTWFTAGGTVATARTPSRCLVVKLLTPIALARPSRWHSSMARHTPARSSGTAFSFLVGSSGGPGFRHTGQWISGDRDGLAAYLSVSRRDGSTRSGWFCEHHSLDVTNRSSRDRRVPRRSASATASPSGFSVPYMEAVSKWRNPTSMAESTPSLTASCTRGNDAVPMPTIGIAVLALPDRRATSGTTAVVPADAMLVGSDVVRCRCSTTSRLDARDREGV

SEQ ID NO: 166971 - protein, 117 aa, Zea Mays
MSSPAARSITCYSKIPEFLVGTNGQPMPAVGLGTASHPFVAEDVRTSVLTALELGYRHIDTAGLYASERVVGEAMAEAVSCGLVASRDELFVTSKVWCTQCHPELVLPSLKESLKLN

SEQ ID NO: 166972 - protein, 279 aa, Zea Mays
MFCLQQFTGTELGENPSFNLKGYVTGNPVTDSQFDTDGVVPFLHGMGLIPYEFYENAREMCGGKYSDAASVACAEVTRAIANITSAVNREHVLEPACPDDDDDELFGPKTTMAETDGGTSRRLMLQSADYFLPAGFKCRRASYVLSRVWANDETVQESLGVRKGTIGAWKRCNQDILYNQNVQSVVPYHSRLAAKGYRALIYSGDHDRIVPFVGTQAWIRYLNLTVVDDWRPWYVGGQVAGNSGNLIYATVKGAGHTAPEYKPTECQTMFRKWVSRDPL

SEQ ID NO: 166973 - protein, 364 aa, Zea Mays
MRSGGGGNKRSLLLLLSAWWLLLGSLVAQLPAARGGSGHVVTRMPGFDGPLPFHLETGYVEVDEQLGVQLFYYFVRSEKDDPGEDPLLLWLSGGPGCSGLSGLAYEIGPFHFDARGYRGGFPTLLYRPETWTKVSNIIFMDSPVGTGFSYATSDEGLKSSDTQAVRQLAIFLRKWLEEHPEFLPNPLYIGGDSYGGMIVPALALQIHTSTELGENPSFNLKGYVTGNPVTDSQFDTDGVVPFLHGMGLIPYEFYENAREMCGGKYSDAASVACAEVTRAIANITSAVNREHVLEPACPDDDDDELFGPKTTMAETDGGTSRRLMLQSADYFLPAGFKCRRASYVLSRVWANDETVQESLGVRKV

SEQ ID NO: 166974 - protein, 119 aa, Zea Mays
MGLIPYEFYENAREMCGGKYSDAASVACAEVTRAIANITSAVNREHVLEPACPDDDDDELFGPKTTMAETDGGTSRRLMLQSADYFLPAGFKCRRASYVLSRVWANDETVQESLGVRKV

SEQ ID NO: 166975 - protein, 51 aa, Zea Mays
MLAKRVSSPNKHYLSVKLKASPGFMHNRYICYFTALNDCRFCAVHLSVGVV

SEQ ID NO: 166976 - protein, 51 aa, Zea Mays
MTKVSYLLHCTFSEVARLVPRRGVKQVSIVLLCRCGATKLAHKNAGHTPVM

SEQ ID NO: 166977 - protein, 142 aa, Zea Mays
MGSGGANTAPLLTPYKMGKFDVSHRVVLAPLTRQRSYGNVPQPHAILYYQQRATKGGLLIAEATGVSDTAQGYKDTPGIWTHEQVEAWKPIVDGVHQKGGIFFCQIWHVGRVSNSTFQPNGQAPISSTDKPLKPQGSCSKCD

SEQ ID NO: 166978 - protein, 320 aa, Zea Mays
MTKWQLFLQIEQSFQVHRSYGSMLEGEADELKRVFLEGNPYLLGLTMVVSLLHSLFDFLAFKNDIQFWNKNKSMEGLSAKSVVLNFVCQLVVFLYLLDNDTSWMILASSGVGVCIEFWKIGKAMHIEVDRSGKIPMLRFRDRESYAQNKTKEYDAIAMKYLTYVLFLLVVGFSIYSLKYEKHKSWYSWILSSMTSCVYMFGFIMMCPQLFINYKLKSVAHMPWRQMTYKFLNTIIDDLFAFVIKMPMLHRLSVFRDDVIFLIYLYQRWKYPVDKKRVNEFGFGGEDEPAAQEAVEGSDSAAAPQLTEAGSETSTEDKKTK

SEQ ID NO: 166979 - protein, 592 aa, Zea Mays
MDVEMSCAAPEAAAVPVDWRGRPCRPRRHGGMRAAVFVLGVQAFEIMAIAAVGNNLITYVFGEMHFPLSQAANVVTNFVGTIFLLALLGGFLSDSYLGCFWTMLIFGFVELSGFILLSLQAHLPQLKPAPCDMSSTDGGCEKASGFKSTVFFLALYLVALGSGCLKPNMIAHGADQFDAATPGGANSLPTYFNSAYFSFCAGELVALTALVWVQTHSGMDVGFGVSAVAMAAGLASLVAGAAFYRNKPPQGSIFAPVARVSFRRCLHQKEASLPFQLQFCQRRGLRAGAPRRQLPPQQQIQVPGQGMRPGSAAGAEHEARRSAWRLCTVAEVQQAKTLLAVTPIFACTIVFNTVLAQLQTFSVQQGSAMDTALPPGSGSFRIPPASLQAIPYALLLALVPAYELLLVPLMKRLTGTRSGITPLQRIGVGLATLAFSMVAAADVERRRRDAAAEGRQMSVLWIVPQFLVFGVSEMFTAVGLIEFFYKQACAGMQAFLTALTYCSYAFGFYLSSVLVSLVNRVTARHGGAGWLGDNNLNKDRLDLFYWMLAVLSVLNFCCYLLCARWYNAGAQGSDAAASGLVASEVDDRKEII

SEQ ID NO: 166980 - protein, 113 aa, Zea Mays
MDVEMSCAAPEAAAVPVDWRGRPCRPRRHGGMRAAVFVLGVQAFEIMAIAAVGNNLITYVFGEMHFPLSQAANVVTNFVGTIFLLALLGGFLSDSYLGCFWTMLIFGFVELSF

SEQ ID NO: 166981 - protein, 253 aa, Zea Mays
MFLDLKKVSCATPTANSSIKKDTSLPVMPHSVSQGQDNSKYLSNRTGRVAGLPYQFLSLSGQKEEAQNSQGHDDKQMNTKDANLVGYPQSDEEEHLDFTSLSSFEKVEGHLNFVPLASYCNLLEPGKVIGFTNSNAGISYLPAGRFAPVGCLREVPVSKQVKSVKVHDGGWNISNILNKENPDNFAPVKRGGSKGTKDTLEYLRIYNSFLIDGRLKDCVDLLESMEQNGLLDMRKVRATTHDKTRSRVARMSC

SEQ ID NO: 166982 - protein, 163 aa, Zea Mays
MFLDLKKVSCATPTANSSIKKDTSLPVMPHSVSQGQDNSKYLSNRTGRVAGLPYQFLSLSGQKEEAQNSQGHDDKQMNTKDANLVGYPQSDEEEHLDFTSLSSFEKVEGHLNFVPLASYCNLLEPGKVIGFTNSNAGISYLPAAYSIFRTLCSSWMFKGSSSE

SEQ ID NO: 166983 - protein, 490 aa, Zea Mays
MKDPAHRTKVVLRRLPPAIAQQAVVDQVDARFAGRYDWACFRPGNASQKNHRYSRLYLNFKHPEDVVEFAEVFNGHIFVNEKGAQFKAFVEYAPSQQVPKSNVKKDGREGTVTKDPEYLEFLEFISKPTEHLPSAEIQLERKEAERAAAGKEAPVVTPLMMYVRQQRAAKSMAQRPGSRLSRKVAGVVTSSSSPKRSFEKRRSSTYVVRDSIKEKPTYIMVPKREEHTQREKIVSGNSDATSGGASGSGQSSDKIVILKGRGRVDSNTPDGAAQQSSTPVKNIPPSSSRLDKRSEANGRIIKTVLSNKEVRSSNPSQHEQEGQMFNTEKDKRPPRALNPRTIVKDQVVENAERSHFDEKNNYLHSSAPIGEKVERHARNRDRPDRSVWAPRRYDKSPPGGVSHALSSDFSQMQSHSGDNVSQLTDGHGDRKTDTRGHGGHRHANRRGTPCDPKETKISASVPDGKNSKRGSASYGAHERQVWVQKSSSGS

SEQ ID NO: 166984 - protein, 332 aa, Zea Mays
MMYVRQQRAAKSMAQRPGSRLSRKVAGVVTSSSSPKRSFEKRRSSTYVVRDSIKEKPTYIMVPKREEHTQREKIVSGNSGDATSGGASGSGQSSDKIVILKGRGRVDSNTPDGAAQQSSTPVKNIPPSSSRLDKRSEANGRIIKTVLSNKEVRSSNPSQHEQEGQMFNTEKDKRPPRALNPRTIVKDQVVENAERSHFDEKNNYLHSSAPIGEKVERHARNRDRPDRSVWAPRRYDKSPPGGVSHALSSDFSQMQSHSGDNVSQLTDGHGDRKTDTRGHGGHRHANRRGTPCDPKETKISASVPDGKNSKRGSASYGAHERQVWVQKSSSGS

SEQ ID NO: 166985 - protein, 357 aa, Zea Mays
MESLVLASSCSPSPRLPLLSPSARFRRLPGSMPQAPASTSGATRKGLRRHMLFVAAATATPSGSRNVFKELRAKGFASMSSSTANENMSTETGTLPPMPPPSSYIGSPVFWIGVGVALSVAFTTVSSMLKKYAMEQAFKSMMTQAPPNSFGSNSPFPFGMPPQASPTAPSSFSYLEPRKGTSPQVSTVDVSATEVDAAGTSKEVDVTETPKPSKNFAFVDVSPEDLQQKDLQSSLEMVDVKHDSTESESKEDTEEKAPRNGATFKLNEDAARGPTESSQSGPMLSVETIEKMMEDPAVQKMVYPSQLTRQKGTRAGGQPNANAVQPSPTHPTTPTTSSTPTRRQRKLLKAPTGFHGP

SEQ ID NO: 166986 - protein, 130 aa, Zea Mays
MQKAHAVLLCLSDTRLNSGLESSLSFSNLISTSFLAACLSSSNLVESVMCLRQEGLAFYAQQPEASLQGAAHGLLLERTTTGSVASSLLCRPTIHGIAEKQHSKSQQVILYCNQSNSTPIVVSYDTLLPK

SEQ ID NO: 166987 - protein, 199 aa, Zea Mays
MANEIAGEIQKKKKNSFRNGRRTTTLASPHRTSKKRSSNYRDRYELFRLHSSRRSNPTGNYEQARSNVNQTSTRREEGNRTKGTRTCLRSSASLSLASISSTLAGAPPPRAPSTSLLLIRRGGALAAAGPSSAGISMATGSRAPVIKPSDQPNSRAERPSRAGFRKQPRVPSPPLPFLRCGCGALLYSPSSTSFPLPRK

SEQ ID NO: 166988 - protein, 295 aa, Zea Mays
MVALKSSVNRWIWSSKASFMGAYPSGHQAVVPFAKKKRNEYIEDPPDEEVADDFTDEMEEDFDDAKEDEGDVMDDDEEYEDDYDFEDDFESDDEQDLYAGDGGAGGGISLAGAWWDKEALALAEQVSASFNDDLKIYAFKTAANLTIRVRIEKMSTRYGSPTIDDIEAYTIAYRAKLDEAESAGKIPKNISLEVSSPGVERVIRIPEELERFKERAMYVRYTTASDEATTPQEGDGVLTLISYDMDLRECTWGIADVKINRQQSGKGRPLSKKQREWRLQTPFESLKLVRLYSEC

SEQ ID NO: 166989 - protein, 465 aa, Zea Mays
MMEADRSRKEAFSELMKRKETESKAASAFAKTKDSDSAKKHEIEMREELEVVLVDTRKQHEDLIKNKERAVSVLDSSTRRSAILDAHAEKIKLQIDEFSAELEVIQSSIETLRQKKLKMQRLESKHIDLDKGCTYSHATLSNCASNAFGDDLYGFREFTVLDMQSATCKFSESFRMWSQGRGCVYKGEIMNRTVMIYKLHCHSIESVRQFQQEVYILSNVRHPHLVTLVGACPEALCLVYEYLPNGSLHDRLFSRRSSRHLPWRIRARIVAEISDALLFLHSCKPQTIVHGNLKLENILLDTECHCKIADFGISRLFTGDVKDYPSGGSEPPEGSFPYADPEYMRSKVLTPKSDVYCFGTVILQLLTGRQEPARRLAGEVRCAMACGKLSSILDPAAGHWPMEVAGRLAELGLRCSEDRSRDRPDLTAETVRELEQLHLTREEEQAPSSFLCPIMQASTIVLHHC

SEQ ID NO: 166990 - protein, 506 aa, Zea Mays
MKRKETESKAASAFAKTKDSDSAKKHEIEMREELEVVLVDTRKQHEDLIKNKERAVSVLDSSTRRSAILDAHAEKIKLQIDEFSAELEVIQSSIETLRQKKLKMQRLESKHIDLDKGCTYSHATLSNCASNAFGDDLYGFREFTVLDMQSATCKFSESFRMWSQGRGCVYKGEIMNRTVMIYKLHCHSIESVRQFQQEVYILSNVRHPHLVTLVGACPEALCLVYEYLPNGSLHDRLFSRRSSRHLPWRIRARIVAEISDALLFLHSCKPQTIVHGNLKLENILLDTECHCKIADFGISRLFTGDVKDYPSGGSEPPEGSFPYADPEYMRSKVLTPKSDVYCFGTVILQLLTGRQEPARRLAGEVRCAMACGKLSSILDPAAGHWPMEVAGRLAELGLRCSEDRSRDRPDLTAETVRELEQLHLTREEEQAPSSFLCPIMQEIMHDPQVCAADGVTYEGRAIRERMELETGQGTAPLNNLKLEHLSLTPNHALRFAIQDWLRRSRR

SEQ ID NO: 166991 - protein, 762 aa, Zea Mays
MEILSPSPPPSHCPLLRCGGHWEQHHGETWVHVAVGRSPEKTLSLLRWALRRFGCSRIVLLHVHHPSPLIPTLLGKIPAVQATEEVVLSHRKSEKEEMNKILLTYLAFCHRAKVQARLLVTENGQIHDGILSLVDHHRITKLVMGSTPDNCFKLKYGKESLMASSAPAFCQIWFVWRGRHIWTREASAATDNATPVQYQYDVMTTKRIRFSSYTDNTGAILDEGYPAHEALTTVDLNQDWQDDTEPELNSTFWSRSSIHADTLQLDPKEVLANVKQLMMEADRSRKEAFSELMKRKETESKAASAFAKTKDSDSAKKHEIEMREELEVVLVDTRKQHEDLIKNKERAVSVLDSSTRRSAILDAHAEKIKLQIDEFSAELEVIQSSIETLRQKKLKMQRLESKHIDLDKGCTYSHATLSNCASNAFGDDLYGFREFTVLDMQSATCKFSESFRMWSQGRGCVYKGEIMNRTVMIYKLHCHSIESVRQFQQEVYILSNVRHPHLVTLVGACPEALCLVYEYLPNGSLHDRLFSRRSSRHLPWRIRARIVAEISDALLFLHSCDVKDYPSGGSEPPEGSFPYADPEYMRSKVLTPKSDVYCFGTVILQLLTGRQEPARRLAGEVRCAMACGKLSSILDPAAGHWPMEVAGRLAELGLRCSEDRSRDRPDLTAETVRELEQLHLTREEEQAPSSFLCPIMQEIMHDPQVCAADGVTYEGRAIRERMELETGQGTAPLNNLKLEHLSLTPNHALRFAIQDWLRRSRR

SEQ ID NO: 166992 - protein, 58 aa, Zea Mays
MNMHPCRFSAGHACRIRLCRSTCCHADTGWGSTALLLPVAAELHVWRPNTSRGPAGDI

SEQ ID NO: 166993 - protein, 61 aa, Zea Mays
MSYTEITQAWGIAIQKGRRSISLQEENMGARTFMTNCILFALPKHMQLRLWQMISHRVSSW

SEQ ID NO: 166994 - protein, 183 aa, Zea Mays
MARWITNAPAKKLNLNHHIIGGELLELSKNEVPPEDIVFHRLYLNKTGPVNQYFCRLQIPKESNVMNQILKSNYIVRMRSYNEAECGRATTGNGYGFTFRGCKTFGPESKVVEILVKDLKVFASFNELLFKEITQFLTLDNFRENKQLSKYGDTKYARVIMLVEVQKLIEAYLCTVTSYNFPD

SEQ ID NO: 166995 - protein, 66 aa, Zea Mays
MARWITNAPAKKLNLNHHIIGGELLELSKNEVPPEDIVFHRLYLNKTGPVNRKAKRKDSVLDEGKV

SEQ ID NO: 166996 - protein, 204 aa, Zea Mays
MCDAAATLLHGLRVSLLPCPLPLPTAASCPALVHARRPHQRPPPVSHTLENRRRRRSSSISIMDQKANEAILEVLDLRCLGLEGEADQLLLDELNLNHHIIGGELLELSKNEVPPEDIVFHRLYLNKTGPVNQYFCRLQIPKESNVMNQILKSNYIVRMRSYNEAECGRATTGNGYGFTFRGCKTFGPELQWDVLRSRCRYQST

SEQ ID NO: 166997 - protein, 86 aa, Zea Mays
MCDAAATLLHGLRVSLLPCPLPLPTAASCPALVHARRPHQRPPPVSHTLENRRRRRSSSISIMDQKANEAILEVLDLRWYAIGPKY

SEQ ID NO: 166998 - protein, 147 aa, Zea Mays
MCDAAATLLHGLRVSLLPCPLPLPTAASCPALVHARRPHQRPPPVSHTLENRRRRRSSSISIMDQKANEAILEVLDLRCLGLEGEADQLLLDELNLNHHIIGGELLELSKNEVPPEDIVFHRLYLNKTGPVNRKAKRKDSVLDEGKV

SEQ ID NO: 166999 - protein, 175 aa, Zea Mays
MCDAAATLLHGLRVSLLPCPLPLPTAASCPALVHARRPHQRPPPVSHTLENRRRRRSSSISIMDQKANEAILEVLDLRCLGLEGEADQLLLDELNLNHHIIGGELLELSKNEVPPEDIVFHRLYLNKTGPVNQYFCRLQIPKESNVMNQILKSNYIVRMRSYNEAEFVNILTIKS

SEQ ID NO: 167000 - protein, 261 aa, Zea Mays
MCDAAATLLHGLRVSLLPCPLPLPTAASCPALVHARRPHQRPPPVSHTLENRRRRRSSSISIMDQKANEAILEVLDLRCLGLEGEADQLLLDELNLNHHIIGGELLELSKNEVPPEDIVFHRLYLNKTGPVNQYFCRLQIPKESNVMNQILKSNYIVRMRSYNEAECGRATTGNGYGFTFRGCKTFGPESKVVEILVKDLKVFASFNELLFKEITQFLTLDNFRVDVEAGARWGHGQVCEADGAAMRGGLCLLHPHRLLRP

SEQ ID NO: 167001 - protein, 89 aa, Zea Mays
MVMGSPLEDARHLAQSYNGTCCDQDVGIKVLEPERVSVDMLREFAQEVYIMKVDVEAGARWGHGQVCEADGAAMRGGLCLLHPHRLLRP

SEQ ID NO: 167002 - protein, 81 aa, Zea Mays
MGIYWNASASTTTLPRRGGGDGEHSRTWGGVLGFWGRKQARARGGGGREARVLALEGRRRLPPRRPGAAFLVFFWSEALKF

SEQ ID NO: 167003 - protein, 1288 aa, Zea Mays
MDGKGLFAEIGMKEEDIATMLSGKKVSELAEDAFDGSKEERQIFEGVFCLTNVDGGLNDHYHGGIGHTVHAGKVVTSSRKPSSSADNYKAAHCRIVESFTAGNLSSYRVSCLGADEQAHGAMHSPDAVRFKLAVQWTPPRPDRVYTRRVVTRRSERARICSAMDLESIDICNFSRQRDGRGHGQLWNHLRMHAHLLMVDAGWKIEAKERDNRSKVDHVYVAPDNVTRLYSLPRAWKCFGQWLLMTTPCVNGNESIDYGKEWSNMHEFLYDLKNTLLCLQYEVQRTKPALSFLYQWQLLDPFMAVVCIDKKVAALKDGVALKAVNSTVTCLNRSECKMLDAKNSNRSLGVNSTSKYMNPYLSSCKKSLLPLLSESDYQPDKEGNTMPNEEASLFCTNKTSEDEADRRSLCMSEMNEIGIRSTAHHIVMGLHDATAFHGSSQTCSGRKRKFPCIKSKEDNQTEDKSDPLFFPPSYSSTLSHLVENVQINDVSPHGYETTEIPNMGNRTDILDKMYLGENLLFAPETGNMLLETTDDINNEQHDDAAVSEPQSADNDGSGPSGASSLPPEKDAYMGSKEDSINDYHDPSVVSEFQIANNDAKCEPSIAFLPEKDKDLEANKTSLEGPAKTGQLSSEASGSTLMISEPQVLFVSPQDGTLSFMNNNTNNQEMWRFLNVSPDTMDTEMQMDSNSLVYEASLIQGFLYLDNEGSPICWTVMNPEPPRRLICATALEPNSKLSKQYVEMRLENDASTSEHKKGGKLSDKAADIQDNVPVPLNLVLENKNDKDQGEQSSETSEQLMSKEPQKRDIKRQKRTWSHTCKFDDDDLLMTAVIYKLTARYRNSFHRKLRNKFGFRRLPTYHWENEDKGDRKKFPGEARTVLNKLLEMGIVARVDILQCHGPGGKNVLKDGNITASGIQCQCCGKSYSLCQLQAWSIEQKVRKEHAKDTMSLQADQNDDTCGSCGDGGELICCDNCPASYHQACLSCQDIPDGNWYCSSCLCDICGEVIDSKELVTSLPALDCSQCERQYHVKCVSAKVPCNEDGSGTWFCGRKCHEIYMTFRSRVGVPDHMDDDLCFTVLRNNGDKKVRTAEEIALMAECNMKLMIATSIMEECFLPILDPRTGIDIIPSILYNWRSDLHFNYKGFYTVVLESDDSMVSVASIRLHGAILAEMPLVATSKENRQQGMCRRLMDYIEEMLKSLKVEMLLLSAIPHLAETWTSTFGFREIDESDKKRLSKVRLAAVPGTVLLKKDLLCECSGADAGEPPSPKPFQVYSRVPRGRTGLDAVCQ

SEQ ID NO: 167004 - protein, 1059 aa, Zea Mays
MDGKGLFAEIGMKEEDIATMLSGKKVSELAEDAFDGSKEERQIFEGVFCLTNVDGGLNDHYHGGIGHTVHAGKVVTSSRKPSSSADNYKAAHCRIVESFTAGNLSSYRVSCLGADEQAHGAMHSPDAVRFKLAVQWTPPRPDRVYTRRVVTRRSERARICSAMDLESIDICNFSRQRDGRGHGQLWNHLRMHAHLLMVDAGWKIEAKERDNRSKVDHVYVAPDNVTRLYSLPRAWKCFGQWLLMTTPCVNGNESIDYGKEWSNMHEFLYDLKNTLLCLQYEVQRTKPALSFLYQWQLLDPFMAVVCIDKKVAALKDGVALKAVNSTVTCLNRSECKMLDAKNSNRSLGVNSTSKYMNPYLSSCKKSLLPLLSESDYQPDKEGNTMPNEEASLFCTNKTSEDEADRRSLCMSEMNEIGIRSTAHHIVMGLHDATAFHGSSQTCSGRKRKFPCIKSKEDNQTEDKSDPLFFPPSYSSTLSHLVENVQINDVSPHGYETTEIPNMGNRTDILDKMYLGENLLFAPETGNMLLETTDDINNEQHDDAAVSEPQSADNDGSGPSGASSLPPEKDAYMGSKEDSINDYHDPSVVSEFQIANNDAKCEPSIAFLPEKDKDLEANKTSLEGPAKTGQLSSEASGSTLMISEPQVLFVSPQDGTLSFMNNNTNNQEMWRFLNVSPDTMDTEMQMDSNSLVYEASLIQGFLYLDNEGSPICWTVMNPEPPRRLICATALEPNSKLSKQYVEMRLENDASTSEHKKGGKLSDKAADIQDNVSRKKQKANIASLNNCVSMDNLTVNPIDPVVLNEGEQTGTAITEQVPVPLNLVLENKNDKDQGEQSSETSEQLMSKEPQKRDIKRQKRTWSHTCKFDDDDLLMTAVIYKLTARYRNSFHRKLRNKFGFRRLPTYHWENEDKGDRKKFPGEARTVLNKLLEMGIVARVDILQCHGPGGKNVLKDGNITASGIQCQCCGTTFTMSKFKCHAGLRQEVPSLNLFLDTGKSYSLCQLQAWSIEQKVRKEHAKDTMSLQADQNDETHDRHEYHGRVFPAYSRSQDRDRHYSLHIV

SEQ ID NO: 167005 - protein, 1068 aa, Zea Mays
MDGKGLFAEIGMKEEDIATMLSGKKVSELAEDAFDGSKEERQIFEGVFCLTNVDGGLNDHYHGGIGHTVHAGKVVTSSRKPSSSADNYKAAHCRIVESFTAGNLSSYRVSCLGADEQAHGAMHSPDAVRFKLAVQWTPPRPDRVYTRRVVTRRSERARICSAMDLESIDICNFSRQRDGRGHGQLWNHLRMHAHLLMVDAGWKIEAKERDNRSKVDHVYVAPDNVTRLYSLPRAWKCFGQWLLMTTPCVNGNESIDYGKEWSNMHEFLYDLKNTLLCLQYEVQRTKPALSFLYQWQLLDPFMAVVCIDKKVAALKDGVALKAVNSTVTCLNRSECKMLDAKNSNRSLGVNSTSKYMNPYLSSCKKSLLPLLSESDYQPDKEGNTMPNEEASLFCTNKTSEDEADRRSLCMSEMNEIGIRSTAHHIVMGLHDATAFHGSSQTCSGRKRKFPCIKSKEDNQTEDKSDPLFFPPSYSSTLSHLVENVQINDVSPHGYETTEIPNMGNRTDILDKMYLGENLLFAPETGNMLLETTDDINNEQHDDAAVSEPQSADNDGSGPSGASSLPPEKDAYMGSKEDSINDYHDPSVVSEFQIANNDAKCEPSIAFLPEKDKDLEANKTSLEGPAKTGQLSSEASGSTLMISEPQVLFVSPQDGTLSFMNNNTNNQEMWRFLNVSPDTMDTEMQMDSNSLVYEASLIQGFLYLDNEGSPICWTVMNPEPPRRLICATALEPNSKLSKQYVEMRLENDASTSEHKKGGKLSDKAADIQDNVPVPLNLVLENKNDKDQGEQSSETSEQLMSKEPQKRDIKRQKRTWSHTCKFDDDDLLMTAVIYKLTARYRNSFHRKLRNKFGFRRLPTYHWENEDKGDRKKFPGEARTVLNKLLEMGIVARVDILQCHGPGGKNVLKDGNITASGIQCQCCGTTFTMSKFKCHAGLRQEVPSLNLFLDTGKSYSLCQLQAWSIEQKVRKEHAKDTMSLQADQNDDTCGSCGDGGELICCDNCPASYHQACLSCQDIPDGNWYCSSCLCDICGEVIDSKELVTSLPALDCSQCERQYHQHTHTRAGQTAF

SEQ ID NO: 167006 - protein, 1217 aa, Zea Mays
MDGKGLFAEIGMKEEDIATMLSGKKVSELAEDAFDGSKEERQIFEGVFCLTNVDGGLNDHYHGGIGHTVHAGKVVTSSRKPSSSADNYKAAHCRIVESFTAGNLSSYRVSCLGADEQAHGAMHSPDAVRFKLAVQWTPPRPDRVYTRRVVTRRSERARICSAMDLESIDICNFSRQRDGRGHGQLWNHLRMHAHLLMVDAGWKIEAKERDNRSKVDHVYVAPDNVTRLYSLPRAWKCFGQWLLMTTPCVNGNESIDYGKEWSNMHEFLYDLKNTLLCLQYEVQRTKPALSFLYQWQLLDPFMAVVCIDKKVAALKDGVALKAVNSTVTCLNRSECKMLDAKNSNRSLGVNSTSKYMNPYLSSCKKSLLPLLSESDYQPDKEGNTMPNEEASLFCTNKTSEDEADRRSLCMSEMNEIGIRSTAHHIVMGLHDATAFHGSSQTCSGRKRKFPCIKSKEDNQTEDKSDPLFFPPSYSSTLSHLVENVQINDVSPHGYETTEIPNMGNRTDILDKMYLGENLLFAPETGNMLLETTDDINNEQHDDAAVSEPQSADNDGSGPSGASSLPPEKDAYMGSKEDSINDYHDPSVVSEFQIANNDAKCEPSIAFLPEKDKDLEANKTSLEGPAKTGQLSSEASGSTLMISEPQVLFVSPQDGTLSFMNNNTNNQEMWRFLNVSPDTMDTEMQMDSNSLVYEASLIQGFLYLDNEGSPICWTVMNPEPPRRLICATALEPNSKLSKQYVEMRLENDASTSEHKKGGKLSDKAADIQDNVSRKKQKANIASLNNCVSMDNLTVNPIDPVVLNEGEQTGTAITEQVPVPLNLVLENKNDKDQGEQSSETSEQLMSKEPQKRDIKRQKRTWSHTCKFDDDDLLMTAVIYKLTARYRNSFHRKLRNKFGFRRLPTYHWENEDKGDRKKFPGEARTVLNKLLEMGIVARVDILQCHGPGGKNVLKDGNITASGIQCQCCGTTFTMSKFKCHAGLRQEVPSLNLFLDTGKSYSLCQLQAWSIEQKVRKEHAKDTMSLQADQNDDTCGSCGDGGELICCDNCPASYHQACLSCQDIPDGNWYCSSCLCDICGEVIDSKELVTSLPALDCSQCERQYHVKCVSAKVPCNEDGSGTWFCGRKCHEIYMTFRSRVGVPDHMDDDLCFTVLRNNGDKKVRTAEEIALMAECNMKLMIATSIMEECFLPILDPRTGIDIIPSILYNWRLVFFCRFGHS

SEQ ID NO: 167007 - protein, 1361 aa, Zea Mays
MDGKGLFAEIGMKEEDIATMLSGKKVSELAEDAFDGSKEERQIFEGVFCLTNVDGGLNDHYHGGIGHTVHAGKVVTSSRKPSSSADNYKAAHCRIVESFTAGNLSSYRVSCLGADEQAHGAMHSPDAVRFKLAVQWTPPRPDRVYTRRVVTRRSERARICSAMDLESIDICNFSRQRDGRGHGQLWNHLRMHAHLLMVDAGWKIEAKERDNRSKVDHVYVAPDNVTRLYSLPRAWKCFGQWLLMTTPCVNGNESIDYGKEWSNMHEFLYDLKNTLLCLQYEVQRTKPALSFLYQWQLLDPFMAVVCIDKKVAALKDGVALKAVNSTVTCLNRSECKMLDAKNSNRSLGVNSTSKYMNPYLSSCKKSLLPLLSESDYQPDKEGNTMPNEEASLFCTNKTSEDEADRRSLCMSEMNEIGIRSTAHHIVMGLHDATAFHGSSQTCSGRKRKFPCIKSKEDNQTEDKSDPLFFPPSYSSTLSHLVENVQINDVSPHGYETTEIPNMGNRTDILDKMYLGENLLFAPETGNMLLETTDDINNEQHDDAAVSEPQSADNDGSGPSGASSLPPEKDAYMGSKEDSINDYHDPSVVSEFQIANNDAKCEPSIAFLPEKDKDLEANKTSLEGPAKTGQLSSEASGSTLMISEPQVLFVSPQDGTLSFMNNNTNNQEMWRFLNVSPDTMDTEMQMDSNSLVYEASLIQGFLYLDNEGSPICWTVMNPEPPRRLICATALEPNSKLSKQYVEMRLENDASTSEHKKGGKLSDKAADIQDNVSRKKQKANIASLNNCVSMDNLTVNPIDPVVLNEGEQTGTAITEQVPVPLNLVLENKNDKDQGEQSSETSEQLMSKEPQKRDIKRQKRTWSHTCKFDDDDLLMTAVIYKLTARYRNSFHRKLRNKFGFRRLPTYHWENEDKGDRKKFPGEARTVLNKLLEMGIVARVDILQCHGPGGKNVLKDGNITASGIQCQCCGTTFTMSKFKCHAGLRQEVPSLNLFLDTGKSYSLCQLQAWSIEQKVRKEHAKDTMSLQADQNDDTCGSCGDGGELICCDNCPASYHQACLSCQDIPDGNWYCSSCLCDICGEVIDSKELVTSLPALDCSQCERQYHVKCVSAKVPCNEDGSGTWFCGRKCHEIYMTFRSRVGVPDHMDDDLCFTVLRNNGDKKVRTAEEIALMAECNMKLMIATSIMEECFLPILDPRTGIDIIPSILYNWRSDLHFNYKGFYTVVLESDDSMVSVASIRLHGAILAEMPLVATSKENRQQGMCRRLMDYIEEMLKSLKVEMLLLSAIPHLAETWTSTFGFREIDESDKKRLSKVRLAAVPGTVLLKKDLLCECSGADAGEPPSPKPFQVYSRVPRGRTGLDAVCQ

SEQ ID NO: 167008 - protein, 1040 aa, Zea Mays
MDGKGLFAEIGMKEEDIATMLSGKKVSELAEDAFDGSKEERQIFEGVFCLTNVDGGLNDHYHGGIGHTVHAGKVVTSSRKPSSSADNYKAAHCRIVESFTAGNLSSYRVSCLGADEQAHGAMHSPDAVRFKLAVQWTPPRPDRVYTRRVVTRRSERARICSAMDLESIDICNFSRQRDGRGHGQLWNHLRMHAHLLMVDAGWKIEAKERDNRSKVDHVYVAPDNVTRLYSLPRAWKCFGQWLLMTTPCVNGNESIDYGKEWSNMHEFLYDLKNTLLCLQYEVQRTKPALSFLYQWQLLDPFMAVVCIDKKVAALKDGVALKAVNSTVTCLNRSECKMLDAKNSNRSLGVNSTSKYMNPYLSSCKKSLLPLLSESDYQPDKEGNTMPNEEASLFCTNKTSEDEADRRSLCMSEMNEIGIRSTAHHIVMGLHDATAFHGSSQTCSGRKRKFPCIKSKEDNQTEDKSDPLFFPPSYSSTLSHLVENVQINDVSPHGYETTEIPNMGNRTDILDKMYLGENLLFAPETGNMLLETTDDINNEQHDDAAVSEPQSADNDGSGPSGASSLPPEKDAYMGSKEDSINDYHDPSVVSEFQIANNDAKCEPSIAFLPEKDKDLEANKTSLEGPAKTGQLSSEASGSTLMISEPQVLFVSPQDGTLSFMNNNTNNQEMWRFLNVSPDTMDTEMQMDSNSLVYEASLIQGFLYLDNEGSPICWTVMNPEPPRRLICATALEPNSKLSKQYVEMRLENDASTSEHKKGGKLSDKAADIQDNVPVPLNLVLENKNDKDQGEQSSETSEQLMSKEPQKRDIKRQKRTWSHTCKFDDDDLLMTAVIYKLTARYRNSFHRKLRNKFGFRRLPTYHWENEDKGDRKKFPGEARTVLNKLLEMGIVARVDILQCHGPGGKNVLKDGNITASGIQCQCCGTTFTMSKFKCHAGLRQEVPSLNLFLDTGKSYSLCQLQAWSIEQKVRKEHAKDTMSLQADQNDDTCGSCGDGGELICCDNCPASYHQACLSCQFAQRKRDSKNAGAAARPPPRGSSFLNF

SEQ ID NO: 167009 - protein, 1101 aa, Zea Mays
MDGKGLFAEIGMKEEDIATMLSGKKVSELAEDAFDGSKEERQIFEGVFCLTNVDGGLNDHYHGGIGHTVHAGKVVTSSRKPSSSADNYKAAHCRIVESFTAGNLSSYRVSCLGADEQAHGAMHSPDAVRFKLAVQWTPPRPDRVYTRRVVTRRSERARICSAMDLESIDICNFSRQRDGRGHGQLWNHLRMHAHLLMVDAGWKIEAKERDNRSKVDHVYVAPDNVTRLYSLPRAWKCFGQWLLMTTPCVNGNESIDYGKEWSNMHEFLYDLKNTLLCLQYEVQRTKPALSFLYQWQLLDPFMAVVCIDKKVAALKDGVALKAVNSTVTCLNRSECKMLDAKNSNRSLGVNSTSKYMNPYLSSCKKSLLPLLSESDYQPDKEGNTMPNEEASLFCTNKTSEDEADRRSLCMSEMNEIGIRSTAHHIVMGLHDATAFHGSSQTCSGRKRKFPCIKSKEDNQTEDKSDPLFFPPSYSSTLSHLVENVQINDVSPHGYETTEIPNMGNRTDILDKMYLGENLLFAPETGNMLLETTDDINNEQHDDAAVSEPQSADNDGSGPSGASSLPPEKDAYMGSKEDSINDYHDPSVVSEFQIANNDAKCEPSIAFLPEKDKDLEANKTSLEGPAKTGQLSSEASGSTLMISEPQVLFVSPQDGTLSFMNNNTNNQEMWRFLNVSPDTMDTEMQMDSNSLVYEASLIQGFLYLDNEGSPICWTVMNPEPPRRLICATALEPNSKLSKQYVEMRLENDASTSEHKKGGKLSDKAADIQDNVSRKKQKANIASLNNCVSMDNLTVNPIDPVVLNEGEQTGTAITEQVPVPLNLVLENKNDKDQGEQSSETSEQLMSKEPQKRDIKRQKRTWSHTCKFDDDDLLMTAVIYKLTARYRNSFHRKLRNKFGFRRLPTYHWENEDKGDRKKFPGEARTVLNKLLEMGIVARVDILQCHGPGGKNVLKDGNITASGIQCQCCGTTFTMSKFKCHAGLRQEVPSLNLFLDTGKSYSLCQLQAWSIEQKVRKEHAKDTMSLQADQNDDTCGSCGDGGELICCDNCPASYHQACLSCQDIPDGNWYCSSCLCDICGEVIDSKELVTSLPALDCSQCERQSM

SEQ ID NO: 167010 - protein, 426 aa, Zea Mays
MMVIPFFQHASTSGETPLPGKMNPRIDRSGSNETSKVPRLGSIVGTASMAGFGKAVEILDTLGCLMTTLSSDGGFVSRTKTKGCKISILAFEVANTILKGASIMQSLSEDTVTYFKQVVLPSEGVQNLVSSEMSELMRIAANDKREELKIFSQEIVRFGNRCKDPQWHNLDRYFVKLESENAPQKQLKETSIAEMQKLMSLVQRTTDLYHELHALDRFEQEYFSRINGKGHTDRIEKGGNIQIVKLELKTQSSYVKSLKKRSLWSKTLEEVVEKFVDIMHYLHVEINNDFGSSDGGYVPSNSRDALYQGLPPRIKSALPNKLRTTSVPQELTIDQIRARMEKTLKWLIPMAVNTTCARGFLRFSEWAKSGTERVGRRPGVADRIETLYHADKARTEDCILELLVWLHHLVSQSNRLAMQKVTDQCI

SEQ ID NO: 167011 - protein, 419 aa, Zea Mays
MAGFGKAVEILDTLGCLMTTLSSDGGFVSRTKTKGCKISILAFEVANTILKGASIMQSLSEDTVTYFKQVVLPSEGVQNLVSSEMSELMRIAANDKREELKIFSQEIVRFGNRCKDPQWHNLDRYFVKLESENAPQKQLKETSIAEMQKLMSLVQRTTDLYHELHALDRFEQEYFSRINGKGHTDRIEKGYFAGGNIQIVKLELKTQSSYVKSLKKRSLWSKTLEEVVEKFVDIMHYLHVEINNDFGSSDGGVMNAESTESCQRLGPAGLALHYANIIIQIYSIVSRSGYVPSNSRDALYQGLPPRIKSALPNKLRTTSVPQELTIDQIRARMEKTLKWLIPMAVNTTCARGFLRFSEWAKSGTERVGRRPGVADRIETLYHADKARTEDCILELLVWLHHLVSQSNRLAMQKVTDQCI

SEQ ID NO: 167012 - protein, 406 aa, Zea Mays
MMVIPFFQHASTSGETPLPGKMNPRIDRSGSNETSKVPRLGSIVGTASMAGFGKAVEILDTLGCLMTTLSSDGGFVSRTKTKGCKISILAFEVANTILKGASIMQSLSEDTVTYFKQVVLPSEGVQNLVSSEMSELMRIAANDKREELKIFSQEIVRFGNRCKDPQWHNLDRYFVKLESENAPQKQLKETSIAEMQKLMSLVQRTTDLYHELHALDRFEQEYFSRINGKGHTDRIEKGYFAGGNIQIVKLELKTQSSYVKSLKKRSLWSKTLEEVVEKFVDIMHYLHVEINNDFGSSDGGYVPSNSRDALYQGLPPRIKSALPNKLRTTSVPQELTIDQIRARMEKTLKWLIPMAVNTTCARGFLRFSEWAKSGTERVGRRPGVADRIETLYHADKSGIVIWAITC

SEQ ID NO: 167013 - protein, 467 aa, Zea Mays
MMVIPFFQHASTSGETPLPGKMNPRIDRSGSNETSKVPRLGSIVGTASMAGFGKAVEILDTLGCLMTTLSSDGGFVSRTKTKGCKISILAFEVANTILKGASIMQSLSEDTVTYFKQVVLPSEGVQNLVSSEMSELMRIAANDKREELKIFSQEIVRFGNRCKDPQWHNLDRYFVKLESENAPQKQLKETSIAEMQKLMSLVQRTTDLYHELHALDRFEQEYFSRINGKGHTDRIEKGYFAGGNIQIVKLELKTQSSYVKSLKKRSLWSKTLEEVVEKFVDIMHYLHVEINNDFGSSDGGVMNAESTESCQRLGPAGLALHYANIIIQIYSIVSRSGYVPSNSRDALYQGLPPRIKSALPNKLRTTSVPQELTIDQIRARMEKTLKWLIPMAVNTTCARGFLRFSEWAKSGTERVGRRPGVADRIETLYHADKARTEDCILELLVWLHHLVSQSNRLAMQKVTDQCI

SEQ ID NO: 167014 - protein, 338 aa, Zea Mays
MMVIPFFQHASTSGETPLPGKMNPRIDRSGSNETSKVPRLGSIVGTASMAGFGKAVEILDTLGCLMTTLSSDGGFVSRTKTKGCKISILAFEVANTILKGASIMQSLSEDTVTYFKQVVLPSEGVQNLVSSEMSELMRIAANDKREELKIFSQEIVRFGNRCKDPQWHNLDRYFVKLESENAPQKQLKETSIAEMQKLMSLVQRTTDLYHELHALDRFEQEYFSRINGKGHTDRIEKGGNIQIVKLELKTQSSYVKSLKKRSLWSKTLEEVVEKFVDIMHYLHVEINNDFGSSDGGVMNAESTESCQRFLDQGMCHQIQEMHCTRDCHQGSSQHYQIN

SEQ ID NO: 167015 - protein, 342 aa, Zea Mays
MMVIPFFQHASTSGETPLPGKMNPRIDRSGSNETSKVPRLGSIVGTASMAGFGKAVEILDTLGCLMTTLSSDGGFVSRTKTKGCKISILAFEVANTILKGASIMQSLSEDTVTYFKQVVLPSEGVQNLVSSEMSELMRIAANDKREELKIFSQEIVRFGNRCKDPQWHNLDRYFVKLESENAPQKQLKETSIAEMQKLMSLVQRTTDLYHELHALDRFEQEYFSRINGKGHTDRIEKGYFAGGNIQIVKLELKTQSSYVKSLKKRSLWSKTLEEVVEKFVDIMHYLHVEINNDFGSSDGGVMNAESTESCQRFLDQGMCHQIQEMHCTRDCHQGSSQHYQIN

SEQ ID NO: 167016 - protein, 370 aa, Zea Mays
MAGFGKAVEILDTLGCLMTTLSSDGGFVSRTKTKGCKISILAFEVANTILKGASIMQSLSEDTVTYFKQVVLPSEGVQNLVSSEMSELMRIAANDKRFGNRCKDPQWHNLDRYFVKLESENAPQKQLKETSIAEMQKLMSLVQRTTDLYHELHALDRFEQEYFSRINGKGHTDRIEKGYFAGGNIQIVKLELKTQSSYVKSLKKRSLWSKTLEEVVEKFVDIMHYLHVEINNDFGSSDGGYVPSNSRDALYQGLPPRIKSALPNKLRTTSVPQELTIDQIRARMEKTLKWLIPMAVNTTCARGFLRFSEWAKSGTERVGRRPGVADRIETLYHADKARTEDCILELLVWLHHLVSQSNRLAMQKVTDQCI

SEQ ID NO: 167017 - protein, 156 aa, Zea Mays
MAGFGKAVEILDTLGCLMTTLSSDGGFVSRTKTKGCKISILAFEVANTILKGASIMQSLSEDTVTYFKQVVLPSEGVQNLVSSEMSELMRIAANDKREELKIFSQEIVRFGNRCKDPQWHNLDRYFVKIRKCAPEAVERNVNSRDAKVNESCSTYN

SEQ ID NO: 167018 - protein, 311 aa, Zea Mays
MAGFGKAVEILDTLGCLMTTLSSDGGFVSRTKTKGCKISILAFEVANTILKGASIMQSLSEDTVTYFKQVVLPSEGVQNLVSSEMSELMRIAANDKREELKIFSQEIVRFGNRCKDPQWHNLDRYFVKLESENAPQKQLKETSIAEMQKLMSLVQRTTDLYHELHALDRFEQEYFSRINGKGHTDRIEKGYFAGGNIQIVKLELKTQSSYVKSLKKRSLWSKTLEEVVEKFVDIMHYLHVEINNDFGSSDGGVMNAESTESCQRLGPAGLALHYANIIIQIYSFSIRVCAIKFKRCTVPGIATKDQVSTTK

SEQ ID NO: 167019 - protein, 130 aa, Zea Mays
MIMAKLTMLIVEGPTATNHTEPHHTTGGGGDPVENTKAMATALNRGLRLLAAGAEASKPASRGFHATGVKRMGGHGHDEPYYIHAKHMYNLHRMKHQGLKVTLSVLGAVGIGVGVPVYAVIFQQKKTASG

SEQ ID NO: 167020 - protein, 1371 aa, Zea Mays
MAPKKKQPDSKQRQKPKSSSSSSAATAAPRLQISSENERRLRRLLLNSSAPSPSPANVSEVRGESREQKARRLRGVYDKLALEGFSSAQIEQALSAIPDSATFESALDWLCFNLPGDELPLKFSSAGDSTMSSLTGAEGSVKVLSTAKDNWVPQSREPEEVKVSTEGLEVRIGGRRDENVSLDDGRLSQAAWIRQYMEQQEEEEDANSNDSSTWEDHCLQSFEVVEAKPSRRKSKAAKKNSKHGNLKEQISYPTNSVSSNSETANVEGVQNDLEASEERSESLGNIDEGSDLKKEIPKDIDKTCAKEVDEEVIELDNMFFEDSSAWEAVAPEILKQQQIEKLSHDGYGHLIGNIDDIWKKGDSGKMPKAVLQKFCQKLGWEAPKYNKISERDGKFVYSVNVLRGATGRGKSRKAGGLTIIQLPKLHEEYGSVQEAQSRVAAFALYQFFADLPLRQLLTEPYSSLILRWQEGELSSTSRVLVTEDRRRSGFVDMLLNIDADTIPSSEIENSDTDVISMDSGNTEGSKSVNEKRQTTMTSCMGLKSAERAESAILKKQLEDKRKLPNYLKMLEARASLPIARQRQHFLQLLKENDVVVVSGETGCGKTTQVPQFILDDMIESELGGSCNIVCTQPRRIAAISVAERVSDERCEPSPGSNDSLVGYQVRLDSARNERTKLLFCTTGILLRKLSGNRDLSDVTHVVVDEVHERTILSDFLLIVLKNLVEKRSNQQGRKLKVILMSATVDSSLFARYFGECPVISVEGRTHPVSTHFLEDVYEKMEYCLALDSPASGAYFAQHGEKWKHASSSVNNRRGKKNLVLSSWGDESTLSEGYVNPHYISDYYRSYNERTNQNLKRLNEDVIDFDLLEDLICYIDENCPQGAILVFLPGVAEIDLLIDRLSALVRFGGASSDWILPLHSLLGPSDQRKVFQSPPDNFRKVIIATDIAETSITIDDVVYVVDTGKHKENRYNPHKKMSSIVEDWISRANAKQRRGRAGRVKPGLCFCLYTRHRFENVMRPFQVPEMLRMPLTELCLQIKSLHLDDIKSFLLKAVEPPNEEAISSAVDLLYKVGAFEGHEELSPLGYHLAKLPVDVLIGKMMLYGAIFGCLSPILSVAAFLSYKSPFLSPKDEKQNVEKAKATLLNENLDGSSSVTDNKQSDHLLMNGDKSARQFCHSFYLNSTVMHMIRDMRLQFGTLLADIGLIDLPKDTLRHKVGSRKNNLESWFSNMSLPFNAYARCTSVIKSVMCAGLYPNVAASLEGVDPGALGGRKPSDVLFSKDRPRWYDGRREVHIHPSSVNHSLKAVQYPFLVFLEKVETTKVFLRDTSVVSPYSLLLFGGSMVIQHQCLSMTPCDFSGDSRGWWKPFNVNLF

SEQ ID NO: 167021 - protein, 1378 aa, Zea Mays
MAPKKKQPDSKQRQKPKSSSSSSAATAAPRLQISSENERRLRRLLLNSSAPSPSPANVSEVRGESREQKARRLRGVYDKLALEGFSSAQIEQALSAIPDSATFESALDWLCFNLPGDELPLKFSSAGDSTMSSLTGAEGSVKVLSTAKDNWVPQSREPEEVKVSTEGLEVRIGGRRDENVSLDDGRLSQAAWIRQYMEQQEEEEDANSNDSSTWEDHCLQSFEVVEAKPTAKKNSKHGNLKEQISYPTNSVSSNSETANVEGVQNDLEASEERSESLGNIDEGSDLKKEIPKDIDKTCAKEVDEEVIELDNMFFEDSSAWEAVAPEILKQQQIEKLSHDGYGHLIGNIDDIWKKGDSGKMPKAVLQKFCQKLGWEAPKYNKISERDGKFVYSVNVLRGATGRGKSRKAGGLTIIQLPKLHEEYGSVQEAQSRVAAFALYQFFADLPLRQLLTEPYSSLILRWQEGELSSTSRVLVTEDRRRSGFVDMLLNIDADTIPSSEIENSDTDVISMDSGNTEGSKSVNEKRQTTMTSCMGLKSAERAESAILKKQLEDKRKLPNYLKMLEARASLPIARQRQHFLQLLKENDVVVVSGETGCGKTTQVPQFILDDMIESELGGSCNIVCTQPRRIAAISVAERVSDERCEPSPGSNDSLVGYQVRLDSARNERTKLLFCTTGILLRKLSGNRDLSDVTHVVVDEVHERTILSDFLLIVLKNLVEKRSNQQGRKLKVILMSATVDSSLFARYFGECPVISVEGRTHPVSTHFLEDVYEKMEYCLALDSPASGAYFAQHGEKWKHASSSVNNRRGKKNLVLSSWGDESTLSEGYVNPHYISDYYRSYNERTNQNLKRLNEDVIDFDLLEDLICYIDENCPQGAILVFLPGVAEIDLLIDRLSALVRFGGASSDWILPLHSLLGPSDQRKVFQSPPDNFRKVIIATDIAETSITIDDVVYVVDTGKHKENRYNPHKKMSSIVEDWISRANAKQRRGRAGRVKPGLCFCLYTRHRFENVMRPFQVPEMLRMPLTELCLQIKSLHLDDIKSFLLKAVEPPNEEAISSAVDLLYKVGAFEGHEELSPLGYHLAKLPVDVLIGKMMLYGAIFGCLSPILSVAAFLSYKSPFLSPKDEKQNVEKAKATLLNENLDGSSSVTDNKQSDHLLMVIAYDKWSRILLQNGDKSARQFCHSFYLNSTVMHMIRDMRLQFGTLLADIGLIDLPKDTLRHKVGSRKNNLESWFSNMSLPFNAYARCTSVIKSVMCAGLYPNVAASLEGVDPGALGGRKPSDVLFSKDRPRWYDGRREVHIHPSSVNHSLKAVQYPFLVFLEKVETTKVFLRDTSVVSPYSLLLFGGSMVIQHQCLSMTPCDFSGDSRGWWKPFNVNLF

SEQ ID NO: 167022 - protein, 1426 aa, Zea Mays
MAPKKKQPDSKQRQKPKSSSSSSAATAAPRLQISSENERRLRRLLLNSSAPSPSPANVSEVRGESREQKARRLRGVYDKLALEGFSSAQIEQALSAIPDSATFESALDWLCFNLPGDELPLKFSSAGDSTMSSLTGAEGSVKVLSTAKDNWVPQSREPEEVKVSTEGLEVRIGGRRDENVSLDDGRLSQAAWIRQYMEQQEEEEDANSNDSSTWEDHCLQSFEVVEAKPSRRKSKAAKKNSKHGNLKEQISYPTNSVSSNSETANVEGVQNDLEASEERSESLGNIDEGSDLKKEIPKDIDKTCAKEVDEEVIELDNMFFEDSSAWEAVAPEILKQQQIEKLSHDGYGHLIGNIDDIWKKGDSGKMPKAVLQKFCQKLGWEAPKYNKISERDGKFVYSVNVLRGATGRGKSRKAGGLTIIQLPKLHEEYGSVQEAQSRVAAFALYQFFADLPLRQLLTEPYSSLILRWQEGELSSTSRVLVTEDRRRSGFVDMLLNIDADTIPSSEIENSDTDVISMDSGNTEGSKSVNEKRQTTMTSCMGLKSAERAESAILKKQLEDKRKLPNYLKMLEARASLPIARQRQHFLQLLKENDVVVVSGETGCGKTTQVPQFILDDMIESELGGSCNIVCTQPRRIAAISVAERVSDERCEPSPGSNDSLVGYQVRLDSARNERTKLLFCTTGILLRKLSGNRDLSDVTHVVVDEVHERTILSDFLLIVLKNLVEKRSNQQGRKLKVILMSATVDSSLFARYFGECPVISVEGRTHPVSTHFLEDVYEKMEYCLALDSPASGAYFAQHGEKWKHASSSVNNRRGKKNLVLSSWGDESTLSEGYVNPHYISDYYRSYNERTNQNLKRLNEDVIDFDLLEDLICYIDENCPQGAILVFLPGVAEIDLLIDRLSALVRFGGASSDWILPLHSLLGPSDQRKVFQSPPDNFRKVIIATDIAETSITIDDVVYVVDTGKHKENRYNPHKKMSSIVEDWISRANAKQRRGRAGRVKPGLCFCLYTRHRFENVMRPFQVPEMLRMPLTELCLQIKSLHLDDIKSFLLKAVEPPNEEAISSAVDLLYKVGAFEGHEELSPLGYHLAKLPVDVLIGKMMLYGAIFGCLSPILSVAAFLSYKSPFLSPKDEKQNVEKAKATLLNENLDGSSSVTDNKQSDHLLMVIAYDKWSRILLQNGDKSARQFCHSFYLNSTVMHMIRDMRLQFGTLLADIGLIDLPKDTLRHKVGSRKNNLESWFSNMSLPFNAYARCTSVIKSVMCAGLYPNVAASLEGVDPGALGGRKPSDVLFSKDRPRWYDGRREVHIHPSSVNHSLKAVQYPFLVFLEKVETTKVFLRDTSVVSPYSLLLFGGSMVIQHQTGVVVIDGWLRLSAAAQTAVLFKQLRMTLDAVLKELTRKPEAFDQYRFLPMCTLVCTGFLLHNVADC

SEQ ID NO: 167023 - protein, 1420 aa, Zea Mays
MAPKKKQPDSKQRQKPKSSSSSSAATAAPRLQISSENERRLRRLLLNSSAPSPSPANVSEVRGESREQKARRLRGVYDKLALEGFSSAQIEQALSAIPDSATFESALDWLCFNLPGDELPLKFSSAGDSTMSSLTGAEGSVKVLSTAKDNWVPQSREPEEVKVSTEGLEVRIGGRRDENVSLDDGRLSQAAWIRQYMEQQEEEEDANSNDSSTWEDHCLQSFEVVEAKPSRRKSKAAKKNSKHGNLKEQISYPTNSVSSNSETANVEGVQNDLEASEERSESLGNIDEGSDLKKEIPKDIDKTCAKEVDEEVIELDNMFFEDSSAWEAVAPEILKQQQIEKLSHDGYGHLIGNIDDIWKKGDSGKMPKAVLQKFCQKLGWEAPKYNKISERDGKFVYSVNVLRGATGRGKSRKAGGLTIIQLPKLHEEYGSVQEAQSRVAAFALYQFFADLPLRQLLTEPYSSLILRWQEGELSSTSRVLVTEDRRRSGFVDMLLNIDADTIPSSEIENSDTDVISMDSGNTEGSKSVNEKRQTTMTSCMAERAESAILKKQLEDKRKLPNYLKMLEARASLPIARQRQHFLQLLKENDVVVVSGETGCGKTTQVPQFILDDMIESELGGSCNIVCTQPRRIAAISVAERVSDERCEPSPGSNDSLVGYQVRLDSARNERTKLLFCTTGILLRKLSGNRDLSDVTHVVVDEVHERTILSDFLLIVLKNLVEKRSNQQGRKLKVILMSATVDSSLFARYFGECPVISVEGRTHPVSTHFLEDVYEKMEYCLALDSPASGAYFAQHGEKWKHASSSVNNRRGKKNLVLSSWGDESTLSEGYVNPHYISDYYRSYNERTNQNLKRLNEDVIDFDLLEDLICYIDENCPQGAILVFLPGVAEIDLLIDRLSALVRFGGASSDWILPLHSLLGPSDQRKVFQSPPDNFRKVIIATDIAETSITIDDVVYVVDTGKHKENRYNPHKKMSSIVEDWISRANAKQRRGRAGRVKPGLCFCLYTRHRFENVMRPFQVPEMLRMPLTELCLQIKSLHLDDIKSFLLKAVEPPNEEAISSAVDLLYKVGAFEGHEELSPLGYHLAKLPVDVLIGKMMLYGAIFGCLSPILSVAAFLSYKSPFLSPKDEKQNVEKAKATLLNENLDGSSSVTDNKQSDHLLMVIAYDKWSRILLQNGDKSARQFCHSFYLNSTVMHMIRDMRLQFGTLLADIGLIDLPKDTLRHKVGSRKNNLESWFSNMSLPFNAYARCTSVIKSVMCAGLYPNVAASLEGVDPGALGGRKPSDVLFSKDRPRWYDGRREVHIHPSSVNHSLKAVQYPFLVFLEKVETTKVFLRDTSVVSPYSLLLFGGSMVIQHQTGVVVIDGWLRLSAAAQTAVLFKQLRMTLDAVLKELTRKPEMATFVDNEVVRSIIHLLLEEDKAR

SEQ ID NO: 167024 - protein, 1189 aa, Zea Mays
MAPKKKQPDSKQRQKPKSSSSSSAATAAPRLQISSENERRLRRLLLNSSAPSPSPANVSEVRGESREQKARRLRGVYDKLALEGFSSAQIEQALSAIPDSATFESALDWLCFNLPGDELPLKFSSAGDSTMSSLTGAEGSVKVLSTAKDNWVPQSREPEEVKVSTEGLEVRIGGRRDENVSLDDGRLSQAAWIRQYMEQQEEEEDANSNDSSTWEDHCLQSFEVVEAKPSRRKSKAAKKNSKHGNLKEQISYPTNSVSSNSETANVEGVQNDLEASEERSESLGNIDEGSDLKKEIPKDIDKTCAKEVDEEVIELDNMFFEDSSAWEAVAPEILKQQQIEKLSHDGYGHLIGNIDDIWKKGDSGKMPKAVLQKFCQKLGWEAPKYNKISERDGKFVYSVNVLRGATGRGKSRKAGGLTIIQLPKLHEEYGSVQEAQSRVAAFALYQFFADLPLRQLLTEPYSSLILRWQEGELSSTSRVLVTEDRRRSGFVDMLLNIDADTIPSSEIENSDTDVISMDSGNTEGSKSVNEKRQTTMTSCMGLKSAERAESAILKKQLEDKRKLPNYLKMLEARASLPIARQRQHFLQLLKENDVVVVSGETGCGKTTQVPQFILDDMIESELGGSCNIVCTQPRRIAAISVAERVSDERCEPSPGSNDSLVGYQVRLDSARNERTKLLFCTTGILLRKLSGNRDLSDVTHVVVDEVHERTILSDFLLIVLKNLVEKRSNQQGRKLKVILMSATVDSSLFARYFGECPVISVEGRTHPVSTHFLEDVYEKMEYCLALDSPASGAYFAQHGEKWKHASSSVNNRRGKKNLVLSSWGDESTLSEGYVNPHYISDYYRSYNERTNQNLKRLNEDVIDFDLLEDLICYIDENCPQGAILVFLPGVAEIDLLIDRLSALVRFGGASSDWILPLHSLLGPSDQRKVFQSPPDNFRKVIIATDIAETSITIDDVVYVVDTGKHKENRYNPHKKMSSIVEDWISRANAKQRRGRAGRVKPGLCFCLYTRHRFENVMRPFQVPEMLRMPLTELCLQIKSLHLDDIKSFLLKAVEPPNEEAISSAVDLLYKVGAFEGHEELSPLGYHLAKLPVDVLIGKMMLYGAIFGCLSPILSVAAFLSYKSPFLSPKDEKQNVEKAKATLLNENLDGSSSVTDNKQSDHLLMVIAYDKWSRILLQVSNKLVFLISEW

SEQ ID NO: 167025 - protein, 1179 aa, Zea Mays
MAPKKKQPDSKQRQKPKSSSSSSAATAAPRLQISSENERRLRRLLLNSSAPSPSPANVSEVRGESREQKARRLRGVYDKLALEGFSSAQIEQALSAIPDSATFESALDWLCFNLPGDELPLKFSSAGDSTMSSLTGAEGSVKVLSTAKDNWVPQSREPEEVKVSTEGLEVRIGGRRDENVSLDDGRLSQAAWIRQYMEQQEEEEDANSNDSSTWEDHCLQSFEVVEAKPSRRKSKAAKKNSKHGNLKEQISYPTNSVSSNSETANVEGVQNDLEASEERSESLGNIDEGSDLKKEIPKDIDKTCAKEVDEEVIELDNMFFEDSSAWEAVAPEILKQQQIEKLSHDGYGHLIGNIDDIWKKGDSGKMPKAVLQKFCQKLGWEAPKYNKISERDGKFVYSVNVLRGATGRGKSRKAGGLTIIQLPKLHEEYGSVQEAQSRVAAFALYQFFADLPLRQLLTEPYSSLILRWQEGELSSTSRVLVTEDRRRSGFVDMLLNIDADTIPSSEIENSDTDVISMDSGNTEGSKSVNEKRQTTMTSCMAERAESAILKKQLEDKRKLPNYLKMLEARASLPIARQRQHFLQLLKENDVVVVSGETGCGKTTQVPQFILDDMIESELGGSCNIVCTQPRRIAAISVAERVSDERCEPSPGSNDSLVGYQVRLDSARNERTKLLFCTTGILLRKLSGNRDLSDVTHVVVDEVHERTILSDFLLIVLKNLVEKRSNQQGRKLKVILMSATVDSSLFARYFGECPVISVEGRTHPVSTHFLEDVYEKMEYCLALDSPASGAYFAQHGEKWKHASSSVNNRRGKKNLVLSSWGDESTLSEGYVNPHYISDYYRSYNERTNQNLKRLNEDVIDFDLLEDLICYIDENCPQGAILVFLPGVAEIDLLIDRLSALVRFGGASSDWILPLHSLLGPSDQRKVFQSPPDNFRKVIIATDIAETSITIDDVVYVVDTGKHKENRYNPHKKMSSIVEDWISRANAKQRRGRAGRVKPGLCFCLYTRHRFENVMRPFQVPEMLRMPLTELCLQIKSLHLDDIKSFLLKAVEPPNEEAISSAVDLLYKVGAFEGHEELSPLGYHLAKLPVDVLIGKMMLYGAIFGCLSPILSVAAFLSYKSPFLSPKDEKQNVEKAKATLLNENLDGSSSVTDNKQSDHLLMGHASSVWYLVSRHWTYRSS

SEQ ID NO: 167026 - protein, 1359 aa, Zea Mays
MAPKKKQPDSKQRQKPKSSSSSSAATAAPRLQISSENERRLRRLLLNSSAPSPSPANVSEVRGESREQKARRLRGVYDKLALEGFSSAQIEQALSAIPDSATFESALDWLCFNLPGDELPLKFSSAGDSTMSSLTGAEGSVKVLSTAKDNWVPQSREPEEVKVSTEGLEVRIGGRRDENVSLDDGRLSQAAWIRQYMEQQEEEEDANSNDSSTWEDHCLQSFEVVEAKPSRRKSKAAKKNSKHGNLKEQISYPTNSVSSNSETANVEGVQNDLEASEERSESLGNIDEGSDLKKEIPKDIDKTCAKEVDEEVIELDNMFFEDSSAWEAVAPEILKQQQIEKLSHDGYGHLIGNIDDIWKKGDSGKMPKAVLQKFCQKLGWEAPKYNKISERDGKFVYSVNVLRGATGRGKSRKAGGLTIIQLPKLHEEYGSVQEAQSRVAAFALYQFFADLPLRQLLTEPYSSLILRWQEGELSSTSRVLVTEDRRRSGFVDMLLNIDADTIPSSEIENSDTDVISMDSGNTEGSKSVNEKRQTTMTSCMAERAESAILKKQLEDKRKLPNYLKMLEARASLPIARQRQHFLQLLKENDVVVVSGETGCGKTTQVPQFILDDMIESELGGSCNIVCTQPRRIAAISVAERVSDERCEPSPGSNDSLVGYQVRLDSARNERTKLLFCTTGILLRKLSGNRDLSDVTHVVVDEVHERTILSDFLLIVLKNLVEKRSNQQGRKLKVILMSATVDSSLFARYFGECPVISVEGRTHPVSTHFLEDVYEKMEYCLALDSPASGAYFAQHGEKWKHASSSVNNRRGKKNLVLSSWGDESTLSEGYVNPHYISDYYRSYNERTNQNLKRLNEDVIDFDLLEDLICYIDENCPQGAILVFLPGVAEIDLLIDRLSALVRFGGASSDWILPLHSLLGPSDQRKVFQSPPDNFRKVIIATDIAETSITIDDVVYVVDTGKHKENRYNPHKKMSSIVEDWISRANAKQRRGRAGRVKPGLCFCLYTRHRFENVMRPFQVPEMLRMPLTELCLQIKSLHLDDIKSFLLKAVEPPNEEAISSAVDLLYKVGAFEGHEELSPLGYHLAKLPVDVLIGKMMLYGAIFGCLSPILSVAAFLSYKSPFLSPKDEKQNVEKAKATLLNENLDGSSSVTDNKQSDHLLMVIAYDKWSRILLQNGDKSARQFCHSFYLNSTVMHMIRDMRLQFGTLLADIGLIDLPKDTLRHKVGSRKNNLESWFSNMSLPFNAYARCTSVIKSVMCAGLYPNVAASLEGVDPGALGGRKPSDVLFSKDRPRWYDGRREVHIHPSSVNHSLKAVQYPFLVFLEKVETTKVFLRDTSVVSPYSLLLFGGSMVIQHQEWLL

SEQ ID NO: 167027 - protein, 561 aa, Zea Mays
MEGFHDVVAQSWVFVPAGPCPLITLAKKLKTTARSLQSWNDKKVGKIKLQLEMARELLHQLEVAQDNRSLSPAELWLRNMLKKHSLALSSISHTMARLKSRIGWLKEGDANTSLFHAQTRFRKKKNFIAAIHSEDGQIWTAHEGKAAAFFNFYQGLLGTAEVRDVTVDLEALGMPSYDLDALDAPVSEEEVWDAIKALPSDKSPGPDGFTGRFYKSCWSVIMADFMAAVHCIWARNFRNLGPLNSTFITLLPKVEGATSVRDFRPISLVHSFAKLVTKLLANRLAGRLQNMVSPNQTAFIKKRFILDNFMLVQQTTRFLHCQKQARILLKLDISKAFDSVSWAFLLEVLKKLGFGQIWCDIISGLLATSSTKILLNGLPGESIGHQRGLRQGDPLSPMLFILVMDVLNLLVQRASEEGFLQPLSSRNMQHRISLYVDDAVLFLSPTALDISMVMDILHLFGSASGLRTNIQKSSVFPICCGEEEVNCLHDLLPCNISDFPCKYLGLPLSPKKLTRDQVQAIVDRVASLLPGWKAELMTRAGRAISCAVCHDGKDDLCSFGT

SEQ ID NO: 167028 - protein, 283 aa, Zea Mays
MLDMYDFRNDVWLCHSYGGICQNFTAFQPAVNVLREVERFLSRNPAEVVTIFVEDYVESPMGLTRVLNASGLARYVLPAWRMPKSGGDWPLLSDMVRDNHRLLVFTSKAAKEAAEGVAYEWRYVVENQYGTKGMVKGTCHNRAESAAMNDLSRSLVLVNYFRDLPNLPAACKDNSAQLLDMVTACHDKSGDRWPNFIAVDFYKRSDRGGAAEATDKANGGLVCGCGSISACNANGTCTPRHGRTPRGIFNASSDAAAWRPPPPVLQWQRLILLPSLLALLLGL

SEQ ID NO: 167029 - protein, 388 aa, Zea Mays
MAGGGRDGPAARLLRRVPAAVSVLLMLTLCSPGPPGAVVVVSARKVGETCALDRNCDAGLHCETCVADGNVRPRCTRVAPVDPQTKARDLPFNRYAWLTTHNSFARLGQRSQTGVAIATPWNQQDTVTEQLNQPAVNVLREVERFLSRNPAEVVTIFVEDYVESPMGLTRVLNASGLARYVLPAWRMPKSGGDWPLLSDMVRDNHRLLVFTSKAAKEAAEGVAYEWRYVVENQYGTKGMVKGTCHNRAESAAMNDLSRSLVLVNYFRDLPNLPAACKDNSAQLLDMVTACHDKSGDRWPNFIAVDFYKRSDRGGAAEATDKANGGLVCGCGSISACNANGTCTPRHGRTPRGIFNASSDAAAWRPPPPVLQWQRLILLPSLLALLLGL

SEQ ID NO: 167030 - protein, 150 aa, Zea Mays
MVKGTCHNRAESAAMNDLSRSLVLVNYFRDLPNLPAACKDNSAQLLDMVTACHDKSGDRWPNFIAVDFYKRSDRGGAAEATDKANGGLVCGCGSISACNANGTCTPRHGRTPRGIFNASSDAAAWRPPPPVLQWQRLILLPSLLALLLGL

SEQ ID NO: 167031 - protein, 347 aa, Zea Mays
MCHDISPQSMSHTLISLLRHDVTSTKTDWGAGEGATSPSNIALLLNGVRGLMLDMYDFRNDVWLCHSYGGICQNFTAFQPAVNVLREVERFLSRNPAEVVTIFVEDYVESPMGLTRVLNASGLARYVLPAWRMPKSGGDWPLLSDMVRDNHRLLVFTSKAAKEAAEGVAYEWRYVVENQYSDGRVRVRVLLADGTKGMVKGTCHNRAESAAMNDLSRSLVLVNYFRDLPNLPAACKDNSAQLLDMVTACHDKSGDRWPNFIAVDFYKRSDRGGAAEATDKANGGLVCGCGSISACNANGTCTPRHGRTPRGIFNASSDAAAWRPPPPVLQWQRLILLPSLLALLLGL

SEQ ID NO: 167032 - protein, 77 aa, Zea Mays
MLVKKNIARLDITVNNLWLKSLSAKCIPFCCSQNNLHSDIPCKRAHRANIPMEPLLQVSIINVLIHKHPGMEKNHIQ

SEQ ID NO: 167033 - protein, 780 aa, Zea Mays
MTSANKAKLQLQERVPLPRTAWKLADLAVLSLLLALLARRASSLVSSGGTAAACTWCWVAALICEAWFTVVWLLNMNAKWNPVRFVTHPERLAGYWAGDDELLPAVDMFVTTADPKLEPAVVTVNTVLSLLALDYPAGKLSCYVSDDGCSAVTCYALREAAEFAKLWVPFTRKHGAKVRAPFAYFSSSSGGGAAERGGGGGAADADAEFLRAWTSMKNEYEELVRRIESAEEKSLVRRGDGAFAEFVGADRGNHPTIIKVLWDNDSSKSESDEQAAGDGVPSLIYVSREKSRTQPHHFKAGAMNVLTRVSAVLTNAPIMLNVDCDMFANNPQAALHAMCLLLGFDDEVHSGFVQAPQRFYGGLADDPFGNQMQVIFEKVGHGIAGLQGIFYCGTGCFHRRKVMYGVPPGSGTGATKADSPSYKELQKKFGSSKELIESARSIITSKEAPAAVADLTSRVEVAKQVSACSYETGTSWGQEVGWVYGSMTEDVLTGQRIHAAGWRSALLSPDPPAFLGGAPTGGPASLTQYKRWATGLLEIVLSRHNPFLLSASKRLRFRQCLAYLVIDVWPVRAPFELCYALLGPYCLIANRSFLPKASEPGFVVPLALFLAYNAYNLGEYVDCRLSARAWWNNQRMQRITSSSAWLLAFLTVVLKTVGLSETVFEVTRKEQQQQQGSPDGDGADADPGRFTFDSSPVFVPPAALAMLSVVAVAVGAWRAVTGGGGGPGVGEFVCCAWLLLCFWPFVRGLVGGRGSYGIPWSVRIKAALLVAAFVHLSTRK

SEQ ID NO: 167034 - protein, 784 aa, Zea Mays
MTSANKAKLQLQERVPLPRTAWKLADLAVLSLLLALLARRASSLVSSGGTAAACTWCWVAALICEAWFTVVWLLNMNAKWNPVRFVTHPERLAGYWAGDDELLPAVDMFVTTADPKLEPAVVTVNTVLSLLALDYPAGKLSCYVSDDGCSAVTCYALREAAEFAKLWVPFTRKHGAKVRAPFAYFSSSSGGGAAERGGGGGAADADAEFLRAWTSMKNEYEELVRRIESAEEKSLVRRGDGAFAEFVGADRGNHPTIIKVLWDNDSSKSESDEQAAGDGVPSLIYVSREKSRTQPHHFKAGAMNVLTRVSAVLTNAPIMLNVDCDMFANNPQAALHAMCLLLGFDDEVHSGFVQAPQRFYGGLADDPFGNQMQVIFEKVGHGIAGLQGIFYCGTGCFHRRKVMYGVPPGSGTGATKALAAADSPSYKELQKKFGSSKELIESARSIITSKEAPAAVADLTSRVEVAKQVSACSYETGTSWGQEVGWVYGSMTEDVLTGQRIHAAGWRSALLSPDPPAFLGGAPTGGPASLTQYKRWATGLLEIVLSRHNPFLLSASKRLRFRQCLAYLVIDVWPVRAPFELCYALLGPYCLIANRSFLPKASEPGFVVPLALFLAYNAYNLGEYVDCRLSARAWWNNQRMQRITSSSAWLLAFLTVVLKTVGLSETVFEVTRKEQQQQQGSPDGDGADADPGRFTFDSSPVFVPPAALAMLSVVAVAVGAWRAVTGGGGGPGVGEFVCCAWLLLCFWPFVRGLVGGRGSYGIPWSVRIKAALLVAAFVHLSTRK

SEQ ID NO: 167035 - protein, 478 aa, Zea Mays
MNVLTRVSAVLTNAPIMLNVDCDMFANNPQAALHAMCLLLGFDDEVHSGFVQAPQRFYGGLADDPFGNQMQKVGHGIAGLQGIFYCGTGCFHRRKVMYGVPPGSGTGATKALAAADSPSYKELQKKFGSSKELIESARSIITSKEAPAAVADLTSRVEVAKQVSACSYETGTSWGQEVGWVYGSMTEDVLTGQRIHAAGWRSALLSPDPPAFLGGAPTGGPASLTQYKRWATGLLEIVLSRHNPFLLSASKRLRFRQCLAYLVIDVWPVRAPFELCYALLGPYCLIANRSFLPKASEPGFVVPLALFLAYNAYNLGEYVDCRLSARAWWNNQRMQRITSSSAWLLAFLTVVLKTVGLSETVFEVTRKEQQQQQGSPDGDGADADPGRFTFDSSPVFVPPAALAMLSVVAVAVGAWRAVTGGGGGPGVGEFVCCAWLLLCFWPFVRGLVGGRGSYGIPWSVRIKAALLVAAFVHLSTRK

SEQ ID NO: 167036 - protein, 294 aa, Zea Mays
MTEDVLTGQRIHAAGWRSALLSPDPPAFLGGAPTGGPASLTQYKRWATGLLEIVLSRHNPFLLSASKRLRFRQCLAYLVIDVWPVRAPFELCYALLGPYCLIANRSFLPKASEPGFVVPLALFLAYNAYNLGEYVDCRLSARAWWNNQRMQRITSSSAWLLAFLTVVLKTVGLSETVFEVTRKEQQQQQGSPDGDGADADPGRFTFDSSPVFVPPAALAMLSVVAVAVGAWRAVTGGGGGPGVGEFVCCAWLLLCFWPFVRGLVGGRGSYGIPWSVRIKAALLVAAFVHLSTRK

SEQ ID NO: 167037 - protein, 202 aa, Zea Mays
MSHRKFEHPRHGSLGFLPRKRSSRHRGKELHKKETCEAVTIIETPPLVIVGLVAYVKTPRGLRKVACIGAWHPARVSYTVARAGQNGYHHRTEMNKKVYKIGKAGQETHDASTEFDRTEKDITPMGGFPHYGIVKGDYLMIKGCCVGPKKRVVTLRQSLLKQTSRLALEEIKLKFIDTSSKFGHGRFQTTDEKQRFFGKLKA

SEQ ID NO: 167038 - protein, 230 aa, Zea Mays
MGLSLHRSTLRLELTKEPLLLIGSLEATVPKFGRCVNELELDLLQRQPGSLLQEGLAEGHHPLLWTHTASLDHQVVTLHDTIVGEATHGSDVLLVPVKLCGGIVGLLSSLADLVDLLVHLSAVVVPILTSTGNRIRDPSRMPCTDTSNLAETPVGFAGKAGDTPTSDHTLITFTFGHTNDVNHLILLEDSINRDLFLKKFIAVVHLVSNGTTIDLNLHQVSLLLLQTLHL

SEQ ID NO: 167039 - protein, 318 aa, Zea Mays
MGLSLHRSTLRLELTKEPLLLIGSLEATVPKFGRCVNELELDLLQRQPGSLLQEGLAEGHHPLLWTHTASLDHQVVTLHDTIVGEATHGSDVLLVPVKLCGGIVGLLSSLADLVDLLVHLSAVVVPILTSTGNRIRDPSRMPCTDTSNLAETPVGFAGKAGDTPTSDHTLITFTFGHTNDVNHLILLEDSINRDLFLKKFIAVVHLVSNGTTIDLNLHQVSLLLALAPVLVEPSPHFFAKMLGPNRVECAEATRSLHICHEPNNDKRRGFNDGNSLTSFLLMEFGSWLLNLTDNVSHASLVAKEGSEMARLLGVIPGK

SEQ ID NO: 167040 - protein, 763 aa, Zea Mays
MLQRFRTLFNLPSAIRGNIRKGEYDLAVREYQKAKSIVLPSHVGILKRVLEEVEKVMQEFRGMLYKSMEDPHLDFAELENIVRLLLELEPETDPVWHYLNIQNSRIHGLFEKCTQDHELRMEVLQNKIREKVLSDSKWRQLQQDSNKSLEVDSAICDSPRADQLSTNFMAEEADSLRATYTRRLTSVLIQHVPAFWRLALSVFSGKFAKTASGNVVSDSDMNAKPSANKNDDKGGDVKYTNHTLDEVASMVRDTISAFDTKVQSTFRDFEECNILCPYMSDTIKEIAKACQTLEGKDSSPTAVKLLRTLHFQMTKLYVLRLCSWMRATTKEISKDDTWVILSTLERNKSPYAISCMPLEFRDIIISAMDRIDTMILNLMSETAKSYDISQPLQEINESVRLAFLNSFLDFAGYLERFGGELTENRPNNENNYVQNGYINGTRETSANTDGDLHKKLLVVLSNIGYCKAELSEELYTTYRHIWSPVRNNDERSSDMRDLMTSFSALEEKVLDQYTFAKSNLIRSSAQSYLLDPGIYWGAAPMVKSIRDATLDLLHILVAVHAEIYSGARPLLEKTMKILVEGLVDIFLSVFHENKTKGIRLLDANGFCQLMLELEYFETVLHTYFSPEAQQAMKSLQENLLEKACESIAEAMENPGHQRRPTRGSEDASSDDRQPSVSPDDLLLLAQQYSSDLLQGELERTRLNIACFMESALQSTSAPAGSKPAAYSSYHAQVPQHAPIQTSSPSFRRQQTGTSSPVVSRRRR

SEQ ID NO: 167041 - protein, 159 aa, Zea Mays
MAATVLFTPAQCHRATATTSGRGAPSHCALAPGHRRPGRGSVRAVPPEQSSLPQAAAAAVYGTAGDVKAALYRALDGANRGIFGMTSAKRSEIHGLVELLESRNPTPEPTAKLQDKVDGCWKLIYSTISILGKKRTKLGLRDFISLGDFLQIIDVKQIC

SEQ ID NO: 167042 - protein, 149 aa, Zea Mays
MAATVLFTPAQCHRATATTSGRGAPSHCALAPGHRRPGRGSVRAVPPEQSSLPQAAAAAVYGTAGDVKAALYRALDGANRGIFGMTSAKRSEIHGLVELLESRNPTPEPTAKLQDKWGRMHVWVVDRRWMDAGSSSTARSPYWGRRGPS

SEQ ID NO: 167043 - protein, 224 aa, Zea Mays
MAATVLFTPAQCHRATATTSGRGAPSHCALAPGHRRPGRGSVRAVPPEQSSLPQAAAAAVYGTAGDVKAALYRALDGANRGIFGMTSAKRSEIHGLVELLESRNPTPEPTAKLQDKVDGCWKLIYSTISILGKKRTKLGLRDFISLGDFLQIIDVKQRVDIKLESSTITPEQLMNIFQKNYDMLLDIFNPEGWLEITYVDESLRIGRDDKENIFVLERADLPDV

SEQ ID NO: 167044 - protein, 262 aa, Zea Mays
MAATVLFTPAQCHRATATTSGRGAPSHCALAPGHRRPGRGSVRAVPPEQSSLPQAAAAAVYGTAGDVKAALYRALDGANRGIFGMTSAKRSEIHGLVELLESRNPTPEPTAKLQDKVDGCWKLIYSTISILGKKRTKLGLRDFISLGDFLQIIDVKQEKAVNVVEFSARALKILTGKLTIEASYRVTSQTLSCFQRVDIKLESSTITPEQLMNIFQKNYDMLLDIFNPEGWLEITYVDESLRIGRDDKENIFVLERADLPDV

SEQ ID NO: 167045 - protein, 255 aa, Zea Mays
MAATVLFTPAQCHRATATTSGRGAPSHCALAPGHRRPGRGSVRAVPPEQSSLPQAAAAAVYGTAGDVKAALYRALDGANRGIFGMTSAKRSEIHGLVELLESRNPTPEPTAKLQDKVDGCWKLIYSTISILGKKRTKLGLRDFISLGDFLQIIDVKQAVNVVEFSARALKILTGKLTIEASYRVTSQTRVDIKLESSTITPEQLMNIFQKNYDMLLDIFNPEGWLEITYVDESLRIGRDDKENIFVLERADLPDV

SEQ ID NO: 167046 - protein, 191 aa, Zea Mays
MAATVLFTPAQCHRATATTSGRGAPSHCALAPGHRRPGRGSVRAVPPEQSSLPQAAAAAVYGTAGDVKAALYRALDGANRGIFGMTSAKRSEIHGLVELLESRNPTPEPTAKLQDKVDGCWKLIYSTISILGKKRTKLGLRDFISLGDFLQIIDVKQVSKGHTCCKVFPLRVLVWMLSIDLNPHVLRWIMI

SEQ ID NO: 167047 - protein, 384 aa, Zea Mays
MPSSEPDSDDVFFDAFEDVRSAGEPSCSEDCSTSDEVSVVKFEYEIWANEPMSVQERRQRFLKGMGFDDFVSSRTDSFQCHGEITAVESSTGMEVRTASCHSSVDSSVCDNESEFDGACCIRDMDSRKRDIVKGGHSSITDMLKEVGSDKVMSLLEFQSLPGLSRAVQNLVRRGCGKSPAKETKSAKKMDAKSLWKKFMIKRSFGSVCKYDVHVKNCTNSIPTRTRVQHRKKNFLEFSAVYMDQEIRAHKGSIRVMKFSPSGWYLASGGEDCVVRIWQIIQVEASPKLYRGEDPYEKVEKVQVFKTSIEKGQNQALAVIPNKVFRISETPLHEFRGHTSDILDLAWSKSDYLLTSSKDKTVRLWKPGCDGCLAVFKHKDYVQPY

SEQ ID NO: 167048 - protein, 450 aa, Zea Mays
MAVAPPLSTHVSRTLTSNLHLWPRTHGGVAHARTRALIPTPAAACAFRFSFRVRATASGSKLPPYPLPDVFPYITAEWEAVAKGWACAAVAVYCLSRAVPAAGRLPRALAGGGGGGGAAVVVAARGGVALAAFASARAAATYAQQAFLWEAALQAAGRLRERAFERLLERDLEFFEGRGGVAAGDIAHRITDEADDVADALFSVLNVLPSMLTVKANNGELKEIMRFQKLARADLKNNLSKKKMKALIPQAVRATYIGGLLVLCAGSIVVSGSSFDAEEFLSFLTALALVVEPIQDAGKAYNEYKQGQPALERIFDLMRFNPKVTDKPRAIHLQSINGDIKFHDVTFRYVDDMPPVADGYILLDNHDIQDIQSQCLRTHIAFVSQDTMLFSGTIAENIAYRDPVGDIDMNRVEYAAKIANAEEFIKMLPEGYNSNVGQRGSSLSGGQKQR

SEQ ID NO: 167049 - protein, 304 aa, Zea Mays
MAVAPPLSTHVSRTLTSNLHLWPRTHGGVAHARTRALIPTPAAACAFRFSFRVRATASGSKLPPYPLPDVFPYITAEWEAVAKGWACAAVAVYCLSRAVPAAGRLPRALAGGGGGGGAAVVVAARGGVALAAFASARAAATYAQQAFLWEAALQAAGRLRERAFERLLERDLEFFEGRGGVAAGDIAHRITDEADDVADALFSVLNDAGKAYNEYKQGQPALERIFDLMRFNPKVTDKPRAIHLQSINGDIKFHDVTFRYVDDMPPVADGYILLDNHDIQDIQSQCLRTHIAFVSQDTRPCGRY

SEQ ID NO: 167050 - protein, 544 aa, Zea Mays
MAVAPPLSTHVSRTLTSNLHLWPRTHGGVAHARTRALIPTPAAACAFRFSFRVRATASGSKLPPYPLPDVFPYITAEWEAVAKGWACAAVAVYCLSRAVPAAGRLPRALAGGGGGGGAAVVVAARGGVALAAFASARAAATYAQQAFLWEAALQAAGRLRERAFERLLERDLEFFEGRGGVAAGDIAHRITDEADDVADALFSVLNVLPSMLTVKANNGELKEIMRFQKLARADLKNNLSKKKMKALIPQAVRATYIGGLLVLCAGSIVVSGSSFDAEEFLSFLTALALVVEPIQDAGKAYNEYKQGQPALERIFDLMRFNPKVTDKPRAIHLQSINGDIKFHDVTFRYVDDMPPVADGYILLDNHDIQDIQSQCLRTHIAFVSQDTMLFSGTIAENIAYRDPVGDIDMNRVEYAAKIANAEEFIKMLPEGYNSNVGQRGSSLSGGQKQRLSIARAIYQNSSILIMDEATSALDIRSELLLKEALSNLIAKHSVTVIIIAHRQEMVLMADRIISLERGELREMSKQAFLSQDGHFSLPRIRSPN

SEQ ID NO: 167051 - protein, 609 aa, Zea Mays
MAVAPPLSTHVSRTLTSNLHLWPRTHGGVAHARTRALIPTPAAACAFRFSFRVRATASGSKLPPYPLPDVFPYITAEWEAVAKGWACAAVAVYCLSRAVPAAGRLPRALAGGGGGGGAAVVVAARGGVALAAFASARAAATYAQQAFLWEAALQAAGRLRERAFERLLERDLEFFEGRGGVAAGDIAHRITDEADDVADALFSVLNVIPCMCFAIVNLGKRLRQISKEAHLSLAMLASYLNDVLPSMLTVKANNGELKEIMRFQKLARADLKNNLSKKKMKALIPQAVRATYIGGLLVLCAGSIVVSGSSFDAEEFLSFLTALALVVEPIQDAGKAYNEYKQGQPALERIFDLMRFNPKVTDKPRAIHLQSINGDIKFHDVTFRYVDDMPPVADGVNLHIRPGEIIALVGPSGGGKTTLAKLLLRLYHPQKGYILLDNHDIQDIQSQCLRTHIAFVSQDTMLFSGTIAENIAYRDPVGDIDMNRVEYAAKIANAEEFIKMLPEGYNSNVGQRGSSLSGGQKQRLSIARAIYQNSSILIMDEATSALDIRSELLLKEALSNLIAKHSVTEMVLMADRIISLERGELREMSKQAFLSQDGHFSLPRIRSPN

SEQ ID NO: 167052 - protein, 633 aa, Zea Mays
MAVAPPLSTHVSRTLTSNLHLWPRTHGGVAHARTRALIPTPAAACAFRFSFRVRATASGSKLPPYPLPDVFPYITAEWEAVAKGWACAAVAVYCLSRAVPAAGRLPRALAGGGGGGGAAVVVAARGGVALAAFASARAAATYAQQAFLWEAALQAAGRLRERAFERLLERDLEFFEGRGGVAAGDIAHRITDEADDVADALFSVLNTIVPTSLQLITMAIQMVIPCMCFAIVNLGKRLRQISKEAHLSLAMLASYLNDVLPSMLTVKANNGELKEIMRFQKLARADLKNNLSKKKMKALIPQAVRATYIGGLLVLCAGSIVVSGSSFDAEEFLSFLTALALVVEPIQDAGKAYNEYKQGQPALERIFDLMRFNPKVTDKPRAIHLQSINGDIKFHDVTFRYVDDMPPVADGVNLHIRPGEIIALVGPSGGGKTTLAKLLLRLYHPQKGYILLDNHDIQDIQSQCLRTHIAFVSQDTMLFSGTIAENIAYRDPVGDIDMNRVEYAAKIANAEEFIKMLPEGYNSNVGQRGSSLSGGQKQRLSIARAIYQNSSILIMDEATSALDIRSELLLKEALSNLIAKHSVTVIIIAHRQEMVLMADRIISLERGELREMSKQAFLSQDGHFSLPRIRSPN

SEQ ID NO: 167053 - protein, 344 aa, Zea Mays
MAVAPPLSTHVSRTLTSNLHLWPRTHGGVAHARTRALIPTPAAACAFRFSFRVRATASGSKLPPYPLPDVFPYITAEWEAVAKGWACAAVAVYCLSRAVPAAGRLPRALAGGGGGGGAAVVVAARGGVALAAFASARAAATYAQQAFLWEAALQAAGRLRERAFERLLERDLEFFEGRGGVAAGDIAHRITDEADDVADALFSVLNVIPCMCFAIVNLGKRLRQISKEAHLSLAMLASYLNDVLPSMLTVKANNGELKEIMRFQKLARADLKNNLSKKKMKALIPQAVRATYIGGLLVLCAGSIVVSGSSFDAEEFLSFLTALALVVEPIQGRHTMNISKDSQH

SEQ ID NO: 167054 - protein, 492 aa, Zea Mays
MAVAPPLSTHVSRTLTSNLHLWPRTHGGVAHARTRALIPTPAAACAFRFSFRVRATASGSKLPPYPLPDVFPYITAEWEAVAKGWACAAVAVYCLSRAVPAAGRLPRALAGGGGGGGAAVVVAARGGVALAAFASARAAATYAQQAFLWEAALQAAGRLRERAFERLLERDLEFFEGRGGVAAGDIAHRITDEADDVADALFSVLNDAGKAYNEYKQGQPALERIFDLMRFNPKVTDKPRAIHLQSINGDIKFHDVTFRYVDDMPPVADGVNLHIRPGEIIALVGPSGGGKTTLAKLLLRLYHPQKGYILLDNHDIQDIQSQCLRTHIAFVSQDTMLFSGTIAENIAYRDPVGDIDMNRVEYAAKIANAEEFIKMLPEGYNSNVGQRGSSLSGGQKQRLSIARAIYQNSSILIMDEATSALDIRSELLLKEALSNLIAKHSVTVIIIAHRQEMVLMADRIISLERGELREMSKQAFLSQDGHFSLPRIRSPN

SEQ ID NO: 167055 - protein, 455 aa, Zea Mays
MAVAPPLSTHVSRTLTSNLHLWPRTHGGVAHARTRALIPTPAAACAFRFSFRVRATASGSKLPPYPLPDVFPYITAEWEAVAKGWACAAVAVYCLSRAVPAAGRLPRALAGGGGGGGAAVVVAARGGVALAAFASARAAATYAQQAFLWEAALQAAGRLRERAFERLLERDLEFFEGRGGVAAGDIAHRITDEADDVADALFSVLNDAGKAYNEYKQGQPALERIFDLMRFNPKVTDKPRAIHLQSINGDIKFHDVTFRYVDDMPPVADGYILLDNHDIQDIQSQCLRTHIAFVSQDTMLFSGTIAENIAYRDPVGDIDMNRVEYAAKIANAEEFIKMLPEGYNSNVGQRGSSLSGGQKQRLSIARAIYQNSSILIMDEATSALDIRSELLLKEALSNLIAKHSVTVIIIAHRQEMVLMADRIISLERGELREMSKQAFLSQDGHFSLPRIRSPN

SEQ ID NO: 167056 - protein, 379 aa, Zea Mays
MAIQMVIPCMCFAIVNLGKRLRQISKEAHLSLAMLASYLNDVLPSMLTVKANNGELKEIMRFQKLARADLKNNLSKKKMKALIPQAVRATYIGGLLVLCAGSIVVSGSSFDAEEFLSFLTALALVVEPIQDAGKAYNEYKQGQPALERIFDLMRFNPKVTDKPRAIHLQSINGDIKFHDVTFRYVDDMPPVADGYILLDNHDIQDIQSQCLRTHIAFVSQDTMLFSGTIAENIAYRDPVGDIDMNRVEYAAKIANAEEFIKMLPEGYNSNVGQRGSSLSGGQKQRLSIARAIYQNSSILIMDEATSALDIRSELLLKEALSNLIAKHSVTVIIIAHRQEMVLMADRIISLERGELREMSKQAFLSQDGHFSLPRIRSPN

SEQ ID NO: 167057 - protein, 416 aa, Zea Mays
MAIQMVIPCMCFAIVNLGKRLRQISKEAHLSLAMLASYLNDVLPSMLTVKANNGELKEIMRFQKLARADLKNNLSKKKMKALIPQAVRATYIGGLLVLCAGSIVVSGSSFDAEEFLSFLTALALVVEPIQDAGKAYNEYKQGQPALERIFDLMRFNPKVTDKPRAIHLQSINGDIKFHDVTFRYVDDMPPVADGVNLHIRPGEIIALVGPSGGGKTTLAKLLLRLYHPQKGYILLDNHDIQDIQSQCLRTHIAFVSQDTMLFSGTIAENIAYRDPVGDIDMNRVEYAAKIANAEEFIKMLPEGYNSNVGQRGSSLSGGQKQRLSIARAIYQNSSILIMDEATSALDIRSELLLKEALSNLIAKHSVTVIIIAHRQEMVLMADRIISLERGELREMSKQAFLSQDGHFSLPRIRSPN

SEQ ID NO: 167058 - protein, 313 aa, Zea Mays
MCFAIVNLGKRLRQISKEAHLSLAMLASYLNDVLPSMLTVKANNGELKEIMRFQKLARADLKNNLSKKKMKALIPQAVRATYIGGLLVLCAGSIVVSGSSFDAEEFLSFLTALALVVEPIQDAGKAYNEYKQGQPALERIFDLMRFNPKVTDKPRAIHLQSINGDIKFHDVTFRYVDDMPPVADGVNLHIRPGEIIALVGPSGGGKTTLAKLLLRLYHPQKGYILLDNHDIQDIQSQCLRTHIAFVSQDTMLFSGTIAENIAYRDPVGDIDMNRVEYAAKIANAEEFIKMLPEGYNSNVGQRGSSLSGGQKQR

SEQ ID NO: 167059 - protein, 256 aa, Zea Mays
MCFAIVNLGKRLRQISKEAHLSLAMLASYLNDVLPSMLTVKANNGELKEIMRFQKLARADLKNNLSKKKMKALIPQAVRATYIGGLLVLCAGSIVVSGSSFDAEEFLSFLTALALVVEPIQDAGKAYNEYKQGQPALERIFDLMRFNPKVTDKPRAIHLQSINGDIKFHDVTFRYVDDMPPVADGVNLHIRPGEIIALVGPSGGGKTTLAKLLLRLYHPQKGYILLDNHDIQDIQSQCLRTHIAFVSQDTRPCGRY

SEQ ID NO: 167060 - protein, 264 aa, Zea Mays
MRFNPKVTDKPRAIHLQSINGDIKFHDVTFRYVDDMPPVADGVNLHIRPGEIIALVGPSGGGKTTLAKLLLRLYHPQKGYILLDNHDIQDIQSQCLRTHIAFVSQDTMLFSGTIAENIAYRDPVGDIDMNRVEYAAKIANAEEFIKMLPEGYNSNVGQRGSSLSGGQKQRLSIARAIYQNSSILIMDEATSALDIRSELLLKEALSNLIAKHSVTVIIIAHRQEMVLMADRIISLERGELREMSKQAFLSQDGHFSLPRIRSPN

SEQ ID NO: 167061 - protein, 596 aa, Zea Mays
MAVAPPLSTHVSRTLTSNLHLWPRTHGGVAHARTRALIPTPAAACAFRFSFRVRATASGSKLPPYPLPDVFPYITAEWEAVAKGWACAAVAVYCLSRAVPAAGRLPRALAGGGGGGGAAVVVAARGGVALAAFASARAAATYAQQAFLWEAALQAAGRLRERAFERLLERDLEFFEGRGGVAAGDIAHRITDEADDVADALFSVLNTIVPTSLQLITMAIQMVIPCMCFAIVNLGKRLRQISKEAHLSLAMLASYLNDVLPSMLTVKANNGELKEIMRFQKLARADLKNNLSKKKMKALIPQAVRATYIGGLLVLCAGSIVVSGSSFDAEEFLSFLTALALVVEPIQDAGKAYNEYKQGQPALERIFDLMRFNPKVTDKPRAIHLQSINGDIKFHDVTFRYVDDMPPVADGYILLDNHDIQDIQSQCLRTHIAFVSQDTMLFSGTIAENIAYRDPVGDIDMNRVEYAAKIANAEEFIKMLPEGYNSNVGQRGSSLSGGQKQRLSIARAIYQNSSILIMDEATSALDIRSELLLKEALSNLIAKHSVTVIIIAHRQEMVLMADRIISLERGELREMSKQAFLSQDGHFSLPRIRSPN

SEQ ID NO: 167062 - protein, 487 aa, Zea Mays
MAVAPPLSTHVSRTLTSNLHLWPRTHGGVAHARTRALIPTPAAACAFRFSFRVRATASGSKLPPYPLPDVFPYITAEWEAVAKGWACAAVAVYCLSRAVPAAGRLPRALAGGGGGGGAAVVVAARGGVALAAFASARAAATYAQQAFLWEAALQAAGRLRERAFERLLERDLEFFEGRGGVAAGDIAHRITDEADDVADALFSVLNVLPSMLTVKANNGELKEIMRFQKLARADLKNNLSKKKMKALIPQAVRATYIGGLLVLCAGSIVVSGSSFDAEEFLSFLTALALVVEPIQDAGKAYNEYKQGQPALERIFDLMRFNPKVTDKPRAIHLQSINGDIKFHDVTFRYVDDMPPVADGVNLHIRPGEIIALVGPSGGGKTTLAKLLLRLYHPQKGYILLDNHDIQDIQSQCLRTHIAFVSQDTMLFSGTIAENIAYRDPVGDIDMNRVEYAAKIANAEEFIKMLPEGYNSNVGQRGSSLSGGQKQR

SEQ ID NO: 167063 - protein, 466 aa, Zea Mays
MAVAPPLSTHVSRTLTSNLHLWPRTHGGVAHARTRALIPTPAAACAFRFSFRVRATASGSKLPPYPLPDVFPYITAEWEAVAKGWACAAVAVYCLSRAVPAAGRLPRALAGGGGGGGAAVVVAARGGVALAAFASARAAATYAQQAFLWEAALQAAGRLRERAFERLLERDLEFFEGRGGVAAGDIAHRITDEADDVADALFSVLNVIPCMCFAIVNLGKRLRQISKEAHLSLAMLASYLNDVLPSMLTVKANNGELKEIMRFQKLARADLKNNLSKKKMKALIPQAVRATYIGGLLVLCAGSIVVSGSSFDAEEFLSFLTALALVVEPIQDAGKAYNEYKQGQPALERIFDLMRFNPKVTDKPRAIHLQSINGDIKFHDVTFRYVDDMPPVADGVNLHIRPGEIIALVGPSGGGKTTLAKLLLRLYHPQKGYILLDNHDIQDIQSQCLRTHIAFVSQDTRPCGRY

SEQ ID NO: 167064 - protein, 166 aa, Zea Mays
MSIHTALLCASPSPRRRRRPAPEIAGWFHAAPRLPAGHTDLAKIASSLLFPEGDNDCGGGSGGQRRGGRVHAGRSLAARVMSHLPPSPTTRTPMVCGFVIHHIGTPRRLPSQRQHPHPATPPSPVTSPNPITRPATRKRMLPPPKLMGTRRGRPHRTCLNCSGRWR

SEQ ID NO: 167065 - protein, 90 aa, Zea Mays
MLWVRNIRRFVDTGAGLGSEAIMAVDFGGDSLGKKMVISEENWRLKGYCLRFSRSGSGRVPRLVPSQVFTRNLKKDPLALEFKGWPSTGF

SEQ ID NO: 167066 - protein, 55 aa, Zea Mays
MVISEENWRLKGYCLRFSRSGSGRVPRLVPSQVFTRNLKKDPLALEFKGWPSTGF

SEQ ID NO: 167067 - protein, 107 aa, Zea Mays
MGKNLGAQSSTASQASRGNQQRARPGTGRRKRLGWARRAAGQGRGQARSEQRSSGQGRAIGRRWSRRPWEGQRKRRQRREMKTPAAKNQRRERIGMARRQEQKSGSR

SEQ ID NO: 167068 - protein, 59 aa, Zea Mays
MDLFLWVPNLDLFRLIEFTKTLSLLGDSSELQVETIVPFSVNVVVLCPCKRKETYQDLL

SEQ ID NO: 167069 - protein, 57 aa, Zea Mays
MHEYPFNIVEHDYFVDFTKSLRPSFVFKSRVIARKDILDIYFEEKEKLYAQLKNVTR

SEQ ID NO: 167070 - protein, 199 aa, Zea Mays
MEKMSPLFSLLEGRRTGIKLAKCFTEVMVKWFAEKKLFSLTWDNASNNLVAVKDIIQDLRVNASSYLICDGMFFHIRCARHILNLVARDGLAVISKALKKIKALVLTVKGSPLQWEELMKRATECGLDTSKGIQLDVSTRWNSTYMMLRDALHYKDAFSRLKTSNHHKYENISPSESKWNMAVAVFECLSKFYDLTELL

SEQ ID NO: 167071 - protein, 180 aa, Zea Mays
MLLKHHVRQKTTGHIIPTNSSQQRNVNLELESYLYDDLPDRDESNELDKYMVEPLIKQNLFDILAYWKNQTDKYPVLSQIARDLMSVQVSTVASKSAFSAGGRVIDPYRNRLDPEVVEALICTKDWINVVRKDSKSVLSIVAKLKPPETDPLSPNSSHLMDDEEQGRDSDSQFMNQDGEL

SEQ ID NO: 167072 - protein, 52 aa, Zea Mays
MELGTRSFFLCPRSWAAGQDASSSSGTANGVTSAASGKTPAWLSYMPFWPTM

SEQ ID NO: 167073 - protein, 151 aa, Zea Mays
MPPLAPPHGEKGGRQRQGAAAAPAPAQRSASFHGRGTEQRHHQPQKQRPKTLPDLLAGVRGASFRSGSPPPDGDAGRRTPSKVLVSVAVQQSMWPLHVMAPAEWTVADLVAAAVALYVKEGRRPLLPSTDPAAFGLHYSQFSLDRTCFVLD

SEQ ID NO: 167074 - protein, 103 aa, Zea Mays
MCHFDLSETFVDTVYRKIRVHGGSIYYGGRTVADMVVVGIVEAFFSLGTPSPSACLLIQLENAATFNWKMLLLKNFSRWTETLLGCMQLWTVDVKSCLTSGYF

SEQ ID NO: 167075 - protein, 179 aa, Zea Mays
MEKAGQKRRPLTVMASSSSQVAAARGMGMTNPLAEWTDRVRSLEAGVRAWLAKQPTHVEAAVVTAVGAVQGAALGGLMGTLAPDGGAALPVPPPPPGTDPKVLASFKQAQALAGGPLVQARNFAVMTGANAGISCVMRRIRGVEDVQGSQLWSTPTCLGLEGFVVVVVVVSYNAAIHSA

SEQ ID NO: 167076 - protein, 379 aa, Zea Mays
MLLMIIVDDAGSFIPAMNHSPWDGVTVADFVMPFFLFIVGVALALAYKRVPDKLDATKKAVLRALKLFCLGLVLQGGFFHGVRSLTFGVDLQEIRLMGILQRIAIAYLLTALCEIWLKGDEDVDYGYDLLKRYRYQLFVGAIVGITYMSLLYGTYVRDWEYQTSGPGSIEKSFFVKCGVRGDTSPGCNAVGMIDRRILGIQHLYGRPVYARSKQCSIDSPQNGPLPPDAPSWCQAPFDPEGLLSSVMAIVTCLIGLQYGHVIVHFQKHRERIMNWLIPSFSMLVLAFAMDFLGLRMNKPLYTLSYTLATAGAAGLLFCGIYTLVDIYGYRRPTVAMEWMGMHALMIYVLIACNILPIFIHGFYWKEPQNNLLKFIGIGP

SEQ ID NO: 167077 - protein, 385 aa, Zea Mays
MPHHHICSLMIIVDDAGSFIPAMNHSPWDGVTVADFVMPFFLFIVGVALALAYKRVPDKLDATKKAVLRALKLFCLGLVLQGGFFHGVRSLTFGVDLQEIRLMGILQRIAIAYLLTALCEIWLKGDEDVDYGYDLLKRYRYQLFVGAIVGITYMSLLYGTYVRDWEYQTSGPGSIEKSFFVKCGVRGDTSPGCNAVGMIDRRILGIQHLYGRPVYARSKQCSIDSPQNGPLPPDAPSWCQAPFDPEGLLSSVMAIVTCLIGLQYGHVIVHFQKHRERIMNWLIPSFSMLVLAFAMDFLGLRMNKPLYTLSYTLATAGAAGLLFCGIYTLVDIYGYRRPTVAMEWMGMHALMIYVLIACNILPIFIHGFYWKEPQNNLLKFIGIGP

SEQ ID NO: 167078 - protein, 174 aa, Zea Mays
MSICAITRLEQGVEDNMDILAMGKGQNSVSLTGAMNQTRCNDCGMDQKWTNQIFDCWNGPSSVFLAIPMSLCWTGAWKPCWSAHILLAPQEYFLTACGADQGHLPLVKVNSLPSPRFVVTQSLARQHLDVVTKAARVLTSPWPEFPEEEEDEIQEVISEEESASVPDHQVMGAI

SEQ ID NO: 167079 - protein, 353 aa, Zea Mays
MAGGAAGEDRVQAVCSEKNGWLICGIYDGFNGRDAADFLAVTLYDNIVYYLYLLENRIRQQNGLYNSSESSLNGLKSELTLAMRNSENEGIKFSETFRSGVLNCLSTAVEQAENDFLCMVEQEMDDRPDLVSVGSCILVVLLQGTDLCILNMGDSRAVLASMPYVENGALKATQLTETHSLENPLEYQKLLAEHPNDSSVVRGNKIKGKLKVTRAFGVGYLKQRKFNDALMGILRVRDLSSPPYVYTNPHTLSHKVTDDDLFVVLGSDGLFDFFSNDEVVRLVYQFMHDNPMGDPAKYLIEQLILKAAKEAALTAEELMRIPVGSRRKYHDDVTVIVIILGNAQRTMTASTSL

SEQ ID NO: 167080 - protein, 80 aa, Zea Mays
MSATKHRRPTTCALRPKIANDKCIQLVHCKIQARNREKQTNRIVGVVLVFDSTESPRLKSCQFLQFQSMKWLRLMLIHWE

SEQ ID NO: 167081 - protein, 372 aa, Zea Mays
MKCLWKTMCNLLCSQSLLSEELIWMRMPPESSSQNPGVQIAVFRHVVSGILLHNTIYEVVPLSSKLAVLDTQLPVKQAFKIMHDEGLALVPLWDDHQGTITGMLTALDFVLMLRKLQRNIRVTGNEELEMHPISAWKEAKLQFYGGPDGAAMQRRPLIHVKDSDSLADVALTIIRNEISSVPIFKCMPDSSGVPFLNLATLQGILKFLCSKLQEQAGGCSLLHNQLLSIPIGTWSPHTGRSSSRHLRTLLLSSPLNTCLDFLLEDRVSSIPIVDDKGALHDVYSLSDIMALAKNDVYARIELEQVTVQNALDVQYQVHGRRQCYTCLQTNTLLEVLEGLSIPGVRRLVVIEQSTRFVEGIISLRDIFTFLLG

SEQ ID NO: 167082 - protein, 450 aa, Zea Mays
MVMQRFSWPYGGRSASLCGSFTGWREYPMGLVGAEFQVVFDLPPGVYQYRFLVDGVWRCDETKPFVCDEYGLISNEVLVENNVQPVVQPEPSIRGTNLDEGTVLTTMPPESSSQNPGVQIAVFRHVVSGILLHNTIYEVVPLSSKLAVLDTQLPVKQAFKIMHDEGLALVPLWDDHQGTITGMLTALDFVLMLRKRNIRVTGNEELEMHPISAWKEAKLQFYGGPDGAAMQRRPLIHVKDSDSLADVALTIIRNEISSVPIFKCMPDSSGVPFLNLATLQGILKFLCSKLQEQAGGCSLLHNQLLSIPIGTWSPHTGRSSSRHLRTLLLSSPLNTCLDFLLEDRVSSIPIVDDKGALHDVYSLSDIMALAKNDVYARIELEQVTVQNALDVQYQVHGRRQCYTCLQTNTLLEVLEGLSIPGVRRLVVIEQSTRFVEGIISLRDIFTFLLG

SEQ ID NO: 167083 - protein, 353 aa, Zea Mays
MVMQRFSWPYGGRSASLCGSFTGWREYPMGLVGAEFQVVFDLPPGVYQLAVLDTQLPVKQAFKIMHDEGLALVPLWDDHQGTITGMLTALDFVLMLRKRNIRVTGNEELEMHPISAWKEAKLQFYGGPDGAAMQRRPLIHVKDSDSLADVALTIIRNEISSVPIFKCMPDSSGVPFLNLATLQGILKFLCSKLQEQAGGCSLLHNQLLSIPIGTWSPHTGRSSSRHLRTLLLSSPLNTCLDFLLEDRVSSIPIVDDKGALHDVYSLSDIMALAKNDVYARIELEQVTVQNALDVQYQVHGRRQCYTCLQTNTLLEVLEGLSIPGVRRLVVIEQSTRFVEGIISLRDIFTFLLG

SEQ ID NO: 167084 - protein, 363 aa, Zea Mays
MVMQRFSWPYGGRSASLCGSFTGWREYPMGLVGAEFQVVFDLPPGVYQYRFLVDGVWRCDETKPFVCDEYGLISNEVLVENNVQPVVQPEPSIRGTNLDEGTVLTTMPPESSSQNPGVQIAVFRHVVSGILLHNTIYEVVPLSSKLAVLDTQLPVKQAFKIMHDEGLALVPLWDDHQGTITGMLTALDFVLMLRKLQRNIRVTGNEELEMHPISAWKEAKLQFYGGPDGAAMQRRPLIHVKDSDSLADVALTIIRNEISSVPIFKCMPDSSGVPFLNLATLQGILKFLCSKLQEQAGGCSLLHNQLLSIPIGTWSPHTGRSSSRHLRTLLLSSPLNTCLDFLLEVTSWLWRRMMFMLASNLNK

SEQ ID NO: 167085 - protein, 317 aa, Zea Mays
MVMQRFSWPYGGRSASLCGSFTGWREYPMGLVGAEFQVVFDLPPGVYQYRFLVDGVWRCDETKPFVCDEYGLISNEVLVENNVQPVVQPEPSIRGTNLDEGTVLTTMPPESSSQNPGVQIAVFRHVVSGILLHNTIYEVVPLSSKLAVLDTQLPVKQAFKIMHDEGLALVPLWDDHQGTITGMLTALDFVLMLRKLQRNIRVTGNEELEMHPISAWKEAKLQFYGGPDGAAMQRRPLIHVKDSDSLADVALTIIRNEISSVPIFKCMPDSSGVPFLNLATLQGILKSTRTGWRLFPSAQSASQHSYWYMVSTYGEVK

SEQ ID NO: 167086 - protein, 346 aa, Zea Mays
MPPESSSQNPGVQIAVFRHVVSGILLHNTIYEVVPLSSKLAVLDTQLPVKQAFKIMHDEGLALVPLWDDHQGTITGMLTALDFVLMLRKLQRNIRVTGNEELEMHPISAWKEAKLQFYGGPDGAAMQRRPLIHVKDSDSLADVALTIIRNEISSVPIFKCMPDSSGVPFLNLATLQGILKFLCSKLQEQAGGCSLLHNQLLSIPIGTWSPHTGRSSSRHLRTLLLSSPLNTCLDFLLEDRVSSIPIVDDKGALHDVYSLSDIMALAKNDVYARIELEQVTVQNALDVQYQVHGRRQCYTCLQTNTLLEVLEGLSIPGVRRLVVIEQSTRFVEGIISLRDIFTFLLG

SEQ ID NO: 167087 - protein, 688 aa, Zea Mays
MVGESTEAVGAGVGGGSSGQKMPTLEEYGTNLTKLAEESFGRQDQIERVTQILGRRTKKQPLPNWRAWCWKRLLLLRGLLSVLPMGMFLKQFEGKKVITLDMGLLVAGTKYRGEFEERLKKLMEEIKQNEDIILFIDEVHTLIGAGAAEGAIDAANILKPALARGELQCIGATTLDEYRKHIEKDPALERRFQPVKVPEPTVDETIQILRGLRERYELHHKLRYTDDALIAAAQLSYQYISDRFLPDKAIDLIDEAGSRVRLRHAQLPDEAKELDKELRQITKQKNEAVRGQDFEKAGELRDREMELKAQITAIIDKSKEMIKAETESGEVGPLVTEADIQHIVSSWTGIPVEKVSSDESDRLLKMEETLHTRIIGQDEAVKAISRAIRRARVGLKNPNRPIASFIFSGPTGVGKSELAKALAAYYFGSEEAMIRLDMSEFMERHTVSKLIGSPPGYVGYTEGGQLTEAVRRRPYTVVLFDEIEKAHPDVFNMMLQILEDGRLTDSKGRTVDFKNTLLIMTSNVGSSVIEKGGRKIGFDLDYDEKDTSYNRIKSLVTEELKQYFRPEFLNRLDEMIVFRQLTKLEVKEIADIMLKEVFDRLKAKDINLQVTEKFRDRVVDEGYNPSYGARPLRRAIMRLLEDSLAEKMLAGEVKEGDSAIVDVDSDGKVIVLNGGSGVAEPLEPALST

SEQ ID NO: 167088 - protein, 153 aa, Zea Mays
MVEFNKKEKLFNLKGIALGNPVLEFSTDFNSRAEFFWSHGLISDSTYNIFTTVCNYSRYVSEYYRGSLSTACDRVMSQVARETSRFVDKYDVTLDVCISSVLMQSQVLVPQQGSRELDVCVEDETMRYLNRKDVQQAMHARLDGVQRWTVCSR

SEQ ID NO: 167089 - protein, 467 aa, Zea Mays
MQGRSRDAATIAAAVACAAVLLLGDAWSVSAQAAAEEDKISALPGQPPVGFAQYSGYIPVDAAGKRSLFYYFAEAEADPAAKPLVLWLNGGPGCSSVGVGAFSENGPFRPSGNALTRNEYSWNKEANMLYLESPAGVGFSYSTDPAFYEGVGDSMTARDNLKFLQGWFARFPQYKGRDLYITGESYAGHYVPQLAQRMVEFNKKEKLFNLKGIALGNPVLEFSTDFNSRAEFFWSHGLISDSTYNIFTTVCNYSRYVSEYYRGSLSTACDRVMSQVARETSRFVDKYDVTLDVCISSVLMQSQQGSRELDVCVEDETMRYLNRKDVQQAMHARLDGVQRWTVCSSSVLEYKQLDLQIPTVNTVGALVKAGIPALVYSGDQDSVIPLTGSRTLVGRLAARLRLNATAPYRAWFQGKQVGGWTQVFGGGALSFATVRGASHEAPFSQPERSLGLFRAFLAGQQLPESFQ

SEQ ID NO: 167090 - protein, 60 aa, Zea Mays
MHCVPCTRSCYCTHTCHIHHKHTTGVAATLSCPCTHAGHQCAPPSLPHRGVVGHYSTFCR

SEQ ID NO: 167091 - protein, 162 aa, Zea Mays
MFNPYSEKIYDYLGGIEDIKKAKVRTVIPAGTSFQEDCARILRAIRIAARLGFSFPKETAYYVRTLACSVARLDKARILMEMNYMLAYGSAEASLRLLWRFGLLEHLLPFQAAYFSSTRFKRKDKGTNMLLVLFSKLDNFLAPNRPCHNSLCGYRKINQPTT

SEQ ID NO: 167092 - protein, 424 aa, Zea Mays
MLPFDGSDKSFISDNPEYFTKVKDTFLGSAVIVGRRFPICHVHENNSIVEVSSFNTCARGSSGSQIYNSKSQNCSKNDFVRWKNCQRRDFTINGLMFNPYSEKIYDYLGGIEDIKKAKVRTVIPAGTSFQEDCARILRAIRIAARLGFSFPKETAYYVRTLACSVARLDKARILMEMNYMLAYGSAEASLRLLWRFGLLEHLLPFQAAYFSSTRFKRKDKGTNMLLVLFSKLDNFLAPNRPCHNSLWISLLAFHEALARKPCDPLIVATFALAFYLGGDMSLAVDIGKSINRQHDTGFRELLEPKVWTDKHLAGEVQSFAALMKQALTEMTDEYHVANAMAKIPQAPSSDLVFIPLQAYLKVLKFIECVQYGKKERGHEPKRDGMINYHNLSNGTHAEIRNLFTLVVFDTLYPTDTEDENDCSS

SEQ ID NO: 167093 - protein, 230 aa, Zea Mays
MEMNYMLAYGSAEASLRLLWRFGLLEHLLPFQVLFSKLDNFLAPNRPCHNSLWISLLAFHEALARKPCDPLIVATFALAFYLGGDMSLAVDIGKSINRQHDTGFRELLEPKVWTDKHLAGEVQSFAALMKQALTEMTDEYHVANAMAKIPQAPSSDLVFIPLQAYLKVLKFIECVQYGKKERGHEPKRDGMINYHNLSNGTHAEIRNLFTLVVFDTLYPTDTEDENDCSS

SEQ ID NO: 167094 - protein, 96 aa, Zea Mays
MRVASPLVARSLSSRLACGMKASSRSDANATTAFGGAPLLLHGAPLLLPLLSRWHLRLAPLHPGTEYSGDPEEPNMSAPRERLLEATWSEMPYSKV

SEQ ID NO: 167095 - protein, 198 aa, Zea Mays
MTNEALITVANNCPNFIRFRLCILEPKKPDAMTGQPLDEGFGAIVRECKGLRRLSISGLLTDKVFMYIGKHAKYLEMLSIAFAGDSDKGMMDVMNGCKNLRKLEIRDSPFGDVALLGNVAKYETMRSLWMSSCNVTLKGCQVLASKMPMLNVEIMNELDGSSEMENHGDLSKVDKLYVYRTTAGARDDAPNFVKILQS

SEQ ID NO: 167096 - protein, 272 aa, Zea Mays
MVSRCVKLQRLWVLDCISDKGLQVVASSCKDLQELRVFPSEFYVPGASAVTEEGLVAISSGCPKLTSLLYFCHQMTNEALITVANNCPNFIRFRLCILEPKKPDAMTGQPLDEGFGAIVRECKGLRRLSISGLLTDKVFMYIGKHAKYLEMLSIAFAGDSDKGMMDVMNGCKNLRKLEIRDSPFGDVALLGNVAKYETMRSLWMSSCNVTLKGCQVLASKMPMLNVEIMNELDGSSEMENHGDLSKVDKLYVYRTTAGARDDAPNFVKILQS

SEQ ID NO: 167097 - protein, 113 aa, Zea Mays
MDYSMQGSKDSYSPQGGLRLRLPVPGLPWRIGEPSLLLLHWQLARAAPSSVRRRPLSLPLPAGPGRCRLHHLPQRMSCWSVLLLLTGAMLHLRRMACSAAAWSTHVCSSVVVT

SEQ ID NO: 167098 - protein, 183 aa, Zea Mays
MCAASSSPRASATSLVPAGRAWSGAPYRPGWSLLSLVARNLGKTLRAFQPTIRELQDVSREFRSTLEREIGIDEVSQSTNYRPTTMNNNQQPAADPNVKPEPAPYTSEELMKVTEEQIAASAAAAWNPQQPATSQQQEEAPTTPRSEDAPTSGGSDGPAAPARAVSDSDPNQVNKSQKAEGER

SEQ ID NO: 167099 - protein, 61 aa, Zea Mays
MCSPRHPVCVGGLLGHGHQPGSREFLTGVRDSPWVGVPGSPYLVKNKYRQMRSSKDVAMSS

SEQ ID NO: 167100 - protein, 236 aa, Zea Mays
MLYSLNLITACENSRSGTQVAFGQGNSYYARNFPMPKKDSSAGGASKLPKEYAEPWDYSHDYPVTLPLRKPYSGNPEILDEEEFGESSASRTQDDELSAAEQLGLMDMSSESQFLFFQLPSSLPLPRQPQSGADPNEVRDEKREDMRPSSHNGSKLKEVPEGYMGKMLVYKSGKVKMKIGDTLFDVSFGSNCMFSQEVAAINIREKHCCTVGEISKRAIITPDINYMLGSVDKMEE

SEQ ID NO: 167101 - protein, 586 aa, Zea Mays
MRRRNLIVHSDSDEDDGEGMTTATTPASVSASVASGGVSGSGSVGRPSPQNLSPLPVPFPSLSLSSAPFVISDDDEDVDEIVDPDGDSPIVDAPEVFSPPAPPALHAPAPAPPSPPPPITTPSQTPIPTPPSARTPTPTPPSARTPTPTPPSARTPASIAPPHPSPLSGRLRPVDEFLRRLGLLLRPDWLESCAAGIPGFDGLGGVEAQARRCFEQFLFADMNSCGAGVLPEGVGGMHAEFLDGPFVLQVDEVVNISVPLKERYREAPAGPKRCLKLSMTDGIRHIFGMEYRPIKDLTVLAPAGLKIIVRNVHTRRGLLMLVPEAVEILGGVVDELEAARARLVSEVNKPPRGKSKQGGLSLSSRATRAAWPCSTDITNGVAQGISMQRAVNSSYPTGSGNAFQVGGATETVVEELVSPLVANRVQEINMQGSYASLTRETTETSMHTTHEYDPTHITEKSTGTVMEERPDPPILANSVHEQMQRVQPANGAQSSNVGKINQMEQSFILSGENEKPFTYIYSMLIDWGRQQDTKAYIQGKIKGLITSVKKFQYKQRTKYELYVYIDDGSFISEAFIDSDSLHHPVK

SEQ ID NO: 167102 - protein, 408 aa, Zea Mays
MRRRNLIVHSDSDEDDGEGMTTATTPASVSASVASGGVSGSGSVGRPSPQNLSPLPVPFPSLSLSSAPFVISDDDEDVDEIVDPDGDSPIVDAPEVFSPPAPPALHAPAPAPPSPPPPITTPSQTPIPTPPSARTPTPTPPSARTPTPTPPSARTPASIAPPHPSPLSGRLRPVDEFLRRLGLLLRPDWLESCAAGIPGFDGLGGVEAQARRCFEQFLFADMNSCGAGVLPEGVGGMHAEFLDGPFVLQVDEVVNISVPLKERYREAPAGPKRCLKLSMTDGIRHIFGMEYRPIKDLTVLAPAGLKIIVRNVHTRRGLLMLVPEAVEILGGVVDELEAARARLVSEVNKPPRGKSKQGGLSLSSRATRAAWPCSTDITNGVAQGISMQRAVNSSYPTGSGWWSYRNCG

SEQ ID NO: 167103 - protein, 634 aa, Zea Mays
MRRRNLIVHSDSDEDDGEGMTTATTPASVSASVASGGVSGSGSVGRPSPQNLSPLPVPFPSLSLSSAPFVISDDDEDVDEIVDPDGDSPIVDAPEVFSPPAPPALHAPAPAPPSPPPPITTPSQTPIPTPPSARTPTPTPPSARTPTPTPPSARTPASIAPPHPSPLSGRLRPVDEFLRRLGLLLRPDWLESCAAGIPGFDGLGGVEAQARRCFEQFLFADMNSCGAGVLPEGVGGMHAEFLDGPFVLQVDEVVNISVPLKERYREAPAGPKRCLKLSMTDGIRHIFGMEYRPIKDLTVLAPAGLKIIVRNVHTRRGLLMLVPEAVEILGGVVDELEAARARLVSEVNKPPRGKSKQGGLSLSSRATRAAWPCSTDITNGVAQGISMQRAVNSSYPTGSGNAFQVGGATETVVEELVSPLVANRVQEINMQGSYASLTRETTETSMHTTHEYDPTHITEKSTGTVMEERPDPPILANSVHEQMQRVQPANGAQSSNVGKINQMEQSFILSGENEKPFTYIYSMLIDWGRQQDTKAYIQGKIKGLITSVKKFQYKQRTKYELYVYIDDGSFISEAFIDSDGMMLIELNKNSPVPVVRELNEGCSSSTAWLLLGRLKTISSQKKTIQTQDIMDTTP

SEQ ID NO: 167104 - protein, 249 aa, Zea Mays
MQGSYASLTRETTETSMHTTHEYDPTHITEKSTGTVMEERPDPPILANSVHEQMQRVQPANGAQSSNVGKINQMEQSFILSGENEKPFTYIYSMLIDWGRQQDTKAYIQGKIKGLITSVKKFQYKQRTKYELYVYIDDGSFISEAFIDSDIVNNMLGLSPGEVTAALAGELEFASPSEVKETLKGFQKFLVKFEGMMLIELNKNSPVPVVRELNEGCSSSTAWLLLGRLKTISSQKKTIQTQDIMDTTP

SEQ ID NO: 167105 - protein, 390 aa, Zea Mays
MTDGIRHIFGMEYRPIKDLTVLAPAGLKIIVRNVHTRRGLLMLVPEAVEILGGVVDELEAARARLVSEVNKPPRGKRATRAAWPCSTDITNGVAQGISMQRAVNSSYPTGSGNAFQVGGATETVVEELVSPLVANRVQEINMQGSYASLTRETTETSMHTTHEYDPTHITEKSTGTVMEERPDPPILANSVHEQMQRVQPANGAQSSNVGKINQMEQSFILSGENEKPFTYIYSMLIDWGRQQDTKAYIQGKIKGLITSVKKFQYKQRTKYELYVYIDDGSFISEAFIDSDIVNNMLGLSPGEVTAALAGELEFASPSEVKETLKGFQKFLVKFEGMMLIELNKNSPVPVVRELNEGCSSSTAWLLLGRLKTISSQKKTIQTQDIMDTTP

SEQ ID NO: 167106 - protein, 70 aa, Zea Mays
MYYCRKDPSTKSFSNNSPLVPQHHYHLPILVSKFMYRQVFEVLNPIIEDFCKIVCDVITFDFWVEFTPPP

SEQ ID NO: 167107 - protein, 67 aa, Zea Mays
MCNATASSSETKGKVCIPTQAQSMVSGGDKADAQDAPRASHHVRSQCDDGTHQHTVRQEGHDARPFL

SEQ ID NO: 167108 - protein, 121 aa, Zea Mays
MASEAARRRQEVAVEGQRHLEETIAAAFQILVSMNDELCNAGLWSSSSVSAAAAAAASAGSQHHQSATPPPPHSADSDAADAGGAPGPGGSLDEARHRYKSAVVALRDSISAVSSCPQGCY

SEQ ID NO: 167109 - protein, 94 aa, Zea Mays
MERSRLPVYKFCWTLEGPKPSRPPDSLLLRHGPVRRWGPRRSVASPPSLTHGRTPDSSTPMCKQSSKPASNGWIPCPRPDHGERLDHAGSCPCQ

SEQ ID NO: 167110 - protein, 168 aa, Zea Mays
MHIKAAVDARKESGSDIVIVARTDSRQAISHDEALWRVKAFADAGADVLFIDALASVEEMKAFCAVAPEVPKMANMLEGGGKTPILSPAELEEIGFRLVVYPLSLVGVSMRAMQDALVAIKDGGVPPPSVLPSFQEIKDTLGFNRYYKEEKQYQVFARTGQAGSGGGG

SEQ ID NO: 167111 - protein, 54 aa, Zea Mays
MSLSSLFSSRHMKSYMTLYIKSYMPLHEMLLSFFFPPCHKKPYMTLHKILHDIA

SEQ ID NO: 167112 - protein, 68 aa, Zea Mays
MHVAAIVRVSISTSAGEGERPGERPTKCTSPACRLPSGNSNHRTSIGTSKNNLPGTSTRTSKNKYAPM

SEQ ID NO: 167113 - protein, 60 aa, Zea Mays
MDFLTLAEKKGKRSTMLGLIWPEPALDRQNASTRARPHGGFAPRPSTVRITSEEPYALFV

SEQ ID NO: 167114 - protein, 448 aa, Zea Mays
MAKNHKSKAYYQHRGMVPGVLDSKSPSHRHAHFLLCSIFILISSNTATLSSAQASNRSEDDRQALLCFKSGLSGNSAGVLGSWSNDSLNFCKWEGVTCSTAIPIRVASLKLRSVQLRGKLSSCVANLTSLVQMDLSNNSISGEIPDEIGSLPLLQTLILSKNLLSGTIPPEIGKLVSLTKLAMDQNMLSGIIPWTIGNLSNLVVLALSTNSLSGEIPARIGYLPQLIQLYLDDNTLSGRIPAQLVQCTRLAMLNLSVNSLNGSIPSEILSISSLSLGLDLSNNNLIGTIPSQIGKLINLGLLNVSSNKLSGEIPSELGQCVLLLSLQMEGNMLDGVIPQSLNTLKGIQHMDLSENILSGQIPDFFENFSTLDYLNLSYNRLEGPIPTSGIFTNSNAVMLEGNKALCQQIDIFALPICHITSGLVLCNNQVIPVCASKYTLQYPTQCTA

SEQ ID NO: 167115 - protein, 81 aa, Zea Mays
MSRRERIEPLRPRLAFTIAQPLDRWGIGRDHQVVQIVRVVSRARKLAGETNCLPVLGRILTGNPRAALQRRPAASTSSRVQ

SEQ ID NO: 167116 - protein, 80 aa, Zea Mays
MSRRERIEPLRPRLAFTIAQPLDRWGIGRDHQVVQIVRVVSRARKLAGETNCLPVLGRILTGNPRAALQRRPAASTSSRV

SEQ ID NO: 167117 - protein, 60 aa, Zea Mays
MIPIQFPNLDLEIGRVGSPPMATSCLSVLSPVGHRGERERIGGEKNEGLGLLDHTRTAPI

SEQ ID NO: 167118 - protein, 85 aa, Zea Mays
MFVELSSPLPLCSPADARPCAAIVVAAPCAAALARPASLRDNCSFAESGEVAGEDLEQQLFGEGKCPLAYLCPTHFIIHFPALYN

SEQ ID NO: 167119 - protein, 66 aa, Zea Mays
MFVELSSPLPLCSPADARPCAAIVVAAPCAAALARPASLRGNNCSFAESGEVAGEDLEQQLFGEAL

SEQ ID NO: 167120 - protein, 152 aa, Zea Mays
MFVELSSPLPLCSPADARPCAAIVVAAPCAAALARPASLRGSTCPYMVQLTASARSQSTPPQRASAVTRSQLAHGSRPACVAARGQPVRNFYATAHVRAHARYALQRHAHCHTSVAAALALACAQRVTGSPSMSVYHCSRPSTPLMHVFIVR

SEQ ID NO: 167121 - protein, 133 aa, Zea Mays
MFVELSSPLPLCSPADARPCAAIVVAAPCAAALARPASLRGSTCPYMVQLTASARSQSTPPQRASAVTRSQLAHGSRPACVAARGQPVRNFYATAHVRAHARYALQRHAHCHTSVAAALALACAQRVTGSPSI

SEQ ID NO: 167122 - protein, 67 aa, Zea Mays
MALHQVADRKCQWLQAAVSEVNGDGAVCVRWRRGSQRRKIWNRTVDVSDDLVEQDGTAGSGGTSIAA

SEQ ID NO: 167123 - protein, 57 aa, Zea Mays
MCGFFQGLSGMLWSDLATMYLPSCAISINYDTMWSDSRFSYCFCATCVPSVYRQLDK

SEQ ID NO: 167124 - protein, 115 aa, Zea Mays
MVQMGVLVPTGDMTVVRRTAQFFLNSFQECLIAQRKEREMATAELGFKKQLTKEEKFEKRKQRLAAIGEDLLAIAADQPFRFPATFTFVVRAFSVLDGTGKGLHPRFHITEIAKP

SEQ ID NO: 167125 - protein, 142 aa, Zea Mays
MIDTMFSRFQSNVNKMSANKAHLPYDDHERALKLLHALDRRVWEVKVSTIIELPNYETLTMDELFNKLKSTEIDHQTRAKIENPGAHTMALVSVGGSSPNPSPAMFALSFLLTITEEQVKSLGDEKLALVASWFTWFHNNRM

SEQ ID NO: 167126 - protein, 58 aa, Zea Mays
MKLLCATYLCGIIIYMNLIVPNSCKLITLIIKADAKSRYSYLFILKFRMQSIQTTFRI

SEQ ID NO: 167127 - protein, 413 aa, Zea Mays
MPSYPTKHYLSPQFHHQEYALPFCIVCCLCNLHLLITYSYQQEIDPCKSISDEDIRTTIQNSGGPKGAMFLPEVPFEILVRKQIGRLLDPSLQCAQFIYDELIKVCPQCLISELQKFPALKKRLSEVVCSFLRDGLRPAETMITHIIEMEMDYINTSHPSFVGGTKVVELAKHEVLPPKTSASLSGRKDGTIVGSEIQLAAERSQKSRAVFARDAIRRVTSEQASVEAETSLTGGNQIGNSQVGESSSKLPSIIPLKEPPITLKPSETEQDATEVAVVKLLIKSYYDIVRKNIEDAIPKAVMHFLVNHTKRDLHNFLIRKLYRENLLNELMRETDEVLMRRQRIQEMLEILEQAHRTLEEFPFEVDKLEKGYNLTEHATGLSKIHGVSGDSTNVIYTSSPNCYSPHRASHMVL

SEQ ID NO: 167128 - protein, 472 aa, Zea Mays
MPMESVAVVAVPFPAQGHLNALLHLSLQLAARGVPVHYAAPMEHVRQARSRVQGWGDDTLCRVHFHELSVSAYASPPPDPAAESAFPSHLVPMWEAFTTDAPAPLAALLGGISASCRRFVVLYDIANGFAAEEAARLPNGEGFGLVCTAVSCIVGRTDAGSRLVRERGLDFFPVNSFVTEEFLATVGKRARWAQSIPCSVGILANTCRALEGEFIDIFAQQLAAAGKNLFVVGPLNPLLLPDARSPKHGISKERHECLDWLDLQPPASVVYVSLGSTSSLRDEQVEELASALRDSKQRFIWVLRDADRANIFADHGESPRHAKFLPEFAEHTQDRGLVITGWAPQLEILAHGATAAFLSHCGWNSIMESMGHGKPILAWPMHSDQPWDAELVCKHHKAGILIRPMEKQREVISAAAIQEAIEKMMVSDEGYKIQQRAMALGQAIRASAAVGGGSENKDLDKFIAHISRHLSE

SEQ ID NO: 167129 - protein, 262 aa, Zea Mays
MVTEEALPTYQTMLNTLDGVRDETGASPTTWAVWTRAWTAEENRHGDLLNKYMYLTGRVDMKQIEKTIQYLIGSGMDPGTENNPYLGFLYTSFQERATFVSHGNTARHAKEYGDLKLAQICGTIAADEKRHETAYTKIVEKLFETDPDYTVLAFSDMMRKKITMPAHLMYDGKDDNLFEHFSAVAQRMGVYTAKDYADILEFLVQRWKVADLTGLSGEGRRAQDFVCTLAPRIRRLDERARARAKQAPVIPFSWIYGRKVQL

SEQ ID NO: 167130 - protein, 271 aa, Zea Mays
MMSRQCANRIFLTGGSSFLHGLKSRVASSRSHGTVRLNWRCVRTNLWRAERLGVKATPSEHIIAVLQASDIFSGIRKWSKLQLVAMTGVMACVVLVVPSSDAVDALKTCTCLLKECRIELAKCIANPSCAANVACLNTCNNRPDETECQIKCGDLFENSVVDEFNDCAVSRKKCVPKKSDVGEFPVPDPSSLVKSFNMADFNGKWTHRSPAYSTTMTMSSCTIKMTGTLSHPRLRTRMTTTYLCTIVGEMTHGMVMVVLYCTQEVKLYLKQ

SEQ ID NO: 167131 - protein, 610 aa, Zea Mays
MSGSHLEIREEKVFLQRQEEEKLEEGTWILDTGATNHMSGSRAVFTDLDTEVLGIVRFGDNSVARIEGRGTIKFVCKNGETRSFVGAYFIPRLTTNIISIGQLDEAKYKIHVDDGVMRIREPDGRLLARIVRAENRLYLLHLKIQQPVCLAVRGREEEVAWRWHERFGHVNMAALRKLEKEELVRGLPKLGQVERVCEACQAGKQKRTSFPAQAEYRAKQRLELVHGDLCGPITPMTPRGNKYFLLLVDDLSRYMWMAAISSKDQAADAVKRIQMQAEGESGLKLKALRTDRGGEFTSGEFAEYCAAGGVHRQHTAPYSPQQNGVVERRNGTVVAAARSMLKAKKLPGWFWGEAVKTVVYVLNRCPTKSVDGMTPFEAWHGKKPAVHHLKTFGCIVYVRNTVPHLKKLEDRGKKMIFIGYEEGTKAYRAYDPVTERVHVSRDVIFDEQAQWDWETHGNTDPVNEDQDVFTMEYAIGKQTRPEVEEAGEESGDEQTAGETEDEQATGESETAGGLSPLTPHADTEHTSEEEDEMQEVEFASPPEGNIDEYLDAYRAEDDPLRFRKVDGLLESKTPPGYATRRLLDEELHAEIANMVVVQSYMDRSGRQDQG

SEQ ID NO: 167132 - protein, 90 aa, Zea Mays
MIKDYLNWPHALDMGQGKLEPLYSIHEKTIAHWEWRDGESDTYAPGKGPPKRGGVLSGGAHLFMQWRIRGNCRHMQELRETYVVWLEILS

SEQ ID NO: 167133 - protein, 300 aa, Zea Mays
MDPSYHGGGAAGGSADDHGQILWDWTEQHCEPNDSSHDATKFVWDCLNQDDNELLGLLGNQTPLRYCRDFFADLDDITCKETLDLEESRESKRRRTLEYPLESSQSEVGTHETGSPFVTPEVAEISLLCTDKPQSLNCDTINSLSDEAPYQQEDILLEHCSYGTAVYLEPDQTPCSQQSIACTNDQAGISGTSEIAPMTESFIMQETRKLSTLKVSNGASSSLVTKDNLTTSVAYPFTLIKPSWQEGDVTLQDINRRIRPPKKAPEILGTSAFSGKPVINKTRIRTEGGKGSITILRTKG

SEQ ID NO: 167134 - protein, 310 aa, Zea Mays
MDPSYHGGGAAGGSADDHGQILWDWTEQHCEPNDSSHADATKFVWDCLNQDDNELLGLLGNQTPLRYCRDFFADLDDITCKETLDLEESRESKRRRTLEYPLESSQSEVGTHETGSPFVTPEVAEISLLCTDKPQSLNCGMHHTLNNLDTINSLSDEAPYQQEDILLEHCSYGTAVYLEPDQTPCSQQSIACTNDQAGISGTSEIAPMTESFIMQETRKLSTLKVSNGASSSLVTKDNLTTSVAYPFTLIKPSWQEGDVTLQDINRRIRPPKKAPEILGTSAFSGKPVINKTRIRTEGGKGSITILRTKG

SEQ ID NO: 167135 - protein, 301 aa, Zea Mays
MDPSYHGGGAAGGSADDHGQILWDWTEQHCEPNDSSHADATKFVWDCLNQDDNELLGLLGNQTPLRYCRDFFADLDDITCKETLDLEESRESKRRRTLEYPLESSQSEVGTHETGSPFVTPEVAEISLLCTDKPQSLNCDTINSLSDEAPYQQEDILLEHCSYGTAVYLEPDQTPCSQQSIACTNDQAGISGTSEIAPMTESFIMQETRKLSTLKVSNGASSSLVTKDNLTTSVAYPFTLIKPSWQEGDVTLQDINRRIRPPKKAPEILGTSAFSGKPVINKTRIRTEGGKGSITILRTKG

SEQ ID NO: 167136 - protein, 201 aa, Zea Mays
MDPSYHGGGAAGGSADDHGQILWDWTEQHCEPNDSSHDATKFVWDCLNQDDNELLGLLGNQTPLRYCRDFFADLDDITCKETLDLEESRESKRRRTLEYPLESSQSEVGTHETGSPFVTPEVAEISLLCTDKPQSLNCGMHHTLNNLDTINSLSDEAPYQQEDILLEHCSYGTAVYLEPDQTPCSQQSIACTNDQAGISGN

SEQ ID NO: 167137 - protein, 170 aa, Zea Mays
MHHTLNNLDTINSLSDEAPYQQEDILLEHCSYGTAVYLEPDQTPCSQQSIACTNDQAGISGTSEIAPMTESFIMQETRKLSTLKVSNGASSSLVTKDNLTTSVAYPFTLIKPSWQEGDVTLQDINRRIRPPKKAPEILGTSAFSGKPVINKTRIRTEGGKGSITILRTKG

SEQ ID NO: 167138 - protein, 163 aa, Zea Mays
MHHTLNNLDEAPYQQEDILLEHCSYGTAVYLEPDQTPCSQQSIACTNDQAGISGTSEIAPMTESFIMQETRKLSTLKVSNGASSSLVTKDNLTTSVAYPFTLIKPSWQEGDVTLQDINRRIRPPKKAPEILGTSAFSGKPVINKTRIRTEGGKGSITILRTKG

SEQ ID NO: 167139 - protein, 444 aa, Zea Mays
MGYMDPECMVTGRANAESDVYSFGVVLLEIACGRRPLVPRHGVGMRIPRLRLQIVEAASHNSKFLFLASCAPPAGIVLVEFPKSQPPQYTPPDPCSITATKILRLHLQSTRLPLVSRLLFTSFASRRSLMAAAAAAAAAVSSPIAPRAVAAAASRRGFVTFGGGAARSSPTLRSGRGFSGVQTHVAAVEQAVVKDATKLEAPVVVVTGASRGIGKATALALGKAGCKVLVNYARSSKEAEEVSKEIEASGGEAITFGGDVSKEADVESMMKAALDKWGTIDVLVNNAGITRDTLLMRMKKSQWQDVIDLNLTGVCLCTQAATKVMMKKKKGKIINIASVVGLTGNVGQANYSAAKAGVNAIAPGFIASDMTAELGEELEKKILSTIPLGRYGQPEEVAGLVEFLALSPAASYMTGQATLVHFLVHGRFWATELGFSFSFNTHRG

SEQ ID NO: 167140 - protein, 322 aa, Zea Mays
MELKRVLVAPTAARRAPTVPPTTSGATALPPAGLGLLPPLPEAIPWPSSGVQTHVAAVEQAVVKDATKLEAPVVVVTGASRGIGKATALALGKAGCKVLVNYARSSKEAEEVSKEIEASGGEAITFGGDVSKEADVESMMKAALDKWGTIDVLVNNAGITRDTLLMRMKKSQWQDVIDLNLTGVCLCTQAATKVMMKKKKGKIINIASVVGLTGNVGQANYSAAKAGVIGFTKTVAREYASRNINVNAIAPGFIASDMTAELGEELEKKILSTIPLGRYGQPEEVAGLVEFLALSPAASYMTGQFRRRWFTFLCTGDFGQRN

SEQ ID NO: 167141 - protein, 314 aa, Zea Mays
MELKRVLVAPTAARRAPTVPPTTSGATALPPAGLGLLPPLPEAIPWPSSGVQTHVAAVEQAVVKDATKLEAPVVVVTGASRGIGKATALALGKAGCKVLVNYARSSKEAEEVSKEIEASGGEAITFGGDVSKEADVESMMKAALDKWGTIDVLVNNAGITRDTLLMRMKKSQWQDVIDLNLTGVCLCTQAATKVMMKKKKGKIINIASVVGLTGNVGQANYSAAKAGVIGFTKTVAREYASRNINVNAIAPGFIASDMTAELGEELEKKILSTIPLGRYGQPEEVAGLVEFLALSPAASYMTGQVLTIDGGMVM

SEQ ID NO: 167142 - protein, 194 aa, Zea Mays
MMKAALDKWGTIDVLVNNAGITRDTLLMRMKKSQWQDVIDLNLTGVCLCTQAATKVMMKKKKGKIINIASVVGLTGNVGQANYSAAKAGVIGFTKTVAREYASRNINVNAIAPGFIASDMTAELGEELEKKILSTIPLGRYGQPEEVAGLVEFLALSPAASYMTGQATLVHFLVHGRFWATELGFSFSFNTHRG

SEQ ID NO: 167143 - protein, 69 aa, Zea Mays
MEIGLPTDVQHVAHVTFDRFHGFLGLPVEFKPEVPLRAPSVRIFEPVQDGAQVGSCQVPITSVLNSKCW

SEQ ID NO: 167144 - protein, 68 aa, Zea Mays
MEAEGTEGASSVTDPIMEAEVAAGVAHYTEVMLAISGSTTLAHPVDVVPGHHQRPLLWQSEFLVAMSR

SEQ ID NO: 167145 - protein, 391 aa, Zea Mays
MPLSTNSMALTNLCSCPSSRAHQLQLLCFCLALSLHVPYHANSLSFSYSFFNPDDFRPEDDAQVVDGRIELLGDEFRGRARGRVWHKQPVQLWDGTTGEAASFTANFSFSIESVAGKGAASAGHGMTFFLAPYTPNLPQESYDGCLGLFDESQALNYSKFNASGDSRYQIILGLSSAVLYLHQEWDQCVVHGDIKPSNIMLDESFNAKLGDFGLARLIDHGMSLQTMTAVAGTPGYLDPECVITGKASPESDVYSFGIVLLEVACGRRPMAPPASTGEGKDGQVFRLVEWAWDMRGRGAALDAADERLGGAFDPWEMERVVSVGLWCAHPDPKMRPRIRQAAEALRSRSFRMPLLPPKMPVAVYLQPFGPSTLHFSDTTTSVGSSVTVPRC

SEQ ID NO: 167146 - protein, 196 aa, Zea Mays
MDIWFQICSSIISSCQLGRRHVYFHSCAPILASSIVSFWCTADLVCVKCIRLSQVGDFRLCSLQPRRRRRRRSVHGGHLLHGRIDATARYGYLELAIEQMAKTADASNALNHGLHYLRSTGNACAARVLLWWGWENSDAHAGRHDNSSPSDASRLFDEMWRHDSSSPSDASRLFDEICENQNEHARVLGPLCDPNN

SEQ ID NO: 167147 - protein, 117 aa, Zea Mays
MPSNMPNHSQELYTQDEVPSLPVTQNSPTTSWVKLSTCSNERNEVRNFLFSCHVQPIRNILFFHAYNLIKSIQLALHVLTYLDMLQYIKVPLVLLNSKLPYTHIVMYLLHSNTANIN

SEQ ID NO: 167148 - protein, 90 aa, Zea Mays
MAKTADASNALNHGLHYLRSTGNACAARVLLWWGWENSDAHAGRHDNSSPSDASRLFDEMCEKQNRDINGVFMCLIQIYFLKHSQIAFST

SEQ ID NO: 167149 - protein, 604 aa, Zea Mays
MPLLPAAALALFAPPDVPLPTHTLALLLRRLFTTRSIAAAQGLLHKLHLPSCSALPARNLRAHPALPSFAQPPHAAKLPLALISSHACLRTPLDPMPLLPAVALALFAPPDMPLPTHTLALLLRRLFTTRSIAAVQGLLHKLLDIGVDARPQFLEQQLKKAKGPNLMFGRGDETEGSDNSKSKFKDDEQDGQVSSRSLKKAIGFKTHVRYCDTLMVLKLWIMSKVPFRSSTGHRVLHVNGQQGHRAGGQKQPATTVGHSFLSYICMFFKGMYMDLPNTLDFCKQPKILSEKKVENGRCRGYPAPCLRQWNCMVKAGFAGDDAPRVVFPSIVGRPRHTGVMVGMGQKDAYVGDEAQSKRGILTLKYPIEHGIASNWDDMEKIWHHTFYNELRVAPEEHPVLLTEAPLNPKAKREKMTQIMFETFNTPAMYVAIQVVLSLYASGRTTGIVLDSGDGVSHTVPIYEGYTLPHAILHLDLAGLRTDGLQSIVGAWYQRVHLFTILRSKVLGGEGLDNHQVANYETITVDELFRKWRGGSKDECFNCGDPDHYIASCPKTKSRAEADKGDHHSGRRKGKQEYTSGEHKSKGTFDKEALKKAYLHKAKIK

SEQ ID NO: 167150 - protein, 346 aa, Zea Mays
MVKAGFAGDDAPRVVFPSIVGRPRHTGVMVGMGQKDAYVGDEAQSKRGILTLKYPIEHGIASNWDDMEKIWHHTFYNELRVAPEEHPVLLTEAPLNPKAKREKMTQIMFETFNTPAMYVAIQVVLSLYASGRTTGIVLDSGDGVSHTVPIYEGYTLPHAILHLDLAGRDLTDCSFALDCVCSKDIIQNLTERFYLLHNYCIALFVEYYLLGDGLLLLLAGLRTDGLQSIVGAWYQRVHLFTILRSKVLGGEGLDNHQVANYETITVDELFRKWRGGSKDECFNCGDPDHYIASCPKTKSRAEADKGDHHSGRRKGKQEYTSGEHKSKGTFDKEALKKAYLHKAKIK

SEQ ID NO: 167151 - protein, 83 aa, Zea Mays
MPPPPHDIAHPLFSLPSLSAVDVRSPGAIACAWLPPSLAPRWTSRLVWGHGSPTDRGSRRLMRSKIHLSGSNRKYLKLQFDVV

SEQ ID NO: 167152 - protein, 75 aa, Zea Mays
MRARNALLHVENEEKLDVVEASQNMNVLRRLGAFMLVNLPKKKGVLRLQMLVVCLRLSVIVNLFLLFSINLCLWS

SEQ ID NO: 167153 - protein, 61 aa, Zea Mays
MEIEKKREEKETEQKKRMSYALGLKPLPSAQRLGVQAVVQRLGSPYRFKKSCMLITVTCSG

SEQ ID NO: 167154 - protein, 66 aa, Zea Mays
MDRLNECQDKGWSSSDRRLTNTNQVLCQASPDNEQSEVPKCVVGDLPEQQPGEGKCPLTYYVLHTL

SEQ ID NO: 167155 - protein, 102 aa, Zea Mays
MPTWPRGRTPSHEQQQGNRDALQGSSTAGSQQGMTERARRSENRAGEHRAGGRAARSSWRASREERPALGHTASAMAEGEEDLARRTSNCGGNTGLGESWQS

SEQ ID NO: 167156 - protein, 510 aa, Zea Mays
MNINKAGKEWSGLHWMIGAQASKPSLHGLHIQLKQNYLNSSMKDRGTRIIIYNLWEDDQGDLELDFDAEIHDIQLRGGNRDEKNIQMANQFPNSKHYLTYRHSLRSYASILYLRLPTYFQMILRGKEIEHHNIVTDMMLKKEVTYRPVAPNGHPKDSNMVADVTIGFVKDAKHHIDVQGFNVYHMNRLIKPFWRVWTAAGSGGRGVIGVLEANFIEPAHDKQDFERTTLLARLEARLVQMQKDYWSGNAHRIGYVAPRFGRNTEAGDGEDSPENTASAQPSPYHSGKGYTHAKDLSNNIKKGGKASTSFGIQQRAEKSARTKRSTKSILHGLSDSDNSDSEFMGTLSRSRSHTLKTNRKLFQNGSTGLITPQSSGLIERERVRTKSQPLDPKATSNGDLHTMDEYQSVIMQLRDENSSLKERLSKMEESMSQELVVECDKNKSLTERVEDLQRQLESATKEQEALIDIFSEERNRRDQEEESLRKKLKDASSTIQDLLEQLNAARKGRKV

SEQ ID NO: 167157 - protein, 730 aa, Zea Mays
MDLSSLLRPPMVKTEAAEEREPLSRTPAAAVAVEGSGRRTATAVIDLSSSDSDSDGEGAVGSGKRVRGVGGDGSATKRARVSAVVDLPPGFLEPIPPPPVPVPLAACATKQFWKAGDYDGKPLGDGVAQQSVSGMDHVRVHPRFLHSNATSHKWALGALAELLDNSLDEVINGATYVNIDVLENDKDIDKKKSRMLLVEDDGGGMDPDKMRQCMSLGYSAKSKVASTIGQYGNGFKTSTMRLGADVLVFSRSPGKSGKRPTQSIGMLSYTFLRSTGKEDIIVPMIDYEYKQGWERMVRTTLDDWSTSFQTIITWSPYSTEAELLEQSYASILYLRLPTYFQMILRGKEIEHHNIVTDMMLKKEVTYRPVAPNGHPKDSNMVADVTIGFVKDAKHHIDVQGFNVYHMNRLIKPFWRVWTAAGSGGRGVIGVLEANFIEPAHDKQDFERTTLLARLEARLVQMQKDYWSGNAHRIGYVAPRFGRNTEAGDGDSPENTASAQPSPYHSGKGYTHAKDLSNNIKKGGKASTSFGIQQRAEKSARTKRSTKSILHGLSDSDNSDSEFMGTLSRSRSHTLKTNRKLFQNGSTGLITPQSSGLIERERVRTKSQPLDPKATSNGDLHTMDEYQSVIMQLRDENSSLKERLSKMEESMSQELVVECDKNKSLTERVEDLQRQLESATKEQEALIDIFSEERNRRDQEEESLRKKLKDASSTIQDLLEQLNAARKGRKV

SEQ ID NO: 167158 - protein, 797 aa, Zea Mays
MDLSSLLRPPMVKTEAAEEREPLSRTPAAAVAVEGSGRRTATAVIDLSSSDSDSDGEGAVGSGKRVRGVGGDGSATKRARVSAVVDLPPGFLEPIPPPPVPVPLAACATKQFWKAGDYDGKPLGDGVAQQSVSGMDHVRVHPRFLHSNATSHKWALGALAELLDNSLDEVINGATYVNIDVLENDKDIDKKKSRMLLVEDDGGGMDPDKMRQCMSLGYSAKSKVASTIGQYGNGFKTSTMRLGADVLVFSRSPGKSGKRPTQSIGMLSYTFLRSTGKEDIIVPMIDYEYKQGWERMVRTTLDDWSTSFQTIITWSPYSTEAELLEQFSSMKDRGTRIIIYNLWEDDQGDLELDFDAEIHDIQLRGGNRDEKNIQMANQFPNSKHYLTYRHSLRSYASILYLRLPTYFQMILRGKEIEHHNIVTDMMLKKEVTYRPVAPNGHPKDSNMVADVTIGFVKDAKHHIDVQGFNVYHMNRLIKPFWRVWTAAGSGGRGVIGVLEANFIEPAHDKQDFERTTLLARLEARLVQMQKDYWSGNAHRIGYVAPRFGRNTEAGDGDSPENTASAQPSPYHSGKGYTHAKDLSNNIKKGGKASTSFGIQQRAEKSARTKRSTKSILHGLSDSDNSDSEFMGTLSRSRSHTLKTNRKLFQNGSTGLITPQSSGLIERERVRTKSQPLDPKATSNGDLHTMDEYQSVIMQLRDENSSLKERLSKMEESMSQELVVECDKNKSLTERVEDLQRQLESATKEQEALIDIFSEERNRRDQEEESLRKKLKDASSTIQDLLEQLNAARKGRKV

SEQ ID NO: 167159 - protein, 191 aa, Zea Mays
MAGASLLSPSCTLLRLIPSASHFKRFDRVRRFAPAAMATSSGPKEAPANNPGLQTEVDPATKGYFLQQTMLRVKDPKVSLDFYSRVMGMSLLKRLDFEEMKFSLYFLGYEDVTLAPDDHIKRTEWTFRQKATLELTHNWGTENDPEFKGYHNGNSDPRGFGHIGVTVDDVHKACERFERLGVEFVKKPDDG

SEQ ID NO: 167160 - protein, 226 aa, Zea Mays
MAGASLLSPSCTLLRLIPSASHFKRFDRVRRFAPAAMATSSGPKEAPANNPGLQTEVDPATKGYFLQQTMLRVKDPKVSLDFYSRVMGMSNQQAALPKAHIEDQWSSDDNETKWMIHQHQCVLLLKRLDFEEMKFSLYFLGYEDVTLAPDDHIKRTEWTFRQKATLELTHNWGTENDPEFKGYHNGNSDPRGFGHIGVTVDDVHKACERFERLGVEFVKKPDDDLQ

SEQ ID NO: 167161 - protein, 224 aa, Zea Mays
MAGASLLSPSCTLLRLIPSASHFKRFDRVRRFAPAAMATSSGPKEAPANNPGLQTEVDPATKGYFLQQTMLRVKDPKVSLDFYSRVMGMSNQQAALPKAHIEDQWSSDDNETKWMIHQHQCVLLLKRLDFEEMKFSLYFLGYEDVTLAPDDHIKRTEWTFRQKATLELTHNWGTENDPEFKGYHNGNSDPRGFGHIGVTVDDVHKACERFERLGVEFVKKPDDG

SEQ ID NO: 167162 - protein, 123 aa, Zea Mays
MKFSLYFLGYEDVTLAPDDHIKRTEWTFRQKATLELTHNWGTENDPEFKGYHNGNSDPRGFGHIGVTVDDVHKACERFERLGVEFVKKPDDGKIKGIAFIKDPDGYWIEIFDQTIGTVTSSAS

SEQ ID NO: 167163 - protein, 1057 aa, Zea Mays
MEKLSKILKDTSVASDLQAAGLKVISCIVQRDEARMPMRHTFLWLDDKSCYEEEQILRHVEPPLSTLLELDKLKVKGYNEMKYTPSRDRQWHIYTLRNTENPKMLHRVFFRTIVRQPNAGNKFTSAQISDAEVGCPEESLSFTSNSILRSLMTAIEELELHAIRTGHSHMYLCILKEQKLLDLIPFSGSTIVDVGQDEATACSLLKSMALKIHELVGARMHHLSVCQWEVKLKLDCDGPASGTWRVVTTNVTGHTCTIDIYREVEEIESQKLVYHSATSSAGPLHGVALNNPYQPLSVIDLKRCSARNNRTTYCYDFPLAFETALQKSWQSNGSTVSEGNENSKSYVKATELVFAEKHGSWGTPIIPMERPAGLNDIGMVAWIMEMSTPEFPNGRQIIVVANDITFRAGSFGPREDAFFETVTNLACERKLPLIYLAANSGARIGIADEVKSCFRVGWSDEGSPERGFQYIYLTEEDYARISSSVIAHKLELDSGEIRWIIDSVVGKEDGLGVENIHGSAAIASAYSRAYEETFTLTFVTGRTVGIGAYLARLGIRCIQRLDQPIILTGFSALNKLLGREVYSSHMQLGGPKIMATNGVVHLTVPDDLEGVSNILRWLSYVPANIGGPLPITKPLDPPDRPVAYIPENTCDPRAAICGVDDSQGKWLGGMFDKDSFVETFEGWAKTVVTGRAKLGGIPVGVIAVETQTMMQIIPADPGQLDSHERSVPRAGQVWFPDSATKTAQALLDFNREGLPLFILANWRGFSGGQRDLFEGILQAGSTIVENLRTYNQPAFVYIPMAGELRGGAWVVVDSKINPDRIECYAERTAKGNVLEPQGLIEIKFRSEELQDCMGRLDPELINLKAKLQDVNHGNGSLPDIEGIRKSIEARTKQLLPLYTQIAIRFAELHDTSLRMAAKGVIKKVVDWEESRSFFYKRLRRRIAEDVLAKEIRQIVGDKFTHQLAMELIKEWYLASQATTGSTGWDDDDAFVAWKDSPENYKGHIQKLRAQKVSHSLSDLADSSSDLQAFSQGLSTLLDKMDPSQRAKFVQEVKKVLD

SEQ ID NO: 167164 - protein, 823 aa, Zea Mays
MVVMRAILATNIEEAKKDILQYHMISRQKKNIYFDGWDGFGASAVLNSIANELSSQKMDAPHELRFDKVLYIDCSEWKSRREMQRAIAEELKLDHGTMAMFDNQDEEDDYDGKDKESRDVIRSIAMDIYRRLADCKFMMIFLNGSDNEIDVTRFGIPHITEFGKNTIIWTFKRKLLTINSRHDEIAEKLRYSHLFLYGSIVAGPNLVSEQDFCALVHGEATTIVARHQCMLDMDATMVTECCLFELSLHYNFHNITRLGWDAHSSNYWICAGIIAGNKKMEIANALHGEIRWECDAPLLQRLLEELSPTFSVKKITKPLVVSMRCLVKDRHWISITSQEHGLDGVQDIPAGASAVFLAFQRTGQLEPYARSGHPTSLEGQYSPPILPPGIFKYSRSIAVLVLSYCAFSFASPPFLMCNSLRFLGLDKCKHKPSEQYCDTDAEWTFLLSLWVLEIRYTEWDEILSKEKIDLMSNLKELNIEGVWSWQCINQLRKLIPHLYRLRITNARIYQAETVDVDDSFMDKGKLQLLDLSGNREMKVVPGSLSKASSLEVLLLDGCLGLEYVGALPPSLNSFSLDGYGVASHWTPSINNLLPPENLRPASIDVRDAKISRICLEGCTGLENLFLRGLPNLVELDLSGTGIKILDFTTMVIQVPCLKRLFLLGCERLVAIILEEKWPYDIDTQLELLCIDTRAETGYSRPCIDHTKKSFKLQIHAILSDSRLARSLFSIIDYHICNNIVDIYFNILVTDVPTVYSGEDVQPEAAHRVVALAQYGDVPATAGDVPMQDFPPAPTRDLDRHVGIAKAMPCGEVPQVGYCLSKNR

SEQ ID NO: 167165 - protein, 966 aa, Zea Mays
MTPPVSEPTNPPQLKDPVVVDVSVTASKSNDDAQDDVSLVGLGGTGSSTSATDKNRLLQVADPPAPMKTSGGVDVSMSRMNDDQGDVLGLNAFMAKKRLLSTHAASLAADADAEEEAKAAARKKTRLGWGQGLAKYENRYNKKDYENTHKFLAHDGATREAASSHGSCTPPPGRSKGRHGKNKSLDMAEMRVSRATTASAFSKWSSPLTGDLNDSGKNGSIGSLTGKVVFPSEVSGSCGKHSPTPAAVGSSSPGGSSLVITEKVLCSAAVVPSSPQGRSTASLPPGDRGSIDSKNLTDKAAVDNSDPCISSSSMMTVMAVVPDQLTSSQRCDPPTEDTSDPYISSSSMTAIVVSKLGSSTGCDAPLGESSTELTNAQDIPQKVISEGKHNNEAVCITKSWSKMKENVPQSVLIANLGDQGNCVVSGSCGQDTLKLITSLDESCAKVANGTINGAEIRSGAKTPELGSSMKGCNDGGKNHSWKAPEKKVANSNIDDGRKAPSDMKTLNSKGKPCIDFHAAFVQHMMQLDEETDTDSEKTEDMFIGREGNNHLSCEVNSKKRIEGNDLNAYMENPTKGSSFCIATNNGAVVRHNLMQRPRASGALYTYSRAKECNGINLCRNVTCQKGKGVIQRPEVVNDLNAAPMQISDGAPKTNQHLPSSSGGAALDIVYGNSSYTAMDIDLNVPLDVTPQDLENSHAEASSMGPSDPHQATHNVPQTTQPQTANQPAASIMLFGRVIYEALSTGTANRTPNLQGNQAVVPSRNMPSTTTNIWRGGQAYASWATTTSLWRGNSVSNNQQGRQQQAVLSNYRMPPYGGSTAANGAAAAAVAAAALLQPGSSAALVNLLNQHRQQGLVNTTSPYSIMRGGVPVPSHLIAGSSSNNGSNSVQQQQWPIIPILDTSRLVFGYPFYYPAATANQAPPATATAMPTTGTNNGEGASTSSNRAPSTAAERGRGWNSWLSLRRN

SEQ ID NO: 167166 - protein, 684 aa, Zea Mays
MVSAIHHNNYNTEFACSYVGFQNNDARGIDDRPNMNNLTETIIVPKMSVVPRKEDTSDPYISSSSMTAIVVSKLGSSTGCDAPLGESSTELTNAQDIPQKVISEGKHNNEAVCITKSWSKMKENVPQSVLIANLGDQGNCVVSGSCGQDTLKLITSLDESCAKVANGTINGAEIRSGAKTPELGSSMKGCNDGGKNHSWKAPEKKVANSNIDDGRKAPSDMKTLNSKGKPCIDFHAAFVQHMMQLDEETDTDSEKTEDMFIGREGNNHLSCEVNSKKRIEGNDLNAYMENPTKGSSFCIATNNGAVVRHNLMQRPRASGALYTYSRAKECNGINLCRNVTCQKGKGVIQRPEVVNDLNAAPMQISDGAPKTNQHLPSSSGGAALDIVYGNSSYTAMDIDLNVPLDVTPQDLENSHAEASSMGPSDPHQATHNVPQTTQPQTANQPAASIMLFGRVIYEALSTGTANRTPNLQGNQAVVPSRNMPSTTTNIWRGGQAYASWATTTSLWRGNSVSNNQQGRQQQAVLSNYRMPPYGGSTAANGAAAAAVAAAALLQPGSSAALVNLLNQHRQQGLVNTTSPYSIMRGGVPVPSHLIAGSSSNNGSNSVQQQQWPIIPILDTSRLVFGYPFYYPAATANQAPPATATAMPTTGTNNGEGASTSSNRAPSTAAERGRGWNSWLSLRRN

SEQ ID NO: 167167 - protein, 414 aa, Zea Mays
MPPSSLHYALVTVGTPGQTFMVALDTGSDLFWLPCQCDGCTPPATAASGSATFYIPGMSSTSKAVPCNSNFCDLQKECSTALQCPYKMVYVSAGTSSSGFLVEDVLYLSTENAHPQILKAQIMLGCGQTQTGSFLDAAAPNGLFGLGIDEVSVPSILAQKGLTSNSFSMCFGRDGIGRISFGDQESSDQEETPLDINRQHPTYAITISGITVGNKPTDMDFITIFDTGTSFTYLADPAYTYITQSFHAQVQANRHAADSRIPFEYCYDLSEARFPIPDIILRTVTGSMFPVIDPGQVISIQEHEYVYCLAIVKSMKLNIIGQNFMTGLRVVFDRERKILGWKKFNCYDTDSSNPLSINSRNSSGFSPSTSENYSPQEARNPAGVSQLRPLNNSAPAALYDSLLLMLILVHLAVN

SEQ ID NO: 167168 - protein, 396 aa, Zea Mays
MPPSSLHYALVTVGTPGQTFMVALDTGSDLFWLPCQCDGCTPPATAASGSATFYIPGMSSTSKAVPCNSNFCDLQKECSTALQCPYKMVYVSAGTSSSGFLVEDVLYLSTENAHPQILKAQIMLGCGQTQTGSFLDAAAPNGLFGLGIDEVSVPSILAQKGLTSNSFSMCFGRDGIGRISFGDQESSDQEETPLDINRQHPTYAITISGITVGNKPTDMDFITIFDTGTSFTYLADPAYTYITQSFHAQVQANRHAADSRIPFEYCYDLSEARFPIPDIILRTVTGSMFPVIDPGQVISIQEHEYVYCLAIVKSMKLNIIGQNFMTGLRVVFDRERKILGWKKFNCFSPSTSENYSPQEARNPAGVSQLRPLNNSAPAALYDSLLLMLILVHLAVN

SEQ ID NO: 167169 - protein, 319 aa, Zea Mays
MRSLRAAQTLVSRSLFSARHLSGAASPATAAAAGARWCAAPAPPPRSPLPSSRVMPAGVAGAVSFSLTFATVAAAEAKAKERPQPDLLPQNVVLYQYQACPFCNKVRDYHDIPYKVVEVNPLSKKELKWSDYKKVPILTVDGEQLVDSSDIINILQSRINPNEELTSDEEAKWRRWVDEHLVHVLSPNIYRTTSEALESFDYIAKHGNFSFTERFAVKYAGAAAMYMVSKKLKKKYNITDERASLYDAANTWIDALNGRDFLGGSKPNLADLAVFGVLRPIRYLRAGKDMVENTEIGDWYRRMEDAVGEPSRIQDAEGN

SEQ ID NO: 167170 - protein, 216 aa, Zea Mays
MRSLRAAQTLVSRSLFSARHLSGAASPATAAAAGARWCAAPAPPPRSPLPSSRVMPAGVAGAVSFSLTFATVAAAEAKAKERPQPDLLPQNVVLYQYQACPFCNKVRAFLDYHDIPYKVVEVNPLSKKELKWSDYKKVPILTVDGEQLVDSSDIINILQSRINPNEELTSDEEAKWRRWVDEHLVHVLSPNIYRTTSEALESFDYIAKHVLQRGLP

SEQ ID NO: 167171 - protein, 107 aa, Zea Mays
MRSLRAAQTLVSRSLFSARHLSGAASPATAAAAGARWCAAPAPPPRSPLPSSRVMPAGVAGAVSFSLTFATVAAAEAKAKERPQPDLLPQNVVLYQYQACPFCNKPF

SEQ ID NO: 167172 - protein, 50 aa, Zea Mays
MTFGESFRHRSRWPSMSWQHQLLAWSYGAGRSAAGVPRAVVTSHRRLALP

SEQ ID NO: 167173 - protein, 104 aa, Zea Mays
MRDAWPNARVRKNVSLIHTYHGFKGEKQGALEFLKLIFRALCLCWDRQTQDLHIDWILFRGRPLVPALCEVINDNIDGVYPSSHFPIFAEFLLPRSVRLAETPS

SEQ ID NO: 167174 - protein, 113 aa, Zea Mays
MQNRMKLTKQSALMTLSLYVSGSDACFSSKSPTIVFPCSLPAAAAARCSSISRCAHSLRALDSLIARLFTPPMSTSASTGTKSCRFDAPCIAKYSRTMARNRSASSDATEPSP

SEQ ID NO: 167175 - protein, 205 aa, Zea Mays
MLLWSYFSVVLTDPGSVPPNWNLDFDAERGETAPLTSSEFSSQMNSQQSVALGNTANPRARYCRKCNQLKPPRCHHCSVCGRCVLKMDHHCVWVVNCVGALNYKYFLLFLFYTFLETTLVTLSLLPHFIAFFSDIEIPGSPAALATTFLTFVLNLAFSLSVFGFMIMHISLVSANTTTIEAYEKKTTPHWIYDLGRKRNFAQKRI

SEQ ID NO: 167176 - protein, 313 aa, Zea Mays
MSPDATRNLSQQCLNALAKVIPGFLGGSSDLATSNMTLLKKFGDFQRDTPEERNIRFGVREHAMGAISNGIAVHSPGLIPYCATFFVFTDYMRASIRLSALSESGVIFVMTHDSVGLGEDGPTHQPVEHLFSLRAMPNILMLRPADGNETSGAYKIAVLNRKRPSVIALSRQKLPQLRGTSVDAVSKGGYIVSDDSSGNKPDFILIGTGSELEIAENAAGELRKKGRTVRVVSLVCWELFEEQPEEYKESVLPSEVTSRISIEAGVTFGWEKYIGQKGKAIGIDRFGASAPAGKIYKELGLTVEHVIAAAEAL

SEQ ID NO: 167177 - protein, 390 aa, Zea Mays
MEHDAHAEAPPHAVPPPEVATVDDWARDDAEPMSVESGVAAAELTAADSGADAPLAPAPSAAVAAEGVKEIQSSLQSLELKTNVATQEGAHVVEDDVDETKRHLNVVFIGHVDAGKSTTGGQILFLSGQVDDRTIQKYEKEAKDKSRESWYMAYIMDTNEEERVKGKTVEVGRAHFETEHTRFTILDAPGHKSYVPNMISGASQADIGVLVISARKGEFETGYERGGQTREHVLLAKTLGVAKLVVVINKMDEPTVKWSKERYDEIEAKMVPFLKSSGYNVKKDVQFLPISGLVGTNMKTRMDKSICSWWDGPCLFEVLDRIEIPLRDPKGPVRMPIIDKYKDMGTVVMGKIEAGTIREGDSLLIMPNKYVVLDLLRMFVSNCPELRRRM

SEQ ID NO: 167178 - protein, 209 aa, Zea Mays
MSSGFFGRRRVPNLLWTDRWLHGQALRDLAPILVSRVPNRFLHSRTVKDALTENGWVNDISGSISAQFLSEYFMVWDLIQGFQLHPGVSDQHRWTPSASGEYSSKSAYHRFFEGMVTFEPAARVWKSWAPPRCKFFIWLASLNRCWTADRLARRGLDHPTKCLLCDQKEETMQLIMLQCVFARDVWFHTLSLIGLQHLTPGTVESSFQD

SEQ ID NO: 167179 - protein, 103 aa, Zea Mays
MMINFPRKETHQLFSTQTLSPNATYKVIKILKHKERDNAPGLAWNNTRLVLLDVDHLATILCLVTRSVCPSSGSSISFTMRSSPPVTSSWGRLSSGPPRHVVN

SEQ ID NO: 167180 - protein, 93 aa, Zea Mays
MQQLSGTQLLSPNASNKVIKILKQQGGGKCTGACLDNTTLVFVRRRSLDDHPLSWHLFRLSIFRLIHQHHLVEKLTLNIILWLTQLWFSTSCV

SEQ ID NO: 167181 - protein, 144 aa, Zea Mays
MAMRAAARQAILSPPLGPRSPRPFLCGCSLSIAPRLEPCRAASSTTAPAAGKHLPPLFSVAPMMDWTDNHYRTLARLISRHAWLYTEMVVAETIVHQKDNLDRFLAFPEEQHPIVLQIGGSNLENLAKATELANDYSYDEINLK

SEQ ID NO: 167182 - protein, 253 aa, Zea Mays
MSTIAANCDVPVSVKCRIGVDDRDSYEELCEFVDKVISKSPTRHFIIHARKALLSGLSPAENRKIPPLKYEYYFALLRDFPEIKFTLNGGITNVSQVSASMRQGAHGVMVGRAAYNNPWNMLGHVDGEIYGKQTRYISRRQILENYQAYGDSIIDQYGPSRPNVRQLVKPLLNLFHSEPGNSLWKRKADSALRHCKTVKTFLEETLDAISDSVLDKPVNREPSSDEEYFASVDSLLPPKYTTPMHERLVAAST

SEQ ID NO: 167183 - protein, 347 aa, Zea Mays
MAMRAAARQAILSPPLGPRSPRPFLCGCSLSIAPRLEPCRAASSTTAPAAGKHLPPLFSVAPMMDWTDNHYRTLARLISRHAWLYTEMVVAETIVHQKDNLDRFLAFPEEQHPIVLQIGGSNLENLAKATELANDYSYDEINLNCGCPSGKVAGHGCFGARLMFDPEFVGDAMSTIAANCDVPVSVKCRIGVDDRDSYEELCEFVDKVISKSPTRHFIIHARKALLSGLSPAENRKIPPLKYEYYFALLRDFPEIKFTLNGGITNVSQVSASMRQGAHGVMVGRAAYNNPWNMLGHVDGEIYGKQTRYISRRQILENYQAYGDSIIDQYGPSRPNVRQLVKVGATFW

SEQ ID NO: 167184 - protein, 343 aa, Zea Mays
MPGFILRWSSPRPSCIRRITWFLAFPEEQHPIVLQIGGSNLENLAKATELANDYSYDEINLNCGCPSGKVAGHGCFGARLMFDPEFVGDAMSTIAANCDVPVSVKCRIGVDDRDSYEELCEFVDKVISKSPTRHFIIHARKALLSGLSPAENRKIPPLKYEYYFALLRDFPEIKFTLNGGITNVSQVSASMRQGAHGVMVGRAAYNNPWNMLGHVDGEIYGKQTRYISRRQILENYQAYGDSIIDQYGPSRPNVRQLVKPLLNLFHSEPGNSLWKRKADSALRHCKTVKTFLEETLDAISDSVLDKPVNREPSSDEEYFASVDSLLPPKYTTPMHERLVAAST

SEQ ID NO: 167185 - protein, 525 aa, Zea Mays
MRNNSRLQQLGIPALVSMCGNINSISRNKKPNNRDNEDSESEYDPSHDDSIEGDLFDHDDHNKKGSKDTNRRTIHMAPGGIKPRTKRVYAEQHTTRNTRSKKSIAQPDTSLTRSDIYVPPPSLSHLTQVGEVARSIENHRKTSVEANGPTQVDNTHMANREDGFDQFDDNMTNQGEGITQPGGKGVNQHRERGLNMGLGLQRMNRARRGKLPIVITEGRIRPVAPIVAAKFATECNIAVRNHVLVLKSWKEYEKHPGLFKLFTAKLSAKFDINTEDALVKNACFQMMRNALRQQRYKLKKQYFDPFPLHLVRKTSPIKSTSDEQWNDLVEHWKGPKNMATCEHNKGNRGKVKFHQTTGSRSYMVHVENLGDKYMDQEPDALDLFKECHYSKKKQGYTSTVQLAITQMEDKRSTPGEGEQPMSTTQVVADVLAENTKKNRFLQNVGIQNARPRSSVQNIEAQLEVERKANAELQSLVSIQRERMDVLLKQVHEAELVRIREQEEMKKKQDAMDAQLELMLSQIQPS

SEQ ID NO: 167186 - protein, 525 aa, Zea Mays
MRNNSRLQQLGIPALVSMCGNINSISRNKKPNNRDNEDSESEYDPSHDDSIEGDLFDHDDHNKKGSKDTNRRTIHMAPGGIKPRTKRVYAEQHTTRNTRSKKSIAQPDTSLTRSDIYVPPPSLSHLTQVGEVARSIENHRKTSVEANGPTQVDNTHMANRDGFDQFDDNMTNQGEGITQPGGKGDVNQHRERGLNMGLGLQRMNRARRGKLPIVITEGRIRPVAPIVAAKFATECNIAVRNHVLVLKSWKEYEKHPGLFKLFTAKLSAKFDINTEDALVKNACFQMMRNALRQQRYKLKKQYFDPFPLHLVRKTSPIKSTSDEQWNDLVEHWKGPKNMATCEHNKGNRGKVKFHQTTGSRSYMVHVENLGDKYMDQEPDALDLFKECHYSKKKQGYTSTVQLAITQMEDKRSTPGEGEQPMSTTQVVADVLAENTKKNRFLQNVGIQNARPRSSVQNIEAQLEVERKANAELQSLVSIQRERMDVLLKQVHEAELVRIREQEEMKKKQDAMDAQLELMLSQIQPS

SEQ ID NO: 167187 - protein, 444 aa, Zea Mays
MKILNLSMILHMTILLKGICLTMMIIIRRAQRTLTEELFTWLLVESSLELREFMQSNILLEIQANGPTQVDNTHMANREDGFDQFDDNMTNQGEGITQPGGKGDVNQHRERGLNMGLGLQRMNRARRGKLPIVITEGRIRPVAPIVAAKFATECNIAVRNHVLVLKSWKEYEKHPGLFKLFTAKLSAKFDINTEDALVKNACFQMMRNALRQQRYKLKKQYFDPFPLHLVRKTSPIKSTSDEQWNDLVEHWKGPKNMATCEHNKGNRGKVKFHQTTGSRSYMVHVENLGDKYMDQEPDALDLFKECHYSKKKQGYTSTVQLAITQMEDKRSTPGEGEQPMSTTQVVADVLAENTKKNRFLQNVGIQNARPRSSVQNIEAQLEVERKANAELQSLVSIQRERMDVLLKQVHEAELVRIREQEEMKKKQDAMDAQLELMLSQIQPS

SEQ ID NO: 167188 - protein, 401 aa, Zea Mays
MRNNSRLQQLGIPALVSMCGNINSISRNKKPNNRDNEDSESEYDPSHDDSIEGDLFDHDDHNKGSKDTNRRTIHMAPGGIKPRTKRVYAEQHTTRNTRSKKSIAQPDTSLTRSDIYVPPPSLSHLTQVGEVARSIENHRKTSVEANGPTQVDNTHMANREDGFDQFDDNMTNQGEGITQPGGKGVNQHRERGLNMGLGLQRMNRARRGKLPIVITEGRIRPVAPIVAAKFATECNIAVRNHVLVLKSWKEYEKHPGLFKLFTAKLSAKFDINTEDALVKNACFQMMRNALRQQRYKLKKQYFDPFPLHLVRKTSPIKSTSDEQWNDLVEHWKGPKNMATCEHNKGNRGKVKFHQTTGSRSYMVHVENLGDKYMDQEPDALDLFKECHYNSNGRQAIYTRRR

SEQ ID NO: 167189 - protein, 253 aa, Zea Mays
MIIFDPCLMHLTYCNFYVNLKLGVNQHRERGLNMGLGLQRMNRARRGKLPIVITEGRIRPVAPIVAAKFATECNIAVRNHVLVLKSWKEYEKHPGLFKLFTAKLSAKFDINTEDALVKNACFQMMRNALRQQRYKLKKQYFDPFPLHLVRKTSPIKSTSDEQWNDLVEHWKGPKNMATCEHNKGNRGKVKFHQTTGSRSYMVHVENLGDKYMDQEPDALDLFKECHYSKKKLKWKTSDLHQEKVNNQCLRLRL

SEQ ID NO: 167190 - protein, 369 aa, Zea Mays
MANREDGFDQFDDNMTNQGEGITQPGGKGVNQHRERGLNMGLGLQRMNRARRGKLPIVITEGRIRPVAPIVAAKFATECNIAVRNHVLVLKSWKEYEKHPGLFKLFTAKLSAKFDINTEDALVKNACFQMMRNALRQQRYKLKKQYFDPFPLHLVRKTSPIKSTSDEQWNDLVEHWKGPKNMATCEHNKGNRGKVKFHQTTGSRSYMVHVENLGDKYMDQEPDALDLFKECHYSKKKQGYTSTVQLAITQMEDKRSTPGEGEQPMSTTQVVADVLAENTKKNRFLQNVGIQNARPRSSVQNIEAQLEVERKANAELQSLVSIQRERMDVLLKQVHEAELVRIREQEEMKKKQDAMDAQLELMLSQIQPS

SEQ ID NO: 167191 - protein, 526 aa, Zea Mays
MRNNSRLQQLGIPALVSMCGNINSISRNKKPNNRDNEDSESEYDPSHDDSIEGDLFDHDDHNKKGSKDTNRRTIHMAPGGIKPRTKRVYAEQHTTRNTRSKKSIAQPDTSLTRSDIYVPPPSLSHLTQVGEVARSIENHRKTSVEANGPTQVDNTHMANREDGFDQFDDNMTNQGEGITQPGGKGDVNQHRERGLNMGLGLQRMNRARRGKLPIVITEGRIRPVAPIVAAKFATECNIAVRNHVLVLKSWKEYEKHPGLFKLFTAKLSAKFDINTEDALVKNACFQMMRNALRQQRYKLKKQYFDPFPLHLVRKTSPIKSTSDEQWNDLVEHWKGPKNMATCEHNKGNRGKVKFHQTTGSRSYMVHVENLGDKYMDQEPDALDLFKECHYSKKKQGYTSTVQLAITQMEDKRSTPGEGEQPMSTTQVVADVLAENTKKNRFLQNVGIQNARPRSSVQNIEAQLEVERKANAELQSLVSIQRERMDVLLKQVHEAELVRIREQEEMKKKQDAMDAQLELMLSQIQPS

SEQ ID NO: 167192 - protein, 444 aa, Zea Mays
MKILNLSMILHMTILLKGICLTMMIIIRAQRTLTEELFTWLLVESSLELREFMQSNILLEIQANGPTQVDNTHMANREDGFDQFDDNMTNQGEGITQPGGKGDGVNQHRERGLNMGLGLQRMNRARRGKLPIVITEGRIRPVAPIVAAKFATECNIAVRNHVLVLKSWKEYEKHPGLFKLFTAKLSAKFDINTEDALVKNACFQMMRNALRQQRYKLKKQYFDPFPLHLVRKTSPIKSTSDEQWNDLVEHWKGPKNMATCEHNKGNRGKVKFHQTTGSRSYMVHVENLGDKYMDQEPDALDLFKECHYSKKKQGYTSTVQLAITQMEDKRSTPGEGEQPMSTTQVVADVLAENTKKNRFLQNVGIQNARPRSSVQNIEAQLEVERKANAELQSLVSIQRERMDVLLKQVHEAELVRIREQEEMKKKQDAMDAQLELMLSQIQPS

SEQ ID NO: 167193 - protein, 525 aa, Zea Mays
MRNNSRLQQLGIPALVSMCGNINSISRNKKPNNRDNEDSESEYDPSHDDSIEGDLFDHDDHNKGSKDTNRRTIHMAPGGIKPRTKRVYAEQHTTRNTRSKKSIAQPDTSLTRSDIYVPPPSLSHLTQVGEVARSIENHRKTSVEANGPTQVDNTHMANREDGFDQFDDNMTNQGEGITQPGGKGDVNQHRERGLNMGLGLQRMNRARRGKLPIVITEGRIRPVAPIVAAKFATECNIAVRNHVLVLKSWKEYEKHPGLFKLFTAKLSAKFDINTEDALVKNACFQMMRNALRQQRYKLKKQYFDPFPLHLVRKTSPIKSTSDEQWNDLVEHWKGPKNMATCEHNKGNRGKVKFHQTTGSRSYMVHVENLGDKYMDQEPDALDLFKECHYSKKKQGYTSTVQLAITQMEDKRSTPGEGEQPMSTTQVVADVLAENTKKNRFLQNVGIQNARPRSSVQNIEAQLEVERKANAELQSLVSIQRERMDVLLKQVHEAELVRIREQEEMKKKQDAMDAQLELMLSQIQPS

SEQ ID NO: 167194 - protein, 445 aa, Zea Mays
MKILNLSMILHMTILLKGICLTMMIIIRRAQRTLTEELFTWLLVESSLELREFMQSNILLEIQANGPTQVDNTHMANREDGFDQFDDNMTNQGEGITQPGGKGDGVNQHRERGLNMGLGLQRMNRARRGKLPIVITEGRIRPVAPIVAAKFATECNIAVRNHVLVLKSWKEYEKHPGLFKLFTAKLSAKFDINTEDALVKNACFQMMRNALRQQRYKLKKQYFDPFPLHLVRKTSPIKSTSDEQWNDLVEHWKGPKNMATCEHNKGNRGKVKFHQTTGSRSYMVHVENLGDKYMDQEPDALDLFKECHYSKKKQGYTSTVQLAITQMEDKRSTPGEGEQPMSTTQVVADVLAENTKKNRFLQNVGIQNARPRSSVQNIEAQLEVERKANAELQSLVSIQRERMDVLLKQVHEAELVRIREQEEMKKKQDAMDAQLELMLSQIQPS

SEQ ID NO: 167195 - protein, 526 aa, Zea Mays
MRNNSRLQQLGIPALVSMCGNINSISRNKKPNNRDNEDSESEYDPSHDDSIEGDLFDHDDHNKKGSKDTNRRTIHMAPGGIKPRTKRVYAEQHTTRNTRSKKSIAQPDTSLTRSDIYVPPPSLSHLTQVGEVARSIENHRKTSVEANGPTQVDNTHMANRDGFDQFDDNMTNQGEGITQPGGKGDGVNQHRERGLNMGLGLQRMNRARRGKLPIVITEGRIRPVAPIVAAKFATECNIAVRNHVLVLKSWKEYEKHPGLFKLFTAKLSAKFDINTEDALVKNACFQMMRNALRQQRYKLKKQYFDPFPLHLVRKTSPIKSTSDEQWNDLVEHWKGPKNMATCEHNKGNRGKVKFHQTTGSRSYMVHVENLGDKYMDQEPDALDLFKECHYSKKKQGYTSTVQLAITQMEDKRSTPGEGEQPMSTTQVVADVLAENTKKNRFLQNVGIQNARPRSSVQNIEAQLEVERKANAELQSLVSIQRERMDVLLKQVHEAELVRIREQEEMKKKQDAMDAQLELMLSQIQPS

SEQ ID NO: 167196 - protein, 240 aa, Zea Mays
MIIFDPCLMHLTYCNFYVNLKLGVNQHRERGLNMGLGLQRMNRARRGKLPIVITEGRIRPVAPIVAAKFATECNIAVRNHVLVLKSWKEYEKHPGLFKLFTAKLSAKFDINTEDALVKNACFQMMRNALRQQRYKLKKQYFDPFPLHLVRKTSPIKSTSDEQWNDLVEHWKGPKNMATCEHNKGNRGKVKFHQTTGSRSYMVHVENLGDKYMDQEPDALDLFKECHYNSNGRQAIYTRRR

SEQ ID NO: 167197 - protein, 441 aa, Zea Mays
MKILNLSMILHMTILLKGICLTMMIIIRAQRTLTEELFTWLLVESSLELREFMQSNILLEIQANGPTQVDNTHMANRDGFDQFDDNMTNQGEGITQPGGKGVNQHRERGLNMGLGLQRMNRARRGKLPIVITEGRIRPVAPIVAAKFATECNIAVRNHVLVLKSWKEYEKHPGLFKLFTAKLSAKFDINTEDALVKNACFQMMRNALRQQRYKLKKQYFDPFPLHLVRKTSPIKSTSDEQWNDLVEHWKGPKNMATCEHNKGNRGKVKFHQTTGSRSYMVHVENLGDKYMDQEPDALDLFKECHYSKKKQGYTSTVQLAITQMEDKRSTPGEGEQPMSTTQVVADVLAENTKKNRFLQNVGIQNARPRSSVQNIEAQLEVERKANAELQSLVSIQRERMDVLLKQVHEAELVRIREQEEMKKKQDAMDAQLELMLSQIQPS

SEQ ID NO: 167198 - protein, 212 aa, Zea Mays
MTNQGEGITQPGGKGVNQHRERGLNMGLGLQRMNRARRGKLPIVITEGRIRPVAPIVAAKFATECNIAVRNHVLVLKSWKEYEKHPGLFKLFTAKLSAKFDINTEDALVKNACFQMMRNALRQQRYKLKKQYFDPFPLHLVRKTSPIKSTSDEQWNDLVEHWKGPKNMATCEHNKGNRGKVKFHQTTGSRSYMVHVENLFHKIILLSSVVNK

SEQ ID NO: 167199 - protein, 332 aa, Zea Mays
MKILNLSMILHMTILLKGICLTMMIIIRAQRTLTEELFTWLLVESSLELREFMQSNILLEIQANGPTQVDNTHMANREDGFDQFDDNMTNQGEGITQPGGKGVNQHRERGLNMGLGLQRMNRARRGKLPIVITEGRIRPVAPIVAAKFATECNIAVRNHVLVLKSWKEYEKHPGLFKLFTAKLSAKFDINTEDALVKNACFQMMRNALRQQRYKLKKQYFDPFPLHLVRKTSPIKSTSDEQWNDLVEHWKGPKNMATCEHNKGNRGKVKFHQTTGSRSYMVHVENLGDKYMDQEPDALDLFKECHYSKKKLKWKTSDLHQEKVNNQCLRLRL

SEQ ID NO: 167200 - protein, 443 aa, Zea Mays
MKILNLSMILHMTILLKGICLTMMIIIRRAQRTLTEELFTWLLVESSLELREFMQSNILLEIQANGPTQVDNTHMANRDGFDQFDDNMTNQGEGITQPGGKGDVNQHRERGLNMGLGLQRMNRARRGKLPIVITEGRIRPVAPIVAAKFATECNIAVRNHVLVLKSWKEYEKHPGLFKLFTAKLSAKFDINTEDALVKNACFQMMRNALRQQRYKLKKQYFDPFPLHLVRKTSPIKSTSDEQWNDLVEHWKGPKNMATCEHNKGNRGKVKFHQTTGSRSYMVHVENLGDKYMDQEPDALDLFKECHYSKKKQGYTSTVQLAITQMEDKRSTPGEGEQPMSTTQVVADVLAENTKKNRFLQNVGIQNARPRSSVQNIEAQLEVERKANAELQSLVSIQRERMDVLLKQVHEAELVRIREQEEMKKKQDAMDAQLELMLSQIQPS

SEQ ID NO: 167201 - protein, 401 aa, Zea Mays
MRNNSRLQQLGIPALVSMCGNINSISRNKKPNNRDNEDSESEYDPSHDDSIEGDLFDHDDHNKGSKDTNRRTIHMAPGGIKPRTKRVYAEQHTTRNTRSKKSIAQPDTSLTRSDIYVPPPSLSHLTQVGEVARSIENHRKTSVEANGPTQVDNTHMANRDGFDQFDDNMTNQGEGITQPGGKGDVNQHRERGLNMGLGLQRMNRARRGKLPIVITEGRIRPVAPIVAAKFATECNIAVRNHVLVLKSWKEYEKHPGLFKLFTAKLSAKFDINTEDALVKNACFQMMRNALRQQRYKLKKQYFDPFPLHLVRKTSPIKSTSDEQWNDLVEHWKGPKNMATCEHNKGNRGKVKFHQTTGSRSYMVHVENLGDKYMDQEPDALDLFKECHYNSNGRQAIYTRRR

SEQ ID NO: 167202 - protein, 443 aa, Zea Mays
MKILNLSMILHMTILLKGICLTMMIIIRAQRTLTEELFTWLLVESSLELREFMQSNILLEIQANGPTQVDNTHMANRDGFDQFDDNMTNQGEGITQPGGKGDGVNQHRERGLNMGLGLQRMNRARRGKLPIVITEGRIRPVAPIVAAKFATECNIAVRNHVLVLKSWKEYEKHPGLFKLFTAKLSAKFDINTEDALVKNACFQMMRNALRQQRYKLKKQYFDPFPLHLVRKTSPIKSTSDEQWNDLVEHWKGPKNMATCEHNKGNRGKVKFHQTTGSRSYMVHVENLGDKYMDQEPDALDLFKECHYSKKKQGYTSTVQLAITQMEDKRSTPGEGEQPMSTTQVVADVLAENTKKNRFLQNVGIQNARPRSSVQNIEAQLEVERKANAELQSLVSIQRERMDVLLKQVHEAELVRIREQEEMKKKQDAMDAQLELMLSQIQPS

SEQ ID NO: 167203 - protein, 330 aa, Zea Mays
MGLGLQRMNRARRGKLPIVITEGRIRPVAPIVAAKFATECNIAVRNHVLVLKSWKEYEKHPGLFKLFTAKLSAKFDINTEDALVKNACFQMMRNALRQQRYKLKKQYFDPFPLHLVRKTSPIKSTSDEQWNDLVEHWKGPKNMATCEHNKGNRGKVKFHQTTGSRSYMVHVENLGDKYMDQEPDALDLFKECHYSKKKQGYTSTVQLAITQMEDKRSTPGEGEQPMSTTQVVADVLAENTKKNRFLQNVGIQNARPRSSVQNIEAQLEVERKANAELQSLVSIQRERMDVLLKQVHEAELVRIREQEEMKKKQDAMDAQLELMLSQIQPS

SEQ ID NO: 167204 - protein, 72 aa, Zea Mays
MLISNTLMFYEQFNVLFTTRAYGRAQYTSVLQMETDSLLGAPYRTSISPPFSRAPRPPPTLSAICPAANAQA

SEQ ID NO: 167205 - protein, 772 aa, Zea Mays
MEPRVPCVDGGGDGLELRAARRHRREGGRIHVLDAQILEPQRQRSNPFRNIFHLLTQREVLPRTKHHAKRIWNNSPKYDPHLIELRFSDADAKLGILSWAESLSLHRWSAKYCPLLPPPRSTIAAAFSPDGKSLASTHGDHTVKIMDCHTGKCVKVLSGHRRTPWVVRYHPLHSDILASGSLDHEVRLWDANTSDCIGSQDFHRPIASIAFHGRGEILAVASGHKLYIWNYNKRDDASVPTIILRTRRSLRAVHFHPHGAPYLLTAEVNNIESADSPLTLARSSGYSNYPSALLVSNTNSRFCPLPESNVTSPCLLWPAYLRDDGILHVLGNASSSTIVQQRSSLVQPSTSDTANLQLEQFATPMDVCPGEPTSFNNISDAVTVPTSNAIEMHGAGGQSNPRLQGSSSISNLERFSARDALQVSSLSSIEPIPSTAGSSGSNSRRAMPLNMLLTGGLDVQMFQRNVGSGQQDHFLFGDSSNWEVPFVQGFLMTQNHTGLHPALVNNNVLEDLSGAGTAGINNSTRESSHMHNFGRPGASSSIPLTSGSSRRPNRHYASRSVPGVGSLLLVGPQIDEAEAHAASLGAGSEITASMLAPGTELPCTVKLRIWRHDINEPCVPLAPEACRLTISHAVLCSEMGAHFSPCGRFLVACVACLLPQTEGGRGSQLPVPYEEAGSSPTRHPLPSHRVIYELRVYSLEEETFGDILASRAIRAAHCLTSIQFSPTSEHILLAYGRRHSSLLRSIVVEGENGIPVYTILESFRYGACESAS

SEQ ID NO: 167206 - protein, 811 aa, Zea Mays
MEPRVPCVDGGGDGLELRAARRHRREGGRIHVLDAQILEPQRQRSNPFRNIFHLLTQREVLPRTKHHAKRIWNNSPKYDPHLIELRFSDADAKLGILSWAESLSLHRWSAKYCPLLPPPRSTIAAAFSPDGKSLASTHGDHTVKIMDCHTGKCVKVLSGHRRTPWVVRYHPLHSDILASGSLDHEVRLWDANTSDCIGSQDFHRPIASIAFHGRGEILAVASGHKLYIWNYNKRDDASVPTIILRTRRSLRAVHFHPHGAPYLLTAEVNNIESADSPLTLARSSGYSNYPSALLVSNTNSRFCPLPESNVTSPCLLWPAYLRDDGILHVLGNASSSTIVQQRSSLVQPSTSDTANLQLEQFATPMDVCPGEPTSFNNISDAVTVPTSNAIEMHGAGGQSNPRLQGSSSISNLERFSARDALQVSSLSSIEPIPSTAGSSGSNSRRAMPLNMLLTGGLDVQMFQRNVGSGQQDHFLFGDSSNWEVPFVQGFLMTQNHTGLHPALVNNNVLEDLSGAGTAGINNSTRESSHMHNFGRPGASSSIPLTSGSSRRPNRHYASRSVPGVGSLLLVGPQIDEAEAHAASLGAGSEITASMLAPGTELPCTVKLRIWRHDINEPCVPLAPEACRLTISHAVLCSEMGAHFSPCGRFLVACVACLLPQTEGGRGSQLPVPYEEAGSSPTRHPLPSHRVIYELRVYSLEEETFGDILASRAIRAAHCLTSIQFSPTSEHILLAYGRRHSSLLRSIVVEGENGIPVYTILEVYRVSDMELVRVLPSAEDEVNVACFHPLPGGGLVYGTKGSSGSFNTMAQT

SEQ ID NO: 167207 - protein, 727 aa, Zea Mays
MEPRVPCVDGGGDGLELRAARRHRREGGRIHVLDAQILEPQRQRSNPFRNIFHLLTQREVLPRTKHHAKRIWNNSPKYDPHLIELRFSDADAKLGILSWAESLSLHRWSAKYCPLLPPPRSTIAAAFSPDGKSLASTHGDHTVKIMDCHTGKCVKVLSGHRRTPWVVRYHPLHSDILASGSLDHEVRLWDANTSDCIGSQDFHRPIASIAFHGRGEILAVASGHKLYIWNYNKRDDASVPTIILRTRRSLRAVHFHPHGAPYLLTAEVNNIESADSPLTLARSSGYSNYPSALLVSNTNSRFCPLPESNVTSPCLLWPAYLRDDGILHVLGNASSSTIVQQRSSLVQPSTSDTANLQLEQFATPMDVCPGEPTSFNNISDAVTVPTSNAIEMHGAGGQSNPRLQGSSSISNLERFSARDALQVSSLSSIEPIPSTAGSSGSNSRRAMPLNMLLTGGLDVQMFQRNVGSGQQDHFLFGDSSNWEVPFVQGFLMTQNHTGASSSIPLTSGSSRRPNRHYASRSVPGVGSLLLVGPQIDEAEAHAASLGAGSEITASMLAPGTELPCTVKLRIWRHDINEPCVPLAPEACRLTISHAVLCSEMGAHFSPCGRFLVACVACLLPQTEGGRGSQLPVPYEEAGSSPTRHPLPSHRVIYELRVYSLEEETFGDILASRAIRAAHCLTSIQFSPTSEHILLAYGRRHSSLLRSIVVEGENGIPVYTILELHDTF

SEQ ID NO: 167208 - protein, 1014 aa, Zea Mays
MEPRVPCVDGGGDGLELRAARRHRREGGRIHVLDAQILEPQRQRSNPFRNIFHLLTQREVLPRTKHHAKRIWNNSPKYDPHLIELRFSDADAKLGILSWAESLSLHRWSAKYCPLLPPPRSTIAAAFSPDGKSLASTHGDHTVKIMDCHTGKCVKVLSGHRRTPWVVRYHPLHSDILASGSLDHEVRLWDANTSDCIGSQDFHRPIASIAFHGRGEILAVASGHKLYIWNYNKRDDASVPTIILRTRRSLRAVHFHPHGAPYLLTAEVNNIESADSPLTLARSSGYSNYPSALLVSNTNSRFCPLPESNVTSPCLLWPAYLRDDGILHVLGNASSSTIVQQRSSLVQPSTSDTANLQLEQFATPMDVCPGEPTSFNNISDAVTVPTSNAIEMHGAGGQSNPRLQGSSSISNLERFSARDALQVSSLSSIEPIPSTAGSSGSNSRRAMPLNMLLTGGLDVQMFQRNVGSGQQDHFLFGDSSNWEVPFVQGFLMTQNHTGLHPALVNNNVLEDLSGAGTAGINNSTRESSHMHNFGRPGASSSIPLTSGSSRRPNRHYASRSVPGVGSLLLVGPQIDEAEAHAASLGAGSEITASMLAPGTELPCTVKLRIWRHDINEPCVPLAPEACRLTISHAVLCSEMGAHFSPCGRFLVACVACLLPQTEGGRGSQLPVPYEEAGSSPTRHPLPSHRVIYELRVYSLEEETFGDILASRAIRAAHCLTSIQFSPTSEHILLAYGRRHSSLLRSIVVEGENGIPVYTILEVYRVSDMELVRVLPSAEDEVNVACFHPLPGGGLVYGTKEGKLRILQHNGANMINMGSGCFIEENMVEVWHWRARSVCCLPHLRRQRHVSYPPPSVAFALLGGIGAPARSAAFPTFGDNDMSAWSTLVSHLGPCTLLLLSTPPFVALSFLDVSASPACDFFFSAFPGGMTLLIQRLTSMKDFSAGFICVIRPRENIRSISNYIRTDNSQWALSSALGTGLCRGGRRCKSTWPPSWLPSRCFFLLYTSPILTSGR

SEQ ID NO: 167209 - protein, 131 aa, Zea Mays
MAYCAFAPSAPPQYSELKMTLYTNKEVYRSGPDQNGVTITERSNMGTTWVFSWPVADGPTPDANIVGQLQGTSVQVANTPVVVYHYSLGLVFEDKRKKAYSRHFSLSFNIPRARDDVYLIFQERSLLMYIH

SEQ ID NO: 167210 - protein, 140 aa, Zea Mays
MVRLLGLRSLSFGPKDSPREIPSTADVAPPVGSSAWHVRFFNSAFFCGWIFVSYLYKHDHAGVHDYICNRMYTLPLPGLEAYLFQSLSWRMMTISMGSIWCRSSARMQRPCRASGHRWSGLHFHPLLPVHEKTHWCYTNQ

SEQ ID NO: 167211 - protein, 164 aa, Zea Mays
MTTPGSCPATTAATHPPMCAASAAGGSQKMVRPRLVLFGDSITEQSFRPGGWGAALADTYSRKADVVVRGYGGYNTRWALFLVHHIFPLDGLAPPLATTIFFGANDAALLGRTGERQHVPVSEYKNNLKMIVNHLKDCSNSMVIVLITPPPIDEEGRERFARNH

SEQ ID NO: 167212 - protein, 219 aa, Zea Mays
MTTPGSCPATTAATHPPMCAASAAGGSQKMVRPRLVLFGDSITEQSFRPGGWGAALADTYSRKADVVVRGYGGYNTRWALFLVHHIFPLDGLAPPLATTIFFGANDAALLGRTGERQHVPVSEYKNNLKMIVNHLKDCSNSMVIVLITPPPIDEEGRERFARSLYGQNARKLPERTNEMAGVYAGYCVELAREMCIPCVNIWSKMQETEGWQKLYLRVA

SEQ ID NO: 167213 - protein, 183 aa, Zea Mays
MTTPGSCPATTAATHPPMCAASAAGGSQKMVRPRLVLFGDSITEQSFRPGGWGAALADTYSRKADVVVRGYGGYNTRWALFLVHHIFPLDCSNSMVIVLITPPPIDEEGRERFARSLYGQNARKLPERTNEMAGVYAGYCVELAREMCIPCVNIWSKMQETEGWQKLYLRKETQLSTRRLSKH

SEQ ID NO: 167214 - protein, 80 aa, Zea Mays
MIVNKPNGTIEVKQYLCLRFSCLSISYIIVVVSDNLMVCVLIGHLKYQAHDMCASRTGHGSTRHVLHKSPMGMHSISPRN

SEQ ID NO: 167215 - protein, 161 aa, Zea Mays
MIFMTFISMHSIIICVVFSSAYMRCTRLCSLNPGVTGLPKVSTTTTTTPRKRRMASVLDAVLQFTKTPTSAFAGAFDKKTEDAREVTTASATSIHVETGPSGAAPVEMMKESLPVKPTSPIPEVPLQGDLDYIIQHALGKRLSEEQIAEVQHYAKELKYPQ

SEQ ID NO: 167216 - protein, 207 aa, Zea Mays
MIFMTFISMHSIIICVVFSSAYMRCTRLCSLNPGVTGLPKVSTTTTTTPRKRRMASVLDAVLQFTKTPTSAFAGAFDKKTEDAREVTTASATSIHVETGPSGAAPVEMMKESLPVKPTSPIPEVPLQGDLDYIIQHALGKRLSEEQIAEVQHYAKELKYPQGSLVYGGDNEDDFFYCLPDSKDISICHEMMDNMGYPKLERGLSMMT

SEQ ID NO: 167217 - protein, 165 aa, Zea Mays
MKILVAVKRVVDYAVKVRVRPDRTGVETANVKMSMNPFCEIAVEEALRLREAGAAAEVVAATVGPAQSAETLRTALANGADRAIHVLHDPDPARPLLPLTVAKILRAVALQEKPGLVILGKQAIDDDCNQTGQMLAGLLQWPQGTFASKTVQRLATSRQHNVFSK

SEQ ID NO: 167218 - protein, 154 aa, Zea Mays
MKILVAVKRVVDYAVKVRVRPDRTGVETANVKMSMNPFCEIAVEEALRLREAGAAAEVVAATVGPAQSAETLRTALANGADRAIHVLHDPDPARPLLPLTVAKILRAVALQEKPGLVILGKQAIDDDCNQTGQMLAGLLQWPQGTFASKLSGGV

SEQ ID NO: 167219 - protein, 125 aa, Zea Mays
MKILVAVKRVVDYAVKVRVRPDRTGVETANVKMSMNPFCEIAVEEALRLREAGAAAEVVAATVGPAQSAETLRTALANGADRAIHVLHDPDPARPLLPLTVAKILRAVALQEKPGLVILGKQDKC

SEQ ID NO: 167220 - protein, 68 aa, Zea Mays
MTLSFFRNHNTFLENHQMTCQAILGKIGDNKSYRLVANQQLETGRSTKMLLFQCYRKIATHIPRLPCK

SEQ ID NO: 167221 - protein, 94 aa, Zea Mays
MSSSGVPQCVVVFIPLFLHTARTNKLNTITATLLFDTASRHDCQSGAQTVKYQHTFFIHLEEIRSKLTTITKQRHIHKVQRRMKGVAEGSCLRQ

SEQ ID NO: 167222 - protein, 51 aa, Zea Mays
MNPAHHSSPQIIHHSSRIPNFPQIDRNTAVRHRAVSSRSQVCASSIVPEGH

SEQ ID NO: 167223 - protein, 172 aa, Zea Mays
MLYGNHTSLSFENVKSNLLSKEKIDVYSRSEPKSEGLIVRGSRDHKSNLYCRYCRNNTNHISQCLKVRNKEERKKKELDKSSAKPVLLKLWIVEKLCLLPLLKSVLLGFSISLALFIFVRIEIGFLIMCSLMLVRLLLEMDPHVRLSESALFIFKFMMAVLRNLSMSVLFLN

SEQ ID NO: 167224 - protein, 462 aa, Zea Mays
MPSKSCKSIFCKPQFIRIFHSNLSEKMMLPARFVKDYVSEECLNSRIAIIFSPIAKFWRVELKNDQSGIFFTGGWSQFLDFHGIKNGEVLLLKYEGNMVFKFKAFGLSGCQKDFKNQNAGIQLNTKKQQETPPIRKRKSNDEKSSSEENKRLKTPVTSPSPSDPSLEKPYQIGTSSWIKKRINTYALEQFLALSVKFCNSIGFRMACTITLKTATNSTRSWQVRGTAYKWHRYIIGVGWKSFCQDNRLKAGDLCTFNIIETTLWHVTITRSALAADTFNKQKKPPCSSSRDKKGSSSREGAKRPKPSMAHFSKVQVPPSYARRCAYDVGPPPWIRKQMNASTIRNRLVRMVILAFDSRKLVIGVKIIQNTYEPVWHRPSAIRLSCGDAARSCSRPRSTAIILGGLVVSRRRRVVTLLGPVGKNSARRTELRLVMSAPSMSSKPSCGMSSSHAVAKLWLLQPA

SEQ ID NO: 167225 - protein, 258 aa, Zea Mays
MACTITLKTATNSTRSWQVRGTAYKWHRYIIGVGWKSFCQDNRLKAGDLCTFNIIETTLWHVTITRSALAADTFNKQKKPPCSSSRDKKGSSSREGAKRPKPSMAHFSKVQVPPSYARRCAYDVGPPPWIRKQMNASTIRNRLVRMVILAFDSRKLVIGVKIIQNTYEPVWHRPSAIRLSCGDAARSCSRPRSTAIILGGLVVSRRRRVVTLLGPVGKNSARRTELRLVMSAPSMSSKPSCGMSSSHAVAKLWLLQPA

SEQ ID NO: 167226 - protein, 643 aa, Zea Mays
MVVGTAPCGVSVSSVWILLLLSSLLLSPSAASVDFGHCGCDDADDGALSSTYNILQCQKFGAFIVLCGLTHLITVFTYDPHSFHLVLALTVAKFMTALVSFATAITLLTLIPQLLRVKVRENFLVNKARELDREVGMMKMKEEASWHVRMLTQEIRKSLDRHTILYTTMVELSKALELQNCAVWMPDETRSEMILTHQPRERDIMDQQNCSIPIDDPDVQEIKATKDAKVLGPDSALGVATRKLDVGPVAAIRMPMLRVSNFKGGTPEVMQTSYAILVLVLPNDGSLGWGRRELEIVEVVADQVAVALSHAALLEESQLMREKLAEQYRDLLQAKHEAMRAGEARNSFQTAMYDGMRRPMHSILGLVSMMQQESMNPEQRVVMDAIAKTSSVASTLMNDVMQTSTMNCEHLSLVRRPFNLHSFIKEAVGVVRCLTGCKGVEFEFQVDNSLPERIIGDEKRVFHIVLHMMMNGNIWSVSDSKSVGETIMLVLQFQLQPLTAVSSAASSDLSRSSAIPNFNGLRVLLADSDDTNRAVTHRLLEKLGCRVLSVASGVQCTSSFAAEPSFQLVVLDLALQRTDGLEVARAIRKFSSNSWLPLIVALAARIDDKVRDGCQRSGISGLIQKPATLAALGDELYRVLQNS

SEQ ID NO: 167227 - protein, 175 aa, Zea Mays
MMNGNIWSVSDSKSVGETIMLVLQFQLQPLTAVSSAASSDLSRSSAIPNFNGLRVLLADSDDTNRAVTHRLLEKLGCRVLSVASGVQCTSSFAAEPSFQLVVLDLALQRTDGLEVARAIRKFSSNSWLPLIVALAARIDDKVRDGCQRSGISGLIQKPATLAALGDELYRVLQNS

SEQ ID NO: 167228 - protein, 391 aa, Zea Mays
MKYMYPRAAKTHKADFVVLCIGRFSGVPNTPTFPPGEGPEAFDGQVIHSMDYAKMGTKKAREMIKGKRVTVVGYLKSAVDIAAECAEVNGADHPCTMVVRTKHWIIPDYFAWGVHISLLFLNRFAELLIHKPGEGFLLCLLATLLAPLRWLFSKFAESYYAIPMRKHGMVPDHSLFQALATCLIAIQPKGFYERLEEGSIVLKRSKTFSFCREGVVVEGEVSSSSLVESDVVIYATGFRGDLKIKDMFASEYFRSVAVGSACTTVPLYRECIHPKIPQLAVLGYSESIANLYTSEIRAKWLAHFMDGGFRMPSVAAMQKDVLEWEKCMKRYAGGRYFRRSCIGLLHIWYNDQLCRDMGCDPRRKKGFLEELFGVYGPADYADLHPDRKKDD

SEQ ID NO: 167229 - protein, 157 aa, Zea Mays
METKRVAIIGAGVSGLAACKHLLERGCRPVVFEAGTVVGGVWARVPDSTALHTPRPMYQYSDFPWPDTVTEVFPDHRQVMSYLDAYARHFGVLDCVRFGRRVLGMEYHGVAEDDVAAWEEWGGNGQAFGCAGAGEWRLKVADAEGRIEISSPRSPSL

SEQ ID NO: 167230 - protein, 162 aa, Zea Mays
MASSLVLIAAALLALASSWQQAIAYDPSPLQDFCVADKNSPVRVNGFPCKDPMAVTPDDFFNAAMILGFVTSNPNRLFSKVVKKGDVFVFPKAMIHFQMNLDHDKPAAALSSLSSQNPGVITIASAVFGSKPPISDDVLAKAFQVEKKLIDWLQSQFWDTNY

SEQ ID NO: 167231 - protein, 206 aa, Zea Mays
MPSGSNKLYSGSVDGSVRIWDYNSGKCVDVIKMGGKVSCMITHGPWVLIGIPKFVEALNTKTGMKLRFQGPSSLVCSMAITNEMLFAGTGDGRIMAWRFPAKDSNTEPVLILSGHQRPVISLSILARRLYSGSLDKSIKAWDLTTRQLCQSLETFKSNMPMPRRMVCAHSSACTELGRHQFSSAPSTTAIASACSTCHRLAVCCYA

SEQ ID NO: 167232 - protein, 194 aa, Zea Mays
MGTHWNSKVCGGDILILVRVHLYFVLCMVTLRGDFAWYKALNTKTGMKLRFQGPSSLVCSMAITNEMLFAGTGDGRIMAWRFPAKDSNTEPVLILSGHQRPVISLSILARRLYSGSLDKSIKAWDLTTRQLCQSLETFKSNMPMPRRMVCAHSSACTELGRHQFSSAPSTTAIASACSTCHRECIKISISFIIR

SEQ ID NO: 167233 - protein, 185 aa, Zea Mays
MHRVGKTPVLFCSLHNSNCVRLLDLPSNAGCQEANSCYWITDPRAHCMGWQGNSNSTNDNLQNEDANDASRWPYPWWAHIPGALFFDVDGISDRTSSLPHMLPSEKAFSVAVSALGIYNKDGIVVYDGKGMFSAACVWWWGGLHSSHLEHQNRRANLCAEHGRQSLHDILLAQKQPWLVVLGCLM

SEQ ID NO: 167234 - protein, 174 aa, Zea Mays
MGGKVSCMITHGPWVLIGIPKFVEALNTKTGMKLRFQGPSSLVCSMAITNEMLFAGTGDGRIMAWRFPAKDSNTEPVLILSGHQRPVISLSILARRLYSGSLDKSIKAWDLTTRQLCQSLETFKSNMPMPRRMVCAHSSACTELGRHQFSSAPSTTAIASACSTCHRLAVCCYA

SEQ ID NO: 167235 - protein, 289 aa, Zea Mays
MVILRSIERRALQLLLKTLLCLMWMMMMTLSHPKRSAISQWMPQIRRSDLCEAAQRWHNRSINNVSATIYGCSIIVLLYYLDHLHHAAAPNNKNGTPRIKYFNKNIIRALSMADKRKPRQGGEPFGVCPFRSSSETCYVSKSPTTCQIEIQMLPVHQRQKFQATLIDYDLEVGKIFASIKQCLNTIGTKQSNLAATFGELIDEVLRADESVTPNTQGQTVVGGTVENDSGPVFDKTPIGSVSAPGLFLSELECARALRAYLCSRFIELDRYIIFNFFDLAYFLILFNSD

SEQ ID NO: 167236 - protein, 349 aa, Zea Mays
MERMLARLMRRRSSVPLSGLLHHGGAPAPLQAAGATGASPLILSHQQQQQHTAASAVLPGLKIRDSASQLIGRTPMVYLNKVTEGCGARVAAKLEFLQPSFSVKDRPAISMLEDAEKRGLITPGKTTLIEPTSGNMGIGLAFMAALKGYELVLTMPSYTSLERRVTMRAFGANLVLTDPAKGMGGTVRKATELYERHPSAHMLQQFQNPANVKVHYDTTGPEIWEDTLGQVDIFVMGIGSGGTVTGVGKYLKEKNPNAKIYGVEPAEANVLNGGKPGPHLITGNGVGFKPDILDMDVMEKVLEVKGRDIIGSQHRCCSRASQEAGEQGEAHRDRSSEPWRAVPVVRAVR

SEQ ID NO: 167237 - protein, 757 aa, Zea Mays
MNKCSFAQNQVSYLGHIVSAAGVATDPAKIQAIADWPKPANVKELRSFLGLAGYYRKFIRHFGIICHPLHGLLKKGVVYVWTDDHSTAFHTLKAALASAPVLALPDFSSQFTIETDASSFGIGAVLMQKGHPLSFLSKALGPKCRGLSAYEKEFMAILVAVQQWRQYLQHGEFIILTDHQSLSQLNEQRLHTPWQHKVFTKLLGLQYKIIYRQGHSNRVADALSRRISPEINAVSEVVPQWLTDVQNSYSHDPAAQSLMAKLALDPSAVPHFTLTNGLLRYKGRIWLGNDKVLQQRLVAALHTSPIGGHSGIPVTYSRLKNLFAWKNMKTTVQQFIQTCQICLQAKPDRSAYPGKLQPLPVPSGAWETITMDFIDGLPSSGHANCILVVVDKFTKYAHFIPLSHPYTASSVAQVFFVNVYKLHGLPSAIISDRDPVFTSNFWQHLFKITGTDLKLSSSYHPQTDGQTERVNQCLETFLRCFTSACPKKWKDWLSAAEFWYNTSLHSSLGCSPFQALYGRQPRTLGLTINDAAPASLSAWLQERSVMQELIRQHLLRAQSRMKRHADKHRSERTFQEGDWVYLRLQPYVQASVMPRAHHKLSYKFFGPYKILDRIGQVAYRLALPASSRIHPVVHVSQLKLAKGFKDPEPLPLPDDIPEISVPLQIIQSRGITKGSRLVQQVLVSWSGLPAELATWEDREALQQCFPFAPAWGQAGLPEGGNVKDFDMSAQQQETNVPEGRTHRVRRSNPRVYGPEWV

SEQ ID NO: 167238 - protein, 226 aa, Zea Mays
MATTGAVDAQLTLALESQTRSLLSELDKRIHAIDSKWANRVGILETQVADSTKRLESFSRGIHEDLEARLVTADEAVDDRIRYLEASTISRVAVLESSSQAVELWRPQIDASIDGLYANIQTIRADIAQIVTQQPSNSRSGGFGAAGILGTPRSVIGRSPATFDNTDCSRFGPGAAISHRDSGIGYNQPNFRCPVTGIFSLVDEAKLRLKKCTKALRLCVSNKDDG

SEQ ID NO: 167239 - protein, 131 aa, Zea Mays
MIYKKKDYQIQAKGEVGKQDQLDDQQECYEVLGARVYGKKHGLDRVCATRHQTTFVLTQQVHKETWVGLAVKLWVSISCAGTISSVEHTRAREYQHKHDFFLEVSLAKLKVVWRGKSFHEQNRQHFFCKKG

SEQ ID NO: 167240 - protein, 82 aa, Zea Mays
MHPASQLGPRGDDRASDVVSTTRCSRWTTQGRMDLTSGCSPSEYLPSKHYLSVKIKASPGFMHNRYICYFTALNVCRLVLCT

SEQ ID NO: 167241 - protein, 484 aa, Zea Mays
MSGDHAKKEMVTGMKPATSHGKAPSRESGNKKKEGSPSRIRTHKSGDKKKKMKKVVYYETDSSSPSTSRSEAVSVTSKHQERKKYSKIPLHYSRIPRHTPLLSVPLGKPPTFDGEDYSRWSDMMRYHLTSLHKSIWDVVEFGAQVPSVGDEDYDGDEVAQIEHFNSQATTILLTSLNREEYNKVQGLKSAKEIWDVLKTTHEGDEVTKITKRETIEGELDRFMLNQGEDPQAMYNRLKTLVNQVRNLGSTKWDDHEMAKVILRSLVFLNPTQVQLIRGDPRYKLMSPEEVIEKFVSFELMIKGSKKIIEQGTTSTPEVQPVAFKLATEEKKEESTSSRLPIDASKLDNEEMALIIKSFRQILKQRKGRDYKPRSKKVCYKCGKPGHFIAKCPLSSDSDRGDGKKGKRREKKRYYKKKGGDAHVCREWDSDESSTDSSDEDAANITVTKGLLFPNVGHKCLMAKDGKKKKVKSRSSTKYATSSDE

SEQ ID NO: 167242 - protein, 556 aa, Zea Mays
MTGEKKMFSSYEKNQDIQRAITFGDGNQDLVKGLGKISISPDHSISNVFLIDSLDCNLLSVSQLCKMVYNCLFTDLGVTVFRRSDDSVAFKGVLEGQVYLVDFDRAELDTCLIAKTNMGWLWHRRLAHVGMKNLHKLLKGEHILGLTNVHSEKDRICSACKAGKQVGVHHPHKNIMTTDRPLELLHMDLFGPIAYISIGGSKYCLVIVYDYSRFTWVFFLQEKSQTQETLKGFLRRAQNEFGLRIKKIRSNYGTEFKNSQIEGFLEEEGIKHEFSSPYMPQQNGVVERKNRTLLDMARTMLDEYKTSNRFWAEAVNTASYAINRLYLHRILKKTSYELLTGKKPNVSYFRVFGSKCFMLVKRGRKSKFAPKAIEGFLLGYDSNTRAYRVFNKSTGLVEVSCDIVFDETNGSQVEQVDLDELDDEEASCVVLRNMSIGDVCPKESEEPPQAQDQPSSSMQASPPTQDEDQAQVDEDEDQEDEPPQEEGNDQGGDAHGQDKEDDESPRPPHPRVHQAIQRDHPVNTILGDIHKGVTTRSRVAHFVNITPLCLLLSHTG

SEQ ID NO: 167243 - protein, 146 aa, Zea Mays
MSDWKMFGFFCKIKVSMHLISLWISSSWSASLYDKGDPESPSLESAPLPDDDRLRIASEFRIVPHGDGGHYLLVALCDKVKLKDYMFHIFFMLKLSCMLFRPFKGNMPHISLFWCSELHMVLFMVSVASNRDIRFLYLPIWSYLNL

SEQ ID NO: 167244 - protein, 160 aa, Zea Mays
MPFNVADHDESCDWMSDWKMFGFFCKIKVSMHLISLWISSSWSASLYDKGDPESPSLESAPLPDDDRLRIASEFRIVPHGDGGHYLLVALCDKVKLKDYMFHIFFMLKLSCMLFRPFKGNMPHISLFWCSELHMVLFMVSVASNRDIRFLYLPIWSYLNL

SEQ ID NO: 167245 - protein, 205 aa, Zea Mays
MLISLNSNSALVICLDIDRKHLPIQIEPKGVNLSRSIDIDQQSEKHKSMSRVSASVERELVHEQPTDDDASALAYLVRRRCPNTYLFFYGHALEDRVVRMTFIAKPTYSSRRKYLNDLLDADLVSLSRGDRKRWHNMWAAAEAAAQAARLLLRLSLLTMRAMKTKPDGAAGSVCSLELQSLIYFLLILDLVNLGHCACHAECLVF

SEQ ID NO: 167246 - protein, 157 aa, Zea Mays
MSRVSASVERELVHEQPTDDDASALAYLVRRRCPNTYLFFYGHALEDRVVRMTFIAKPTYSSRRKYLNDLLDADLVSLSRGDRKRWHNMWAAAEAAAQAARLLLRLSLLTMRAMKTKPDGAAGSVCSLELQSLIYFLLILDLVNLGHCACHAECLVF

SEQ ID NO: 167247 - protein, 345 aa, Zea Mays
MVFVCVMDVLNSIILKAESYGLLQPLLRRGIGQRISLYADDVVLFMHPVRSDLETVKQVLKVFGEASGLVTNLAKSSFTPICCNDQEVLAIQETLSCNLVNFPCKYLGLPLSIRKLSRRDLLPLVEKVADRLPGWKAALIHPAGRATLVKSVLSAIPVYHLIALQCPKWVIKAIDKIRRGFLWKGRKNIKGGHCLVGWQKVCLPLTLGGLGVPNLEVMGWSLNLRWLWLKKTQPERPWAFLDVQVHPNAAALFAASVQSVVGSGTDTKFWTDRWLHGKRIADWAPSLFAAVNKKVVRSRTVQEAINGSSWVLDIRGNFSSMAFSEFFQIWDLVREVQLLSDVPDQ

SEQ ID NO: 167248 - protein, 638 aa, Zea Mays
MNAWEATERENHVTERGLVPVSTGDVQVQHEHGGAAKADGFVRRDQSCRYASSDIPSDLLVKVGGVNFHVHKHPMVSRSGRLARLVDEASALHGPVAATVVELPDLPGGHGAFELAAKFCYGVVVDITAANVAALRCAAEYLEMTEEVEEGNLAFRAEAFLSYVVASSWRDSVVVLRACEGLSPWADDLHLVRRCSESVAAKACTNPRAVRWAYAGRTSSSPNKSPTAGTAGNSQQQPGPPADWWVEDICVLRIDHFVRVVTAVQARGMRPDLIGAAITRYASKWLSSAGLLANKDSPASRGGGGGGVLQMIVASEGDDAQTETEASEQRRIVESLISIIPPQKDCLSCSFLLRLLRLAVVLKAAPALVTEVEKHVGMQLDQAKLLDILVPSYPYARSEAAYDVDLVQRLVEQFVVQEQSGRDKEKQEQQSSRALRMASLMDSYLSEVSRDRNLSLGKFQALAESLPESARVCHDELYRAVDSYLKAHPTVTEHERKRLCRAVDCGKLSREARLHAAQNERLPLRVVVQVLLSEQAKMAGALGRAGKKEDDVNALRQEVESVNAKYMELQREVELLQRQVERMLPPSAAAKQHNVSGWSSGWKKLGRLGRIQVEQPVVTAATGETANRQLRRRRNSAS

SEQ ID NO: 167249 - protein, 242 aa, Zea Mays
MQIVAKATDHTHKHDTAEEGNTFSEANADVTCPWNTSTDDDNNLSLPGSFLPKLNSLNMEIPCINPWGWMKKRTCEQKPSPWDGCSAWHPLRHAPMAAIENAAERDRTMFPSSISITKPDSDGSPENCCDNEPAKRLKTDTKDNEKPASESSGGDLFETSRPYLCTGFDIYLVWEPCTMCAMALVHHRFKRVFYAFPNPVAGALGGVYRLHGERSLNHHYNVFRVSVPEAYLNGLNCYSKEC

SEQ ID NO: 167250 - protein, 67 aa, Zea Mays
MPLPVVIKNDEIANETAGPSSSERSRTERRRQNNPADDPAKQLLDERIPIKKKVHISYTLHVPISFQ

SEQ ID NO: 167251 - protein, 108 aa, Zea Mays
MINVAFFATSLTAYFSCEKDLYLLTGLNYNHVYLSNLKCSSGHTHVAEALKVPIHILFTMPWTPTSKFPHPFSRVKQPAGYRIGVQRSMLLDFASLILLPITCLLNHL

SEQ ID NO: 167252 - protein, 273 aa, Zea Mays
MINVAFFATSLTAYFSCEKDLYLLTGLNYNHVYLSNLKCSSGHTHVAEALKVPIHILFTMPWTPTSKFPHPFSRVKQPAGYRLSYQIVDSMIWLGIRDMINEFRKKKLKLRPVTYLSGSQGSGNDIPHGYIWSPHLVPKPKDWGPKIDVVGFCFLDLASNYVPPEPLVKWLQAGDKPIYVGFGSLPVQDPQKMTEIIVKALEITGQRGIINKGWGGLGTLAEPKDFVYLLDNCPHDWLFLQCKAVVHHGGAGTTAAGLKAAVSALSMPYFNVK

SEQ ID NO: 167253 - protein, 214 aa, Zea Mays
MPWTPTSKFPHPFSRVKQPAGYRLSYQIVDSMIWLGIRDMINEFRKKKLKLRPVTYLSGSQGSGNDIPHGYIWSPHLVPKPKDWGPKIDVVGFCFLDLASNYVPPEPLVKWLQAGDKPIYVGFGSLPVQDPQKMTEIIVKALEITGQRGIINKGWGGLGTLAEPKDFVYLLDNCPHDWLFLQCKAVVHHGGAGTTAAGLKAAVSALSMPYFNVK

SEQ ID NO: 167254 - protein, 208 aa, Zea Mays
MPWTPTSKFPHPFSRVKQPAGYRLSYQIVDSMIWLGIRDMINEFRKKKLKLRPVTYLSGSQGSGNDIPHGYIWSPHLVPKPKDWGPKIDVVGFCFLDLASNYVPPEPLVKWLQAGDKPIYPVQDPQKMTEIIVKALEITGQRGIINKGWGGLGTLAEPKDFVYLLDNCPHDWLFLQCKAVVHHGGAGTTAAGLKAAVSALSMPYFNVK

SEQ ID NO: 167255 - protein, 132 aa, Zea Mays
MPWTPTSKFPHPFSRVKQPAGYRLSYQIVDSMIWLGIRDMINEFRKKKLKLRPVTYLSGSQGSGNDIPHGYIWSPHLVPKPKDWGPKIDVVGFCFLDLASNYVPPEPLVKWLQAGDKPIYVGFGSLFKTHKR

SEQ ID NO: 167256 - protein, 81 aa, Zea Mays
MTEIIVKALEITGQRGIINKGWGGLGTLAEPKDFVYLLDNCPHDWLFLQCKAVVHHGGAGTTAAGLKAAVSALSMPYFNVK

SEQ ID NO: 167257 - protein, 308 aa, Zea Mays
MPWTKFPHPFSRVKQPAGYRLSYQIVDSMIWLGIRDMINEFRKKKLKLRPVTYLSGSQGSGNDIPHGYIWSPHLVPKPKDWGPKIDVVGFCFLDLASNYVPPEPLVKWLQAGDKPIYVGFGSLPVQDPQKMTEIIVKALEITGQRGIINKGWGGLGTLAEPKDFVYLLDNCPHDWLFLQCKAVVHHGGAGTTAAGLKAACPTTIVPFFGDQPFWGDRVHARGLGPPPIPVDQFGLQKLVDAIKFMTKPVVKDKAVEVAKAMESEDGVTGAVRAFLRHLPSKTEEPSPPQPSGFLEFFLGPLSKCLGCS

SEQ ID NO: 167258 - protein, 211 aa, Zea Mays
MPWTKFPHPFSRVKQPAGYRLSYQIVDSMIWLGIRDMINEFRKKKLKLRPVTYLSGSQGSGNDIPHGYIWSPHLVPKPKDWGPKIDVVGFCFLDLASNYVPPEPLVKWLQAGDKPIYVGFGSLPVQDPQKMTEIIVKALEITGQRGIINKGWGGLGTLAEPKDFVYLLDNCPHDWLFLQCKAVVHHGGAGTTAAGLKAAVSALSMPYFNVK

SEQ ID NO: 167259 - protein, 74 aa, Zea Mays
MFGMLLVQNAICHGLAPWRHTTRVCRDIPCKEALALLFFVSFSFPAGICSVQRVVACGVHGLQRMACALWCVSF

SEQ ID NO: 167260 - protein, 302 aa, Zea Mays
MHLWRLVQEKDGGPSWIHMMDRTLPTMRYQAWRRDPPNGPPQYRSSTIFEDASPEVVRDFFWDDEFRVKNSWDDMLLQYETLEQCAKTGTMVVRWVRKFPFFCSDREYIIGRRIWASGKTFYCVTKGVPRPSVPRQNKPRRVDLYYSSWCIRPVESRKGDGAMTACEVLLFHHEDMGIPWEIAKLGVRQGMWGCVKRIEPGLRAYQVARTAGEPISKHAAMAHVTTRFDADELVTEDSAEASSSSDNNKTAEVEKPKHWTNNIPKVLMIGGAVALACTFDGGLMTKAAIFGTARRFAGPGRR

SEQ ID NO: 167261 - protein, 109 aa, Zea Mays
MNTRVSDIERHFTPFGNISSVRIRKNFAFVQFETMEEARKALEATHATTLLDRVISVEYAFRDDSEVSDRYGSPRRGGGYDLLLIDQGPHLRNEEHMTNREPSVMPYMA

SEQ ID NO: 167262 - protein, 51 aa, Zea Mays
MDLLEKMMGRGVLSDLQNFSGLMEHLASVVDLNGMAGRSILEHRYRYNVPL

SEQ ID NO: 167263 - protein, 65 aa, Zea Mays
MVLFVLIMGSDPKSVAIYYQLYISTYLNLWKCQLCESSLVGFGGLDDNPIKGLTSVLSVEQVLNA

SEQ ID NO: 167264 - protein, 55 aa, Zea Mays
MAWLDGRFAGSFLGSSSIRSSPPWLWSVPPCPQRLLMRSAVQSILEHRYRYNVPL

SEQ ID NO: 167265 - protein, 115 aa, Zea Mays
MSASGTTTSPTSRSPRSRSARSSTWRDAPDAVGGTANRNVAFQHGFRPPYGSGSVHCRVSGSPEMLTTAYTCMRVIRFTLFSSCADRRLSSNSRCFSMLLNELILHGQAVLKLNA

SEQ ID NO: 167266 - protein, 61 aa, Zea Mays
MSMLISTNFLIIFNRMGECRMLFQILFLGPSNLFELNASFCSNVAKNDCLTNCEHDCLQQS

SEQ ID NO: 167267 - protein, 56 aa, Zea Mays
MADTVAPPLPPLPRCLLHLIASHRYEQPSFIALTQIRSCLLGLVSCLFHAPLRRCG

SEQ ID NO: 167268 - protein, 60 aa, Zea Mays
MGECRMLFQILFLGPSNLFELNASFCSNVAKNDCLTNCEHDCLQQRKDGIELWWPHMCGD

SEQ ID NO: 167269 - protein, 265 aa, Zea Mays
MALGRFDHVVSSIDKARIIDPGKTEVVTMHNKVKSVARARSLGNELFNSGKFSEACIAYGEGLKQHPVNKVLYCNRVACRFKLEQWEKSIEDCNEALKIQPNYTKALLRRAASYGKCYEVIVVNGKCGCHASAIVQIEEANFLVPYFGVSRAVETRRLEDRSAHHRTTARGKARSSRRQQEVAAAQLAGSAHAQIYPSLTDVFKPLIKEGNVYNVSYIQIKKANRMYKPVDNDIMICFTKWILCWLSPAAYPSPYPYSKFTMRIV

SEQ ID NO: 167270 - protein, 159 aa, Zea Mays
MWVANQYLFQCYEVIVVNGKCGCHASAIVQIEEANFLVPYFGVSRAVETRRLEDRSAHHRTTARGKARSSRRQQEVAAAQLAGSAHAQIYPSLTDVFKPLIKEGNVYNVSYIQIKKANRMYKPVDNDIMICFTKWILCWLSPAAYPSPYPYSKFTMRIV

SEQ ID NO: 167271 - protein, 529 aa, Zea Mays
MGRFLRHLCHSRLTAEQRMSERAELLKAQVRQAFDAASMDVAGLITYVDTLERLGLDNHFRDLIGAALERIGAEELPEHGGGLHIVALRFRLLRQHGIWVSTDVFDAFREDAGGFCSSLCSDDPRGLLSLYNAAHMAVPGEVVLDDAIAFARGRLLDIISKGEVRSPVSEQITRALDIPLPRFTRRLETMHYIAEYEHEEAHDGLLLELARLNFVLVRALHLRELKDLSLWWRELYNTVKLPYARDRMVEIYFWTCGMLHEEEYSLARMFFAKTFGMVSLMDDTFDVHATLDECHKLKEAMQRWDESEVSILPEYLRLLYIKTLSNFKEFEEILEPNKKYRMAYTKEAYKLCSKNYLKEAIWSNQKYQPSFKEHEELSIMTSGLPMLTILTLMGFGDEATPEAFEWVSSVPEMVRAGSQVTRFLNDLSSYKLGKNKKDMPGSVETYMVENGLTGDEAAAAIAALLENRWRILNQTRMEIDHTLLPAAQVVLNMARANEIIYLHGRDAYTFGADLKDLVTTLFLKQVLPL

SEQ ID NO: 167272 - protein, 323 aa, Zea Mays
MATTHLLTPPRVHHPSPSASSSVARVRATASLAHPLHLCRLRLAAPRSRSPSPRHGRRAMSVRSSLIDPDGGALVELVAPPDRLPALRAEAEALPRVRLAPVDLQWAHVLAEGWASPLRGFMREHEYLQSLHFNCVRLPDGGLVNMSLPIVLAIGDADKEQIGGKPDVALQGPDGGVVAILRRVEIYPHNKEERIARTWGTTAPGLPYVDEAIASAGNWLIGGDLEVLEPIKYNDGLDHYRLSPRQLRKEFDKRGADAVFAFQLRNPVHNGHALLMNDTRRRLLEMGYKNPILLLHPLGGYTKADDVPLPVRMEQHSFRRWSA

SEQ ID NO: 167273 - protein, 99 aa, Zea Mays
MARFLQRRPESSAGHPASLCVAPSHPSVCSPVPWTARSRYAAGILVTISKPPSRRAGCPSLILALTSSCPCNACLVLAKTPESGPSSFSRSSSWLRYVN

SEQ ID NO: 167274 - protein, 872 aa, Zea Mays
MEPKPSPPPAAPSRRRGAATKRKEKAASAVPSGSPSPKRQARERGPVYQPSLPPPQPRSRQPARKPQRKPARNKSPRRSVEPPRAQEEEEGPPPLPPPRPSLEKEIEAVLSRGAGVHVVPTFAGWFSWKEIHPIEKQMLATFFDGKSERRTPEIYLGIRNLIMNKFHCNPEVHLESKDLCELSVGEMDARLVILEFLAYWGLVNFHPFPSVVQEHKLVESKSSAETAEGISQAEKLFQFETVHSYLVPVSKEAEAISPVQFTSLLPEPTLAEDAIGAAESSVEYHCNSCSVDCSRKRYHCRTQVDFDFCSDCYNEEKFDEGMSKSDFILMESADVPGSGGSNWTDHETLLLLEALEIFKGKEWHEIAEHVATKTKEQCMLHFLQMPISEPFLDGDDFNETPQKITKQDSAETGPSDVPDKMDVDGNAEGKESTDEKAYKKADSSSAETRTKLADQNISAKEDTMKLGDDDLVASIVDEPNKSSLVDPAHKKNSANADVSGEHPSNFITNILRSTFEAVDHFLGKEDMGSFAEAGNPVMALAAFLASLVERDDAVSSCCSSLRAISEMSPALQLATEHCFILPDPPSDLKDPASTFSPCAGGESQEGADTTQNVNDTDKNNSEREDSDLALEKESATFTSQKQHLEELSDAKETFIGGPEAEAKSNSTKDSDNPIAKEASPASTKDTAIPEQVERPSSEELLADVSLPQGKVEPKKTEPAPAASSSIQQHGCKQAGNGNTEPKSKENAAADDDPITRLQRAAGTAISAAAVKAKFLVEQEEGYIRQLAALVIEKQFQKMETKMSFLTEVGNLVLRSRDLTERMRKKLLLERSMIIASRMGAAAASRTIQHGAPVTTRLPVGHVHALNPQLRRP

SEQ ID NO: 167275 - protein, 570 aa, Zea Mays
MEPKPSPPPAAPSRRRGAATKRKEKAASAVPSGSPSPKRQARERGPVYQPSLPPPQPRSRQPARKPQRKPARNKSPRRSVEPPRAQEEEEGPPPLPPPRPSLEKEIEAVLSRGAGVHVVPTFAGWFSWKEIHPIEKQMLATFFDGKSERRTPEIYLGIRNLIMNKFHCNPEVHLESKDLCELSVGEMDARLVILEFLAYWGLVNFHPFPSVVQEHKLVESKSSAETAEGISQAEKLFQFETVHSYLVPVSKEAEAISPVQFTSLLPEPTLAEDAIGAAESSVEYHCNSCSVDCSRKRYHCRTQVDFDFCSDCYNEEKFDEGMSKSDFILMESADVPGSGGSNWTDHETLLLLEALEIFKGKEWHEIAEHVATKTKEQCMLHFLQMPISEPFLDGDDFNETPQKITKQDSAETGPSDVPDKMDVDGNAEGKESTDEKAYKKADSSSAETRTKLADQNISAKEDTMKLGDDDLVASIVDEPNKSSLVDPAHKKNSANADVSGEHPSNFITNILRSTFEAVDHFLGKEDMGSFAEAGNPVMALIHQVTSKIRLPLSALAQAVRAKKVLILLKM

SEQ ID NO: 167276 - protein, 343 aa, Zea Mays
MSPALQLATEHCFILPDPPSDLKDPASTFSPCAGGESQEGADTTQNVNDTDKNNSEREDSDLALEKESATFTSQKQHLEELSDAKETFIGGPEAEAKSNSTKDSDNPIAKVGSSVASDKMRDGCNANAIPCPATSNHTTEPSSVASQEASPASTKDTAIPEQVERPSSEELLADVSLPQGKVEPKKTEPAPAASSSIQQHGCKQAGNGNTEPKSKENAAADDDPITRLQRAAGTAISAAAVKAKFLVEQEEGYIRQLAALVIEKQFQKMETKMSFLTEVGNLVLRSRDLTERMRKKLLLERSMIIASRMGAAAASRTIQHGAPVTTRLPVGHVHALNPQLRRP

SEQ ID NO: 167277 - protein, 419 aa, Zea Mays
MLATFFDGKSERRTPEIYLGIRNLIMNKFHCNPEVHLESKDLCELSVGEMDARLVILEFLAYWGLVNFHPFPSVVQEHKLVESKSSAETAEGISQAEKLFQFETVHSYLVPVSKEAEAISPVQFTSLLPEPTLAEDAIGAAESSVEYHCNSCSVDCSRKRYHCRTQVDFDFCSDCYNEEKFDEGMSKSDFILMESADVPGSGGSNWTDHETLLLLEALEIFKGKEWHEIAEHVATKTKEQCMLHFLQMPISEPFLDGDDFNETPQKITKQDSAETGPSDVPDKMDVDGNAEGKESTDEKAYKKADSSSAETRTKLADQNISAKEDTMKLGDDDLVASIVDEPNKSSLVDPAHKKNSANADVSGEHPSNFITNILRSTFEAVDHFLGKEDMGSFAEAGNPVMALFVESYIRDVSCSPTGN

SEQ ID NO: 167278 - protein, 460 aa, Zea Mays
MLATFFDGKSERRTPEIYLGIRNLIMNKFHCNPEVHLESKDLCELSVGEMDARLVILEFLAYWGLVNFHPFPSVVQEHKLVESKSSAETAEGISQAEKLFQFETVHSYLVPVSKEAEAISPVQFTSLLPEPTLAEDAIGAAESSVEYHCNSCSVDCSRKRYHCRTQVDFDFCSDCYNEEKFDEGMSKSDFILMESADVPGSGGSNWTDHETLLLLEALEIFKGKEWHEIAEHVATKTKEQCMLHFLQMPISEPFLDGDDFNETPQKITKQDSAETGPSDVPDKMDVDGNAEGKESTDEKAYKKADSSSAETRTKLADQNISAKEDTMKLGDDDLVASIVDEPNKSSLVDPAHKKNSANADVSGEHPSNFITNILRSTFEAVDHFLGKEDMGSFAEAGNPVMALAAFLASLVERDDAVSSCCSSLRAISEMSPALQLATEHCFILPDPPSDLKDPASTFRR

SEQ ID NO: 167279 - protein, 659 aa, Zea Mays
MRYGSTASKTSSPSDMMRSEVTEAAKLLNLWNEWGLQILVLVSFGLQVFLLVFGGVRRHSNSTALAFSLWSAYVLADSTATYTLGHLSVDSRSNEHQLVVFWAPFPLLHLGGPDNITAYALEDNALWLRHLQILAVQVLGAAYVIYKYISSSGKLLLLASLSMFFVGILKYGERIWALKCGNISSIRSSISIRKVKTDPYQLLTLGTSEEDLLLGAHSQFDICKGVFADIIMLPNPLVRSQPKPRSVISYLGEDLYKLVEMELSLMYDFLYTKAAVIHTSYGFCIHFISLFGTATTFLLFQLSISSSGNRYSRVDVAISYVLLVGALVLEIISVCRAVLSTWTCSLLHRRGRGWEWCLHIITSLGQRVHPASRRLWSGSLGQYNLFHLCTRNTNEIGSRLAMKLGLEDWWNMMHFSGTFPHTNSSLSIQDIKKLVLQALRSKEQALQHQDTDLNSRGSFILKRMEAYKDFARWSVNIDFDESILVWHIATEVFIRKSKAKHAKELLEATEVLSNYLMFLLVVKPNMLPGAARHNIHLTSCEQLEGHCRTRFGDKDSPLAPSPVSWNLCYIIKELFHHDGPSCSRIPRREKLAEVAWSFSQFALVWAAWASSTFICLKILFIFLGAMAQIVPRLTVCISQFAGIASLTIQLKNISLVIYV

SEQ ID NO: 167280 - protein, 701 aa, Zea Mays
MRYGSTASKTSSPSDMMRSEVTEAAKLLNLWNEWGLQILVLVSFGLQVFLLVFGGVRRHSNSTALAFSLWSAYVLADSTATYTLGHLSVDSRSNEHQLVVFWAPFPLLHLGGPDNITAYALEDNALWLRHLQILAVQVLGAAYVIYKYISSSGKLLLLASLSMFFVGILKYGERIWALKCGNISSIRSSISIRKVKTDPYQLLTLGTSEEDLLLGAHSQFDICKGVFADIIMLPNPLVRSQPKPRSVISYLGEDLYKLVEMELSLMYDFLYTKAAVIHTSYGFCIHFISLFGTATTFLLFQLSISSSGNRYSRVDVAISYVLLVGALVLEIISVCRAVLSTWTCSLLHRRGRGWEWCLHIITSLGQRVHPASRRLWSGSLGQYNLFHLCTRNTNEIGSRLAMKLGLEDWWNMMHFSGTFPHTNSSLSIQDIKKLVLQALRSKEQALQHQDTDLNSRGSFILKRMEAYKDFARWSVNIDFDESILVWHIATEVFIRKSKAKHAKELLEATEVLSNYLMFLLVVKPNMLPGAARHNIHLTSCEQLEGHCRTRFGDKDSPLAPSPVSWNLCYIIKELFHHDGPSCSRIPRREKLAEVAWSFSQFALGSVKAPNPHGNSIRDSANMYAILLANELMSIELRWQDQRDTLELILGVWVEMLLYAADHCSQESHARQLSNGCEFITIVSLLAHHFKYYSGAFRDAAT

SEQ ID NO: 167281 - protein, 529 aa, Zea Mays
MRYGSTASKTSSPSDMMRSEVTEAAKLLNLWNEWGLQILVLVSFGLQVFLLVFGGVRRHSNSTALAFSLWSAYVLADSTATYTLGHLSVDSRSNEHQLVVFWAPFPLLHLGGPDNITAYALEDNALWLRHLQILAVQVLGAAYVIYKYISSSGKLLLLASLSMFFVGILKYGERIWALKCGNISSIRSSISIRKVKTDPYQLLTLGTSEEDLLLGAHSQFDICKGVFADIIMLPNPLVRSQPKPRSVISYLGEDLYKLVEMELSLMYDFLYTKAAVIHTSYGFCIHFISLFGTATTFLLFQLSISSSGNRYSRVDVAISYVLLVGALVLEIISVCRAVLSTWTCSLLHRRGRGWEWCLHIITSLGQRVHPASRRLWSGSLGQYNLFHLCTRNTNEIGSRLAMKLGLEDWWNMMHFSGTFPHTNSSLSIQDIKKLVLQALRSKEQALQHQDTDLNSRGSFILKRMEAYKDFARWSVNIDFDESILVWHIATEVFIRKSKAKHAKELLEATEKDTAEHDLVIRTVHWRHPL

SEQ ID NO: 167282 - protein, 604 aa, Zea Mays
MRYGSTASKTSSPSDMMRSEVTEAAKLLNLWNEWGLQILVLVSFGLQVFLLVFGGVRRHSNSTALAFSLWSAYVLADSTATYTLGHLSVDSRSNEHQLVVFWAPFPLLHLGGPDNITAYALEDNALWLRHLQILAVQVLGAAYVIYKYISSSGKLLLLASLSMFFVGILKYGERIWALKCGNISSIRSSISIRKVKTDPYQLLTLGTSEEDLLLGAHSQFDICKGVFADIIMLPNPLVRSQPKPRSVISYLGEDLYKLVEMELSLMYDFLYTKAAVIHTSYGFCIHFISLFGTATTFLLFQLSISSSGNRYSRVDVAISYVLLVGALVLEIISVCRAVLSTWTCSLLHRRGRGWEWCLHIITSLGQRVHPASRRLWSGSLGQYNLFHLCTRNTNEIGSRLAMKLGLEDWWNMMHFSGTFPHTNSSLSIQDIKKLVLQALRSKEQALQHQDTDLNSRGSFILKRMEAYKDFARWSVNIDFDESILVWHIATEVFIRKSKAKHAKELLEATEVLSNYLMFLLVVKPNMLPGAARHNIHLTSCEQLEGHCRTRFGDKDSPLAPSPVSWNLCYIIKELFHHDGPSCSRIPRREKLAEVAWSFSQFALV

SEQ ID NO: 167283 - protein, 95 aa, Zea Mays
MVSLSTWFRYAAHKFDYCISLSLKKYNVGQISSTQLTDVIFKNFFHGKLTYVCQTKGEEAMAPIVSPTGGAVLVRKLANLSPTTVDIIDPCKLAN

SEQ ID NO: 167284 - protein, 96 aa, Zea Mays
MVSLSTWFRYAAHKFDYCISLSLKKYNVGQISSTQLTDVIFKNFFHGKLTYVCQTKGEEAMAPIVSPTGGAVLVRKLANLSPTIAGQVNLLNAVSC

SEQ ID NO: 167285 - protein, 91 aa, Zea Mays
MVSLSTWFRYAAHKFDYCISLSLKKYNVGQISSTQLTDVIFKNFFHGKLTYVCQTKGEEAMAPIVSPTGGAVLVRKLANLSPTHGCHVQQF

SEQ ID NO: 167286 - protein, 134 aa, Zea Mays
MRSSVDSVPCREVFVGDVVLLKDPEKSGNFVIRRLAALEGYEMVSNDEKDEPFVLEKDQCWVLADNLVLKPKEARDSRLFGPVPMTDILGRVIYSLRTAVDHGLVENSGMATKLDGPVLAVELDVEELAKNNKA

SEQ ID NO: 167287 - protein, 53 aa, Zea Mays
MEKKRIDSFSSPLIWLVDSCCCSAAQAKAADEKENKKTESNALHSTMILLAGV

SEQ ID NO: 167288 - protein, 50 aa, Zea Mays
MNWKKTQKTALFSFVAPDKSLIFKLSSGLSSYDDSGSSLPRQAQQHRHIR

SEQ ID NO: 167289 - protein, 640 aa, Zea Mays
MTVQEARVEKNNLSMTKKGAQRSVDLPDKISGGGVRDDRWSGGGDQRRGGVRPATLMRRGNGFCYQRDPASVKSIYSGQMGQNMLQPQVLCLCSIILTLFFTLLQPTAAQITAPWEVDALKAIRGSLIDPHGNLSSWNRGDPCMGNWSHVICYNATGSDGYFHVKELQLLSLNLSGILAPELGQLSQMKIMDFMWNSIGGTIPKEVGNITSLELMLLNGNQLNGSLPEEIGFLPNLNRIQIDQNHISGLIPKSFANLNKTKHFHMNNNSLSGQIPPELSRLPSLVHLLLDNNNLSGYIPPELSKLPNVLIIQLDNNNFSGSTIPSSYGNISTLLKLSLRNCSLEGPVPDVSGIPQLGYLDVSWNQLRGPIPSIQFSSNITTIDLSHNNLNGSIPGIFSGLPYLQRLSLDDNNLTGSVPSNIWQDIDLRGNKSLVLDFQNNALNNLSTPLSPPPNVTILLHGNPVCIGQNQLNISQYCQSGTYVARGGSADNSTVCPPCSSDFPFERIPMSPIPCSCVVPVYVGYRLKSPGFSNFIPYESQFQQYLTSGLSLSSYQLEVSTFMWEEGPRLKMDLKIFPNNTPFFTLQPRVVQHNNTTGYKVWSEYRCHCWGGHGGICCSCHSFIPRYYHHIAETLKTVFFK

SEQ ID NO: 167290 - protein, 844 aa, Zea Mays
MKIMDFMWNSIGGTIPKEVGNITSLELMLLNGNQLNGSLPEEIGFLPNLNRIQIDQNHISGLIPKSFANLNKTKHFHMNNNSLSGQIPPELSRLPSLVHLLLDNNNLSGYIPPELSKLPNVLIIQLDNNNFSGSTIPSSYGNISTLLKLSLRNCSLEGPVPDVSGIPQLGYLDVSWNQLRGPIPSIQFSSNITTIDLSHNNLNGSIPGIFSGLPYLQRLSLDDNNLTGSVPSNIWQDIDLRGNKSLVLDFQNNALNNLSTPLSPPPNVTILLHGNPVCIGQNQLNISQYCQSGTYVARGGSADNSTVCPPCSSDFPFERIPMSPIPCSCVVPVYVGYRLKSPGFSNFIPYESQFQQYLTSGLSLSSYQLEVSTFMWEEGPRLKMDLKIFPNNTPFFTVSEVFRLNGMFTAWQIADSDIFGPYELISFNQGWYNTIIPQGTKSGLSTGAIVGVVMAAFVAAAILSSLVTIIILRRRSRQSSSNKRTAKRISMKIAGVKDFTFDELSHCTHDFNDSTLIGQGGYGKVYRGVLADGIVVAIKRAQQGSLQGSKEFFTEIELLSRLHHRNLVSLLGYCDEDDEQMLVYEYMPNGNLRDHLSARAKVPLDFPMRLRIALGSSRGILYLHTEADPPIYHRDIKASNILLDSKFVAKVADFGLSRLAPLPETEGSAPGHVSTVVKGTPGYLDPEYFLTHKLTDKSDVYSLGVVFLELLTGMQPISHGRNIVREVLAANQSGMIFSVVDNRMGSYPAECVEKFAALALRCCQDETDSRPSMVEVVRELDMIWRMTPGTENIASSESGVMGMGSNSTSTPTASGSRMDDHYISSMEVSGSNLLSGVMPSINPR

SEQ ID NO: 167291 - protein, 952 aa, Zea Mays
MGQNMLQPQVLCLCSIILTLFFTLLQPTAAQITAPWEVDALKAIRGSLIDPHGNLSSWNRGDPCMGNWSHVICYNATGSDGYFHVKELQLLSLNLSGILAPELGQLSQMKIMDFMWNSIGGTIPKEVGNITSLELMLLNGNQLNGSLPEEIGFLPNLNRIQIDQNHISGLIPKSFANLNKTKHFHMNNNSLSGQIPPELSRLPSLVHLLLDNNNLSGYIPPELSKLPNVLIIQLDNNNFSGSTIPSSYGNISTLLKLSLRNCSLEGPVPDVSGIPQLGYLDVSWNQLRGPIPSIQFSSNITTIDLSHNNLNGSIPGIFSGLPYLQRLSLDDNNLTGSVPSNIWQDIDLRGNKSLVLDFQNNALNNLSTPLSPPPNVTILLHGNPVCIGQNQLNISQYCQSGTYVARGGSADNSTVCPPCSSDFPFERIPMSPIPCSCVVPVYVGYRLKSPGFSNFIPYESQFQQYLTSGLSLSSYQLEVSTFMWEEGPRLKMDLKIFPNNTPFFTVSEVFRLNGMFTAWQIADSDIFGPYELISFNQGWYNTIIPQGTKSGLSTGAIVGVVMAAFVAAAILSSLVTIIILRRRSRQSSSNKRTAKRISMKIAGVKDFTFDELSHCTHDFNDSTLIGQGGYGKVYRGVLADGIVVAIKRAQQGSLQGSKEFFTEIELLSRLHHRNLVSLLGYCDEDDEQMLVYEYMPNGNLRDHLSARAKVPLDFPMRLRIALGSSRGILYLHTEADPPIYHRDIKASNILLDSKFVAKVADFGLSRLAPLPETEGSAPGHVSTVVKGTPGYLDPEYFLTHKLTDKSDVYSLGVVFLELLTGMQPISHGRNIVREVLAANQSGMIFSVVDNRMGSYPAECVEKFAALALRCCQDETDSRPSMVEVVRELDMIWRMTPGTENIASSESGVMGMGSNSTSTPTASGSRMDDHYISSMEVSGSNLLSGVMPSINPR

SEQ ID NO: 167292 - protein, 576 aa, Zea Mays
MFRLHGNPVCIGQNQLNISQYCQSGTYVARGGSADNSTVCPPCSSDFPFERIPMSPIPCSCVVPVYVGYRLKSPGFSNFIPYESQFQQYLTSGLSLSSYQLEVSTFMWEEGPRLKMDLKIFPNNTPFFTVSEVFRLNGMFTAWQIADSDIFGPYELISFNQGWYNTIIPQGTKSGLSTGAIVGVVMAAFVAAAILSSLVTIIILRRRSRQSSSNKRTAKRISMKIAGVKDFTFDELSHCTHDFNDSTLIGQGGYGKVYRGVLADGIVVAIKRAQQGSLQGSKEFFTEIELLSRLHHRNLVSLLGYCDEDDEQMLVYEYMPNGNLRDHLSARAKVPLDFPMRLRIALGSSRGILYLHTEADPPIYHRDIKASNILLDSKFVAKVADFGLSRLAPLPETEGSAPGHVSTVVKGTPGYLDPEYFLTHKLTDKSDVYSLGVVFLELLTGMQPISHGRNIVREVLAANQSGMIFSVVDNRMGSYPAECVEKFAALALRCCQDETDSRPSMVEVVRELDMIWRMTPGTENIASSESGVMGMGSNSTSTPTASGSRMDDHYISSMEVSGSNLLSGVMPSINPR

SEQ ID NO: 167293 - protein, 557 aa, Zea Mays
MYCQSGTYVARGGSADNSTVCPPCSSDFPFERIPMSPIPCSCVVPVYVGYRLKSPGFSNFIPYESQFQQYLTSGLSLSSYQLEVSTFMWEEGPRLKMDLKIFPNNTPFFTVSEVFRLNGMFTAWQIADSDIFGPYELISFNQGWYNTIIPQGTKSGLSTGAIVGVVMAAFVAAAILSSLVTIIILRRRSRQSSSNKRTAKRISMKIAGVKDFTFDELSHCTHDFNDSTLIGQGGYGKVYRGVLADGIVVAIKRAQQGSLQGSKEFFTEIELLSRLHHRNLVSLLGYCDEDDEQMLVYEYMPNGNLRDHLSARAKVPLDFPMRLRIALGSSRGILYLHTEADPPIYHRDIKASNILLDSKFVAKVADFGLSRLAPLPETEGSAPGHVSTVVKGTPGYLDPEYFLTHKLTDKSDVYSLGVVFLELLTGMQPISHGRNIVREVLAANQSGMIFSVVDNRMGSYPAECVEKFAALALRCCQDETDSRPSMVEVVRELDMIWRMTPGTENIASSESGVMGMGSNSTSTPTASGSRMDDHYISSMEVSGSNLLSGVMPSINPR

SEQ ID NO: 167294 - protein, 97 aa, Zea Mays
MATSSSFTAVFFSSAFAACFAEVCTIPLDTAKVRLQLQRKAPLPLPPAAAAATAAAAGGTLATIMCIAREEGVAALWKGVIPGLHRQFLYGGLRISL

SEQ ID NO: 167295 - protein, 234 aa, Zea Mays
MCIAREEGVAALWKGVIPGLHRQFLYGGLRISLYEPVKAFFVGGAVVGDVSLLSKILAALTTGVIAIVVANPTDLVKVRLQADGKANTVKRSYSGALNAYATIIRQEGIGALWTGLGPNVARNAIINAAELASYDQFKQMFLKLPGFTDNVFTHLLAGLGAGFFAVCIGSPVDVVKSRMMGDSMYKSTLDCFAKTLKNDGPCAFYKGFIANFCRIGSWNVIMFLTLEQVRRFFL

SEQ ID NO: 167296 - protein, 311 aa, Zea Mays
MATSSSFTAVFFSSAFAACFAEVCTIPLDTAKVRLQLQRKAPLPLPPAAAAATAAAAGGTLATIMCIAREEGVAALWKGVIPGLHRQFLYGGLRISLYEPVKAFFVGGAVVGDVSLLSKILAALTTGVIAIVVANPTDLVKVRLQADGKANTVKRSYSGALNAYATIIRQEGIGALWTGLGPNVARNAIINAAELASYDQFKQMFLKLPGFTDNVFTHLLAGLGAGFFAVCIGSPVDVVKSRMMGDSMYKSTLDCFAKTLKNDVRKMCIQLGHNLQQGILSWTLCFLQGIHCKLLSDWVMECDNVFNSGAG

SEQ ID NO: 167297 - protein, 1203 aa, Zea Mays
MNVVWICPRPHQGHHMLHQNQRHLQLHQNPRHRLPADHVCAGSHRRRLPPNGPAVNATTALKNIQSITSVLLAEFFCWNWMEKIPGQRIHWQRSWGISLHALTGIDIADTLKLKVSINGVALIALVDSGSTHTFIRDAIVPRLGLHVTPTAGLPVKVANGEKVLSGGVCSQTPLTVGEENFTTTCYTLPLDGFDVVLGVEWLRSLGPFICNFEKLTLSFWRHGHMVRWTGIGGSPPRCNALDMAHKLLDTLLLSFEDLFVEPQGLPPPRRHDHRIRLLPGTVPVAVRPYRYPQLLKDEIERQCDQMLSQGIIRECTSTFSSPVLLVKKSDNTWRFCIDYRELNTKTVKDKFPIPVVDELLDELRGARFFTKLDLRSGYHQVRMHPEDINKTAFRTHHGHYEFLVMPFGLTNAPSTFQALMNDVLKPFIRKFVLVFFDDILIYSSSWAEHLQHMRQVFQLLQEQKLALKRTKCSFGETQVGYLGHIISDKGVAMDPAKIEAVESWPPPRSIRALRGFLGLTGYYRKFIAGYGTVAAPLTALLKREAFRWTEEAEEAFNLLKQALMSAPLLQMPDFGRSFIIDCDASGSGFGAVLHQGDGAIAFFSRAVAPQHQKLPAYERELIGLVKAVRHWRPYIWGRQFLVRTDHYSLKYLLDQRLTTIPQHTWVSKLFGYDFMVEYKPGKLNGAADALSRRVESSMALNTISTPSFELFDSLRAEAATDPQIQDVRQQLAAGTVSPGWTELDGLLLFKGKVYVPDASTLWPILLSSAHDTGHEGIQKTIHRFRSSFYNPHALQRVKEFIKGCSVCQRNKTEHLHPGGLLQPLSVPSEVWSDISMDFIEGFPKVGGKSVILTVVDRFSKFAHFIALGHPYTAASVAKAFFDNIVRLHGLPCSIVSDRDTVFTSTFWSELFQLAGVKLHMSSAFHPQSDGQSEVVNRIITMYLRCLAGDRPREWLKWLPWAEFCYNTSFQTALRCSPFKVVYGREPPALLPYHPGTSQVAAVDKQLQTRDEFLADIRDRLIQSQVTMKSYQDRHRREVEFHEGDWVWLRLQQRTTVGVTSATPNKLGPKFFGPYQVLSRVGTVSYKLQLPPRARIHDVFHVSLLKKFIGEAPTQVIPLPELLNGRVIPTPEKVLRARLNRGVWEVLIKWTGRAETDTSWEQLEDFKLRYPAMTLEDELFVGEGGNVVDTFVGRQYARRHKGVS

SEQ ID NO: 167298 - protein, 101 aa, Zea Mays
MLHTSLRCCILSHREDLRNVEFMIWALVPFRTTGRTYLKSPPNTIVFPPKGKSGLSIISLMLLSSASIACRLVIMASSHKISDDLRNCHVRALVRQAASRP

SEQ ID NO: 167299 - protein, 207 aa, Zea Mays
MADTWTYLPWRRSLFPAGRRCPSMVLARSQAELVSMAAGQPLLPVRLSRDLAGPRPCSASPERLPPARFLASTMGPAARHRVCTFSSEQQPRIYAAPALFSTSLATDVMACAPRVRQNPRVMDIYARFESIPPVCRKESDMYVFTIWGASRPSLLLVVDPRHIRDMLVDPDDLSFNCTLLALGSEALCHARLWMSSFRAPSRNPGSG

SEQ ID NO: 167300 - protein, 202 aa, Zea Mays
MITDMNYYPVAKYHFDLSGTAFGGMAQPGRDNELRHAGIIDIQFRRVPCIYPGQTVTFHIEHGSNPNYLAVLVEFEDGDGDVVQVDIMEANSGWWMPMRESWGSIWRMDSKRRLQGPFSLRITNESGETLVAYQVIPANWAPNSYYRSNIQYEAFGSAAGQATGSAVGLVISSAARLHTLITRIIGLICLVLLYHLQGIEVP
